United States Patent Application Publication US 2005/0228172 A9 - sequence listing, part 152

SEQ ID NO: 697685 - DNA, 2014 bp, Homo sapiens
acaatctatattcctttgggtacattcgattgctggatcgaatggtagctctgttttaagctatttgagaaaacttcagctgaaatttacaaaagaaaagaaattcaaagcttaaaaacgttgtcacatctaaagttacaaattaagaagtggcagaaccaggatttgcatatatgtatttttgattgccaaatgcaagtggttagccgtgaaggctactgagaaattgccaggcaaatataatgctccaatccagatgcagaagtgaggcacagtcactcagaccaaatcataatcattcatatcccttagagactggttatttccttctaaacactcaccaggcagaggatggtgtcacttaggatataaaagaccaaaaattaatttttagggaagaaaaactgataactttgacagatatccacagtacaggcattttaaataaaaatataattatttaaagttatagaataaataactaataaaacacctctataacagcaatcattttttgttgctgctgtaaaatgttaccacaaaggtaatggcttaaaacaacacaactgattctcttatagttctggaagtcatagttcaaaatcaatcttactgagctaaagttgaaggtgttaacagggttggttccttatggaggctctgagagaaaatagttctctgccttttcagcccgtaaaggtcacctgcattcctcagctagtgtctccctcctcacatcaatccaacctcttgtttccatcataacagctactactatttgggtcctcctgccctgctcttataaggrtccttgggtttacatttttcccacctggataaccctgggtaatctcccctatctcaacattcttaatcatatcagtaaagtcccttttgccatgcaatgtactttattcacaagttttgggggtgaggacctggacatctttagggaggcattattttatgtactacaattaccaacacttacatttttcaagttaaaaggaaaaaattaattagaaaaaaaaaaaaaatccagtctctattgtactcacctgtgtccaatttccaattaatttgtggtctttcaggacttactttaagggaaagatattatttttctcttcttgttggaaactttctggagcatgtgggtgtagtgactggtattgctctgggttacagagcagcttggatgagcatctgtgcagaaaccactatggtaggctatatttaaaaactgtttatttcaaatgttcaaaaaataaaagggctgggtctctagcaagaagcagccttgaatttgctgcagaaagaagatagagattataagacgtagagggtggttcaatcaatccatttaatattagctgttcactaaaaatgagtgaggaggagagagaaaaaaactgcaacttcttgaatgataattaaacctgttaatcatattctgattagaaaaatatataggaataaacatgtgcttcatattcctgtgggttttctgttctggccatgaaaaataaaagagaatcaaactgccaagaggctttttgaatggggttggataacaaaaattcccccaaaaaacaaaaaactttctgcaaaatcttagtggggcaagcacatgcaaaaaactattttgttttttctccttgaattaataactggagaacatccactcacttaatgccctgggagagagttgtacagtcttctggtgtttcaacctgatgagaaaagacctctacaactgttgctacacagatagagctatgtgtttgaaggttcaaactgcttcttctaagaaaatcaagtgacattcaaagtacttttgaaaagagattaacacagttctaatactaggaaactcatgcttatctaaatgtttctcttttgtttcagacgtgcttctaataacatgtcaatgtatatattcatctcctagaaaggcattaactaatacatggggcgggatttattttatgctataatattatttaaaaatata

SEQ ID NO: 697686 - DNA, 611 bp, Homo sapiens
ttaaatattttgtaggcaacagaaacagaaactaccaacttaaggaaaagtttggccaggaatggcrggggtgtctcacgcctgtaatcccagcactctgggaggctcaggctggtggatcacgaggtcaggagatggagaccatcctggctaacacggtgaaaccccatctctactaaaaaaaaaatacaaaaaattagcccggtatggtggcgtgcacctgtcgccccagctacccaggaggctgaggcaggagaatcgcttgaacctgggaggcggaggttgtggtgagctgagatcgcgccactgcaatccagcctgggcgacacagcgagactccatctcaaaaaaaaaaaaaaaaagatttataaattggagtaatactggatgagtgcaaaaaactgaagagcaagtaagcatgctctgggatgactgggctcaggggtgcttcgggcctccccacagtagataagcattcctaccagggttccctaccccatctaccttctgtgttcaggaaataaattactgagcaggataatccaatgccctaccttggaccacatgactatatctataatcagagggaaaaagtctgctgattaaaacct

SEQ ID NO: 697687 - DNA, 611 bp, Homo sapiens
ttaaatattttgtaggcaacagaaacagaaactaccaacttaaggaaaagtttggccaggaatggcgggggtgtctcacgcctgtaatcccagcactctgggaggctcaggctggtggatcacgaggtcaggagatggagaccatcctggctaacacggtgaaaccccatctctactaaaaaaaaaatacaaaaaattagcccggtatggtggcgtgcacctgtcgccccagctacccaggaggctgaggcaggagaatcgcttgaacctgggaggcggaggttgtggtgagctgagatcgcgccactgcaatccagcctgggcgacacagcgagactccatctcaaaaaaaaaaaaaaaaagatktataaattggagtaatactggatgagtgcaaaaaactgaagagcaagtaagcatgctctgggatgactgggctcaggggtgcttcgggcctccccacagtagataagcattcctaccagggttccctaccccatctaccttctgtgttcaggaaataaattactgagcaggataatccaatgccctaccttggaccacatgactatatctataatcagagggaaaaagtctgctgattaaaacct

SEQ ID NO: 697688 - DNA, 620 bp, Homo sapiens
agctcatagcccagtggaggagaaagtaagtgagtaaataactataaccatacaataagatgctataatggaatgttccccaacatttccccgaaacatataggaaataagttattttctctgggagaattaggaaaagcttcactaaaaaaagtatttgagttgggtattaaatgaggaataagatatttttgccagataagaaaaggaggaacagtctgccaggcaaaataattttatgtaaaaagacagagargcctgaaaaaagtgagataaaaaaggtagggtgaaaaagtgtaactaaactgttggaaatctacagttgcatctattgaatagggagttttgtaaaaatacagattacctgatccttctcctggaagtttgtattcaatacatcttgaatagaaggaatcttttttaaaaaatggtcccaaggttatcatagtgactagccaggtttagaaaactgtggcctagagtgctgcttaaattttaatctgcataaaaattacctggaatccttgtgaacatttcagattctgattcagttggtatgtgttggggtctgatattccgcatttctaataatcttccaggtgatgccatttgctgccagt

SEQ ID NO: 697689 - DNA, 650 bp, Homo sapiens
atttatctgatagtaacatagttatctttctagtaacttaaccaaatccaggcatgtctttctatttttgcaatgagaagtttgatggggtgtaatacacgatggtagcaataattcatatttcttgattgtgtctctaattgtattggttaatacataaatcaataaatgaactattctgaaaatttaatacatgcaaagaactggacactaggaacacattattaatgtggaggaggtaaatgtacttgtaaaaagtttaacggacacatcaactcacctagaagatacaaaatttgtaactactggcaagcaaagatgaggcttaggcaatttaaagctgttttctggagaaacagacaagaaaaggatgttttggcattaagtatttcacagatagttgcggttaaatgggggctccaaacygggttttgagaaaggataaagtttaaatttatagaagatgtttgcgaattgggaggaaaataattaacactgtgtacctaaggcattaaactgtatttatatcagtgggaccccagttaaactagattggaaattgtgtgcaagtgaggagaagaaattaaggttgaaaccgtatataggtacctgactgtggaggtttttgaaagcaagtatatactcagtta

SEQ ID NO: 697690 - DNA, 633 bp, Homo sapiens
tgctttaatgaatgaagatcaataaagataataagcatattatttgcaaaaaaaaaaaaaaggtttttttcctcaggagtttaaatagcactcttgtatcaggttagagagccttcaaaatagcaaataatagcagagacatacaatgcaattaactttttaacccatcttcaaatcaatataattttaataacagtggaaaatctggatttataacagcttactrtattttattagctaatttgctttttaaatacatttttaaatcctgttgaaaaaactaattaaatacccttgatttcttttttagtattttccttaaggtggctgatgtgggcttttctaaactccttttcattaaatcatagataccaccagagcaagaagaagccaggagagtgatggtgttgaatacattttcatttccaagcatttgtttgagacagatgtacaaaataacaagtatgtggacatttttgagaattttcatgtgactgttttttataagcacatgcctgtcccgttttagacaactgagagttctccatttgaagtgtattttaattatcataataatatttgaaacagatgaaaaggtaataatttggttggtaattattgttaatcttcacc

SEQ ID NO: 697691 - DNA, 635 bp, Homo sapiens
ctgagatcgctaaactgcactccagcctgggtgacagagcaagactccatctccataaattataaagatttttatctcatggcagtgtggttaagataaaatgagctcctaatcataaagcacttagggtaatgcccgatacagagctggcaatatgtgtttgttattgtcacttccaatcccagctttaaagccccttcctctgtgaggttcatcagtgtcctgcaatgaatggcccctctgttatctcttaccatttgtatagaaattatctgtctatagtagttcctctatccacagctttgctttctgcagtttcagttacccgcagtcaaccacagtatgaaaatactaagtggaaaattccagaaatgaacaattcataaattttaaattgcacatcattctgagcagtatgatgaaatctcatgctgtcctgctctgtcctgggcatctcactccgtcctgcctgagacatgaatcattcctttgtccagygtatccagctgtctctactctccaccgttaatcacttagtagctgtctcagttatccgattgattgtcactgtcttggggtgtttgtggtcaagtaacattgttagcaatcaacaacaatctttcattgtattttaa

SEQ ID NO: 697692 - DNA, 525 bp, Homo sapiens
tgcattattggaattggaagtctgtgtttagaaaagaattgaaataaatgataactgcatgtttctacaacttgggatcagttttatattgtgttttcctattaacacattttgactttgatgtggctgtcaagttaaggctgctttgatggaaaatttaaatagaaagttatttctctttggctggttattgtaattgctgcatgatattcagttaacagaaaaatataagggactgatttaatatttatcaagttcaatgatatttccttttctttttttgagacagggtttcactctgtcgcccaggctggagtgcagtggtgcaatctcggcttattgcaatctctgcctcctgggttcaagcgattctcatgcctcagcctctctagtagctgtagtagctgggattacaggtgaccaccaccacacacagctaatttttgtgtttttagtagagacgaggttttgccatgttgcccagcctggtctygaactcctgggctcaagtgatccactctcctt

SEQ ID NO: 697693 - DNA, 905 bp, Homo sapiens
tgtttatgccattttataattcccttactgtaattttatcagggttttgaggaaggagcagagctaaacgtgtgagttaaattatctgccatctttaaccacaagtctcttaattctttttttgtttttttaaattattttattttacattcaggggtacacgtgcacatttgtttcatgggtattcttaactcttcatgtcttttatatccatctcttttcattttaaccatcaccacattatacagcttcttaccacttcctatctgggctcctttcctctatcatctcgtcccttaggtctgttttccacaatgttgtggattcttcttcccaaacaactgcactgtgtatcagagttttgattgtaaaaractcttctgttgcttcttaatgccaaaaggagaaaatcaaagtcttccacagtctagcctctgtctactgtttcaaccttattttttaggctttccgaaacactcatatccatatccatacccatctccacttgtagctttggtcaaacttgtctggtgtaccaaataagtaggggcacagcagctcggcttgcctggtgatgtatccagtagacttagaagttggcctgttgattttgagcaaccaatttaaaactccttaagtgaatacctgtctaacttgaaggcatcttatggcccctttcagcctaggatttgaaaatctattttccatatatgctatttcttgattgtgttcactatatagcatatagagttttttccatggtctattactcacaccttatttaccttctgctagactttgaaggtgcaaggatgagtaggctgtggaaattacatcctataagaaacttccatcttctttcttatatggtattaagtttaagccatagctcaatgactgggtat

SEQ ID NO: 697694 - DNA, 1539 bp, Homo sapiens
  misc_feature 1462, 1489, 1538: n = A,T,C or G
aaaatagcttttgaatcttcctcataaaacatttatgcaaaatgggcttgggcggctcctcggcrggtggcggtggtggccgtagcggttcctcctggccctgttaatgtcggggccaggccgggggaggatggcgccctagaacccggccttgctggggtaggggcgggaggggacggggtggggaccggccatgtcggaggtgacccggagtctgctgcagcgctggggcgccagttttaggagaggcgccgacttcgactcttggggccagctggtggaggcgatagacgagtatcagatattagcaagacatctacaaaaggaggcccaagctcaacacaataattctgaattcacagaagaacaaaagaaaaccataggcaaaattgcaacatgcttggaattgcgaagtgcagctttacagtccacacagtctcaagaagaatttaaactggaggacctgaagaagctagaaccaatcctaaagaatattcttacatataataaagaattcccatttgatgttcagcctgtcccattaagaagaattttggcacctggtgaagaagagaatttggaatttgaagaagatgaagaagagggtggtgctggagcagggtctcctgattcttttcctgctagagttcccggtactttattaccaaggttgccatcggaaccaggaatgacattactcactatcagaattgcgaaaattggtttgaaagatgctgggcagtgcatcgatccctatattacagttagtgtaaaggatctgaatggcatagacttaactcctgtgcaagatactcctgtggcttcaagaaaagaagatacatatgttcattttaatgtggacattgagctccagaagcatgttgaaaaattaaccaaaggtgcagctatcttctttgaattcaaaccctacaagcctaaaaaaaggtttaccagcaccaagtgttttgctttcatggagatggatgaaattaaacctgggccaattgtaatagaactatacaagaaacccactgactttaaaagaaagaaattgcaattattgaccaagaaaccactttatcttcatctacatcaaactttgcacaaggaatgatcctgacatgatgaacctggaacttctgtgaattttaccactcagtagaaaccatcatagctctgtgtagcatattcacccttcaacaggcaggaagcaagccgtacccagaccagtaggccggacggagtccaatgcaaagctgtaccacagaattcagagtccagcacatcactgacgtataggactccttgggatacaggtttattgtagattttgaaacatgtttttacttttctattaattgtgcaattaatagtctattttctaatttaccactactctaccctgcttcctggaacaatactgttgtgggtaggatgtgctcatcttcagacttaatacagncataagaatgtgctagaagttacacantctgtcacttttgctccatatgctcttttgactaatgtcaaagcttggnt

SEQ ID NO: 697695 - DNA, 1175 bp, Homo sapiens
tcaggtggtgaagtgggagttaaggtttcccccaaaagaacagctgccactcctccatgcaaaaccgagatgattcaaggaccaggcagctccacctttcagtgcactactttcatttgactggagaggcctgcttagctaggcacgtattttctccagtagcagagtccaatgacgctctggacttcctaattagtggtggtggggcggaagtttttccttgggaagagcgttgtcgctgtatatggtccgcagaaacttgacttggaatgtgttcggggtttcatcgcccccttgtggcggcgacgtggtaacaccgcactcaaggcttccaasttgtcaaccaataggatggcatctacgtagtgaaggcttcccttcccttgtcctgcagcgtgctggacagtgtcccggctcagggaccccttctgtccccttcctggctactatgggtcggccctgcgtcctcaccactttgagccaccctttgacccagcgtctctcccgcaatgggacctggtgggatggggacttggagcatgctacaggagaggtagaacttttgagtctcttcttcccaaggttctccccagagtcggagagcagagacggatccaggggcactttctggccgctgcctgctcgggctcaacagatggagtccaatgtttcagtctcccccaagaatgtgtatcctcattgctgacacgggagctgggtgcggggagagatgtggtggtggggacccttgcctgagcagcccattgtcatgagtgttattgccattgtgataatatgttagcatgactctcctcccaaatggccgcttgtttgttgcaatctcccgccactcagcctccagacattcattaacaggacagtggggttcttgactcccctaccactggggtgacagtccttgctactggatctgggcagttactgtctcatggatgctggcagaagacgattcaagttggcggactagattctacaaggaatgatctcttgcataattctagccaacatgctcttggggtgggtgcttctggttttggaaagcaaagttactgtgtagttaacaactattgtggtaagaatagtctctccatcattcttttgtttcacggttgtcagaaagatgggcataactaatggttgggctcttatttgga

SEQ ID NO: 697696 - DNA, 1570 bp, Homo sapiens
taatccctatcaaaatctcagtgatgttcttcacaaaaataggaaaaataatcctaaaatttgtatggaacaacagaagacctcgaatagccaaagcaattctcttaaaatatcctgtaaaagttgtattcataaatatattgcagtccatgcatataataagatcataagcaacaataaaaatcaagaactacaactgtttacacagagatgagcctcacaaacataatggtgagtaaaagaagctgaatctgaaagaacacatattctatttataaaaagtttaaaaacaggcaaaactggaccacatggtttaggataaaattagaaagaaaagaagtgtttgccataaaactcagaatagtggttacttctagtgagcagagatagagatatgtccaagaatgggcccatgggatggtaatggtggcagaggttccagtatattgcaaaatctggttgtttttatcagttaatggttacatgagtatttgcataattattccttaaaatttactcttatgttttatgcacttttgtgtatgattgttatatttcacaataaaagaaagttaataaacaaaaacataaactggcaggtatattgtacttaacttcttagtggataatcctgaaaaatataaaccacaagagtataatgttttcccatatttctcggttttctaaattataatttaaaaagacaattggaaaataggcaaaagatgaaactcaaactcactataggcagtaagtatcctttcacatctatcagttgttctcaaagtgtgatttgaagactgctaggactctttcaggagtcatcaagttcccctcttttccaactacatgtctgagactggattttattcacagatgtcaaacaaaacaacagatcacaagagactgaatgcagagaagttacaagaatccatctatcttctattcagccagacattaaaaagatttgaaaacgtcaaaacattgctacttttcccattaatttgttgtattaaagcatgtagttattttctataagactctgtttttatgttaatatgtaatgggcttggttttgttctttttaagtggatacataaacattttcttaattttaacttatgatgaatatcaataaatagaaaaacacaactacaatctctttgaggggatgcccataatttatgagtatcagtgagcgctgaaacgaaaacatctgagacctgctggtatggacatttacaagtatctttctgggtttttaattggggtgactattatgagtttataataatattaatctcttttttattggttgtccttttcaaaccacaggaaaacaaatgtgcattttcctgaccatgcatagtgactgtggtgtagcaccagackgcatttggaggaaagtctgttggaaaagggtggggatgggagataatgaggacacaaaaaaggaggaagagcttggttcaaaaactgtatttaaaaaatgaagagtaatctcacccaaaatgagatttattgtgattactccacaataaaaaaatgaggagtaatctcacccaaagtc

SEQ ID NO: 697697 - DNA, 653 bp, Homo sapiens
aaatcaagtgctacctgccatttgtaaagtaacaacttagtttcaatttttgctcaacctggagtttaggattcccaaatagaacataaaaatgcccagcatttttattatatagttatcacacttttgagtagatgacattatcactatgtttaatgtaacccaagttgtaggatatttactataccttttactctacctgtttgagttgtactaaacaagaccattctctagtaatttgtcatattttcacagggtttgttaaaaatgacaaagggctaaattcttccatgtgtcaagctctaaataactggtcaaatggtcatattagagaagactgataaatattaaaagscttttcttcaaaattgttttggtgttaagaaaatcaaggaggctcttgttttaaggcttaatttttaaggagaagcttttttaaagaataggctataatctggatactaggtgatggagtaactcatatcaagtaacaatggtgaaagagtcttagtatttcaggaatttgaagtcgtattgtctagatgttgattccagacttgtaggtaagtcactttcagttggtaaaatgcatgtcttttgtaaaacgcctagaacaataatagcacctacttcttagggtcattatggagata

SEQ ID NO: 697698 - DNA, 653 bp, Homo sapiens
aaatcaagtgctacctgccatttgtaaagtaacaacttagtttcaatttttgctcaacctggagtttaggattcccaaatagaacataaaaatgcccagcatttttattatatagttatcacacttttgagtagatgacattatcactatgtttaatgtaacccaagttgtaggatatttactataccttttactctacctgtttgagttgtactaaacaagaccattctctagtaatttgtcatattttcacagggtttgttaaaaatgacaaagggctaaattcttccatgtgtcaagctctaaataactggtcaaatggtcatattagagaagactgataaatattaaaagccttttcttcaaaattgttttggtgttaagaaaatcaaggaggctcttgttttaaggcttaatttttaaggagaagcttktttaaagaataggctataatctggatactaggtgatggagtaactcatatcaagtaacaatggtgaaagagtcttagtatttcaggaatttgaagtcgtattgtctagatgttgattccagacttgtaggtaagtcactttcagttggtaaaatgcatgtcttttgtaaaacgcctagaacaataatagcacctacttcttagggtcattatggagata

SEQ ID NO: 697699 - DNA, 2220 bp, Homo sapiens
tgtataaatgtaagcatcttttgggccttatattcatcattattgaattgaaataaagatttcacttagtaatttaatactatcactgtcttctgttactcgaagacagaattgggttggtgtaaagaacactgaaaaacctttcagagattgtattcccactgaaaaacctttcagagattgtattttaactttctgtgcttaatgactaaacatatttattgtatataaagttaaggtagttgatgaggctgggttaggattgttgaaggaagtggccgtattttaggggaactaagttgttttttttttttgttttttttttttgagacggagtctcacttctgttgcccaggctggagtgcagtggcgcgatctcggctcactgcaagctccgcctcccgggttcacgccattctcctgcctcagcctccccagtagctggaactacaggtgcccgccaccatgcccagctaattttttgtatttttagtagagatggggtttcaccgtgttagccaggatggtctcgatctcctgatccaccctcctcggcctcccaaagtgctgggattacaggcatgagccaccacgcctggcctagaggaactaagtttcaaatgctactacatgaatggttcagaatgaagggtgtaaaatgcttacttttggtatgtttattttagcgtacactttcatgtcttttcaaaagtattgttaagtgtttatatttctaattaaagtttcttgagtttagtaaaacagtataatcaatctgaatcatattttatattatgtaattttgttatttctaagtttatrtaattgtgaattagtcctatttatcactttaaccattgttatttatccttagaaactgtagacaatgttcagcgttgtcagttccttgatgacagaattctacagtgtataaagcagtatgctgacaagattaaatccggcatacagaatacagccatgcttctcaaagaattgctttcttggaaagttttgagcacagaagactatacaacctgtttttctagcagaaattttctaaatgaagcagtggactatgttattcgccacttgattcaagaaaataacagagtaaagacaagaatatttctgcatgttttgagtgagcttaaagaagtggagcccaaattagccgcctggatccaaaaacttaatagctttggtatgtccctttatattccagagcaataaactttaatacgaaggggaagtgtaggtctctgagtcattttcattttcctgccatataatttataactttaaatgcaggactataaatttgtatggttaagaatacttttccagtcccagctacttgggaggcggaggcaggatgattgcttaatctcaggaatttgagaccaacctggcaatgttgcaagacctgtctctaaaagaattttttaaaaaaagaactaaatatatgaaggcctttaaaaaacagaaaaactattacacacacacgcacaccacaatttttaggttattttatagataggttacagtatacttcttcaaaaggtgcaatctaaggaaagaccagtcagtaaagaaatccagacctatattagactaaactatttgtaaatgtgtagatgtgtgaatactaggcacaaccatggtaaataacacatcctggagtctgccccctgctcaggagctgtgttgagaagacaaatctataattcagattctttgaagaaaaatttagaggcaagagtggatgagactaattgctcagggtcacctaaggcaaatctgtatctagagattaagaggaacatatcctagggttggactgagctgtggtaaatcacaggattatataactctgtactgtgttctgactttcgtaacttggctgggagaagggaagagtgagcaagccccctgccctcccctaaagcaggcgctttgcctaaagccatgcaggactgcagaaggcagctgcagatacagttgttgtgtaacacgaggtagggatgctttgggcacctaccagggcactatttatcttgctgactggatagcaactggcctagcacaatagttcattcagtcggcagctattagataagaggctaaagtacgccacgggaaaaaggcagggcctttagccgcagaccacagagtgaggcctgctaagcctctgccagccgtccccacctgtctgaatgttta

SEQ ID NO: 697700 - DNA, 644 bp, Homo sapiens
ttaaacttcatatgtaaaaatgaacatcaagaatgggtatggaagagaaactaagaaaaggagttgtgcaactaaatatcaaaacacaatataaatctatctatattaccacatacatagaccattaatatgagagtgcctggccaacatgttgaaaccccgtctctactaaaaatacaaaaattagccaggtgtggtagcttacctgtaatcccagctacttgggaggctgaggtaggagaattgcttgaacctgggaggcggaggttgcagtgagccaagatcacgccagtgtactccagcctgggcgacagagtgagactccatctcagtcagtcaatcaagatggtagattggctgggtgtggtggctcatgcctgtaatcccagcactttgggaggctgaggtgggtggatcacgaggttaggagtttgagaccagctggccaacatagtaaaccccatctctactaaaattaaaaaaaattagctggscgtggtggtggacacctgtaaccccagctacttgggaggctgaggcaggagaatcgcttgaacccaggaggcacaggttgcagtgagccaagattgcgccactgcactctagcccgggcgacagtgcgagactctgtctcaaaaaaaaaa

SEQ ID NO: 697701 - DNA, 683 bp, Homo sapiens
aatgcatgttactaagtgaaataagccaattttataaggctgcgtactgcatgagtccaattatatgccattctggaaaaggcaaaactatggagacagtaaatagatcagtggttgccaggggttgggaggacacaagatgaattgggagagcacagaggatttttagggccgtgggactatcctgtatgattctataatggtggatccatgcctttatacatttgcccaaatccatagaatgtacaacaccattgtaaacaatggactctggggtgatagtaatgtctcagtgtagactcatccatttccacagatgtaccattgtggtttggcatatcactcgtgggggcggccatgcatgcgggggccgggggtaaatgagagctcttggtaatttctgctctattttgctgtgaagttaatgctgctctaaaaaataaaatttatcaagtttttaaaaaaggggtggaggaagctatttccgaccagtgaaatgatatacccaggaygacattgctcatctgggggcaaaacctggtcttctgaatccagggttcctaccaaacactggaagaaaggctgttgcctgcaggttcagggaagtgtatggtacatttttaaaataatgccacagtgcatgcaggggaggaacgccaatcttaaggctttgatttctggaa

SEQ ID NO: 697702 - DNA, 639 bp, Homo sapiens
actggtgggccctagtccaatataattgatgtccttataagaagaggaaattaggacacagacacacacagaggaaagattatgtgaacagagggaggagatggccatctacaagccaaggagaggggtctcagaagaaccagccctgttcacattttgttctcagacatctaccatccagccttgtgagaaaataaatttctgatgtttaagccactcagtctgtggtactttgttatggcagcaaactcaatacacttactgacttctatagggagaggaaaatacctttccgtagtgccatttgaagaggagtatttaatttatgtaataagtaagatttaagtaaatgctcatggatgcttttccaatttttattcatttttatatcagaactcatttaaaaaargataaaaaagaatattaatgtttgcctatcagtaaaatattaaaaagtatttctggggtaaattgataattttcttcagaaaaattcctgtcttacgtattgacttaggtcccagtccagtctttaaaactgtgatgttttactgaatttggaaaagtagcaaaataaaaccaactgagttagcctcataagcaaggcagaactgccaagatgacatctctgtgtgtgtg

SEQ ID NO: 697703 - DNA, 633 bp, Homo sapiens
caaactatcacctgttgaccagctcacaacattcccgctatttaacgatcagctgtcatgagctgatacgagctcactgcagcaccyccactgaaacaagtcctacatccttgcagtgggggtgaagggatcctattttgctggaaggtggtgggaaggagggggtgacatggaagggaaataaagggatgcaggtttgggaaaggttgcccactctgtctccctcttggagagttctagaacaagtgagcctattaagggctctgagaaatcctatgattgatatatataattgcttaaatgtgctttcccaaactcatttgagcttaggataacctacgcacatcttggttctgtggaacgtatttgatatttggtttggcggctcctggaatgaatgacaggaacgttggagatgggcacacccccactatgccttcttcacgattcgctcagggccagcccagcatgtccccgtttccacctgacacagcccaaagctgtcagcccaagcattcactgtcagcatcccctattgtcctcagcgtgcaccgactcccgctcccttccccttgcctcagtagaaagagacatgactcagtcaaccagcaacaagcaaaaaggagagtgaca

SEQ ID NO: 697704 - DNA, 639 bp, Homo sapiens
aagattgctgtgaaaacgaaaatgtgtagacgcactctcaaaaactgcacggacatacaaaatcaatcttttcctttgatcttgtggctaaaccagcatttctgtgtttgagagatttcctgttaggtgcttcgtctgaaagtgaactctcataattcaaattgtataaaataaagctacatttctaagagcttggtgtagggcaattggaataatgtcctgttagataaacagacatttagcaatsctgacattaaaaggaaatgtatttctatacaagattattagctgtaatacaagatatttatttaaccaatgaccttatggctgagagttgaattgtggttcagtattcattgatctcactgctttaaaacatgctctttttgttcaagcaggaaaaatattatatctaattatgtctatgtggtaatacctaaaaagaggtagagagactctatgttcacaaaatatagtaatttcatttttacctttcttcagtggactgaattgtatggaaggaaattgatcagatctgtaattcacaactgtggaaacctacacaaatggggctgatgccattgtttcctctattttattttatttatttttgaatccactatctctttccattcaaaa

SEQ ID NO: 697705 - DNA, 627 bp, Homo sapiens
ttaacacatgggtattgtcggtctaagatgctctttaggggctagtgactcattcatgatgtgcaggaaatggcacagacacctccatgaccacagaaggtttctacaggcgccgtcatcacagggtctacaaacagaaggaagtcagagagagaggctcaggggaaggcaaggcggggctggagacctggattctacgtcggagtttaccgcatcctggttctattcccaaagtcctctctgtgtggccatatgcctgattctcagcctggcttcattccagtcatctcaggatcttacaaacaacattgatgtccaggccccaccccagaccaatgaaatcagaatctcytggacattaaaaaaaaaaatgagtgattctttctgggtgattctaatatgtggtcagggttgaggccactgctttacttcattacatcatgacactaaaaatactactggaaagaaaaaaggagggctaccatctgccttccaatctcttcagctgggaacctcttcataagactgtatctgaaaccaggatacgagatccttataagtaattccatttataataacaaagaaagaaaagaaagaaagaaagagagagagagaaagaaagaaagg

SEQ ID NO: 697706 - DNA, 605 bp, Homo sapiens
tttggtgcctgctcttgccatgagagatggaatcacctagagagagacagagagagagaggctggtagagggaagagacagaagaaagatgaagggataagtgtccagaatccctggatctgggatggaataaaggatctggatggtaaacggagagtgctgggaaccagtaaggacttctctaggtataccatgctcttctatgagcctaggggatgtgtagcaatgggccctgcatacagttaatcatttcttttgcaatggcttaaatcaacaaccttgttcttttctttgattaatcagattattcagacacaaagacatggccaggtgttgggatgtgttcaytgcaggtggatgcctgccttctcttaatgagtactatgcaggaaaactaggacaggtaggagtaccatttataaatatgctggagcctatgccactttgggcggcctttagtggatgtctgcagacctaaggatattggaaatctatctattaggctgtcgcaggctctattgtttatagtttctcttcaaggcagcacatatgcagtagatgcttctaaaaggtctagtatctaattgtatttggaggaggaaaaa

SEQ ID NO: 697707 - DNA, 571 bp, Homo sapiens
tgactactattttrtcttctcctgtagctatttctggaccctttgtggtttaagaaggaatacagggaggagaaagagaaaaaaaatgaaatcatccaggcaaggaagtttagaaagcagaggtttaggagaagaaaaagaagagacagtttctggcagcttcctgattttagaagctgattttgctacttttctttaattctgaggtagtttcaaatattttgttgttacctttctggaaagaaataagtttatcatttctacttttggatgtttttaggtgccagctaaaatacaaccctcatttattttccttgatgcagaaacctaacttctctaatttagcatacgagaagaccagtttgggaatatttaaagttcttcactttgggaaccttagatgttggtcgtccttagtaaaatcctccctttacataaatgtttgtaagaagaggtgctataattatcacacataaaaccagctggggtgcccaaagggggacactctccttgcctgtcctcgattttagagatatgttttctcatttttctttaaaaggagtagttgaac

SEQ ID NO: 697708 - DNA, 571 bp, Homo sapiens
tgactactattttatcttctcctgtagctatttctggaccctttgtggtttaagaaggaatacagggaggagaaagagaaaaaaaatgaaatcatccaggcaaggaagtttagaaagcagaggtttaggagaagaaaaagaagagacagtttctggcagcttcctgattttagaagctgattttgctacttttctttaattctgaggtagtttcaaatattttgttgttacctttctggaaagaaataagtttatcatttctacttttggatgtttttaggtgccagctaaaatacaaccctcatttattttmcttgatgcagaaacctaacttctctaatttagcatacgagaagaccagtttgggaatatttaaagttcttcactttgggaaccttagatgttggtcgtccttagtaaaatcctccctttacataaatgtttgtaagaagaggtgctataattatcacacataaaaccagctggggtgcccaaagggggacactctccttgcctgtcctcgattttagagatatgttttctcatttttctttaaaaggagtagttgaac

SEQ ID NO: 697709 - DNA, 2540 bp, Homo sapiens
ccctttacagatcatatgtgataaatagttatccaactttctagatgtccacccagagctgcttccatatgaagaggtggaaacggattctgtgcatgatactggttaggatcgggaactgtttttttttaaaggagatttttaaaatttgttttccttgtacacatagccttaatattgtgttgctaactgccctctgggaacaaagtcataccaatcacaaatacattgcctaaagtgggatggttattactctgctgtgaattgcacctcctattatgttttaaagatgctacaaacttgagacattactatgtagatgacattcccagcaaatccccaaacaacacttaatgagatttcaaataccaggatcatgaaacagtaagagatataaggaaataaagaaaaacacagtatatgtgtagaaggcattaaaacacaaattttataattacgaatgcatataataaggaataagttttattctaaatagcaattatatcagaactacgatacagggaataaaagtgaatattaagccattgtaccaacaataacagagccccttttctgctgcgtgatggaatttagtgtttactaaggaagaaaaaaatgcaagatatcttaaatttggtactttccaacaaatttaagaaatgtgtacacacttgaggagacttaagaagtctctgactaaaacactagaaaagaaaagcagtgaaaaaccaaataagtattactcaacaataacaacatttgttactattatattaatattaaacacactattaagcaacaacatttcagttactcactgagcccaaagtcatttttcatgaaccattcacaacactgataacctattgaaaaatgattgaaaacaaaaaagcttatttctttccaagtccttttaaagccttctcatgtgtcatttcatataatccttataacaaatctatggagtatatactgactttatctctgtacagaaaagaaaactgaatcacattcagaataagttgcaaagatccccagataatcagtgtcataggtgaaatatgatgtcacagtgtactcaagagtaatttagggaagcagtacaaatgatggttgaaagcacaggttctggggtaaatagcctgaagtcaaaatctagttcatatcctcagtggctgtgtgatcttgggaaatttcccttaactctctgtgtcttgattttatagtttcatccatttttgcctctcatatgatctggtgagcgttacactagtttatgcttctaggacactgaaaacagtgcctggctcttgataaatattaacaattttgtttcattttcttcaccttgagtatttcatggccagatggaaatcaatgtcaatatgaaaaaatgttcataattcagcaggaagaaatacaaaaccatataaacaactttgttttattggcaagtgtatttggaagctatgttaaattgagaaggggaagggaaagcctctaaggatatcgattaatcaatgactgaaagctgatgagacttgtctggaattttttttttggagactctgagacttaaaattttgacaaaataaggagatgaattgagtagtgtggaagagacattttctgaagtcagcagagaaaggagagacaaatatggtaaggggaaaatggtatgaagtaataatatgaatgaagtgctttctaaagtataacacatgtaagttgtgttaaatgtaaactatcatgattatatcattactgtctgactgatacaactatatccacctcagttagccacataagatcaattttcctatatcttagagaataccagtaacctccagttcagaaacagcataaatatctatccacagctgagcagacacatacagctagctaccagatgaaatgggctatatcttcaaatactattsttttccattttttaactgtggcaaaacacactcaacaatttgcatcttaaccactgttaagtatacaattcagtgtcattaaatgtattcacaatgttgtgcaagcatcaccaccacccatctccataattctttttgtcttgtaaaattgaaatcctgtacccattaaaaagtgactccccattccccgccctcccagggcaactacagctttactttctgtcttgatgaatcatacaatatcaaatggaatttttaagatatttaaaatcttttgtctggaagcgaagtggaagttaatatcaatggctatgccttcagtgagttctcagaccacattgcaatgtagttaactatttatcttttattacgttctagacctattatttctttctggcacaaaaatatcttctttgtagattatggcatttacctctatctccacacctttctgcgtctgtcatccacagatcatcagcctcttgcttagtctccatttaatgacaatttctatttagtatacaagagtccttccccccgcaatgcaatttcttcactctgaaaagctctgactctggctactggtctctgttatgtact

SEQ ID NO: 697710 - DNA, 2540 bp, Homo sapiens
ccctttacagatcatatgtgataaatagttatccaactttctagatgtccacccagagctgcttccatatgaagaggtggaaacggattctgtgcatgatactggttaggatcgggaactgtttttttttaaaggagatttttaaaatttgttttccttgtacacatagccttaatattgtgttgctaactgccctctgggaacaaagtcataccaatcacaaatacattgcctaaagtgggatggttattactctgctgtgaattgcacctcctattatgttttaaagatgctacaaacttgagacattactatgtagatgacattcccagcaaatccccaaacaacacttaatgagatttcaaataccaggatcatgaaacagtaagagatataaggaaataaagaaaaacacagtatatgtgtagaaggcattaaaacacaaattttataattacgaatgcatataataaggaataagttttattctaaatagcaattatatcagaactacgatacagggaataaaagtgaatattaagccattgtaccaacaataacagagccccttttctgctgcgtgatggaatttagtgtttactaaggaagaaaaaaatgcaagatatcttaaatttggtactttccaacaaatttaagaaatgtgtacacacttgaggagacttaagaagtctctgactaaaacactagaaaagaaaagcagtgaaaaaccaaataagtattactcaacaataacaacatttgttactattatattaatattaaacacactattaagcaacaacatttcagttactcactgagcccaaagtcatttttcatgaaccattcacaacactgataacctattgaaaaatgattgaaaacaaaaaagcttatttctttccaagtccttttaaagccttctcatgtgtcatttcatataatccttataacaaatctatggagtatatactgactttatctctgtacagaaaagaaaactgaatcacattcagaataagttgcaaagatccccagataatcagtgtcataggtgaaatatgatgtcacagtgtactcaagagtaatttagggaagcagtacaaatgatggttgaaagcacaggttctggggtaaatagcctgaagtcaaaatctagttcatatcctcagtggctgtgtgatcttgggaaatttcccttaactctctgtgtcttgattttatagtttcatccatttttgcctctcatatgatctggtgagcgttacactagtttatgcttctaggacactgaaaacagtgcctggctcttgataaatattaacaattttgtttcattttcttcaccttgagtatttcatggccagatggaaatcaatgtcaatatgaaaaaatgttcataattcagcaggaagaaatacaaaaccatataaacaactttgttttattggcaagtgtatttggaagctatgttaaattgagaaggggaagggaaagcctctaaggatatcgattaatcaatgactgaaagctgatgagacttgtctggaattttttttttggagactctgagacttaaaattttgacaaaataaggagatgaattgagtagtgtggaagagacattttctgaagtcagcagagaaaggagagacaaatatggtaaggggaaaatggtatgaagtaataatatgaatgaagtgctttctaaagtataacacatgtaagttgtgttaaatgtaaactatcatgattatatcattactgtctgactgatacaactatatccacctcagttagccacataagatcaattttcctatatcttagagaataccagtaacctccagttcagaaacagcataaatatctatccacagctgagcagacacatacagctagctaccagatgaaatgggctatatcttcaaatactattgttttccrttttttaactgtggcaaaacacactcaacaatttgcatcttaaccactgttaagtatacaattcagtgtcattaaatgtattcacaatgttgtgcaagcatcaccaccacccatctccataattctttttgtcttgtaaaattgaaatcctgtacccattaaaaagtgactccccattccccgccctcccagggcaactacagctttactttctgtcttgatgaatcatacaatatcaaatggaatttttaagatatttaaaatcttttgtctggaagcgaagtggaagttaatatcaatggctatgccttcagtgagttctcagaccacattgcaatgtagttaactatttatcttttattacgttctagacctattatttctttctggcacaaaaatatcttctttgtagattatggcatttacctctatctccacacctttctgcgtctgtcatccacagatcatcagcctcttgcttagtctccatttaatgacaatttctatttagtatacaagagtccttccccccgcaatgcaatttcttcactctgaaaagctctgactctggctactggtctctgttatgtact

SEQ ID NO: 697711 - DNA, 2092 bp, Homo sapiens
ctggaaagcatagcctacaggtggtgaggcaggaggagtgggctcagctgtgagaaggagaaggaaatatggctgaaaactagataggggtcttgaaatcacaccgaggatttgggcctttgctgctgtctgccagcagctgccagtagttctcacactttggctggcaacaaaatcacctggggcagtggtgcggaagcggggggagtgttgtaaaaccacaagtgaccaggcaaaaaacacctgtatgttttccaattcagtaagtacagaaatattaattggaaaaaggtggaggtcagacattgatagtgctgtggactgctccagggacgtaagcatgatctttagagaggtgactctaatcarttgagggcaaccactggacagaaagaggtccagaccaaccatacacagagacatcatacaactacactttagcaacctctccaaataacatgtctcttagtgaaacttgggaggttgcaagttaaaaacataaaatccagtggcatttatgtatcctaggcacttacatttgtctgattcttccaacttgcctttgcttggttagagttttgggtagataagaggtggatttacatgtgctagtgtgagaactttgatacactcatttagacattgacctactatcttgtttgaaagctaaaacccaaagaaatttgtcttcttacataaaacaaattcagcccttgccttccttgtagattacatcttccactagcagtaataaaaaagtaacaatatgcataagtcaaagtatcttcttagatcctctgtagtgttttattatttagttgtgttaattaaagtaactgtctcaaaatttcaaggaatgcctgagaagaaattcatgttcaaaggctgccctcttgtgacaatgtgttgtatgctttactgtaaaagtaaccttattttaccttataacctctacaatccaattcataacagcataaaaaggaaacaaaaccttacataattttgaattttaaaaagtaccttgtttatatggctcctttagctaatgaatagtcaatttggtaaatattccagtgagttgaaggtttgaatctatctcacttaactagcttgatgaatgtatttctaaacctatacaacccactcctctgcttttaaaaaattaaagttagctgtagattgagatgtcagtgacacagtttatagaacataacttagattgtcatctacattactgtaactacaaataccaccttcagatggaagaataagttttatcagtgaacatctctaattgaactataaatggtgtatgtcttctggtttttacaagctcttggtctaacacaggggatatatgatgtaaaaattacaaagcaaggtcactcacggtggctcatgcctgtaatcccagcactttgggaggccaaggcgggcggatcacagattcaggagatcgagatcatcctggctaatatggtgaaaccccgtctctactaaaaatacaaaaattagctgggtgtggtgacacacgcctgtagtcccagctactcagtaggctgaagcaggagaatcgcttgaacccaggacgcggaggttgcagtgagccgagatcgcaccactgcactccagcctggtggcagaacaagactccatctaaaaataaataaataaataaataaataaataataaaatagcagtgactataatgttttgtgatgttaaactttgagagcttttttttttctttcttttcccaagtgcctttcccagttccaggagcagagttattctaagcccactgatgtaaaggaatagaaagaaaaggtttgttggaaaacctaataacctgctttctgtcttttgttttttaaaagcttgagcatttgggagaatttggaaagattgtggagtaagtgcaaagaaggaatttgctaacaaaaatcatataaggtaaaatgagttttttccaggttagaaaatatccactccctaccctcctacattcctttcccatggttaagaagaggaaaaaacaaaggcctcttggtgagcagtggtgacttaggcagtttcttagaaatattctag

SEQ ID NO: 697712 - DNA, 2092 bp, Homo sapiens
ctggaaagcatagcctacaggtggtgaggcaggaggagtgggctcagctgtgagaaggagaaggaaatatggctgaaaactagataggggtcttgaaatcacaccgaggatttgggcctttgctgctgtctgccagcagctgccagtagttctcacactttggctggcaacaaaatcacctggggcagtggtgcggaagcggggggagtgttgtaaaaccacaagtgaccaggcaaaaaacacctgtatgttttccaattcagtaagtacagaaatattaattggaaaaaggtggaggtcagacattgatagtgctgtggactgctccagggacgtaagcatgatctttagagaggtgactctaatcaattgagggcaaccactggacagaaagaggtccagaccaaccrtacacagagacatcatacaactacactttagcaacctctccaaataacatgtctcttagtgaaacttgggaggttgcaagttaaaaacataaaatccagtggcatttatgtatcctaggcacttacatttgtctgattcttccaacttgcctttgcttggttagagttttgggtagataagaggtggatttacatgtgctagtgtgagaactttgatacactcatttagacattgacctactatcttgtttgaaagctaaaacccaaagaaatttgtcttcttacataaaacaaattcagcccttgccttccttgtagattacatcttccactagcagtaataaaaaagtaacaatatgcataagtcaaagtatcttcttagatcctctgtagtgttttattatttagttgtgttaattaaagtaactgtctcaaaatttcaaggaatgcctgagaagaaattcatgttcaaaggctgccctcttgtgacaatgtgttgtatgctttactgtaaaagtaaccttattttaccttataacctctacaatccaattcataacagcataaaaaggaaacaaaaccttacataattttgaattttaaaaagtaccttgtttatatggctcctttagctaatgaatagtcaatttggtaaatattccagtgagttgaaggtttgaatctatctcacttaactagcttgatgaatgtatttctaaacctatacaacccactcctctgcttttaaaaaattaaagttagctgtagattgagatgtcagtgacacagtttatagaacataacttagattgtcatctacattactgtaactacaaataccaccttcagatggaagaataagttttatcagtgaacatctctaattgaactataaatggtgtatgtcttctggtttttacaagctcttggtctaacacaggggatatatgatgtaaaaattacaaagcaaggtcactcacggtggctcatgcctgtaatcccagcactttgggaggccaaggcgggcggatcacagattcaggagatcgagatcatcctggctaatatggtgaaaccccgtctctactaaaaatacaaaaattagctgggtgtggtgacacacgcctgtagtcccagctactcagtaggctgaagcaggagaatcgcttgaacccaggacgcggaggttgcagtgagccgagatcgcaccactgcactccagcctggtggcagaacaagactccatctaaaaataaataaataaataaataaataaataataaaatagcagtgactataatgttttgtgatgttaaactttgagagcttttttttttctttcttttcccaagtgcctttcccagttccaggagcagagttattctaagcccactgatgtaaaggaatagaaagaaaaggtttgttggaaaacctaataacctgctttctgtcttttgttttttaaaagcttgagcatttgggagaatttggaaagattgtggagtaagtgcaaagaaggaatttgctaacaaaaatcatataaggtaaaatgagttttttccaggttagaaaatatccactccctaccctcctacattcctttcccatggttaagaagaggaaaaaacaaaggcctcttggtgagcagtggtgacttaggcagtttcttagaaatattctag

SEQ ID NO: 697713 - DNA, 2092 bp, Homo sapiens
ctggaaagcatagcctacaggtggtgaggcaggaggagtgggctcagctgtgagaaggagaaggaaatatggctgaaaactagataggggtcttgaaatcacaccgaggatttgggcctttgctgctgtctgccagcagctgccagtagttctcacactttggctggcaacaaaatcacctggggcagtggtgcggaagcggggggagtgttgtaaaaccacaagtgaccaggcaaaaaacacctgtatgttttccaattcagtaagtacagaaatattaattggaaaaaggtggaggtcagacattgatagtgctgtggactgctccagggacgtaagcatgatctttagagaggtgactctaatcaattgagggcaaccactggacagaaagaggtccagaccaaccatacacagagacatcatacaactacactttagcaacctctccaaataacatgtctcttagtgaaacttgggaggttgmaagttaaaaacataaaatccagtggcatttatgtatcctaggcacttacatttgtctgattcttccaacttgcctttgcttggttagagttttgggtagataagaggtggatttacatgtgctagtgtgagaactttgatacactcatttagacattgacctactatcttgtttgaaagctaaaacccaaagaaatttgtcttcttacataaaacaaattcagcccttgccttccttgtagattacatcttccactagcagtaataaaaaagtaacaatatgcataagtcaaagtatcttcttagatcctctgtagtgttttattatttagttgtgttaattaaagtaactgtctcaaaatttcaaggaatgcctgagaagaaattcatgttcaaaggctgccctcttgtgacaatgtgttgtatgctttactgtaaaagtaaccttattttaccttataacctctacaatccaattcataacagcataaaaaggaaacaaaaccttacataattttgaattttaaaaagtaccttgtttatatggctcctttagctaatgaatagtcaatttggtaaatattccagtgagttgaaggtttgaatctatctcacttaactagcttgatgaatgtatttctaaacctatacaacccactcctctgcttttaaaaaattaaagttagctgtagattgagatgtcagtgacacagtttatagaacataacttagattgtcatctacattactgtaactacaaataccaccttcagatggaagaataagttttatcagtgaacatctctaattgaactataaatggtgtatgtcttctggtttttacaagctcttggtctaacacaggggatatatgatgtaaaaattacaaagcaaggtcactcacggtggctcatgcctgtaatcccagcactttgggaggccaaggcgggcggatcacagattcaggagatcgagatcatcctggctaatatggtgaaaccccgtctctactaaaaatacaaaaattagctgggtgtggtgacacacgcctgtagtcccagctactcagtaggctgaagcaggagaatcgcttgaacccaggacgcggaggttgcagtgagccgagatcgcaccactgcactccagcctggtggcagaacaagactccatctaaaaataaataaataaataaataaataaataataaaatagcagtgactataatgttttgtgatgttaaactttgagagcttttttttttctttcttttcccaagtgcctttcccagttccaggagcagagttattctaagcccactgatgtaaaggaatagaaagaaaaggtttgttggaaaacctaataacctgctttctgtcttttgttttttaaaagcttgagcatttgggagaatttggaaagattgtggagtaagtgcaaagaaggaatttgctaacaaaaatcatataaggtaaaatgagttttttccaggttagaaaatatccactccctaccctcctacattcctttcccatggttaagaagaggaaaaaacaaaggcctcttggtgagcagtggtgacttaggcagtttcttagaaatattctag

SEQ ID NO: 697714 - DNA, 2092 bp, Homo sapiens
ctggaaagcatagcctacaggtggtgaggcaggaggagtgggctcagctgtgagaaggagaaggaaatatggctgaaaactagataggggtcttgaaatcacaccgaggatttgggcctttgctgctgtctgccagcagctgccagtagttctcacactttggctggcaacaaaatcacctggggcagtggtgcggaagcggggggagtgttgtaaaaccacaagtgaccaggcaaaaaacacctgtatgttttccaattcagtaagtacagaaatattaattggaaaaaggtggaggtcagacattgatagtgctgtggactgctccagggacgtaagcatgatctttagagaggtgactctaatcaattgagggcaaccactggacagaaagaggtccagaccaaccatacacagagacatcatacaactacactttagcaacctctccaaataacatgtctcttagtgaaacttgggaggttgcaagttaaaaacataaaatccagtggcatttatgtatcctaggcacttacatttgtctgattcttccaacttgcctttgcttggttagagttttgggtagataagaggtggatttacatgtgctagtgtgasaactttgatacactcatttagacattgacctactatcttgtttgaaagctaaaacccaaagaaatttgtcttcttacataaaacaaattcagcccttgccttccttgtagattacatcttccactagcagtaataaaaaagtaacaatatgcataagtcaaagtatcttcttagatcctctgtagtgttttattatttagttgtgttaattaaagtaactgtctcaaaatttcaaggaatgcctgagaagaaattcatgttcaaaggctgccctcttgtgacaatgtgttgtatgctttactgtaaaagtaaccttattttaccttataacctctacaatccaattcataacagcataaaaaggaaacaaaaccttacataattttgaattttaaaaagtaccttgtttatatggctcctttagctaatgaatagtcaatttggtaaatattccagtgagttgaaggtttgaatctatctcacttaactagcttgatgaatgtatttctaaacctatacaacccactcctctgcttttaaaaaattaaagttagctgtagattgagatgtcagtgacacagtttatagaacataacttagattgtcatctacattactgtaactacaaataccaccttcagatggaagaataagttttatcagtgaacatctctaattgaactataaatggtgtatgtcttctggtttttacaagctcttggtctaacacaggggatatatgatgtaaaaattacaaagcaaggtcactcacggtggctcatgcctgtaatcccagcactttgggaggccaaggcgggcggatcacagattcaggagatcgagatcatcctggctaatatggtgaaaccccgtctctactaaaaatacaaaaattagctgggtgtggtgacacacgcctgtagtcccagctactcagtaggctgaagcaggagaatcgcttgaacccaggacgcggaggttgcagtgagccgagatcgcaccactgcactccagcctggtggcagaacaagactccatctaaaaataaataaataaataaataaataaataataaaatagcagtgactataatgttttgtgatgttaaactttgagagcttttttttttctttcttttcccaagtgcctttcccagttccaggagcagagttattctaagcccactgatgtaaaggaatagaaagaaaaggtttgttggaaaacctaataacctgctttctgtcttttgttttttaaaagcttgagcatttgggagaatttggaaagattgtggagtaagtgcaaagaaggaatttgctaacaaaaatcatataaggtaaaatgagttttttccaggttagaaaatatccactccctaccctcctacattcctttcccatggttaagaagaggaaaaaacaaaggcctcttggtgagcagtggtgacttaggcagtttcttagaaatattctag

SEQ ID NO: 697715 - DNA, 1141 bp, Homo sapiens
tagtggtgatttgtgagattttggtgcacccaacacccaagcagtacatagcactcaatttgtagtcttttacccctcacctctttcccatgctttcccccctgagtccccaaagactattgtttcattcttaggcctttgcatcctcatagcttagctcccacttatgagtgagaacacaccatgtttggttttccattcctgagttacttcacttagattaatagtctccaatcctatccaggttgctgtgaatgccattaatccatttgaggaggatactttctatgagtgcagtgtgttacaaacccatggtcatctctgtaaaaatccagacattcagcatggaaccagccagactcctgggctaaacataactctttagcccaagaatctggctagctaacagttgtgtttcttagaatcttacttgtctctgactctaaagctccttgagaactagtgatgacaaatttcaggtgtctcccgtgagctgggtgtggtttataatgtgctgtgctagaaagagcttagaatttagctcaaccagccagggcccagaaataagaggccaccactagtaactctgcaaattgcctgagttttgatttccttgcctctaaaaggagtataatatcttacctgaaatgattgcctggaagatcaatggagaaatgtaaaaagactttggaatctatgaggtactttctagcattgtctttattattctctgctcttagaagctgaactttaaagtccctttcaactttaaaattctgtgatgttagactcttcctaggacagatctctttattcttccttcccacgagacacccacagtctcaagagggacatcaagtccaagtgaaatccagtgggattactctctgtcctcttaatttagtacagtttggtagttgtttctttatttttgttttaagttgaaccaaatagatccttaaagcaacaatgggtctgcgaagagcaacacagcttccttgccaaggctatattatcagacatgaggtcagcattgcagcagctgtctgggaaggctggtgggagggggkcaccttggtttggtgccttcttgatgaggtgtttctgcaggaatgacttacacatgcaaggcaaaagagtg

SEQ ID NO: 697716 - DNA, 640 bp, Homo sapiens
ggtttttaaaatgacagtcaggcattaagaacaaatgaaaaatagatacttacaaatgaatgttgagtttttattttattcatagatattgctacccgttcccagagcacacttacctagccaattgctyttcaaataataagaaataaaggttggtgggatggtaaagatgtttacgattgaattcatctccagccagaacttgatcttgtcatcagctgccataaactatgaaatagaaacagaataacacaaattctgttaccctcaagaattttaagtgaacactagatagcattattcagctgcattttacttatcagctgaagccttgatctccttctattttacatatacacagacacatatatttatatgctatgtggatgctttgggaggccaaggcaggcagatagcttgaggtcaggagtttgagaccagcctgaccaatatggcgaaaccccatttttaccaaaaatataaagattagctgcacgtggttgcagctgcctgtaatcccagctacccaggaggccgaagcaggagaaccactggaacctgggaggtagaggttgcagtgagccaagaacgcttcactgtactgcagcctaggtgacaaagcaagaccatgtctaaaaaa

SEQ ID NO: 697717 - DNA, 640 bp, Homo sapiens
ggtttttaaaatgacagtcaggcattaagaacaaatgaaaaatagatacttacaaatgaatgttgagtttttattttattcatagatattgctacccgttcccagagcacacttacctagccaattgcttttcaaataataagaaataaaggttggtgggatggtaaagatgtytacgattgaattcatctccagccagaacttgatcttgtcatcagctgccataaactatgaaatagaaacagaataacacaaattctgttaccctcaagaattttaagtgaacactagatagcattattcagctgcattttacttatcagctgaagccttgatctccttctattttacatatacacagacacatatatttatatgctatgtggatgctttgggaggccaaggcaggcagatagcttgaggtcaggagtttgagaccagcctgaccaatatggcgaaaccccatttttaccaaaaatataaagattagctgcacgtggttgcagctgcctgtaatcccagctacccaggaggccgaagcaggagaaccactggaacctgggaggtagaggttgcagtgagccaagaacgcttcactgtactgcagcctaggtgacaaagcaagaccatgtctaaaaaa

SEQ ID NO: 697718 - DNA, 655 bp, Homo sapiens
ggaaggtcagaaaatccatcctaggttttatgatttgcttcaggagagggtgagaayaaccctcctgcttctgttgttttctcaaaatccttcagcttaaaataatcaatattccaaagtgccattattttgggatagggtgtcctaaaccccacggctaactttgtctccacagctctctcttttctctgccctgaccaaagtgctcttcaggggatattttctcaattcccaagcttcacagaagtcttaaaatttaattgtgttctctttagcatctgtccttttcccctgacttctcctctgatattagattaaaaaatctttttgtatttccttaatgtttatggctttagagcagagatgtgtgaggttaaagggtgcaggttagaaacaaaaatgtctaagatatcaaagatggtctaatccttaattcactaaagataaatggctgtcttatgctctgcatctggtgtctcagccatgactgaccttgcttttctagaaaaatctgcacaagtctgggtaacttgctttactaaatcctacttccttttgatctgtaaaatcctgaatgctttatgctccacttgaactctactcaggcaaatttttaattcactttgctttagttttcccacctgggccaattgtt

SEQ ID NO: 697719 - DNA, 2729 bp, Homo sapiens
ttattctttcaatagtgaaccttccaagtttctttctgcctttggcttcttttcggtgactttgagtagccgctttttaaatattttgtccagagcttgtacagaaaggattaatttcattccagctcctccagtattattcaaatgagagctgtcaatattacagttttctgaataagaaagaagtaaaccatccacccattaccacataacacaactttgcctggctaagtcctcctcgatatttaggtttgagattaaacatccttgtccatatgtgatctgtcttcctgagttttaggggggggttaggtctactcacttatgatgtatcttcctatatttccctgtatacctaccatgacaactctcatcatgatttttttgaagtgatgtttttaatgtctgtctatctgaatagactaaaaattctctggggacagcaatcatgtgtctcatgtttttggttgtatccaaggccctcccaacatggtagacaaatgattaacataaatgaatgaaaaagtgaaaaaatccagattggtagggaaaatcacatagtttaagattaaaaaatagagcagaaagagagaaaaggctctgtaagccttgaacactgacgttgcctccaccaactggacatagctcattggacagctcttgagtctctactcgatctcttgacctttgagatcctcacaggatcccatgaagacaccccatgtgggttgaggccagggttaaaaaaattcaggagcagatgccactgagaatggtgcttgtgtttttttccaagaaatttggaacttctgtcttgtatgagagaaaccaagcctgggcaacatattgagacctcatctctacaaaaataaaaataaaaaaatagccaggcatggtggtgcatgcctgtagtcccagctacttggaagggtgaggtaggtggatcacttgagcctaggcgtttgaggctgcagcagtgagcagtgattgagccactgcactccagcttgggtgacagagtgagaacatgtctcaaaaaaagagagagagagggagagaaaggctagacatcaccagagaaaagaaagtccaaagtcttaaataccaagccaagtttctttgttaattgttctcctgtcctggctgataagccaacccagtcagctggcaatcacctaaatactctctaaacagatattaaactcctcatgctttgagtaattctgacccatgccttttgtgttttagtttttgttcatggagtaggggttggcaaatatatatatatatatatatatatatatatatttgtattatatcttgaaacattgaaaaatgagccttgggaaataaaaacacttcagtcagcgcctataatctattaaggcaattaatcaaacacacactttgtcaacttcctctttttctgttatgttttatgactctattattatttcaccaacacagtaaaaggaattaatctttattgcatggaaaagtttgggagataaaggaaagaaacttagctggccagcctccatattgtggttcaaatcaatcatctggcagattggattatttttaacggtaatgcattcattaggccttattggawacattttaatgaatgataggatttcctctctaccagaatacagatctgtcactcggaatgaacttgcttaacaactcagatgccctttcattagctcttttctgtaataggatatgaaaatcttcagaaatcgatagttgaataacagttacatatttacaggaatgctcctaagtgccttgagaaaggcatataggtaaactcagaagaatttttcaaatctagaaataattaatactagaggggattcaaggtttctcaagagaagaggacacttatacacgaaggggttcatttgtttctaggtctagctcctcaggcaactggattatttctctacgtctagtgcaatataatcatagacacccataaaaataagcacgtcttagtatattaacatgtacttactgaacatctattatgatgtgaacaataaattaggctccgtggatctagaagtaattaaaacatgtagtctctatggacaatgaactttaatctagttgggaagattcttatgtgagtacaatgtaagttgattgtttacatcagtatatgaaaaattctaacagattgatgtggacatatgtgtcagtcaagtgcagaaagaaatgaattggaatatactgtgggcctgagggatcttgaagacccaggaggtgggttcgatgagtcttgtgggcctagaagttgaggaaaaccactgcagtcatactgaggatcttgcagaaaagtttttaagtggttttacacattttctcctctctagtatgatgaagtttcagctctgaaaatttcactaggataaacctatgtgaaaatcttagtttcaagatatgtgttacttcccttaaattcccttaaaaagaaagtcattcaaaatgactctattttgtcctagaaaatgctctgaaccatccatcaggtccctggataaccttggagtaattattttacctctccgagcctcagttttctcctatgattaagagagcaccaaactagagagtcatcatgatctcttattattcacaagtagtttcatgaagactacttttcactgggtagaaaacaggtatcagaaaacccagctgacctattctttctgttaggt

SEQ ID NO: 697720 - DNA, 635 bp, Homo sapiens
aaatggtgtaattctctgtttatattttcctccctcaaagtaaatataatttactttttagtgaaatcttcataactatgtaaaataattgggggaaaaatgttctcctgcatctctgttgtgtgattacttgcatttgcatttgakataataaaccataacaccttttctttcataactcaatttctttatcaaaacctaaaggtaaaactgactttggtccaaactccagccaaagatatatccaggagcaatttgctgaaaagaaaaaaactttcttttgccaaacttccttatgcctgctgctcttgaaagctatttctgcaggaaaaaaaatctataaacacagatataaaaagctactgttgcctctgttcaagttcccatcacatgtgacctgattttcttatcctctgtgatgtctggacccttatttcccagagagagccaaggcgaattgctttcaggagtctctatctctgtctgcaaaccaaacccagtttgcccattaggcagacatctggtgtggagaccatggcaaaacatccttatggagcctcaatctgagtggaaggccaaggtgcacttggtcagaattcatctgaagatcaagaggtcagtgtcaaggtagataa

SEQ ID NO: 697721 - DNA, 1721 bp, Homo sapiens
gtaatcaagaggcttgcctataattagtttgtaatgactctaagggatacatttagttgatttctccaccaatgctttgcagccttagaggtacagtggaaattctggggttctcaaggtaattgagaatgttgatgagagagtgactgaagtaatgaactaggtggtctaggctggttaggaaagtgagagagccaagaggtggctgagaatctggaagacaatggagaagtcataggtcccttgactccctgtatttagtctgtactgactgtgtggttggagtgaggacatgaagaacatgatggataagagtttgaggttagaaagtgggatatttgcatttaacatttctgatttggtacagttgatgatgaggattaagacaaggaaagggtgcagcttgactgatattcaagggaagtctttagagttggataaataaaagaaatgtgaagataatatgttgaagtctttgtggaaatggatattgaagtcattcttgatgatgtggagggtagaaataattgttatgtgtgctttgggaaggggcaattgttgcaaggatggcagggaaaaaataggaaaattattgaacctcttgattcctccctgtggttggcagaattctcaaatgaccccctgtggtccacacctttgtagaattacccatcctttgaatgtggatagtatcagtaacttgcttcttaccaataggatatacaaaaaagacatattccaatgattatgttatatttcatgacatagatgagagatttagcagatgtaatcaaggcccctaatcagttaactttaagttaatcaataaggagattattctgggtaagcttgaccttgtctggtgagccactaaaagggtatcaaggtcagagatggaagaaagtcaaagaaatactatcctgctggccttaagaaagcaacagccatgttgaaaatttccaagagatttggaaatcttcaaaactcctatggggtggcataggagctgagagctccactcctacaaccacatgagcttggaagagcacccccagaccacaataagaccccatccctggctgacaccttgattgcagatttgtgagatcctgagcagaggacccaactgagccacacccagactcctgacccatggaaactgtgagatagtaatgtaaatttttatgtagcaagggagcactaatagactacattaaatataccacctgatgttaaagactaaagtgttttcagaaatcttatttatcattcttttaaaaatgttttcaaaaaaaatttttgccttcaacttttattcacagacacaaatatgagatggtttctaaattaagaatgtagattaaagcatgagaagcaagctgtgcagtagatggatatagaacaatgggacagatctcagtcataattctcatcactcctacttctctttagtcaacttgtctgcatggagcagaaacaaaaggaacaagtgcttccagtctgaggggctggatctgctgacaatcaacaccttaggaaaggatgctgggctcggagagaggtaaaagaagatgtgaagtttgytgaattgctaagactgagaatggaatagaagttgggagcaagggaaacagagataaaggaaagagaagagataatcaactgagcagctgctttaatagacacacatgatttcttgatggctagtgatatttacccta

SEQ ID NO: 697722 - DNA, 1004 bp, Homo sapiens
agaaacatctgaaaaaataatacctgaaatttacagaaaagtacattaacacagatgatgatcatgcaaagcagtttaagagaagttagctagaatgagaatttaagcctgttccactgttgtgtgatgtcaccagccagtactgaaagaagtttacgttcacgacctaatatcttaataatggctttcttcattccccaaacaaaaaggtaatctaatttataaaagtggtgttttccaatcaacacagggtaaaaggtatatgttcagtaattctctggcaaatcattttattatattcatagaaatgcatattttatttcatattaagtaaaacatcttggctagcttcaattccttgatccatagaactcaaaagggagcaaccaggatgagggctcagctgccgacatccccaagtccattgttaggagtcaagtgggaatttcatggactcaagtgatactgctcctctttcatcactgaggtttctatcagcagaaatcaagaagtagcctgtgcacttgatgcgagactgtttctttgtcagctggctaagatgaaaggaatcacataaattcaaaattagaccactgtgttgtcaagacctccagtcacttcccaggcttttctttcactttggttactactcaatcctctttgctggtgttcttctcttctccctattattaagatgtgcagctctctgtccttgcaccttttccctttttaatgttagtcactcttttgggtacaacatcctgtaacatgactatacatacaatctttacactagtaactcccaaattaatataccagccccattctgtttcctgaacttcatacttactctactgcctactcartattttcatttggattgatctgacgcatctcagacttaacaaatcctaacctagattcctgccctccttgctccatgaaagaactcaatatacaaaatgacccccaaatgctgaacaagtttgaaaaccaaagaacaa

SEQ ID NO: 697723 - DNA, 1746 bp, Homo sapiens
ttacttttccagcttattacctctgattcgctgactctaacagtcaattgaaatcatttgaatctacaattcacgaccctccttatcctcgcattccctttttccttctcacctatctaaatctcatgctctctcatagctgcctcattctctccagcaccaccttttcactgcactgcaccgcaccaycaagatccccactgccagacagaggcattcattgtatgatgctaagtctgttggttgttcctggcccacaactgagtgtcatccccaggaatttccatccacaaaagagagctaacttgcccaagcctacccctcccctccagggtaagcttacatccaatgactggttgatgttggcgtacaaagcccagcacttttttgcctccattaaggacatttctgaagggccatctcagctctgttctcccaatatcagctaagagctgtgttctgtcacagccatgtggcatttcagcctcttcctgtgcctaatcctaccctctttactcccatgcaggtctcttgccccaactgctgccctataaaacacctgcatacaaatctccacctccaagtctgttcaacagggaatgagacttaaacagttgcatgaagagtggtgccagagagcagattctaaagtccagttttggaaagggatcatctgtctccaagctggcaaaaaggacaacatcactggtgggaggtggagttatgacaaccctagaatgctgcagtgctgtgattattaaaactaccattggtggcaagctgagatgggatatccatagtaaaagtacactggcaggtactatgtctcaagcatttgagagatttaggaagtactaattatatagaactatatagaattggatgggtgttgctgggggttattaaagcatcgtagaaagataatgaaaggccaacagtagttaatctccaatttaaggtgaacaatgaaagcttccttggcaacatgcagagtctttcatcttctgcagctggagaacagacaaatctgaaggtgaggcccaggacttagttggtagtagagtgccatatacagttgaattctaaaacctgtaaagtctactacaccaagactaggactctgagaagtaatgtgactctgggccttgagatgggaacatgtagatatttgaaaattttgagtgactagatttcttgaacattttcatactatgtcaaactttgagtgactagatttcttgaacattctagagctatagatctggtccactcctttttactaaaggccagtgttctccccttgactaaagaagaatcagcttcaaagctcactaaggtggttggcagaatttattttcttgtaaatgtgggactgagagcttcagattgtttttgcttatcagccaaaggcttcactcagctactacatgccatccacatagctccctggcatgtgtccatagatggctcacaatatagaagtttggattatcaaggctagcagaagatcagtagaagtctaccagcaacacagagccttatataccacaatgtaatcatgggagtgacatcccattacctttgccatatcctactaattaaaagtacctcatacggccgggtgcaatggctcacgcctgtaattccagcactttgggaggccaaggtggcagatcacttgaggccaggagtttgagaccagcctgaccaatatggtgaaaccccgtctctactaaaaacacaaaa

SEQ ID NO: 697724 - DNA, 646 bp, Homo sapiens
ataaaatgaaactacttatctaaattagtgcttctcaacccttgctgctcattggagtcacccatatcagggtttgttaatatttcctgtatacacatttcactgagaatcttggtgaaatgcagatttatgctctagggtagggccccaaattctgcatttctaacaaagtcaccgatgatgccagtgctgctggtggtcacaggacatactttgaggagcaaaggccttgagtgctttaaagaaaatgtttgtgccagaccccacataaactatttagtctttaaagatgggcaccaggcacagagatttgttaaytgttgcctaggagactaatgcctaggcataattgaaaactactggtctgacatcaaagtttgcatgtattccactataaacaatgtcttctaataagaatttattttactgaagtctgtctatctaagtagtactttacatgctacttgtcaatgtatcatatagttaagagagggaagggagatgtgtattggttttctgtggctattaataaaaaaatttataatctagatgacttaaaacaacagaattttcttctctcaaagtccaaagaacagaggtccaaaattagtagtactgggctgaaactaaggtttgacagggctat

SEQ ID NO: 697725 - DNA, 608 bp, Homo sapiens
taaacatatgaaggcataaagatatacagaagaaaaattattaaacaactcattttaagattcaaattaactaattcctgcatatatgacattccttacataagcgaacactaaacaaaaatggctagaaatgtctttttctttcttttctctctttgttgtttaaggtattaagcacgaattattacatgagactggcagatagctattaatcctcttacagatttgagaaagttgattctcaaatatttatgcaccttctccttcattgttttctttaaatctgtcctcttaaaaagcttcttaagagctcagttaatgcttttgacttaactaggagaaaaaggcatgataatacaggcaagatggcattgttagcaattctggtagtggtttggaatgaatcctaagaggcagggatcttaaggacaaggaagagaagagagagagggagggatctttgatctctttctctggtaatcttaatgcataattttactaawacatgttctcaattcattcatattattaagctcttcctgcagttgatatctgagcagagtaagatttgtatttccatttttacttttttgaaagagaatatatgg

SEQ ID NO: 697726 - DNA, 638 bp, Homo sapiens
ttgcatataacctctgcacatcctcctatatactttaaatcatttttagatcgcttataatacccartacaatgtaaatgctatgtaaatagttgtcagactgtgttatttgtattaattttttaatgttgcattttaaaaaatattttgactgctctgcattcggatgaatctatggatgtggagcctgcagttacagaaggcctactgtacttaaaaatggttaagatggttacttttatgttaattaatttttaaaaattaattttgaatagtatggtacaacccctttggaaaacacattggcacttttttataaagtttttttttttttttttttttttttttaaaacagaatcttgctctgttgcccaggctggagtgcagtggcatgatctcagctcactgcaacctctgcctcctgagtagctgggactacaggcctgcaccaccacacacagctaatttttctgtttttagtagagatgaagtttcaccatgttggccaggctggtctcgagctcctgacctcaagtgatctgctgcctctgcctcccaaagtgctgggaattataggccagagccacgcggccggcctcttttctataaaattaaatgtacactttccataatatcca

SEQ ID NO: 697727 - DNA, 813 bp, Homo sapiens
acaggacagggtattggtgaggagagagttgctccaaaagagaatccagagatgtgcagagtgatccctgagaatatagctgagtaatgatgggtacatgcatgtgaaagaaactgaagccagggggaaaatcaccaaaaagaattagcattaacagtgcttggtgttcacacagggacaggaataatgcctcttcccacgagtcaggtgagaaaacttaacattcatggtagatgactgagaagggtcttgcctcactagtaaggaataactagtcctaggctgataactgcttctatcccacctaacaaatctaaaaatgcaaagctcaaaaggatcaaactgtttccaagtaactcaactatgtgacagamaaaagctcaagaatattacaaaaacacctagcattcaacaggtttaaattcagcgtccgacatttaataaaaaattatgaggcataaaatgatacagggaaatgccacatgtaataataagcaatcaaaattgattcaaagttgacagagatgttagaattagcaaacatggatatttaaacagttttcatataataactgtattccataggttcaaaagttaagatacagacgatattatgggtgttgggggtagcccaggttaaatttctatatacaacaactacagtatgtgaggtgataagatgaaaaacggccagatggaattaagggcagactgaatgataccatggcatatcaaaattaaattgttaaaaaccagtgatatagagaaaactgtaaaaacagaaaaaaaagacatgttatttttagagaaata

SEQ ID NO: 697728 - DNA, 813 bp, Homo sapiens
acaggacagggtattggtgaggagagagttgctccaaaagagaatccagagatgtgcagagtgatccctgagaatatagctgagtaatgatgggtacatgcatgtgaaagaaactgaagccagggggaaaatcaccaaaaagaattagcattaacagtgcttggtgttcacacagggacaggaataatgcctcttcccacgagtcaggtgagaaaacttaacattcatggtagatgactgagaagggtcttgcctcactagtaaggaataactagtcctaggctgataactgcttctatcccacctaacaaatctaaaaatgcaaagctcaaaaggatcaaactgtttccaagtaactcaactatgtgacagaaaaaagctcaagaatattacaaaaacacctagcattcaacaggtttaaattcagcgtccgacatttaataaaaaattatgaggcataaaatgatacagggaaatgccacatgtaataataagcaatcaaaattgattcaaagttgacagagatgttagaattagcaaacatggatatttaaacagttttcatataataactgtattcyataggttcaaaagttaagatacagacgatattatgggtgttgggggtagcccaggttaaatttctatatacaacaactacagtatgtgaggtgataagatgaaaaacggccagatggaattaagggcagactgaatgataccatggcatatcaaaattaaattgttaaaaaccagtgatatagagaaaactgtaaaaacagaaaaaaaagacatgttatttttagagaaata

SEQ ID NO: 697729 - DNA, 549 bp, Homo sapiens
tggtgtgggcacctgtaatctcagctacttgggaggctgaggcacgagaatcacttgagcccaggatgcaaagaatgcagtgagccaagactgcaccactgcactccagcctggttgatggagtgggactctgtctcaaaaaaaaaaaaaaaaaaaaaaaaaagatgaataattgacgtagttgtattcgagttgtttccataatgctatgagagatactttttgcttctagtataaataacagaggaaaagcactgttttctatcaaagaatgtcaaaagaaaataacaactcaacagtctactrtggtcatctatgattcacacaaactaccctaaacactaaacaaaaagaacaatataaggattttgcatgcttaatgtgtttggaagcatactttgtaatattacaaccaaatattttaagtcatactatggatttatgactttactattgaattatcatggcctttgcatttgaagcggataaaaacaaactgaaggcaaatctggactacacgccaacattccaccaactcttgcctaaaca

SEQ ID NO: 697730 - DNA, 659 bp, Homo sapiens
ccactagactctataattgcttctcctcttttctcataaaaatgccattctctcagagccaaacagtcccagttaggtatggacagcaggatgtaggggttggggagtgggtggaagacgctgaatacaccaattttgtgaaattaacttatatgaccattgatctttaattggtgaaatttcagtgacagaagggaatcatttgggtggaaatttcatttccagggatctttaagagtgccataaccagccaggcatggtggctcacgccaccrtgagccactttgggatgccgaggcaggtggatcacctgaggtcaggagttcaagaccagcctgaccaacatggagaaaccgtctctactaaaaatacaaaattagctggatgtggtggcgcatgcctgtaatcccagctacttgggaggctgaggcaggagaatcatttgaacccgggaggcggaggttgcagtgagctgggattgtgccattgctctccagcctggccaacaagagtgaaactctgtctcaaaaaaaaaaaataaaaaagagtgccataaccacatcctaggtactatttcacctacagtgaagtcaacactgaacaaaaacttttagaagagaaatctgcgtattctatcctctcccccattctccacttcc

SEQ ID NO: 697731 - DNA, 1057 bp, Homo sapiens
tttctattaaaggagttgccaacatccttaggagagctgtgctgtttttctctattaaatagagggaatgaggtctaagttgctttggttagtgtgtcttctttatgatccagaattcacagtatttatttaattatcttatcctacccccatggtgatctctccatttttttcttttgtttttagcacattttaacctcactttagtatgatatatttatataattgctgtatttatatgattaaatcttgagtaataaccttaacaatactcttagtttcaatgtgttatgaggatcaggtcacttggcacttttaaaaatttgttttattgtgcaagaaactggtaacacacaacaggaagtgagaagtctaatctataggtcaaattcaagagggagaccgagtgaaaaagatctgtttccttgttccccaaatatgtacccagtgttccatatgttttggttgtcgataaggtattaggaatttggcctaatgggaaaaagctttaaaaaaaagctctccatcatttttgcaacatattgagttaagtgtagtaggagaagaatggaatgtataggccagtcagaaattgtgcttgtgttcagggggtaaggagattgtgtacgaaagtgtgcaattaaaatttrggtaacctagagatgaaactttgggaatcaccaacatttaagaaataaagagaatgaaaaggaactgtttagagagattggaagtgtataggagtgagtggaatcaagacgcaaacaaaagaaagttacacacagagtaatgattaattacacaacctgttggagggaaggcaagttctgtaaaaaaggagatactctgtgtgcgtttggcaccttctaaagctgagtgcagcaacgtgtttggtgaggtaccaggctgtaaatattttaggtcttgcagaccacatggtctcattgcagctactcaactctgtcgttgtagagcatgagcagaaacagaaaatacatagatgaatgagcgtggctgtgcaccaataaaactttttatataataacaagtgtgcctc

SEQ ID NO: 697732 - DNA, 608 bp, Homo sapiens
caagtggccccatgtccatgagccacagggtgccagggatgtgggattgtagctcccctgtgggtcccctcaatgaagggaattattcctccaaggagatttgggtcctctgctgctctcagacagtcagttgctttctgactcgtccacacaatggatactgcgtccaattgtatcacaccatcgtggacggctggagtcacatctaaaatgtccttgtacctccagcctccatcactgcacacctgtaactctgctcaccctaagtgcttaatgaacatggtggatgggctggtatacaaatgccttttkggggtggtttgacttacagccatctctgctctcactacagaaagaggagaggagcctcacagaggtaatgtcagtggaagaacctccaaccctcctttgaacacattcctaacaaagaaacctgcatgctttccccaccttttctcctacctgtcttgtgtcagagcagtgcctccctgctgctgatttagaaccaaccaacagctggacctgtttatatctagcaccttgcagtgttctacctagattccaaaaatgaactcaacaatgattcagtgtcattgatcaggttcata

SEQ ID NO: 697733 - DNA, 1057 bp, Homo sapiens
cctggactccaagaagttgagcttaagtgatggcaagttggttgcaaaaaaatggctttgatatttccaaaatgattttctttaagttttcagcaaagcattgactagtcatagacttttagaccttgttctgtggacccagatctaaaccaaactgcaagtttgtgtcacttgagatattatctaccagcacatttaagtctctttctttaaacatatcacttcagtggtgatatcttaagctacagaaagagtcatcttcctttacacatttggctataattgagtagagatgacttttataagattcagtcctacagtcwtaggcctgggttaaaaagctgtctttgactgaagtgggaggagaaaggagaaaaggagaggggaaatagttatttgggatcccttctgggatatcccttctgactccttgtggcaggagtgattgtctgattgtttcattgcaggggtcaggctggagcagagcctcaaaggcaggagggtaaagaattagggctccaaccccaggggctaacgatgctagggaacttcaggagcttatgacatatccctgacttctccctctggtgttcaacaaatatccatgtaatcctaacctttccttggcctctcttacagttagggcaggaccaactaattagattgtggttaatgggatgtaagtgggaataagctaacctcttccaggttgagaacttaaaggtgtcctatattataatcccacccaccctctctcccctcactgtagtgacattatatcttgaattacagatgccatagctacaaggtgggagcagcctgggaccctgaatcactgcgtggaagagattctcgcagaggagaagttttcaaagcatctgtctttgtgtgagcaggaaataagcgttggtggtatgaagacattgaaacatgggaatatttgtgatggcagctggcattaattactctgattttgacattacttcttggcaaggaaaataagtgagaggtggtgcacctttgatgagaagcatgggattcggagttggaaaataca

SEQ ID NO: 697734 - DNA, 636 bp, Homo sapiens
tgtgtgtawatttgtgtgtgtgtgtgtgtgtgtgtgtgtgtgtgtatgtctttgttttgtttttttaatacatagtctggctctgtcacccaggctggagtgcagtggcgtaatctcagatcactgcaacctctgcctcctggtttcaagcgattcttatgcctcagcctcctgaggagctgggattacaggaacgtgccaccacaccaggctaattttgtatttttagtagagacggggtttcacctcttgcccaggctggtcttgaactcctgacctcaagtgatccgcctgccttggcctcccaaagtgctgggatttcatgtgtgagccaacgtgcccggccagtccttgtgttgtgagtgtgtttgcgtgtgtgtgatcagctcacgagcccacctgccaacatcaaacagaaacatgggatcgcccctccctttccaaaccacccttagatgccttcttctgccttgttcttgatgtttatttcagccctaagacccctgccttaaaatgtgggaggcaggaaggaaaggcataggagtcattcgttttaggccgggtgtccctatgaactttccgtgaaggcttcactttatcagtttccatgaggagggttctttaagcaaagcttgc

SEQ ID NO: 697735 - DNA, 636 bp, Homo sapiens
tgtgtgtaartttgtgtgtgtgtgtgtgtgtgtgtgtgtgtgtgtatgtctttgttttgtttttttaatacatagtctggctctgtcacccaggctggagtgcagtggcgtaatctcagatcactgcaacctctgcctcctggtttcaagcgattcttatgcctcagcctcctgaggagctgggattacaggaacgtgccaccacaccaggctaattttgtatttttagtagagacggggtttcacctcttgcccaggctggtcttgaactcctgacctcaagtgatccgcctgccttggcctcccaaagtgctgggatttcatgtgtgagccaacgtgcccggccagtccttgtgttgtgagtgtgtttgcgtgtgtgtgatcagctcacgagcccacctgccaacatcaaacagaaacatgggatcgcccctccctttccaaaccacccttagatgccttcttctgccttgttcttgatgtttatttcagccctaagacccctgccttaaaatgtgggaggcaggaaggaaaggcataggagtcattcgttttaggccgggtgtccctatgaactttccgtgaaggcttcactttatcagtttccatgaggagggttctttaagcaaagcttgc

SEQ ID NO: 697736 - DNA, 662 bp, Homo sapiens
aaaatatctatcttattaatgaaccaattaaagctgggtaaacttcgccaaaattttaacacatttccttgtttttattcagactcattacgtgcatatattatactccgaggtaaataaaattctgtttcctccaaccttctatactccacacacactcatgctttgccattcactatactgtttcatactttggaacatattttcttttcactttgtaaacaaaaatataccccattaccttatacacatgagcttgcataaaacaaccccctagagacacatacattctttgaacatcatcttcaaagtggcaaaaccaaaatgctcattaacatgactctaagttacagyttctctgtaacatatagaaataataagacgtatatagacatttataggtataagcagacatacacacactaatggtaatcatcatgccaatattatctcttaatgagaagcaacccagatatcccaagattatccaccagttaacttcttgattttacattagctcacgatctgaaacgtaatagaaacatggaaattccatgtcaactgataccttataaagtgtaaaaactgtttatataaaaattttgccaaaattctaactcaacataattacatataattttaaatcttcattttaaacatta

SEQ ID NO: 697737 - DNA, 662 bp, Homo sapiens
aaaatatctatcttattaatgaaccaattaaagctgggtaaacttcgccaaaattttaacacatttccttgtttttattcagactcattacgtgcatatattatactccgaggtaaataaaattctgtttcctccaaccttctatactccacacacactcatgctttgccattcactatactgtttcatactttggaacatattttcttttcactttgtaaacaaaaatataccccattaccttatacacatgagcttgcataaaacaaccccctagagacacatacattctttgaacatcatcttcaaagtggcaaaaccaaaatgctcattaacatgactctaagttacagtttctctgtaacatatagaaataataagacgtatatagacatttataggtataagcagacatacacacactaatggtaatcatcatgccaatattatctcttaatgagaagcaacccagatatcccaagattatccaccagttaacttcttgattttacattagctcacgatctgaaacgtaatagaaacatggaaattccatgtcaactgataccttataaagtgtaaaaactgtttatataaaaattttgccaaaattctaactcaayataattacatataattttaaatcttcattttaaacatta

SEQ ID NO: 697738 - DNA, 642 bp, Homo sapiens
gcagaggctgcaatctcggcactttgggaggccaaggcaggcggctgggaggtggaggttgtagcgagccgagatcacgccactgcactccagcctgggcaacactgagcactgagtgaacgagactccgtctgcaatcccggcacctcgggaggccgaggctggcagatcactcgcggttaggagctggagaccagcctggccaacatagcgaaaccccgtctccaccaaaaaaatacgaaaaccagtcaggcgtggcggcgcgcgcctgcaatcccaggcgctcggcaggctgaggcaggagaatcaggcagggaggttgcagtgagccgagatggcagcagtacagtccagcttccgctcggcatcagagggagaccgtggggagacggagacagagagggagggagagggaggaggagggggagagggagagggagcccccttcctttttcatgttgttcatgctccttctgaaatactagtgatgcactagtataggagaaatttaaatcagaaaaccttgcagcagatccggccagtttattcattttctagtgttacataacaactaaatagttctgtagagcrgaagtccaacaagaagactgggtatctgcccaaagtatcacaaggctgaaa

SEQ ID NO: 697739 - DNA, 1065 bp, Homo sapiens
tttttttttttaagacagagtcttgctctgttgcccaggctggagtgcagtggcatgatctcggttcactgcaacctccgcctcctggattcaagcgattctcatgcctcaggctccagagtagctggacttacaggcacatgccaccaagcccgagtattttttgtgtttttagtagacacrgggtttccccatgttggccaggctgatcttgaactaacctcaagtgatccactcgccttggcctcctaaagtgctggggttacaggcatgagccaccgcacccggccagggtagttaaaaattgtatgctctgaatgtgtaaaacaggttgtccaagaaatcttatggacaataaaagtcatttactttggaaattattctaaaacattttgaaatagagcaatgttagaaatgagatgctgcctctgctagttgcctcagagctggttagttagcagaggatagattttctcggtttaatagccataaaggatcttcatattctgatttgatctgcaaatgtattcaacaaagtgactgcatgatgaaagcaagaaaattatataaataatttccactccaatttttcgtatatgcccaaagtcataccagtgtagagccttaacatgtttgtatgtaggggacagggaacagaagcgtattaatagacacagggccattcaaggatcctctacaagacagtcattcctgattgactagcctaaatcagaaaatggtgtgtatggttaggccaaaattagtctcttctttttttttttttttttgagacaggtctggctctgtcacctaggctggagtgcagtggcacaatttcgtctcactgcagcctcgacctcccgggttcaagtgattctcctgcctcagcctaccgagtagctaggaatcacaggtgcgtaccaccacgtccggctaaatttttgtatttttagtagagacagggtttcaccattttgcccaggttggtctcgaactcttgacctcaagagattcacccgcctcggcctctcacagtgctgggattacaggtgtgagccactgtac

SEQ ID NO: 697740 - DNA, 608 bp, Homo sapiens
caggcggatcacctgaagtcaggagtttgagacctatctgaccaacgtgggaaaacctcgtctctactaaaaaaaataaaataaaataaatacaaaaattactcgggcatggttgtgcgtgcctgtaatcccagctactctggaggcttaggcaggagaaccgcttgaacctgggaggcggaggttgcagtgagccgagattgaactattgcacgccagcctgggtgacagaacgagactccatataaaaaaagaaaaaaaattatgcaggtcactttagcgccttgtgcgatgcagtctcctacaacacacttgtgtttaaatcatggctcatgccactttgtatctttgtgtcctgaaacaaattatttaaaattcagatccccaattttatcacttgaaacattgggataattaaatccaacttaaagacactattcttattaaattaaatgtgatggtaaatgmgctttaaaatgtgatggtaagctacactgtaaaatgataaaaatgatgatctctaaggtcacatggagtggaagtctcctaggagatctataaatgcagccagcttatttctttaaaaatttcaatttgtagaatataca

SEQ ID NO: 697741 - DNA, 620 bp, Homo sapiens
cttgcatcagttaggtctctgttgaacaaaaaatatctaagtccacatgtaatttcatagtcttgaccttagacaatagaaaatagtaaaacaaacaaaagtacaatcctctagaggattaaatcatccttgggtggacctgttaggcaatgatcccatgtgactttgaaacgaaatacagtcrttgttcttttgttttatttccaagttttagataattttctcagcagttccctattgtgtcataaataatttccaaagattattcatattaccaaaagtctgatgtcattgtgcttagacctgattaatttacatgggggcagtgcaagatgttcattgaccatggaagcctctggatatgggtagcaaattcagagctgctgtttcaagcagctactaaggacagaaaattaacttctgtaagaaaatttcaaaagaaatctctcattgcattttcagaatcctttctccagaattttttttttctcttactggcttttttattccaaggtgtttgagtttcctattgctttttaggtgaattaccacaagcattgtcgttcaaagcaacacaaattaattctcctactgctttggcagtcagaactctaacacaa

SEQ ID NO: 697742 - DNA, 620 bp, Homo sapiens
cttgcatcagttaggtctctgttgaacaaaaaatatctaagtccacatgtaatttcatagtcttgaccttagacaatagaaaatagtaaaacaaacaaaagtacaatcctctagaggattaaatcatccttgggtggacctgttaggcaatgatcccatgtgactttgaaacgaaatacagtcgttgttcttttgttttatttccaagttttagataattttctcagcagttccctattgtgtcataaataatttccaaagattattcatattaccaaaagtctgatgtcattgtgcttagacctgattaatttacatgggggcagtgcaagatgttcattgaccatggaagcctctggatatgggtagcaaattcagagctgctgtttcaagcagctactaaggacagaaaattaacttctgtaagaaaatttcaaaagaaatctctcattgcattttcagaatcctttctccagaattttttttttctcttactggcttttttattccaaggtgtttkagtttcctattgctttttaggtgaattaccacaagcattgtcgttcaaagcaacacaaattaattctcctactgctttggcagtcagaactctaacacaa

SEQ ID NO: 697743 - DNA, 594 bp, Homo sapiens
tgcgagaatgaactaatacactattctaaagcacaagcttcctccttgaatttctgctcagtgcccagtaagttcaaatacgtgtattygccatttccctccccatccagatcatgggtcagaattgcttttcttttttatgcatgtatcccttaggaagcttttagctgcaagtaaacacgaacaagcaggcacacacgtgcacatatatgcacaagctcagtaactcaagaggatttattatctcatataacaagaggtactaagatgaagaagttgcagggctagtcaattaggcagcccagtgagttcaccagggacccaatgttccttctgtggttcctctcagccaatcttagcatggtctcctcaggttagttccctttattgccccaagatgtctgccatagttccaagcatcacatgcagaaacgaaaataccagcagcagaaaataactgtttcctcatgtccatctatttttaagaacgaggaaaacatttttcagaattcccccagcagatttccctttgtatggcattggccagaatcatatcacatgacttgacctggacctatcattggcaaggggtac

SEQ ID NO: 697744 - DNA, 594 bp, Homo sapiens
tgcgagaatgaactaatacactattctaaagcacaagcttcctccttgaatttctgctcagtgcccagtaagttcaaatacgtgtattcgccatttccctccccatccagwtcatgggtcagaattgcttttcttttttatgcatgtatcccttaggaagcttttagctgcaagtaaacacgaacaagcaggcacacacgtgcacatatatgcacaagctcagtaactcaagaggatttattatctcatataacaagaggtactaagatgaagaagttgcagggctagtcaattaggcagcccagtgagttcaccagggacccaatgttccttctgtggttcctctcagccaatcttagcatggtctcctcaggttagttccctttattgccccaagatgtctgccatagttccaagcatcacatgcagaaacgaaaataccagcagcagaaaataactgtttcctcatgtccatctatttttaagaacgaggaaaacatttttcagaattcccccagcagatttccctttgtatggcattggccagaatcatatcacatgacttgacctggacctatcattggcaaggggtac

SEQ ID NO: 697745 - DNA, 592 bp, Homo sapiens
ccataaaccaaaaagaaacacctgtccaggctgaaggcagcaggacttatttaccagataattgtatccataagtccttgcactgcccaaattctcactttacacacagaaacttcaaggactaacttttatgattcagattctagttggctttataatggcccacccaaagataccaggtcccaataccrggaacctataaatgttactttataaagaaaaaaaagatcttgcagatgtgattattgggaaagttgtcctggattatgcaggtgggctttaaatgcaatcaaaagtgtccttatggcagggcacggtggctcatgcctataatcccagcattttaggaggccgaggtgggtggatcacctgaggtcgggagttcaagaccagcctgaccaacatggtgaaaccctgtctctactaaaaacacaaaattagctgggcctggtggcgcatgcctgtaattccagctacttgggaggctgaagcaggagaatcgcttgaacccgggaggcagaggttgcagtgagccaagatggcgccattgcactccagcctggccaacaagagcgaaactctggctcaaaaa

SEQ ID NO: 697746 - DNA, 655 bp, Homo sapiens
gaaagaaaagggaaaggaaaaaaaagaaaagaaaaaaaccccaaaaccatgggattcatacaaagatgactgagtgggggcaagaaagactcagcctaactagtattttaccaaatctgacacgtttgaatgatgagagctccatggaagaaaggagatgctaagaggtgaataagcacacttttaatggtcacatgtctacattacactgggcccttgttgggattttttgcattaaaaaatatctttttagtgtctacctacttcatgctaactgctattctacagacacaatgataaacaagaccaataacttacaatctagtgaacagscattatcaccttctcactcctgcaaagctgatattaaaaccccatcttggtcatccctgagcactccaaggtctacaaaccaggtagagatgctaggacgggaactaaatgcagaaaacagatcagagttgccagggggtgaggggcagggtggacaactacaaaagagacgcacaggacaatttttaggtgaatgtagtgttctacatgtactatggtgatggatacatgcttctatgcattttcaaatgccattgcaatgtatctcacaaagaatgaagttcaatgtaggcaaaaatgttaaaaatcaaccaggaggtca

SEQ ID NO: 697747 - DNA, 655 bp, Homo sapiens
gaaagaaaagggaaaggaaaaaaaagaaaagaaaaaaaccccaaaaccatgggattcatacaaagatgactgagtgggggcaagaaagactcagcctaactagtattttaccaaatctgacacgtttgaatgatgagagctccatggaagaaaggagatgctaagaggtgaataagcacacttttaatggtcacatgtctacattacactgggcccttgttgggattttttgcattaaaaaatatctttttagtgtctacctacttcatgctaactgctattctacagacacaatgataaacaagaccaataacttacaatctagtgaacaggcattatcaccttctcactcctgcaaagctgatattaaaaccccatcttggtcatccctgagcactccaaggtctacaaaccaggtagagatgctaggacgggaactaaatgcagaaaacagatcagagttgccagggggtgaggggcagggtggacaactacaaaagagacgcacaggacaatttttaggtgaatgtagtgttctacatgtactatggtgatggatacatgcttctrtgcattttcaaatgccattgcaatgtatctcacaaagaatgaagttcaatgtaggcaaaaatgttaaaaatcaaccaggaggtca

SEQ ID NO: 697748 - DNA, 664 bp, Homo sapiens
aaggaagtgctcaaaaaacagaaggatggaggcaggtcaaaaggacatgacagccaaactgaaagagttcccagtggccaaagctggaacaaattgagtactaaattaattaattaattaactaagtaacatgatgctaaattgcaatccaaagcataaaataattatacatgagtccatactgatataaatttattcatataattaaataaatatgtaaataagggagaaaagatatagctttcttaaaaaagaattcgaaataattatgtagatactccccttcgagagatggagtctagtgctacctccctgtgcttgaacctgggtggatctttatgacttgcttccaaagaagagaatatggaagggagaaagggtaactttacagtggagaaaacttccaattactaccttgactgagtgatcaaggagaggcaagggctgaaaaactacctgttggttagtagttcactatttggatgatgggctcgagagtaattcaaacctcagcatgatataatgcttagcatttaytaccatgtaataaacctgcacatttatcccctgaatctaaaagaaaaaaaatttaaagaaatttccaagttctcaaactgagcttaatgaagaccacaaattagtcttgacttttctcaatccctga

SEQ ID NO: 697749 - DNA, 837 bp, Homo sapiens
gatcaggaaacccttagtgcagtgaaaattgtaaaagtttatgacctgggaggcccgtgtctagccatgcctctgtcakgaatctgtggtgtgacttctgacaagagttttatccctctggatctgtttccttggctggaaagtgaggaaatcgatccaaagattacctcgcagattctctccaactctgacattctatcatttcacactcactttaaaatagactgtcggcgaccctacgccagttttccttgagaaacagcgccaccttcaggtcataataaccataagagagctgaccgtgaaggtgcttctccggcaggagcgatttgccctgatccacagaaacccttcccccgcagtcctctgggatgcggtcacacacttgtgagtctgccgctgggttaagatcaatgcgtatggacatggagccaagctgagctaactggcccacaagggacagatgcatgaccttggcctaattatcacagctccagctaacagttcgcccacagcaaagctccttgtggaaccctataaagaaggaaaggaagcgagggatatgctggatgaactaaactctacaaaacaatgaaaatggacacacctcttcttcaggcaattccacttaagatagtttccagctgttcttattttagcaagatatctacttggatatactttcattaagaaaaatgacatagtgaactctgaagtaaatatcagatttttttcacccagcaaatatttattgagcaaccaaccacttgaatgccagcaccgtgctaaaagctctcacaaaattacttttattgaatttccacaacagcccttgtg

SEQ ID NO: 697750 - DNA, 837 bp, Homo sapiens
gatcaggaaacccttagtgcagtgaaaattgtaaaagtttatgacctgggaggcccgtgtctagccatgcctctgtcaggaatctgtggtgtgacttctgacaagagttttatccctctggatcygtttccttggctggaaagtgaggaaatcgatccaaagattacctcgcagattctctccaactctgacattctatcatttcacactcactttaaaatagactgtcggcgaccctacgccagttttccttgagaaacagcgccaccttcaggtcataataaccataagagagctgaccgtgaaggtgcttctccggcaggagcgatttgccctgatccacagaaacccttcccccgcagtcctctgggatgcggtcacacacttgtgagtctgccgctgggttaagatcaatgcgtatggacatggagccaagctgagctaactggcccacaagggacagatgcatgaccttggcctaattatcacagctccagctaacagttcgcccacagcaaagctccttgtggaaccctataaagaaggaaaggaagcgagggatatgctggatgaactaaactctacaaaacaatgaaaatggacacacctcttcttcaggcaattccacttaagatagtttccagctgttcttattttagcaagatatctacttggatatactttcattaagaaaaatgacatagtgaactctgaagtaaatatcagatttttttcacccagcaaatatttattgagcaaccaaccacttgaatgccagcaccgtgctaaaagctctcacaaaattacttttattgaatttccacaacagcccttgtg

SEQ ID NO: 697751 - DNA, 485 bp, Homo sapiens
aaaattagctcttggcttcagggccttgtagtggactgatgtccctccttaactgaacagtcagtctgcttatttttttggggtggtttaggggtaaaaataagtagataactgaacaaagctggctggcaggaaccttcggctgaccgcaggctttggtggtggtcaagacctggaattggatttgaggcctggccagcgtgaaggatatgccataggagcccaggaggatgactctgccaggcctgcttttgacatgtctgtcatgcttcatgctttatgctgctctgggccattaagcaagaactaaatctgatgcccmatcaaggctgagctctttttttttttgagacactgtctcactctcttgcccaggctgtagtgcagtagtgtgatcatggctcactgcagcctcagtctcctggactcaagtgatcctcccacctcagccttctgagtagctgggagtacaggtgagtcaggtg

SEQ ID NO: 697752 - DNA, 1650 bp, Homo sapiens
gacggcctttgctagaaacaaaaacccaagtcctccttggaaagtctgagctcactgtaagctgcctctgaaggaggtgggaatctggctgctggtataaattcttgatgtgtgttctgtggcatttatgaaatcatgactttgatcgtggagcccacgcatgtgaggtgcaggggagctgcgccgcttaccctctggccccgccagctgaacgtcgttgtgggtggggtgcaccctgccccctgtgttgggccctggtgacctttcagcgtgcccaccctccacaggctgaacgtccttttgatggtggaagtaataaacctgttttgaggggcttcacatccgcccccttgggatgaactaacaacggtccagccacctgttaatttcagtgctgttagaacaaccaaacgggctatgctttgtgacaggcctgcgttgttcatacaagccagttgcgtgcaaagtctgtgattcaatgacttttacaattttctgccagctccacaagcttctcattgaaccccagacacattaattacaatccctaaaaataactgttgacaaaaaacacaagtaatgttcatgccctttaacaacaaattcttacaaatttattttcttttctccaagaaaaaaatggcagcagagctgcagttccagtttgtggacgtcctgctgaaagacaatgtttccctcacaaaagcgctcagcacggtgacccaggagaagctggagctgagcagagccgtgtctaagcttgagaagttgctgaagcaccatctgcagaagggctgcagcccaagcgtaggtgtctgtgcttaactcytacctgcctcagcctaacccaccatggtccagagcagctccaccccacaagaggccgggctccctttagggacctggggatgtgggcgtcaccttctccctaaccgccaggctctgttgcctctgtctgaagccttgctaaatgttgtgggatgtttgaacatctcagccgacttccagctccgccacagacggcgtcctcactgaccctgaccgctacttgatgtttggtgcatgttcataaaagggtattttgactaagaatattataatctgatctaatttagagttttagttaaagtgatttataatttttttttttttttttttttgagaccgagtcttgctctgttgcccaggctagagtgcagtggtgcgatctcagctcactgcaacctccacctcccaggttcaagcaattctcctgtgtcagcctcccaagtagctgagattacaagtgcccgccaccacacatggctaatttttatatttttagtagagatggggttttgccatgttggccaggctggtctcaaaatcctgacgtgattccgcccacctcagcctcccaaagtgctgggattacagacatgagccaccgtgcccggcctaaagtgacttataattttcataatggtatagttggatagagttatcttccggaatgtctcatttttttttcttttgtatttaggctattttgtttgtgatttgctttattttttataactttttaaaaattatttttaaatttacatacagtaaaatttgccctttcctggtgtagtgtcatacaagttcacacacacacacatccctgta

SEQ ID NO: 697753 - DNA, 628 bp, Homo sapiens
ggataaccaatcccaggtgtttgaraccagtctgggcaatgtggcaaaccccatctctagaaaaaataaaaagaaaaattagccaggcattgtggcacacatctgtaatcctaggtatctgggaggctgacacaggaggattgcttgagcccaggagttagaggctgcagtgatccatgatggagccactgtactccagcctgggggacagagcaaggccctgtgcatctctaaaataaataaccaccccccacccaacaagtcatgccttgtcaggaccccaccccacccccgtctcactgtaaggggttgatgacaccagcaggggtccccagcacctgagatggacttggaggcttgggccccaaagacctcccaccagcagctgtgagccccgctctgagccactcttctcttccctactctgcccgggcaggtccaggtgctgctgtacttcctgcagctggaggccatccctgccccggacagcaagagacagagcatcctgttctccaccgaagtctaaaggtcccagtccatctcctggaggcagacagatggcctggaaacctctggctaatcaggccatccgtagagcgggaaccttcctgaggtgtccttgggccac

SEQ ID NO: 697754 - DNA, 628 bp, Homo sapiens
ggataaccaatcccaggtgtttgagaccagtctgggcaatgtggcaaaccccatctctagaaaaaataaaaagaaaaattagscaggcattgtggcacacatctgtaatcctaggtatctgggaggctgacacaggaggattgcttgagcccaggagttagaggctgcagtgatccatgatggagccactgtactccagcctgggggacagagcaaggccctgtgcatctctaaaataaataaccaccccccacccaacaagtcatgccttgtcaggaccccaccccacccccgtctcactgtaaggggttgatgacaccagcaggggtccccagcacctgagatggacttggaggcttgggccccaaagacctcccaccagcagctgtgagccccgctctgagccactcttctcttccctactctgcccgggcaggtccaggtgctgctgtacttcctgcagctggaggccatccctgccccggacagcaagagacagagcatcctgttctccaccgaagtctaaaggtcccagtccatctcctggaggcagacagatggcctggaaacctctggctaatcaggccatccgtagagcgggaaccttcctgaggtgtccttgggccac

SEQ ID NO: 697755 - DNA, 1376 bp, Homo sapiens
gtgcacatgtcagctccatcagctcaggggacagggacagggaagagctgcagttggactagctaaagccttatgactttctcaatcactagagctgctaagctgacactatctttattacctggttcctctcagagttgacatttggaataaagtacatggccttccctttatttctgtgaaatgacatcttgatctagttgtcccagtccactgcatttggtgcaattgtccaaggtactcatgaactctgccagctctgcgatatgagctgagtgagttgggcgggtcgcctcaccactctggcctctatctctatttgtacaatggggatcacagcaggacctgactatgaggtcactgagatggaggttctgtccctgaaatgattatcacctggggtataaagttcaccagtgatgaacaggccattgtgacccagaaggttgtaaatgaacccagatgctcagtgctttggggacctcccaccacacacaragggcaaggactggggtcacacaaggagaggggccgcaccatgtccccccaacaggtcctccccagggcctttccctcagaggcaccagcaccgtgtaggcttaggtttcctaggggtcagtcctaggaggtgactctggctgaggtctagtgacccacagaccccagggaaggcccccacaacatcagctggagcccaccacctggtgctcggggaggtggcccctgcccagtgggggaaagggtgtggaggcggcacatacatagtgggaggaggaggaggagggggagaggaagggagaaaggaggagcctgggtgccctgtggggacagcggccaccatcctctgtggacatcctgcccctgcctccattcccacccctgcctccattcccacccctgcctccattcctgccctatccagaggactggggggaggccagtgagatgctggccttggtgccaaatttaacaggggccagaaatctcacgaatcaagataaataatattttaatatgatatttaaaaataaaaattaggccgggcacaggttaattatgggctcatgcctgtaatcccagcactttgggaggccggggtgggtggataacttgaggtcaggagttcgagatcagcctggccaacatggcgaaatgccatctttacaataaaaaaattagccagccattgtgtgcacctgtgagcccagctacttgggaggctgaggtaggagaatcgcttgaacctgggaggcgaaggttacagtgagctgagttcacgccactgcactcccgcctcaaaaaaaaaaaatttttttttttgagtgagaccccacctcaaaaaaaaaaaattaattcaaacaagttcatgatggaca

SEQ ID NO: 697756 - DNA, 663 bp, Homo sapiens
tctgcaaccacttggagaaatctggaagacaattaggtgaaatgaaatgagtctgctagggagacccacactgcatgacatcaggcatatggaatccaaaacacattgtctcctagaagcagaacttccaataggggttactacaggctggggagagcagggagcctgggcagggatgggtaacgggtacagagtgatgctcagatacgaggaatccattctggtgttctgttacacagcagggtgactaggtgactagggtcaacagaatctacaaaaatttttcaaaatcagctggaaaatacggttctgaatattctctccacagagaagtaacaatgatggaaggtcacagagatgccagatatgatgatttgatcatgatgctacatatacatgtcaaaatgtcccttgcactcttacggttgtgtgtgtttgtgtgtgtgtgtatatatatatacacatacacacacacatactctacagaaacaaaactgccatcaaatgttggtagtattcattctaactgcagtgagatgaaatcttcagtgtgattttcacttaygcttttgtgtgaatcagcgatggtgagaatcttctcttctacctgtgcctccacctcacgtcttcaggtcctccatccagtcctaacaacaaattaaa

SEQ ID NO: 697757 - DNA, 875 bp, Homo sapiens
gggggacctgcagccacctctcacctgggctctggatggtttctactccatgaggatttccagagtttcccctcagccaccctcagagtcaggggggcttccayggggctgcaaccatctgtcccagtctttcctgtctctatgacacaccgtgtgacctgtgtacactgcgagatgtaggtgcgtgcattgaaaccgtacagttaagatgacctacaactgatgctactctaagtcttccagagatttttcagatatccccagagtaaaccaaactagtgatatcccatggttttgcaaaccagaaccaacaactgcacagaaacagctccttatgcgccatcagacactctccagacctgcccctcactcacaaatgtaacaaagcagcatgaacccaggcagtcttcactcctcagggccacataacaacctctatcggtcaggaagcctttgatctgggccaggctgccgacccacaggggttaattgtgcctctcatgctgagtgttgtttctcctcactggactaacccccacccttccaccaagaagggcccccagggaaactgctgtttgacatccaggagcccatgtggaatgttccagcaacctggatggccttggccacctctaataccagcctttccctctgtggggctcccttcctggctcttgctcatgcaagtcaatctaaagtggctgagatgtcctgctccctcaccctcctgggtcaccctgatggcataggcaggtgtctgcattcaagaacgagttacccacaggccaacttccctggtgtgggggacaatgcctggggcctccaaacagccagccccaggtaaacaatccagctctgacacagctcaaagactg

SEQ ID NO: 697758 - DNA, 875 bp, Homo sapiens
gggggacctgcagccacctctcacctgggctctggatggtttctactccatgaggatttccagagtttcccctcagccaccctcagagtcaggggggcttccatggggctgcaaccatctgtcccagtctttcctgtctctatgacacaccgtgtgacctgtgtacactgcgagatgtaggtgcgtgcattgaaaccgtacagttaagatgacctacaactgatgctactctaagtcttccagagatttttcagatatccccasagtaaaccaaactagtgatatcccatggttttgcaaaccagaaccaacaactgcacagaaacagctccttatgcgccatcagacactctccagacctgcccctcactcacaaatgtaacaaagcagcatgaacccaggcagtcttcactcctcagggccacataacaacctctatcggtcaggaagcctttgatctgggccaggctgccgacccacaggggttaattgtgcctctcatgctgagtgttgtttctcctcactggactaacccccacccttccaccaagaagggcccccagggaaactgctgtttgacatccaggagcccatgtggaatgttccagcaacctggatggccttggccacctctaataccagcctttccctctgtggggctcccttcctggctcttgctcatgcaagtcaatctaaagtggctgagatgtcctgctccctcaccctcctgggtcaccctgatggcataggcaggtgtctgcattcaagaacgagttacccacaggccaacttccctggtgtgggggacaatgcctggggcctccaaacagccagccccaggtaaacaatccagctctgacacagctcaaagactg

SEQ ID NO: 697759 - DNA, 1147 bp, Homo sapiens
gtgagatgtgagtcagggctggggaggtgggcaggggcctggccctgctgtgcacctgcttgggagtcctggccccgtcttagctctgtgagtccacctggagtccagcactcctcactaccccaccaaggccactgccagatggctcccttcctccctccccgccttccagtagaggtctcagcatggcagctcagcccatgtctcttgtctgcccaaaataccgcagaagcttcccacatccctctgtggaagccaagcctgtccaaaggcctcagggccctaactgctctctgctacagtccctcgccaccctcatctcctcccttttcccctcactgggcagatccgggtaccagaccttggctcctcagtcttttacatctctgtgtcccccacctgggactgttctcccccagggagccacattcctgctccctgggcacattcacttcttcctaaaggccaccttcctagaagccttcctggcctcctgacttctgaggccagcctggactttctccccctccctccctttcctccctggcactcccgtgctttctggyacaccacatgctcacttaacctacttagtgtctgtcagtgcccccaccagcatagctttttttttttttttttttttttttttttttttttttttttgacacagagtctcgctgtgttgcccaggctggactcaaacacctgagctccagtgatcttcccacctcagcctcccaagtaactgagactacagacatgtaccacctcacctttctcagaacagccttttgaatgtttgtctctcttgtgcctctccttggtagacacacagtctagactttggaataaatgaatgtgttagtgactgaatggcaggggacaggcaactccatccatgagcccagggcagggagggcttgctgggtgggagccatgtgcctatggtcctatggggtcctgttgggtggttccatgggctgtctgctgctgcacgttctttttggacccagcacccacgtggtttgcttggcattagattccagttgggaagggccagtgcctccgattccattcatcatcaggcgtgggcgtatgtggagatagcaaaggacatgggggcccgactgcagtccccattgcctgg

SEQ ID NO: 697760 - DNA, 1147 bp, Homo sapiens
gtgagatgtgagtcagggctggggaggtgggcaggggcctggccctgctgtgcacctgcttgggagtcctggccccgtcttagctctgtgagtccacctggagtccagcactcctcactaccccaccaaggccactgccagatggctcccttcctccctccccgccttccagtagaggtctcagcatggcagctcagcccatgtctcttgtctgcccaaaataccgcagaagcttcccacatccctctgtggaagccaagcctgtccaaaggcctcagggccctaactgctctctgctacagtccctcgccaccctcatctcctcccttttcccctcactgggcagatccgggtaccagaccttggctcctcagtcttttacatctctgtgtcccccacctgggactgttctcccccagggagccacattcctgctccctgggcacattcacttcttcctaaaggccaccttcctagaagccttcctggcctcctgacttctgaggccagcctggactttctccccctccctccctttcctccctggcactcccgtgctttctggtacaccacatgctcacttaacctacttagtgtctgtcagtgcccccaccagcatagctttttttttttttttttttttttttttttttttttttttttgacacagagtctcgctgtgttgcccaggctggactcaaacacctgagctccagtgatcttcccacctcagcctcccaagtaactgagactacagacatgtaccacctcacctttctcagaacagccttttgaatgtttgtctctcttgtgcctctccttggtagacacacagtctagactttggaataaatgaatgtgttagtgactgaatggcaggggacaggcaactccatccatgagcccagggcagggagggcttgctgggtgggagccatgtgcctrtggtcctatggggtcctgttgggtggttccatgggctgtctgctgctgcacgttctttttggacccagcacccacgtggtttgcttggcattagattccagttgggaagggccagtgcctccgattccattcatcatcaggcgtgggcgtatgtggagatagcaaaggacatgggggcccgactgcagtccccattgcctgg

SEQ ID NO: 697761 - DNA, 588 bp, Homo sapiens
tgttcttttgctcttatcatattgctgagtgctcagagggtactgggtagggtcatagccactcactctgtccgttctgggtaacagagtgagactccgaagttcagccgaccagtgaggggatgggagggtaagggtgttgcttgctttgtagctgtggaaagtaatcttgaaatctggcttgtgggtcctgtgaagtcaagaaaggtgtgagagttaaggggtttcaaattaattttactcaggattctttgttgttgaagaagagatggaagattttttgaatgtcaaagrgtttaatgctagtagatttataaaagagggagattgatgtgtctgtgtggtgcatttttttcatccctgccaccgtgtaagattttaatttgcattctttgtgaaggtgatatttctgggggagataaatccaagaaaggggtaaaacggaagaagatttcagaagagagtggagaaacagcaaagcggcggtctgcccgtgtccgaaacaccaagtgcaaaaaagaagagaaagtagacttccaggagcttctgatgaagttcttgccgtccaggtactgtgtattttttctg

SEQ ID NO: 697762 - DNA, 614 bp, Homo sapiens
gactttcacaatgactctggttgcatttagtagtctttatcatgctggaaaataatcctctggctctcacatgttgggtgttttgaccaggaggcatcagctcaggctttggactcccacatcagcaccctgtaggcaccctcgcaccccagtggcctcctggtaaaggctgctggctttctctaatgaaacacrggccccattttcctggcaattaggatttataaattggggggggttttgatctgtgttcagataccacaccacattccaaaggcagttccaggtatttctgaccccacacctgttggtctcacctcagagagtggcagctgcacatgtcaaggttgggaggagccgctgccagacctgggctgtggcgaggttagagcccaatgggtcaccgggcagcaggtgcttcctgtaggtgtaacaagcgtcccaccagatctgtgaattcacagacaggctgtgtttccccatgcaccagcacagtgatgagagatcccaggcatttaaatgggttgtattctaggccaaaaaaaaaaaaaaaaggagctttgcgaaaagcagtggtttccaaagagaagcttttaaaatagaagtaacagttc

SEQ ID NO: 697763 - DNA, 614 bp, Homo sapiens
gactttcacaatgactctggttgcatttagtagtctttatcatgctggaaaataatcctctggctctcacatgttgggtgttttgaccaggaggcatcagctcaggctttggactcccacatcagcaccctgtaggcaccctcgcaccccagtggcctcctggtaaaggctgctggctttctctaatgaaacacaggccccattttcctggcaattaggatttataaattggggggggttttgatctgtgttcagataccacaccacattccaaaggcagttccaggtatttctgaccccacacctgttggtctcacctcagagagtggcagctgcacatgtcaaggttgggaggagccgctgccagrcctgggctgtggcgaggttagagcccaatgggtcaccgggcagcaggtgcttcctgtaggtgtaacaagcgtcccaccagatctgtgaattcacagacaggctgtgtttccccatgcaccagcacagtgatgagagatcccaggcatttaaatgggttgtattctaggccaaaaaaaaaaaaaaaaggagctttgcgaaaagcagtggtttccaaagagaagcttttaaaatagaagtaacagttc

SEQ ID NO: 697764 - DNA, 1305 bp, Homo sapiens
tgaaaaacaacacatccagtgggggcctttgaactgcaaagaaaattggcagaacttctgttggaggcatcaattcgaacagaacataaaagagcacttaagaaaaacagaagacttgtggagcacacgcatgcaaaattctgatatacaaatatgattattgatctaaacattttttgaagttgagcaaatgaaaggataggtggtcaatttagcaatctcaatagtgtcagaaaatatcaagtcaaaaacaatttcaaagcgcaaagcaaaaggatagagcatagatggaaatcatgacggaaaagaagaaagacttgaaaacatcctggaacttcctggacagaaatagcargttacctccaaaaaagataagcctggcttcagtcttctcatctcaacactagaaaccaaatgacagtggacaggaactcttacagactacaggaaaaaagtatttcactccataaatcccatacaccaacaagctatctctcacttatcagggtgaaagagcagtgtatttcacccaaatatctcatttgaaaaaatacagtcggccctcagtatctccaggttctgcattcttggattcaatcagccatggattgaaaatattagaaaaaatgaaaaataaaagtacaatggcaaaaagtaatatgaatcaaaacaatacagtataacaattatttgcatggcctttacaatgtattacgtattataagtaatctagagattatttaaagtacatgggaggatgtgtgtgtgttacaggcaaatatctatgccattttacatgagggacttgagcatctgtggatttgagtttgggggaggtgtcctggaactagtcctccccaggacctcaagggaccactagattcacaaaagagctccatccaaatagcaaatgcatccaaatggagacaccaaactagagaaaaggggaaggaaaaaaagccaccagtggcatgctgtaaacttgagtatatatagcagaggtgtccaatcttttggcttctctgggccacattgaaagaagaattgtcttgggccacacataaaacacactaacactaatgatagctgatggactttttaaaaaaattgcaaaaaaatattcataatgttttaagaaagtttacgaatttgtgttgggccatattcaaagctatcttggcccacatgcagcttgcaggccgtgggttggacaagctcggcacatagggttatgtggactgcaaatgtgaaatgtatgtgctaaatattcttgaagtaaaaaggacaaagaaaaatctaattgtt

SEQ ID NO: 697765 - DNA, 644 bp, Homo sapiens
gaaatataaatatctgattattttatgaacattataatatattatatgggggatatgtgggagataaaakatagaaagatttagcatgaaaaaagaaagaaaaaaatccgatatttacaatatctataaatctccagaagttggatgattagcaaagatcaaaaagtctgagaagtatatatggagaaaatgttttttctttttttgtatgtccttttttttttttttttttttgagatggagtcttgctctgtcatccaggctggagtgcagtggtgtgatcttggcttactgcaacctttgcctcccaggttcaagcaatcattgtgcctcagcctcccaagtagcagggattacaggcatgcaccaccacacctggctaattttttgtagaaaatatatttttcaaacaagtcatgccttctccttgctcactgcataaaataagtaatgctaattgtggaaattatagtaagaatgtgaacagaatgcagccagacagaaaaaagaaagaaagaaagaaagaaagagagaaagaaaaaagaaaagaaaagacagaaagaaagaaaaagaaagaaagaaaaagaaagaaagaaaacaatattgaagaatcacatggggcattgaaaaattaaataaaacat

SEQ ID NO: 697766 - DNA, 644 bp, Homo sapiens
gaaatataaatatctgattattttatgaacattataatatattatatgggggatatgtgggagataaaatatagaaagatttagcatgaaaaaagaaagaaaaaaatccgatatttacaatatctataaatctccagaagttggatgattagcaaagatcaaaaagtctgagaagtawatatggagaaaatgttttttctttttttgtatgtccttttttttttttttttttttgagatggagtcttgctctgtcatccaggctggagtgcagtggtgtgatcttggcttactgcaacctttgcctcccaggttcaagcaatcattgtgcctcagcctcccaagtagcagggattacaggcatgcaccaccacacctggctaattttttgtagaaaatatatttttcaaacaagtcatgccttctccttgctcactgcataaaataagtaatgctaattgtggaaattatagtaagaatgtgaacagaatgcagccagacagaaaaaagaaagaaagaaagaaagaaagagagaaagaaaaaagaaaagaaaagacagaaagaaagaaaaagaaagaaagaaaaagaaagaaagaaaacaatattgaagaatcacatggggcattgaaaaattaaataaaacat

SEQ ID NO: 697767 - DNA, 2019 bp, Homo sapiens
gcatcccctcgcccctttctactcaaagtgtggtccacagaccagcagcatcagcatcatgggggagattatttgaaatctaggctctcaggccccattctagactctaattcagaatctgcattttaatagagttcctcatgtgattcttatacacagtaaaatttgagaagcactggtggaggkcccaaattctgtaaagttacctattaacttacggaaggctgataagttataaatgactcttgccagtaaagataaaaatgatttctgtttgactgaaaatatcccaaaggttagaatttattgccttgtagggtattagccagttttgtatttgatttagtaatctgatttcagtaatttttttcctgtgactacacatttttttctggtctttttaaaactagctttgccaccctgctgacttcctcaataataaattaaataaatctttgccacgtattcactatatatttgtatgagaatcatgtttttaactttttgaaaattatgctttgacaaccagctttctgtcatcatttttaatagttctgtggtattctattttgtgattgaccatagtttacttatctattgccctaatgttagacacttaggatattgctaatttagtaccaatataaataattctgcagtgaacatctttgagcataaaactttttccgtattttatatttatttcctttgagtaagttttcaagtactgaattaatggatcaaagggtatgaacatttttattttattttttaattttttatttttttaagacagagtcttgctctttcacccaggctggaatgcagtggtgccaccttgactcactgcagcctccacctcccgggctcaagtgattctcctgcctcagcctcccaagtagctgggactacagacatacaccatcacacctggctgattttgtatttttagtagacacgagtttcaccatgttggccagactggtcaagtatgaacattttcagatgagcaataatgagcttgtcaaatggacaaggatggaagggcatttcaggaggcaagagcagcctgcagagaggctggggaccaccggtctcacagagagagaggcctctaactggctagaatgtaaatatgtgtcctgggagcagctggaaaggcaggaaggagaccagagtatgaaggccctggtgtcctgaattagatgctcagcctaaaggaaagtcatggatactgtaaaccgagaagtgacatgatgagacctgtgccttagaaaaacaactctatcagcaaggaggcctttccaagcctcctgaaatagtgctggtgagagaagacgagatgtgagccaggaggtacctgggatggaaacaagaggatggagagaaaagttgtttagaaaggtgtaggggcttaaccaaggatcacccagctcattggtggtgatgacgggacctgatcatcagtgcttcttgcctctccatgtcgtccatgctgctgttccttccttagagttttgttttttaatctaagatatgacttcctagagctacaggacactcagctcatcactcacagatgagtttgagagttgtgatgtgagagaacaggctctgccaaagcatggagcacgcatccaaggggatgaacagcatccctaaaaataataagagatgaagcccacattccggggaagtgacagggcattcttgtggaacttgacagactaaactgtagctgctactttaacctctgtgtccacaaaaccagacctccaacgtggcgttgctggtatgcagatttcagtgtccctaagaagccatctgggttagcacagggggctgggttttacagctaaccccgctgagctcagtgtctcagtctgattcatagtcaacaataaggtttagcagacttttctcacacccaggtgctttcacagaactgccacatttccctatcagaccgccatttcacagaggaagagaaagttggttgcctacggttgcaccaggacc

SEQ ID NO: 697768 - DNA, 638 bp, Homo sapiens
tttattaaataattgctatgtgctagatactgtcctaagtgtattacaagcattattccatttaatcttcacaaaaattttcctttcacatataaggaaactgaggctcagagatcttagatagtttgattagaagtagtttgatgagtgtataaatgaaaaacagtatttggccagatgtggcagctcacacctgtaattccagcgctttgggaggctgaggcaggcaaatcgctagagcccaggagtttgagaccagcctgggcaacatggcaaaaccccatctctacaaaaacgcgtaaattagccaggtgtggtggcatgtacctgtagtcctagctactcaggaggctgaggtgggaggatcgcttgagcccaggaggtggaggttgcagtgagctgagattgtgccactgcactcccagcctgggtgacagagtgagactctgtctcaaaaaaagaaaaaagaraaacagtattttaaaacctagttctacctgatttatccactccttacatgccttctaaatgagcaaacagagcaagactctggccatgacctctatattcaggctggctggaatattttggactaaaatcagtaggtagcaagacacagtgcctaaatccctgccttt

SEQ ID NO: 697769 - DNA, 664 bp, Homo sapiens
agaagataggaaggggtggcactggccatgtcagtcccttttatggaaagtaaatgctttcacagaaaaacccaggagacttctgcttatgtcttattggcctgacacagtgcctggcagatttcttttacttactgccaaaatcatttctatctgatgacaggtatattcttggaaatagcatacagttgacttagtcaaaccaattgggtatagccatttgtcacatggctatccaatagcaacaggggaggaatttagcccagcatattcctgctctcaacaaaatcaggacaagggrggaatgactcataagtagatacactagtcagtatgggtttgtttatgcttcagtaacaacctcaaaacctcagaggtttaaacaataaaagtctatttttcactcatgctacttctttataatgggttggctgagctgagccttttgttctgtggcactatccaacagaaatataatgcgagtcacatgtatcatttaattttttccagtagccacattaatgaaaatatttttaaaacaagtgaaattaattttaataacattttatttaatcactatatccaaaatattatctcaatatgtaatcaatagaaaaaatattagtgagacaatttatattctttttatcttactaatccttca

SEQ ID NO: 697770 - DNA, 666 bp, Homo sapiens
attatctaggccaggcacagtggctcaggascctgtaatcccagcaccttgggaggccagggcaggcggatcacccaaggtcaggagttcaagaccagcctggccaacatggtgaaaccccgtctctactaaaaaatacaaaaattagccaggcgtggtggtgcatgcctgtaatcccagctactcaggaggctgaggcaggagaattgcttaaatccaggaggcggaggttgcagtgagctgagatggcatcactgcactccaggctgggtgacaagagtgagactctgtctcaaaaaaaaaaagtatatatatatacatatatatatttatatatacacatatatatttatatatacacatatatatttatatatatacatatatatttatatatatatttatattttctaatagtaaaaccatctttgcatttctggttaaaactgtttttaactggctgtgcatggtggcagattgccaaggcaagcagattgcttgagctcaggagttccagaccaacctgagcaacacaacaagacctcgtctctacaaaaaatataaaaattagccaggtgtggtgggtgcacctgtagtctcagctactcaaggaggctgaggtgggaagattgcttgagcctgggaggtcaaggctgctgtaagccg

SEQ ID NO: 697771 - DNA, 666 bp, Homo sapiens
attatctaggccaggcacagtggctcaggagcctgtaatcccagcaccttgggaggccagggcrggcggatcacccaaggtcaggagttcaagaccagcctggccaacatggtgaaaccccgtctctactaaaaaatacaaaaattagccaggcgtggtggtgcatgcctgtaatcccagctactcaggaggctgaggcaggagaattgcttaaatccaggaggcggaggttgcagtgagctgagatggcatcactgcactccaggctgggtgacaagagtgagactctgtctcaaaaaaaaaaagtatatatatatacatatatatatttatatatacacatatatatttatatatacacatatatatttatatatatacatatatatttatatatatatttatattttctaatagtaaaaccatctttgcatttctggttaaaactgtttttaactggctgtgcatggtggcagattgccaaggcaagcagattgcttgagctcaggagttccagaccaacctgagcaacacaacaagacctcgtctctacaaaaaatataaaaattagccaggtgtggtgggtgcacctgtagtctcagctactcaaggaggctgaggtgggaagattgcttgagcctgggaggtcaaggctgctgtaagccg

SEQ ID NO: 697772 - DNA, 666 bp, Homo sapiens
attatctaggccaggcacagtggctcaggagcctgtaatcccagcaccttgggaggccagggcaggcggatcacccaaggtcaggagttcaagaccagcctggccaacatggtgaaaccccgtctctactaaaaaatacaaaaattagccaggcgtggtggtgcatgcctgtaatcccagctactcaggaggctgaggcaggagaattgcttaaayccaggaggcggaggttgcagtgagctgagatggcatcactgcactccaggctgggtgacaagagtgagactctgtctcaaaaaaaaaaagtatatatatatacatatatatatttatatatacacatatatatttatatatacacatatatatttatatatatacatatatatttatatatatatttatattttctaatagtaaaaccatctttgcatttctggttaaaactgtttttaactggctgtgcatggtggcagattgccaaggcaagcagattgcttgagctcaggagttccagaccaacctgagcaacacaacaagacctcgtctctacaaaaaatataaaaattagccaggtgtggtgggtgcacctgtagtctcagctactcaaggaggctgaggtgggaagattgcttgagcctgggaggtcaaggctgctgtaagccg

SEQ ID NO: 697773 - DNA, 666 bp, Homo sapiens
attatctaggccaggcacagtggctcaggagcctgtaatcccagcaccttgggaggccagggcaggcggatcacccaaggtcaggagttcaagaccagcctggccaacatggtgaaaccccgtctctactaaaaaatacaaaaattagccaggcgtggtggtgcatgcctgtaatcccagctactcaggaggctgaggcaggagaattgcttaaatccaggaggcggaggttgcagtgagctgagatggcatcactgcactccaggctgggtgacaagagtgagactctgtctcaaaaaaaaaaagtatatatatatacatatatatatttatatatacayatatatatttatatatacacatatatatttatatatatacatatatatttatatatatatttatattttctaatagtaaaaccatctttgcatttctggttaaaactgtttttaactggctgtgcatggtggcagattgccaaggcaagcagattgcttgagctcaggagttccagaccaacctgagcaacacaacaagacctcgtctctacaaaaaatataaaaattagccaggtgtggtgggtgcacctgtagtctcagctactcaaggaggctgaggtgggaagattgcttgagcctgggaggtcaaggctgctgtaagccg

SEQ ID NO: 697774 - DNA, 666 bp, Homo sapiens
attatctaggccaggcacagtggctcaggagcctgtaatcccagcaccttgggaggccagggcaggcggatcacccaaggtcaggagttcaagaccagcctggccaacatggtgaaaccccgtctctactaaaaaatacaaaaattagccaggcgtggtggtgcatgcctgtaatcccagctactcaggaggctgaggcaggagaattgcttaaatccaggaggcggaggttgcagtgagctgagatggcatcactgcactccaggctgggtgacaagagtgagactctgtctcaaaaaaaaaaagtatatatatatacatatatatatttatatatacacatatatatttatatatacacatatatatttatatatatacatatatatttatatatatatttatattttctaatagtaaaaccatctttgcatttctggttaaaactgtttttaactggcygtgcatggtggcagattgccaaggcaagcagattgcttgagctcaggagttccagaccaacctgagcaacacaacaagacctcgtctctacaaaaaatataaaaattagccaggtgtggtgggtgcacctgtagtctcagctactcaaggaggctgaggtgggaagattgcttgagcctgggaggtcaaggctgctgtaagccg

SEQ ID NO: 697775 - DNA, 1162 bp, Homo sapiens
gatgaaagcaaaatatagtttgttagtaaaataaatttgaaaaattatcttgaaattcttgccaagaatttaattgggcccaaatttttatatatatgcacacacacatgtatctataaacttgggagaatttggttaagaaatagagatgtgggaggtctacctaggcaaggtgaagagatgagaagcgataggatatatgctgagaaaacagttaagttagagcgttcatgtagggaaggagacaaaaataaaaggraagtttggggcctggtggcagaaacttcaaatgaccagctaaaaagtttaggcaagaacttcaagataattttctagcaagcagggcctttgaaaagtaggcaattaattataacacaaatatagataaaatgatgtcctttaattattctgggaaaggggacacagcattgcccagtgctggagactggtctgtttctctcaagcaacgaataatttgaatcatgaattcccactttcaaggcaatgtcttgcaattacgtacggcaattcagagtgcttggaaagtgttttgttttctcagatctagccatttaatatttactgcttgcttacaactatactctgaaccttattttaggaagttgtacccaataaaagggtttatttagttttctgtccaggcaatgaagcatatatgtgtttttactttgggggaagtaaagcaaatgaactggcatttcttgagggccaggtataccaggcagtatgtaagtagctttatatatgcatctcattcaatcttcactacacccttacaaaaaaagtagtgaccattttcttttatagacaagaaaatcaaggctttaaggatcaagtctcaggcatatagcttataattgtcaaagagggtatccaaacatgggtctgtctgacaattgccagtcattcacagtgttactctttgaagcgctcaagtttatagtaaatgaattgctgtgctgttcatatacaaaagcttaaggttagcagataataaaagatggtgtggatggagagaggagttacaagtgatacttgctagcatgcaaaaataacagaaaatgggccaagaggaggattcttatagccaggcagaaatgtctgttagaatatgtaggaaaggatcacatcatcatagaac

SEQ ID NO: 697776 - DNA, 1162 bp, Homo sapiens
gatgaaagcaaaatatagtttgttagtaaaataaatttgaaaaattatcttgaaattcttgccaagaatttaattgggcccaaatttttatatatatgcacacacacatgtatctataaacttgggagaatttggttaagaaatagagatgtgggaggtctacctaggcaaggtgaagagatgagaagcgataggatatatgctgagaaaacagttaagttagagcgttcatgtagggaaggagacaaaaataaaaggaaagtttggggcctggtggcagaaacttcaaatgaccagctaaaaagtttaggcaagaacttcaagataattttctagcaagcagggcctttgaaaagtaggcaattaattataamacaaatatagataaaatgatgtcctttaattattctgggaaaggggacacagcattgcccagtgctggagactggtctgtttctctcaagcaacgaataatttgaatcatgaattcccactttcaaggcaatgtcttgcaattacgtacggcaattcagagtgcttggaaagtgttttgttttctcagatctagccatttaatatttactgcttgcttacaactatactctgaaccttattttaggaagttgtacccaataaaagggtttatttagttttctgtccaggcaatgaagcatatatgtgtttttactttgggggaagtaaagcaaatgaactggcatttcttgagggccaggtataccaggcagtatgtaagtagctttatatatgcatctcattcaatcttcactacacccttacaaaaaaagtagtgaccattttcttttatagacaagaaaatcaaggctttaaggatcaagtctcaggcatatagcttataattgtcaaagagggtatccaaacatgggtctgtctgacaattgccagtcattcacagtgttactctttgaagcgctcaagtttatagtaaatgaattgctgtgctgttcatatacaaaagcttaaggttagcagataataaaagatggtgtggatggagagaggagttacaagtgatacttgctagcatgcaaaaataacagaaaatgggccaagaggaggattcttatagccaggcagaaatgtctgttagaatatgtaggaaaggatcacatcatcatagaac

SEQ ID NO: 697777 - DNA, 1162 bp, Homo sapiens
gatgaaagcaaaatatagtttgttagtaaaataaatttgaaaaattatcttgaaattcttgccaagaatttaattgggcccaaatttttatatatatgcacacacacatgtatctataaacttgggagaatttggttaagaaatagagatgtgggaggtctacctaggcaaggtgaagagatgagaagcgataggatatatgctgagaaaacagttaagttagagcgttcatgtagggaaggagacaaaaataaaaggaaagtttggggcctggtggcagaaacttcaaatgaccagctaaaaagtttaggcaagaacttcaagataattttctagcaagcagggcctttgaaaagtaggcaattaattataacacaaatatagataaaatgatgtcctttaattattctgggaaaggggacacagcattgcccagtgctggagactggtctgtttctctcaagcaacgaataatttgaatcatgaattcccactttcaaggcaatgtcttgcaattacgtacggcaattcagagtgcttggaaagtgttttgttttctcagatctagccatttaatatttactgcttgcttacaactatactctgaaccttattttaggaagttgtacccaataaaagggtttatttagttttctgtccaggcaatgaagcatatatgtgtttttactttgggggaagtaaagcaaatgaactggcatttcttgagggccaggtataccaggcagtatgtaagtagctttatrtatgcatctcattcaatcttcactacacccttacaaaaaaagtagtgaccattttcttttatagacaagaaaatcaaggctttaaggatcaagtctcaggcatatagcttataattgtcaaagagggtatccaaacatgggtctgtctgacaattgccagtcattcacagtgttactctttgaagcgctcaagtttatagtaaatgaattgctgtgctgttcatatacaaaagcttaaggttagcagataataaaagatggtgtggatggagagaggagttacaagtgatacttgctagcatgcaaaaataacagaaaatgggccaagaggaggattcttatagccaggcagaaatgtctgttagaatatgtaggaaaggatcacatcatcatagaac

SEQ ID NO: 697778 - DNA, 1162 bp, Homo sapiens
gatgaaagcaaaatatagtttgttagtaaaataaatttgaaaaattatcttgaaattcttgccaagaatttaattgggcccaaatttttatatatatgcacacacacatgtatctataaacttgggagaatttggttaagaaatagagatgtgggaggtctacctaggcaaggtgaagagatgagaagcgataggatatatgctgagaaaacagttaagttagagcgttcatgtagggaaggagacaaaaataaaaggaaagtttggggcctggtggcagaaacttcaaatgaccagctaaaaagtttaggcaagaacttcaagataattttctagcaagcagggcctttgaaaagtaggcaattaattataacacaaatatagataaaatgatgtcctttaattattctgggaaaggggacacagcattgcccagtgctggagactggtctgtttctctcaagcaacgaataatttgaatcatgaattcccactttcaaggcaatgtcttgcaattacgtacggcaattcagagtgcttggaaagtgttttgttttctcagatctagccatttaatatttactgcttgcttacaactatactctgaaccttattttaggaagttgtacccaataaaagggtttatttagttttctgtccaggcaatgaagcatatatgtgtttttactttgggggaagtaaagcaaatgaactggcatttcttgagggccaggtataccaggcagtatgtaagtagctttatatatgcatctcattcaatcttcactacacccttacaaaaaaagtagtgamcattttcttttatagacaagaaaatcaaggctttaaggatcaagtctcaggcatatagcttataattgtcaaagagggtatccaaacatgggtctgtctgacaattgccagtcattcacagtgttactctttgaagcgctcaagtttatagtaaatgaattgctgtgctgttcatatacaaaagcttaaggttagcagataataaaagatggtgtggatggagagaggagttacaagtgatacttgctagcatgcaaaaataacagaaaatgggccaagaggaggattcttatagccaggcagaaatgtctgttagaatatgtaggaaaggatcacatcatcatagaac

SEQ ID NO: 697779 - DNA, 1162 bp, Homo sapiens
gatgaaagcaaaatatagtttgttagtaaaataaatttgaaaaattatcttgaaattcttgccaagaatttaattgggcccaaatttttatatatatgcacacacacatgtatctataaacttgggagaatttggttaagaaatagagatgtgggaggtctacctaggcaaggtgaagagatgagaagcgataggatatatgctgagaaaacagttaagttagagcgttcatgtagggaaggagacaaaaataaaaggaaagtttggggcctggtggcagaaacttcaaatgaccagctaaaaagtttaggcaagaacttcaagataattttctagcaagcagggcctttgaaaagtaggcaattaattataacacaaatatagataaaatgatgtcctttaattattctgggaaaggggacacagcattgcccagtgctggagactggtctgtttctctcaagcaacgaataatttgaatcatgaattcccactttcaaggcaatgtcttgcaattacgtacggcaattcagagtgcttggaaagtgttttgttttctcagatctagccatttaatatttactgcttgcttacaactatactctgaaccttattttaggaagttgtacccaataaaagggtttatttagttttctgtccaggcaatgaagcatatatgtgtttttactttgggggaagtaaagcaaatgaactggcatttcttgagggccaggtataccaggcagtatgtaagtagctttatatatgcatctcattcaatcttcactacacccttacaaaaaaagtagtgaccattttcttttatagacaagaaaatcaaggctttaaggatcragtctcaggcatatagcttataattgtcaaagagggtatccaaacatgggtctgtctgacaattgccagtcattcacagtgttactctttgaagcgctcaagtttatagtaaatgaattgctgtgctgttcatatacaaaagcttaaggttagcagataataaaagatggtgtggatggagagaggagttacaagtgatacttgctagcatgcaaaaataacagaaaatgggccaagaggaggattcttatagccaggcagaaatgtctgttagaatatgtaggaaaggatcacatcatcatagaac

SEQ ID NO: 697780 - DNA, 687 bp, Homo sapiens
ctacagtcttgagtagagttcagtgcttcttgggaatttaatagcagcaagggtttcctttgcaaaatatttttatacctaaatcttacatgaaaagggttgtttgctgactcactgattaactagacttggtttatgttaagcctttgagtcctttgttacagacatcatttgtgcccaagttgctttctcctcctgaaaccccattgctgacctgtaactagtctaatcttgcttgattatacgtttcccccgcccccatccctctgtaaaaccatcttttgtaccaaatgccgttgtatcttttgaatgatgtccactacaaaatagctttttacatagatcttgtagattttgaaaaatttttaactaacatgtcattgtatcttcataacaattctatgagagaggcatttataaaatacaaaatagcaatccacccayggggatggctgttacgtattttgtaaatgaagaaacaagaaatgggtggacgcgacttgcagcttagtggaaagccaggtttgaccaggtctctgggcttccagtccaccaaacctctagtagtgtttagaaacatttctggaagtctcccaatttttccaaaagtaggaaaaatttattatgtagattgagttgtctttaaagagacagctctaaaatattttacgattgatgttgttttaa

SEQ ID NO: 697781 - DNA, 2215 bp, Homo sapiens
gaaataaactttgtttttattttagttcagagcagctaaaatttcattccatcatatattttacagtcccatggactccggatattgaatagttttttttctttttttttttttttgagatggagttttgctcttatcgcctaggatggagtgcaatggcgccatcttggctcaccgcaacctccacctcccgggttcaagggattctcccacctcagcctccagagtagctggtattacaggcacccgccaccatgcctagctaatttttatatttttagtagagacggggttttgccatgttagccaggctggtctcgaactcctgacctcaggtgatccacccgcctcagcctccaaaagtgctgggattacaggcgtgagccaccgcgcccagccttgttttgttttttaatggagatggggtcttgctctattgcctaggctggcgggcaatggctattcacaggtgcaatcatagctcatcgcagcctcgaactcctgggctcaagtgatcgtcctacctcagcctcccaagtagcggggactacagatgtgccaccatgcttgactgaaagtgtttttcaagtgctgggtacttgttattccctctggcttcactgcatgtctaccagtaagagctgggataaaggtttacaggaagctggaggtccaagtttttggtaaaagaagagaagtaatcataactgatgattgctgaaaacaagtcagcatcttcttgctgccttgccccacttttttcttccttccttccttccttctttccttctttccctccctcccttccttccttccttttttttttcttttttgatggattttcgctctggttgatcaggctggagtgcaatggtacggtatcagctcactgcaacctctacctcccaggttcaagcaattcttatgcctcagccctcccaggtagctgggattacaggcatgcaccaccacacccagctaatttttttgtatttttaatagagacggggttctaccatgtcggtcaggctggtcttgaactcctgacctcaggtgatccacccacctcggcctcccaaagtgttgggattacaggtgtgagccactgcgcccggaccccactctttctttgtaggacacattgacagggcaggtggtaagcattggtctcaaaattatcagccacagccagaattgtgtacctactacatttcggccctagcctaaaaatgtacaatatgtcaaccagcttgcctggcttctgtgtgttgcagatagatgaggcagcacttktcttcctggaattaatgatatttatcaggaaatgggataaaaggacagcataaagggacagcaatgaaaattggggtcattcagcagcttcccatccatcttccttttactgtggaatgcagtgtggctccaaagagaaacaaacaccttgtttctgggaagttagcaagacctttggctcccattttatttcctcttcaaagctcatttaattcaagggcttatctactggccctaagagaataacttagctcaaaacaaaggcaactgctgcttattttgctcatgatttgtaagcctggctgccaccccgctgcctgcctgcaacacatctcttggttctggaccatgcctagtaaacattctgggtaaatacgggacgtttcctggaggctctgctattggcctgccacgtgatagatgctttgtgttaaggcacaagacagtatttataaagatacctactctttggaatgttgcaaagtaagagaggtttaagggaaagaaattgcatagctaaagttatgaaatgctagctggatcattactacagtgttttttttttttcttttcttggttgttgttttagcgcctccatcctttatagatgatttataactgggagagtattatttacccaggtggctttaacatttccgttttaaaatagtaaagccaactagatccaaaaatcatctgtgatatggaaaaagttggatgtacatttgagtgtatgtcattatcacaactatgtaaaaggaaaagtccagggtaagaatcctggtgagaaatacatgacaatgggcaccattctttcttgcatttgtgggtatttactctgtgcttcttcttctccaaggccattactcactttttatgatgctggcttatttataatttttttttttttttgagatggggt

SEQ ID NO: 697782 - DNA, 1020 bp, Homo sapiens
gtagagatgaggtttcaccattttggccgggctcatctttaactgctgacctcaggtgatccaccagcctcagcctcccaaagtgctgggattayaagcatgagccaccgctcccagcacgattatgtctttttatatgagaaaaatttattgagatcataaggaaaaaaaaatccctgagccaaaaaatgtcaaccaagaagaaaaagaaagtgagaagtaagaaaaatatgtattttagagaaagtgaagtgggcatagcaatcacattgaaatctgggtatagaacaaccttcatctctaaaatttatatttagtcaaccactatgctaagcaaggttgtggtaggaatacctgccacctattttaggccacatgtctcttacgggcaaaaagtaaagcaaagccataattgtggttcgatattttggatgtattaattctcatttcagcatttgcatagtctcacattttggaaaacaaaattgtggtgatttcacttgtctctccatatcatgattatattcaaaactaggaaacaaacgtagactaaagaagcaaatactaaagagtgagatcatgcaggttaaacagatactctttctcagggaaaagtcatttacccatcatgagctgatatactgttgtgagtttatatggtttagtgtatttacaacttaactaagtatacatgattcactgtgtactgtagaatataattaaattgacatttgctggtacggaataaatttgcacatcagtgaaataaatgatgaaaataaataaagtctgaggccagataattccattggttaccaatttatgtcttcagctctacaccaaagcaaacatttgtactggttcttttttttttttttttagtcacgctgtactttatttaaaggtggccatagcattaaagtgtgaattcattttgtacaaccagaaatggaaaaggagtcagtcaaggtggggcagaagtttctaacaaagtctaaagcatagttttatataactaat

SEQ ID NO: 697783 - DNA, 3542 bp, Homo sapiens
tgagtgccactcatgtggtatctaataaacagtcttcattcactagaaacataagagattttttttttttttttttgagacggagtctcgctctgtcacccaggctggagtgcagtggcgcgatctcggctcgctgcaggctccgctccccggggttcacgccattctcctgcctcagcctcccgagtagctgggactacaggcgccyttaaaagcctaaaggagaactaacattttattccttactacacctatctattgaatgtattttgcaagccatgtgtagtttcaaggtacaggaaatgtagcggtaaatgaaacaaagtccctgtcctcatatagcttatgttctaatacaggtcacagacaataaactagtaaaatgtatataaataatatgatttcagaaaatgatacttttttatggtatttatttttatgaaaaaaatatagtcttgtagtaatttgttatacaattttttcctgactaccttagcactacttgaaggcagggactatagcttataaataaactctgcagcaataagctatgctcattgattgatacatggtaaatacttgataaatgtctcaattaaggaaagaaaggaggaaataacttaaaggtaaaaattcaatacattcagtagtttgatacagattacttacattacaaggcaatgtcacatattaaaggaagaaaaacaaaaggttttaaagtcagaataaaatcattcctctaaaggactgttaaattccctaaaacatgattttgggggaataataaggtcctcaaaactagcattcaaagtattaaaccatcattgttgtgttaagtaaattatttggcctcttggagtcttgattttcttaccaatgaaataggaatgagagcataggaatgaacagctctcattatagaaaggggttgtaagcacaaatgagataaattatgatcctttgaaaagtacaaagtattacagagaaagcaatagcattaattctggcagcagtctggaatggagcagtaattccagtcatctggaaatacaggcagtagtgagtcatggctacagactcagagcagggaactggtttggataaagtgtgtgacaagttgtgggggatattaaaaggagctaggcagggtcaggcatggtggctcacgcctgtaatcccagcagtttgggaggccgaggcgggcggatcacctgaggtaggaagttcgagaccagcctggccaacatggggaaatcccgtctctactaaaaatacaaaaatcagccgagcgtggtggtgcatgcctgcaatccccgctactcgggaggctgaggcaggtgaatcgcttgaacccgggaggcagaggttgcagtggccactgcaccactccagcctggacaacagagcaagactccgtctcaaaaaaaaaaaacaaaaaacaaaaaacaaacatcggagctaggcaggttccacacccagagctagtggtcaggaatcaaatggcaaggaatcaaatctagtcatacaagccacagtcgggtcaaacctgaaaagacagttgcagtgaccatggatcctcaagaacagaataggaaggcaatataaagtttggtaaacagtcaggaatctggaaatgtgatgaacaaaaagaaggataatgtaaatgagaggccaaatttgagatcttcaaaaatgcagcaaggcagttttgtgcatcagctccagtgtatgtataaggatcctttgaaggaaagcattcactcttgaggagcaggtgctcaggattacatgattgaggtaagggaatgtaggtggagccgaaccaacactttctcctcaagaaaattctggcaataaatatcttagccagtttttagaagaatctttccagtcattcattttctaattggacagcaagataaagcttcatcaaatctctagacaaatttcccttgggacttatgccatgttttcatgataccacaaaatattttgaaagtaaaaaaactcaatcgtcgatgtatgcactcattattagatcctcagtatgtatggtttcagctatgaatgaaagcattgcctcctttcttgttgacctgagtttactaagtaattggctaaagttaattaatgaatcaattgtactgtagcaacatgcatgtgaatgctaggcaaaaccctcctgtggatgggagagaattactgtctttgggtaactgtttgtttgctttctatctctacattcaaaactgaccaaggaatgccactagctagacatgtgtagtgactaccagtgaacctcagggaggctcactcaggactggctacccccaggatggaggggtggcatgccagtaaggaacctggccttagcagcaagttggttttttttctgcaagtatcttctatttcttctccaaccaattttgttccccttggttcttgggaaccattatactgttaggttaatggatcattggtttatccacctgtacatttcctgaattttggccattcaaccatgcattcctggtgactgggtttataagtattagtttcctaggtccaacaccacatttggatatctcttaactataaattggtgtagtaaccgtgatatatcagcatagagatggctccatccattaaaaatatattggtattggtggtttcaaaaaattgtatatttgttactggcatctaaaacaaatgaatggccagatacaaaattgtacagaacccagattagtatctaataaagaattaataaagaatatgaattaatgtagatatatccatttacatattaattgtttttttcaaattggccaaatttttcaaaacaattacatattaaaaactgagatatacggaaattctaactaataggtttatagtcattcctagggtaggcattaacacttcttggtaagttctgtaagttaattatagtttaacttcctaattaattaattctgtaagtcaatttatagtttaacttcccagaggctttggtgtctttttttaccctcactttaaaatacacacaatagtatataatatatcacatttggtcaacagttcaaatttttttattctttaaagcatgtacaaaaaatatactagttagaattcctgtgaaaaattctaatacagaggaattatatggctatgtttggaaagataatatttctttaaaaatgtgttttctttatgttttatgtttgcaataaggattatttaagtttgattgaagaacttcatgattcttatgtattattttcttgtattgagaaatagtggcccattgttgggctgtatttaaaattaatgtgtatgaaacaagaaatatttaattagagttattaattttccacaagtaatatgtgtacttgacctaaatcagtatcttttatcatatcagcctcacatacaacaagaataatagcaaggacaacaacaacaaatttgaatgtttcctttgtgcctatgctcctaactatcatgttatactcattcatataaacctaacaattaatttg

SEQ ID NO: 697784 - DNA, 647 bp, Homo sapiens
taatgtatttattctattgactgcatgctttaacatcattataagctcaatgatttaaacayataaggtgtgcacctgctcattgcagtcatcatcatcatcatcatcatcattattttggtttgtttgtttttgagacagatcttgctttatggcccatgctggagtgcagtggcataatcacagctcaccgcatcctcagactcctgggcttaggtgaccctgccacctcagcctctcaagtagctgggactacagacacaagctaccatgcctggctaattttttgttttctatttttggtagacagaaggttttactatgttgcccaggcttgtcttgaacacctgggctaaagcaatccacctgccttggcttcccaaagtgttgggcttacaggtgtgaaccaccgtgcctggcttgtggtcatcaatattattgatgcttatattagttcatgtttggagagtgggacttccttcaagttgcctcttggatcctatggacacgatcctagggggtataaaagtgtccttgcattccagtatgacgagatgctctagattgattttgcacattgcctgcctgcagccagaaagcagccatttctccaagaagctttggttccttttagtgaatgatgacat

SEQ ID NO: 697785 - DNA, 647 bp, Homo sapiens
taatgtatttattctattgactgcatgctttaacatcattataagctcaatgatttaaacatataaggtgtgcacctgctcattgcagtcatcatcatcatcatcatcatcattattttggtttgtttgtttttgagacagatcttgctttatggcccatgctggagtgcagtggcataatcacagctcaccgcatcctcagactcctgggcttaggtgaccctgccacctcagcctctcaagtagctgggactacagacacaagctaccatgcctggctaattttttgttttctatttttggtagacagaaggttttactatgttgsccaggcttgtcttgaacacctgggctaaagcaatccacctgccttggcttcccaaagtgttgggcttacaggtgtgaaccaccgtgcctggcttgtggtcatcaatattattgatgcttatattagttcatgtttggagagtgggacttccttcaagttgcctcttggatcctatggacacgatcctagggggtataaaagtgtccttgcattccagtatgacgagatgctctagattgattttgcacattgcctgcctgcagccagaaagcagccatttctccaagaagctttggttccttttagtgaatgatgacat

SEQ ID NO: 697786 - DNA, 647 bp, Homo sapiens
taatgtatttattctattgactgcatgctttaacatcattataagctcaatgatttaaacatataaggtgtgcacctgctcattgcagtcatcatcatcatcatcatcatcattattttggtttgtttgtttttgagacagatcttgctttatggcccatgctggagtgcagtggcataatcacagctcaccgcatcctcagactcctgggcttaggtgaccctgccacctcagcctctcaagtagctgggactacagacacaagctaccatgcctggctaattttttgttttctatttttggtagacagaaggttttactatgttgcccaggcttgtcttgaacacctgggctaaagcaatccacctgccttggcttcccaaagtgtygggcttacaggtgtgaaccaccgtgcctggcttgtggtcatcaatattattgatgcttatattagttcatgtttggagagtgggacttccttcaagttgcctcttggatcctatggacacgatcctagggggtataaaagtgtccttgcattccagtatgacgagatgctctagattgattttgcacattgcctgcctgcagccagaaagcagccatttctccaagaagctttggttccttttagtgaatgatgacat

SEQ ID NO: 697787 - DNA, 371 bp, Homo sapiens
tttttgatgtgttgttgaattctacttcctaaatttttttttcctgatcagccatttatttttatatacatatatatattttattacactttaagttctagggtacatgtgcacaatgtgcaggtttgttacatatgtatacatgtgccatgttggtgtgctgcacccattaactcatcatttacagtaagtatatctcataatgctatccctcccccctccccccaccccacaacagacccaatgtgtgatgttccccttcctgtgtccaagtgttctctttgttcaattcccacctatgagttagaacatgtggtgtttggtyttttgtccttgtgatagtttgctgagaatgacagtttccagcttca

SEQ ID NO: 697788 - DNA, 946 bp, Homo sapiens
gcctacaacaaaggatttagaatattgataaacatagtaaaacagtggcagggtgtgagargactgactccaattttgaaagaagttctactatgggtaaaatgcttatcaaacagtatcgcatggtacactgaaatctttcgtggaaggaagagtcagttaatgtggcaaatttcattgttttcttttaagaaattgttacaaccacttcaatattcagcaaccatcgcccttatcaggcagcagccaacaacatcaaggcaagacccttcaccagcaaaaagactaagactccctgaaggctcaggtgatcattagcattttcagcaataaaagatttttatattttttctttgttttaaataattgagcttcaagtaagggcagcaagtagtttttcttctttttctttctgtttttcttttttcttttctttttttaaagacgtgttttgccatgttgtccaggctggtcttgaactcctgaattcaagtaatcaacctgtcttggcctcccaaagtgatgggattacaggtatgagccaccgaacccagccagcatcaagagttttaaaattaaggacataacgccatttcacactttaaatagactatagtgtagtgtaaacatagcttctttttttaaatagagacaggatctccctatatgcccaggttgatctcacaattcctgggctcaagtgaccctcccgcctccgtctcctaaagtactgggattataggcatgagccatcacacccagccaatataacttcatattcacaaggaaacaaaacaatttgtgtgactcactttgtagcaatatctgctttattgtggtggtctcgaatcaaatctacaatatctttgaggtatggctgtactttctaagcatttcctgagtcagcctactgtttctccatttttattgtcactattctatctat

SEQ ID NO: 697789 - DNA, 946 bp, Homo sapiens
gcctacaacaaaggatttagaatattgataaacatagtaaaacagtggcagggtgtgagaggactgactccaattttgaaagaagttctactatgggtaaaatgcttatcaaacagtatcgcatggtacactgaaatctttcgtggaaggaagagtcagttaatgtggcaaatttcattgttttcttttaagaaattgtkacaaccacttcaatattcagcaaccatcgcccttatcaggcagcagccaacaacatcaaggcaagacccttcaccagcaaaaagactaagactccctgaaggctcaggtgatcattagcattttcagcaataaaagatttttatattttttctttgttttaaataattgagcttcaagtaagggcagcaagtagtttttcttctttttctttctgtttttcttttttcttttctttttttaaagacgtgttttgccatgttgtccaggctggtcttgaactcctgaattcaagtaatcaacctgtcttggcctcccaaagtgatgggattacaggtatgagccaccgaacccagccagcatcaagagttttaaaattaaggacataacgccatttcacactttaaatagactatagtgtagtgtaaacatagcttctttttttaaatagagacaggatctccctatatgcccaggttgatctcacaattcctgggctcaagtgaccctcccgcctccgtctcctaaagtactgggattataggcatgagccatcacacccagccaatataacttcatattcacaaggaaacaaaacaatttgtgtgactcactttgtagcaatatctgctttattgtggtggtctcgaatcaaatctacaatatctttgaggtatggctgtactttctaagcatttcctgagtcagcctactgtttctccatttttattgtcactattctatctat

SEQ ID NO: 697790 - DNA, 1030 bp, Homo sapiens
ttctaaatgcatgcacctgagtaaaaggatctgggctgcagtctaggctgagagatgccagcaaaggctgcctaggccagtgcagtccagtaaatccctctttaatcttcttttccacacagacagcagtgatgagcatgcccacgaacccacatgattattttgggaaaaatgaaagagttgtattctttttgtggtagtaattccacttccaggggcaaatacattttgattattttatcacctttcagtgagttgtttttgttctttaaccaaggatgtatgtttgaggtaagaagtaaagcataaagtatatgattttttgtgtgtatttttatcttgctatacccatagggaatgtttaattctgccttggaagtggccatatttgaaggtgctgtgattcaaactgtcagcgagataaggcagcagatcaagaaagcactccgggctccagaaggagccttccaggccagctttgagcataagctgctgatgagcagtgagtgtcttgagtagtgttcagggcagcatgttaccattcatgcttgacttctagccagtgtgacgagaggctggagtcaggtctctagagagttgagcagctccagccttagatctcccagtcttatgcggtgtgcccattcgctttgtgtctgcagtcccctggccacacccagtaacagttctgggatctatgggagtagcttccttagtgagctttcccttcaaatactttgcaaccaggtagagaattttggagtgaaggttttgttcttygtttcttcacaatatggatatgcatcttcttttgaaaatgttaaagtaaattacctctcttttcagatactgtcttcatgcgaacttggtatcctgtttccatcccagccttctataacccagtaacatcttttttgaaaccagtgggtgagaaagacacctggtcaggaacgcggaccacaggacaactcaggctcacccacggcatcagactaaaggcaaacaaggactctgtataaagtaccggtgg

SEQ ID NO: 697791 - DNA, 3582 bp, Homo sapiens
ctccttagtcttttatttacttatatatgttatgatgctattatcaaatgaattactttattcatttgtttttcagttaacagtttgtcattggtgtatagaaacaagaatactatttgtatgttaattttgtaactctcaactttcaatgcgtttatcagctttaacactttttttcttttttatggagtctttaagattatctctatattggctgggcacggtggctcatgcctgtaatcccggcactttgggaggccgaagtgtgtggatcacgagatcaggagtttgagactagcctggccaatatggtgaaaccctgtctctactaaaaaaatacaaaaattagccgggcgtggtggcacgcacctgtagtcccagctacttgggagactgaggcaggagcagcacttgaacccggaggcggaggttgcagtgagctgagatggtgccactgcattccagcctctttcctatttggatgcctttctgttctttgccttgtatgattactctggctacatgattacatataacgttttcagcatttgtaatttgacatcacatccatctgttgtaatacactgattgttacttttcaacttgaaaacctggacatttatcactaatctccctttctcttcgcctagttcttatccaagaaaacaacctgtcaatataaaccaagttagataattatttttctataaaaccacttcaaatgcatttaaaattttttaacctaacaatttttaaactttgtatgttaatgattttcaactgtggtctctcaaaacaaatccaatacttttagtaggaaaaattacgttaattcctacactaccgttggggctacccaagagttgaccaaaggtgatattaatacatatgcttatttattaccctgttctcacagttctagtgtaagtcttgaaaatcaagtaaatttggaaacatagttgcacaaatcttctcatgagtcacacagttaatccagaatattatttctaagttatcataaagccaacaagcaaatatgatgtactgtttaaaaagaataatcataattttatattatacaaatgaaacatgtattcaatactgtttactgaatatctcaagtatacttatttacgtagaaacaaaggaatcaacggatatctgttatataacgtttaaattactaaaaatactttatatagcatcgctccataaatgctagtgtaaatgctgacgaaagtaaaaatgtcattccctacatttgctaaatatattgtgacacattataagtgtttttaaaacatatcactaaggggcaaaagaagtaggcaaaaataattgtaagtatttaattatggaaaaatttagaacacagcatagtattcatgtgatggaaggattttaaatggaacccagagattagcagcagcaggaagtttctatcatacttaggattgggaaaacaacagaagttactggaacacaaaagcagggtcatgttattaaaaactggggccatggtgagtgtctgtgaccattacctaatatgtcacactgaataaagacagatagcacatgatctgaggcttttttcttccacagatgccttccattggccagaattagcaagtatttagagtgcactgaagactgggagggtctgttctctgtaacagagtgaagagaaggagaaggtgagatgctcattaccttagtgatggcttcaatcgtaccccaaaactcagtatcacacrataaacctgcacatttttattcaatctaaaataaaagttgaatttaaaaaaaaatacagaaagcagtttagactttactaatcagtagtaaagtctttagagctgctcttccaaaagtaagccattgcactgagaaaactgaccattttattcatcagaagaaaaattcaatgaacctttactcactgacaatagtgagaatcagaatgaatgaatcagaatgtctgtcctaactactccctctggttctacttcaattcctgctgcctccatatggttcatcagtgtgtggaagatgaatgtggtaaaactgaagtggctgcttgtacttggagaacaacaacaatgcactgaaaattcactgcttagaagctgttgaaagagtttggcaataaatacaacctaatattcacaataaagagcaatgatctataagcccattttcacatctattgtaaaggccaaccatgtgtttcagccaaaacaaactgattttattaatacaatgaccagacatatataaataataatatgagtttattttaccagaggaattggctctcacacttgcattctattgtaggtttttacacttatccaattctaacaagagttggataaactcagggttttcctaaaataacaatgaccattcctcacaaaagagtcacaagcaaagtctacacctgaaaatgtgtagattgccttccatgtcctgtgtgcattaagaaacgttttatttttacacctggtatacggacaacatggatgaatatgttggctaattagaacaagtttatcaagttctttgaaacccttggtagacaaagtaattcaaggattcagcccagattagtagtgtgaaagcctgcaacaaaccaaactgtagaaaagtaataatgtaaatacaaatgtgatttcaatctccgcttggcgactgacctccctcagaccactaaactctgtgcatcagatgcattaacaatgagacattggtcactcactggggaggtgggcatggtgaaaacctttttttacccatagatctgggggaactgctgaaaagcctgaaatgcattcagttgatgcaccagacatcagttactgaagaagcagaggcaatgaacttcccttaacgttgacctaagtggataaacgcatggcaacatgctgagtgacttcaacaatgcagacacactcaatgtcaaaatgccacagggctacccggtgctgcaaggctgggactcggtttccgtaagactgtcttaaggcagtgagatttctgatggaactgtggacataagcatatgcccccatacgccactcccactactcactgtaggaacagcagtgtaacatttgtcccggctaatgatgacaaacaatccccaagtccctatgcaaaccaagtgctggggccacacagtggcctgagcaacatacctatgggtagtaactattgagaagacatttccaagggattgccattccaacaggcgtggggaatgctcaacatcaccaatcatcagagatgaggtaccggtgccatcacacgctggtcagagtggccatttgtcctaagtcaaaacataacatgctggtgtggcagcagagaaaagcaaacatggctattctcttggaggtaatgcaaactagatctcaaactgtggaaatcagtctgaagatttctggaaaaaaaaaaggacagaaagcagagctacgctttgacgcagcaatcccaccccgtgcgtctaccccagggaaaaacacatgcatctatcaaaaggacacagacactcacatgtccacgggagtgttactgacagga

SEQ ID NO: 697792 - DNA, 2382 bp, Homo sapiens
tttaaagcaaaggaaaccggtaccttaaggagttacctgccttcccatgtttcatgacagtattcgcaatatagaagatatggaatcaacctacctgtccatccatagatgaagggatgaagaaactgcagtatatctgcacaacacaatactcttcatccataattaatgtaattttcatttggagccatatggatgaacctggaaaatatgttaaataaaataagccaagcatagaaaaataaccacagattcatctcacttatatggaatccagaaaactttgccttggataagtagtggttttctgaggagaggggaaggagggaatgggaggattggttgtggaaacaaagttgcagttagttgggacagatacattcttgtgctctataccacagctccgtgattctggttaatactatatttttcaaaaaagccacagggagcaattccaatgttttcacaaaagaataatacctgtatgagagaacagatatgccaagtaccctgatttgatcattactaaaaatatacatgaatcaaaatgtgccagaggaaaaacagtcccagcagactctctaattatatactttactatgcacagaaatttaagaaacgtgaatacacaatgctgatgatcacatggaaccacaaatggccctgaatgtctaaggaatcctgagaaatagaaactaagttggaggactcacaatccctgatatgccgctgtgctccagcctgggtgagagaatgaaactctgtctcaaaaaaattgttagaacatttgaaggaaacatagaagtgataactacaaggactctgtcactcaggctggaatgcagtggcatgatcatggctcactgcagccttgacctctctggcacaagtgatcctcccacttctgcctcctgaatagctggaactacaggcacacaccaccacgcctggctaatttctttgtattttttgtagagatgaacttttgccatgttgcctaggctggtctcaaattctttggctcaagtgatctgcccaccttggccttgcaaagtgcttggattacaggcaccagccattatgcctggccataagaaaacatgcatggcaacatcaaagtgaaaagtttttgcaaggaaaaggaaacaatgaacccaaaaagaaaggctgggagaatgttttgaggaatcacgaatcagctaaggggttgttatggaaaatatacaacacattaacagtactaagtagcaacaaaaaaaccaatgatccatccaaaaatgagcagggaccctgaatagacatttctgcaaagaggacagtaaaccacactcaaggtcccttcccccagtcaggtggccatgactagagggacagagttaggcaggcactgcagggagtggagaaatgtgacccctacgtcctgatagcagggatacagatttaaaaattcaccagaccgggtgcagtagttaatgcctgtaatcccagcactttgggaagttgaggcgcgaggactgctttgagctcagaagtttgagacaagcccaagcaacatggcgaaaccctgttgctaccaaaaatacaaaaaaaaaaaatagctgggcatggtggcataggccaaaatactgttgaggctgaggctggagaatcccttgggcccagaaaatggaggttgcagtgagctgagatccaccactgcactccagcccgggcaacagagcaagactgtatctccaaaaaataaaaataaaaataaaaacaattaaaaaatcagcaaaccctggaggttaagttggatcctttccttccatctgaggcttgaaagcaaggcagccaaactggggcctggccccaaaaccccacctgggccaggcttccccttcctcccacagccagagctttcctctccacctacatggggagtctccctcagaaacagccctaaagcctcccacacattccaaactcaaaagccctcagggaatgagtactactgtaaaattaatggcaagatatcaagagagaaaaaaggagtgagaatctagcagaaatrcacagaacattccacaaaacgaaagcttctgtactcaccatgaaagaaaaacgccccaaagaagctgggccacggagaagccacgccgaagcactgtcctcagcagtcagcaccatggacaggaggtgtttcttccccaggatgcgccctcaagttatcccaaagctgctgcagcacctggtggctcctgataattctaaaattcatatgggaaaaaaaaaacgagcccacatagccaaagcaagactaagcagaaagaacaaatctggaggcattacattacctgacttcaatctatactacaaacccatagtcagcaaaacagcata

SEQ ID NO: 697793 - DNA, 2382 bp, Homo sapiens
tttaaagcaaaggaaaccggtaccttaaggagttacctgccttcccatgtttcatgacagtattcgcaatatagaagatatggaatcaacctacctgtccatccatagatgaagggatgaagaaactgcagtatatctgcacaacacaatactcttcatccataattaatgtaattttcatttggagccatatggatgaacctggaaaatatgttaaataaaataagccaagcatagaaaaataaccacagattcatctcacttatatggaatccagaaaactttgccttggataagtagtggttttctgaggagaggggaaggagggaatgggaggattggttgtggaaacaaagttgcagttagttgggacagatacattcttgtgctctataccacagctccgtgattctggttaatactatatttttcaaaaaagccacagggagcaattccaatgttttcacaaaagaataatacctgtatgagagaacagatatgccaagtaccctgatttgatcattactaaaaatatacatgaatcaaaatgtgccagaggaaaaacagtcccagcagactctctaattatatactttactatgcacagaaatttaagaaacgtgaatacacaatgctgatgatcacatggaaccacaaatggccctgaatgtctaaggaatcctgagaaatagaaactaagttggaggactcacaatccctgatatgccgctgtgctccagcctgggtgagagaatgaaactctgtctcaaaaaaattgttagaacatttgaaggaaacatagaagtgataactacaaggactctgtcactcaggctggaatgcagtggcatgatcatggctcactgcagccttgacctctctggcacaagtgatcctcccacttctgcctcctgaatagctggaactacaggcacacaccaccacgcctggctaatttctttgtattttttgtagagatgaacttttgccatgttgcctaggctggtctcaaattctttggctcaagtgatctgcccaccttggccttgcaaagtgcttggattacaggcaccagccattatgcctggccataagaaaacatgcatggcaacatcaaagtgaaaagtttttgcaaggaaaaggaaacaatgaacccaaaaagaaaggctgggagaatgttttgaggaatcacgaatcagctaaggggttgttatggaaaatatacaacacattaacagtactaagtagcaacaaaaaaaccaatgatccatccaaaaatgagcagggaccctgaatagacatttctgcaaagaggacagtaaaccacactcaaggtcccttcccccagtcaggtggccatgactagagggacagagttaggcaggcactgcagggagtggagaaatgtgacccctacgtcctgatagcagggatacagatttaaaaattcaccagaccgggtgcagtagttaatgcctgtaatcccagcactttgggaagttgaggcgcgaggactgctttgagctcagaagtttgagacaagcccaagcaacatggcgaaaccctgttgctaccaaaaatacaaaaaaaaaaaatagctgggcatggtggcataggccaaaatactgttgaggctgaggctggagaatcccttgggcccagaaaatggaggttgcagtgagctgagatccaccactgcactccagcccgggcaacagagcaagactgtatctccaaaaaataaaaataaaaataaaaacaattaaaaaatcagcaaaccctggaggttaagttggatcctttccttccatctgaggcttgaaagcaaggcagccaaactggggcctggccccaaaaccccacctgggccaggcttccccttcctcccacagccagagctttcctctccacctacatggggagtctccctcagaaacagccctaaagcctcccacacattccaaactcaaaagccctcagggaatgagtactactgtaaaattaatggcaagatatcaagagagaaaaaaggagtgagaatctagcagaaatgcacagaacattccacaaaacgaaagcttctgtactcaccatgaaagaaaaacgccccaaagaagctgggccacggagaagccacgccgaagcactgtcctcagcagtyagcaccatggacaggaggtgtttcttccccaggatgcgccctcaagttatcccaaagctgctgcagcacctggtggctcctgataattctaaaattcatatgggaaaaaaaaaacgagcccacatagccaaagcaagactaagcagaaagaacaaatctggaggcattacattacctgacttcaatctatactacaaacccatagtcagcaaaacagcata

SEQ ID NO: 697794 - DNA, 1313 bp, Homo sapiens
acatttctttccttcataacttttcttaccatcaatacatcttcacatctacaactttctttagatctctctcccctactaatttctgatgtccacctaaaccaaaaaggtcagataacgcaaggcaaaacagaggagagccttaggttttgagaaggacctgtctgcttaaagttcttggggttccatgaggaaaacagagtttctcctaaaatggggtttgtcgaaccttctatttttccttaaggagtcccaggctgtcagaaattaccttagatcctctcacgtgagcatcaagagtggcaacaagacagacaagggaaataattcggacaactgagcagaaaaagaaaaacttactactgtcsccaccataaagatggataaactgaggcaccatgcagtttaaaaattcatgttcacatagagttaggctccacagctcactctcttaccatcctgcaattttgccaactctatgcccagtcactgatgcccctgtatggtagctcatggtcccctaggaacttagaacctgagtttcattcctgctctacagctatataattttacaattttcttctgaatttgttggattctaaccctgtgtatctcaaattttattaatattactgaaccttaaagggggctgtgatgacttttgtcttcagaaatattaaacctacaaacaaggcctatatgaggttaaacagtattcaaattcctatatgctttaaaacatggatgcaatttattgagaaacacacctatgaaactgcacccaatcaactctggacaaacatttagatattatctcttcaatataagctatctagtggtaattagacatattcttccatatatcaacagtatcttacatgctcataaccttaaacataactgaaaagtgtccaaattacaggccttacacattactgtgggcttgaaaaataatatagattgtctttaaagcaggcaagaaaatgtataaacttccagaagaatgagtaaaaataaaaataaaaaaacggttcacaccaaaggtagtaatactaggaataaaagagggctcaacactgcaggttcttagaggcaaaagttaataaagccttgtttttggttgtgactctttgccttaaaacattatacacggccaggcatggtggctcatgcctgtaattccagcactttgggaggccaaggcaggtggatcacctgaggtcaggtgttctagaccagcctgaccaacatggtgaaaccctgtctctactaaacatacaaaaattagccgggcatggtggcaggtacctgta

SEQ ID NO: 697795 - DNA, 588 bp, Homo sapiens
tctcttccccccgcttctccaaccctaggcaaccacgaatctactttgtctctgtagatttgcctattctggatattttctgtaaatggagttttagaatatgtggccttttacgattagcttctttcacttagcataatgttcccaaggttcatccgtgtgaaatcaaagctttttaaaagaaatttgatactttggcaattatattagtgtaygacaaaaataaatcagtggctctttaaaaatgtatatggtaatttagggggttgattttaatgtatttttttacatttttttgtacgtttgtcacggaagaaatgttggataaagagtaatttgtcaagtctcaactaatttaggtttaattcatgctttgcacaaaaattttgtgtttaggctgttgaaagcttcacaagaccattgttaagaggcgaatgtcccatgtgagtggaggaggacccatagatttgtctgacacagactccctacaggcatggatcaacatgactagcttcctttgtgcccttgggggagtgtgcctccagcagagaaggaattctggcctggcaacctatagcccacccatgg

SEQ ID NO: 697796 - DNA, 588 bp, Homo sapiens
tctcttccccccgcttctccaaccctaggcaaccacgaatctactttgtctctgtagatttgcctattctggatattttctgtaaatggagttttagaatatgtggccttttacgattagcttctttcacttagcataatgttcccaaggttcatccgtgtgaaatcaaagctttttaaaagaaatttgatactttggcaattatattagtgtatgacaaaaataaatcagtggctctttaaaaatgtatatggtaatttagggggttgattttaatgtatttttttacatttttttgtacgtttgtcacggaagaaatgttggataaagagtaatttgtcaagtctcaactaatttaggtttaattcatgctttgcacaaaaattttgtgtttaggctgttgaaagcttcacaagaccattgttaagaggcgaatgtcccatgtgagtggaggaggacccatagatttgtctgacacagactccctacaggcatggatcaacatgactagcttcctttgtgcccttgggggagtgtgcctccagcagagaaggaattctggcctggcaacctatagcccacccrtgg

SEQ ID NO: 697797 - DNA, 2570 bp, Homo sapiens
gtaatagttggttttaaaatgtcgtttctggccaggtgtggtgactctaacctataatcccagcacattgagaggccaaggaaggaggmtcgcttgagtccaggagtttgagaccagcctgggcaacataataagaccctgtctctacaaaaagagtttttaaaaattagctgggcatggtggcgtgcacctactcaggaggctgaggcaggaggattgcttgagcctgggagttgaaggctgcagtgagctgtgattctgccaccctactccagcccgggtgaaagagtgagaccctgtctcaaaatgaaggaatgaatgaataaaacaaataaaaataaattatcgtttataatacagccaaagagaccatctgctagctcattcggccacttcctaggatcagaaaggagattagtgtaaacatgcatatgcactgattgggcaaagcccttctcaggactttcactcaattcagggttgctgctgttgtttgttctcaatatgtttttaaacagtaaataagttagcatggataaaaaccactatattaaccaaaatacatgtctgaaattaatctaaatgttcttcagtatactcaagaagatgctttgacccatgggtctcaaatactaaactcgaattgcttcagaagaagcataaagtcattaaaaatttcagaaagcaatatgtgtatgtctatgtgtgtacatgcatagacacatacataatttcttctaaagattactatcaattttggtttcaaacttattgaatcaacatgatgatatcattaatagttacattatttatgtatttacagaatgaaatgccaagaggcatatgtattttccctccctcaccttccaattttcttatgcaacaagttggcaagcctagtggtttatgaggaaatctgttagagagtaagtagtggacacactgtcttatgataacatttgctctttctttctccagtctaaattatatagttcacttgattgttgtagttacgaagttgtatttgttcacgtgtctgtctccccattggacagtgagtccaggagagcagggattatgatttttatctctgtatctaatcacttttctgcccccaggagccagctaccttattcagtaaatggatgctcttccacatggtaatcttgattggtcaatttctgtactatataaggttttgggaagcagagatggacaatgataagagagagtagacgaaaggaagatgaggttatagggagaatgtgggaaaggaaagaaggggatatcttcatagagcaggaagcaaaattggaagtcaaagtgtccagtggcagtggtgaaaagtgttgaccaacctcgatttggtgaaggtggcgtcacatcaatttaaacttttcatggggaagcagggtatttctcaacctaatgcttatggagaattggcctctgtatttccctccagactttcacggactactcagcctagcccaaacatgagccagatgccgaatggactgccaatgtgaaaattattcgatttgattaagaaacaatttaatcttattctggtttgtatttaaagcctgctaatatcaaagtacacagaattttcatttttgtatcagcaacttagatgccatttagaagctgtgccaccctgaaattaaaagcacaagtgctagagtcagctttcaccattcccctagaagagatcagcttttttggtgttaacaatgtgttctatagcaggaaggcaagactactgtccaagatctgacctcctttcctatctcctggagggctgtgatgagggccactgctgctggctgtgagggtctccatttccctgcccctcaaccctgtaccctcagtgcacacaccacctttccttttttacattgcagactagctgtgtcttctggtggccacatagcttcagaagtgtggtttttagtaggtacagatctactaggacctttcattcagttaaagcttctaggaactgaaagacaacaggaggcgaggagagcaggagaaagaggaagcatggagtattagaagataaacgatcctcatttcaaatgaagactgcttaatgaaaaatctccttaaggcactatttcccaaacttgcctgttcatcagtgtgaattacacaggacccctgggaaaaatccagactcctggctgccattttagaaccactaaatagatctgcagaggtaagagtctggataatgtgtattttcaacatgccctggaaattccaacagtcaggcaaattagggaatcactaatttagaagaagtccactccatcaacttaagttgttaagatttgaatagatcaggattagctctcaaaaatgcattgcttcttgaagtaaacatttcaacagaattaaattttgaaagaattaaatcccctaatgctatcccttccctagctccccacaggccccaatgtgtgatgttcccctccatgtgtccatgtgttttcattgttcaactcccacttatgagtgagaacatgtggtgtttggttttctgttcctgtgttagtttgctg

SEQ ID NO: 697798 - DNA, 2570 bp, Homo sapiens
gtaatagttggttttaaaatgtcgtttctggccaggtgtggtgactctaacctataatcccagcacattgagaggccaaggaaggaggctcgcttgagtccaggagtttgagaccagcctgggcaacataataagaccctgtctctacaaaaagagtttttaaaaattagctgggcatggtggcgtgcacctactcaggaggctgaggcaggaggattgcttgagcctgggagttgaaggctgcagtgagctgtgattctgccaccctactccagcccgggtgaaagagtgagaccctgtctcaaaatgaaggaatgaatgaataaaacaaataaaaataaattatcgtttataatacagccaaagagaccatctgctagctcattcggccacttcctaggatcagaaaggagattagtgtaaacatgcatatgcactgattgggcaaagcccttctcaggactttcactcaattcagggttgctgctgttgtttgttctcaatatgtttttaaacagtaaataagttagcatggataaaaaccactatattaaccaaaatacatgtctgaaattaatctaaatgttcttcagtatactcaagaagatgctttgacccatgggtctcaaatactaaactcgaattgcttcagaagaagcataaagtcattaaaaatttcagaaagcaatatgtgtatgtctatgtgtgtacatgcatagacacatacataatttcttctaaagattactatcaattttggtttcaaacttattgaatcaacatgatgatatcattaatagttacattatttatgtatttacagaatgaaatgccaagaggcatatgtattttccctccctcaccttccaattttcttatgcaacaagttggcaagcctagtggtttatgaggaaatctgttagagagtaagtagtggacacactgtcttatgataacatttgctctttctttctccagtctaaattatatagttcacttgattgttgtagttacgaagttgtatttgttcacgtgtctgtctccccattggacagtgagtccaggagagcagggattatgatttttatctctgtatctaatcacttttctgcccccaggagccagctaccttattcagtaaatggatgctcttccacatggtaatcttgattggtcaatttctgtactatataaggttttgggaagcagagatggacaatgataagagagagtagacgaaaggaagatgaggttatagggagaatgtgggaaaggaaagaaggggatatcttcatagagcaggaagcaaaattggaagtcaaagtgtccagtggcagtggtgaaaagtgttgaccaacctcgatttggtgaaggtggcgtcacatcaatttaaacttttcatggggaagcagggtatttctcaacctaatgcttatggagaattggcctctgtatttccctccagactttcacggactactcagcctagcccaaacatgagccagatgccgaatggactgccaatgtgaaaattattcgatttgattaagaaacaatttaatcttattctggtttgtatttaaagcctgctaatatcaaagtacacagaattttcatttttgtatcagcaacttagatgccatttagaagctgtgccaccctgaaattaaaagcacaagtgctagagtcagctttcaccattcccctagaagagatcagcttttttggtgttaacaatgtgttctatagcaggaaggcaagactactgtccaagatctgacctcctttcctatctcctggagggctgtgatgagggccactgctgctggctgtgagggtctccatttccctgcccctcaaccctgtaccctcagtgcacacaccacctttccttttttacattgcagactagctgtgtcttctggtggccacatagcttcagaagtgtggtttttagtaggtacagatctactaggacctttcattcagttaaagcttctaggaactgaaagacaacaggaggcgaggagagcaggagaaagaggaagcatggagtattagaagataaacgatcctcatttcaaatgaagactgcttaatgaaaaatctccttaaggcactatttcccaaacttgcctgttcatcagtgtgaattacacaggacccctgggaaaaatccagacycctggctgccattttagaaccactaaatagatctgcagaggtaagagtctggataatgtgtattttcaacatgccctggaaattccaacagtcaggcaaattagggaatcactaatttagaagaagtccactccatcaacttaagttgttaagatttgaatagatcaggattagctctcaaaaatgcattgcttcttgaagtaaacatttcaacagaattaaattttgaaagaattaaatcccctaatgctatcccttccctagctccccacaggccccaatgtgtgatgttcccctccatgtgtccatgtgttttcattgttcaactcccacttatgagtgagaacatgtggtgtttggttttctgttcctgtgttagtttgctg

SEQ ID NO: 697799 - DNA, 2570 bp, Homo sapiens
gtaatagttggttttaaaatgtcgtttctggccaggtgtggtgactctaacctataatcccagcacattgagaggccaaggaaggaggctcgcttgagtccaggagtttgagaccagcctgggcaacataataagaccctgtctctacaaaaagagtttttaaaaattagctgggcwtggtggcgtgcacctactcaggaggctgaggcaggaggattgcttgagcctgggagttgaaggctgcagtgagctgtgattctgccaccctactccagcccgggtgaaagagtgagaccctgtctcaaaatgaaggaatgaatgaataaaacaaataaaaataaattatcgtttataatacagccaaagagaccatctgctagctcattcggccacttcctaggatcagaaaggagattagtgtaaacatgcatatgcactgattgggcaaagcccttctcaggactttcactcaattcagggttgctgctgttgtttgttctcaatatgtttttaaacagtaaataagttagcatggataaaaaccactatattaaccaaaatacatgtctgaaattaatctaaatgttcttcagtatactcaagaagatgctttgacccatgggtctcaaatactaaactcgaattgcttcagaagaagcataaagtcattaaaaatttcagaaagcaatatgtgtatgtctatgtgtgtacatgcatagacacatacataatttcttctaaagattactatcaattttggtttcaaacttattgaatcaacatgatgatatcattaatagttacattatttatgtatttacagaatgaaatgccaagaggcatatgtattttccctccctcaccttccaattttcttatgcaacaagttggcaagcctagtggtttatgaggaaatctgttagagagtaagtagtggacacactgtcttatgataacatttgctctttctttctccagtctaaattatatagttcacttgattgttgtagttacgaagttgtatttgttcacgtgtctgtctccccattggacagtgagtccaggagagcagggattatgatttttatctctgtatctaatcacttttctgcccccaggagccagctaccttattcagtaaatggatgctcttccacatggtaatcttgattggtcaatttctgtactatataaggttttgggaagcagagatggacaatgataagagagagtagacgaaaggaagatgaggttatagggagaatgtgggaaaggaaagaaggggatatcttcatagagcaggaagcaaaattggaagtcaaagtgtccagtggcagtggtgaaaagtgttgaccaacctcgatttggtgaaggtggcgtcacatcaatttaaacttttcatggggaagcagggtatttctcaacctaatgcttatggagaattggcctctgtatttccctccagactttcacggactactcagcctagcccaaacatgagccagatgccgaatggactgccaatgtgaaaattattcgatttgattaagaaacaatttaatcttattctggtttgtatttaaagcctgctaatatcaaagtacacagaattttcatttttgtatcagcaacttagatgccatttagaagctgtgccaccctgaaattaaaagcacaagtgctagagtcagctttcaccattcccctagaagagatcagcttttttggtgttaacaatgtgttctatagcaggaaggcaagactactgtccaagatctgacctcctttcctatctcctggagggctgtgatgagggccactgctgctggctgtgagggtctccatttccctgcccctcaaccctgtaccctcagtgcacacaccacctttccttttttacattgcagactagctgtgtcttctggtggccacatagcttcagaagtgtggtttttagtaggtacagatctactaggacctttcattcagttaaagcttctaggaactgaaagacaacaggaggcgaggagagcaggagaaagaggaagcatggagtattagaagataaacgatcctcatttcaaatgaagactgcttaatgaaaaatctccttaaggcactatttcccaaacttgcctgttcatcagtgtgaattacacaggacccctgggaaaaatccagactcctggctgccattttagaaccactaaatagatctgcagaggtaagagtctggataatgtgtattttcaacatgccctggaaattccaacagtcaggcaaattagggaatcactaatttagaagaagtccactccatcaacttaagttgttaagatttgaatagatcaggattagctctcaaaaatgcattgcttcttgaagtaaacatttcaacagaattaaattttgaaagaattaaatcccctaatgctatcccttccctagctccccacaggccccaatgtgtgatgttcccctccatgtgtccatgtgttttcattgttcaactcccacttatgagtgagaacatgtggtgtttggttttctgttcctgtgttagtttgctg

SEQ ID NO: 697800 - DNA, 2570 bp, Homo sapiens
gtaatagttggttttaaaatgtcgtttctggccaggtgtggtgactctaacctataatcccagcacattgagaggccaaggaaggaggctcgcttgagtccaggagtttgagaccagcctgggcaacataataagaccctgtctctacaaaaagagtttttaaaaattagctgggcatggtggcrtgcacctactcaggaggctgaggcaggaggattgcttgagcctgggagttgaaggctgcagtgagctgtgattctgccaccctactccagcccgggtgaaagagtgagaccctgtctcaaaatgaaggaatgaatgaataaaacaaataaaaataaattatcgtttataatacagccaaagagaccatctgctagctcattcggccacttcctaggatcagaaaggagattagtgtaaacatgcatatgcactgattgggcaaagcccttctcaggactttcactcaattcagggttgctgctgttgtttgttctcaatatgtttttaaacagtaaataagttagcatggataaaaaccactatattaaccaaaatacatgtctgaaattaatctaaatgttcttcagtatactcaagaagatgctttgacccatgggtctcaaatactaaactcgaattgcttcagaagaagcataaagtcattaaaaatttcagaaagcaatatgtgtatgtctatgtgtgtacatgcatagacacatacataatttcttctaaagattactatcaattttggtttcaaacttattgaatcaacatgatgatatcattaatagttacattatttatgtatttacagaatgaaatgccaagaggcatatgtattttccctccctcaccttccaattttcttatgcaacaagttggcaagcctagtggtttatgaggaaatctgttagagagtaagtagtggacacactgtcttatgataacatttgctctttctttctccagtctaaattatatagttcacttgattgttgtagttacgaagttgtatttgttcacgtgtctgtctccccattggacagtgagtccaggagagcagggattatgatttttatctctgtatctaatcacttttctgcccccaggagccagctaccttattcagtaaatggatgctcttccacatggtaatcttgattggtcaatttctgtactatataaggttttgggaagcagagatggacaatgataagagagagtagacgaaaggaagatgaggttatagggagaatgtgggaaaggaaagaaggggatatcttcatagagcaggaagcaaaattggaagtcaaagtgtccagtggcagtggtgaaaagtgttgaccaacctcgatttggtgaaggtggcgtcacatcaatttaaacttttcatggggaagcagggtatttctcaacctaatgcttatggagaattggcctctgtatttccctccagactttcacggactactcagcctagcccaaacatgagccagatgccgaatggactgccaatgtgaaaattattcgatttgattaagaaacaatttaatcttattctggtttgtatttaaagcctgctaatatcaaagtacacagaattttcatttttgtatcagcaacttagatgccatttagaagctgtgccaccctgaaattaaaagcacaagtgctagagtcagctttcaccattcccctagaagagatcagcttttttggtgttaacaatgtgttctatagcaggaaggcaagactactgtccaagatctgacctcctttcctatctcctggagggctgtgatgagggccactgctgctggctgtgagggtctccatttccctgcccctcaaccctgtaccctcagtgcacacaccacctttccttttttacattgcagactagctgtgtcttctggtggccacatagcttcagaagtgtggtttttagtaggtacagatctactaggacctttcattcagttaaagcttctaggaactgaaagacaacaggaggcgaggagagcaggagaaagaggaagcatggagtattagaagataaacgatcctcatttcaaatgaagactgcttaatgaaaaatctccttaaggcactatttcccaaacttgcctgttcatcagtgtgaattacacaggacccctgggaaaaatccagactcctggctgccattttagaaccactaaatagatctgcagaggtaagagtctggataatgtgtattttcaacatgccctggaaattccaacagtcaggcaaattagggaatcactaatttagaagaagtccactccatcaacttaagttgttaagatttgaatagatcaggattagctctcaaaaatgcattgcttcttgaagtaaacatttcaacagaattaaattttgaaagaattaaatcccctaatgctatcccttccctagctccccacaggccccaatgtgtgatgttcccctccatgtgtccatgtgttttcattgttcaactcccacttatgagtgagaacatgtggtgtttggttttctgttcctgtgttagtttgctg

SEQ ID NO: 697801 - DNA, 2570 bp, Homo sapiens
gtaatagttggttttaaaatgtcgtttctggccaggtgtggtgactctaacctataatcccagcacattgagaggccaaggaaggaggctcgcttgagtccaggagtttgagaccagcctgggcaacataataagaccctgtctctacaaaaagagtttttaaaaattagctgggcatggtggcgtgcacctactcaggaggctgaggcaggaggattgcttgagcctgggagttgaaggctgcagtgagctgtgattctgccaccctactccagcccgggtgaaagagtgagaccctgtctcaaaatgaaggaatgaatgaataaaacaaataaaaataaattatcgtttataatacagccaaagagaccatctgctagctcattcggccacttcctaggatcagaaaggagattagtgtaaacatgcatatgcactgattgggsaaagcccttctcaggactttcactcaattcagggttgctgctgttgtttgttctcaatatgtttttaaacagtaaataagttagcatggataaaaaccactatattaaccaaaatacatgtctgaaattaatctaaatgttcttcagtatactcaagaagatgctttgacccatgggtctcaaatactaaactcgaattgcttcagaagaagcataaagtcattaaaaatttcagaaagcaatatgtgtatgtctatgtgtgtacatgcatagacacatacataatttcttctaaagattactatcaattttggtttcaaacttattgaatcaacatgatgatatcattaatagttacattatttatgtatttacagaatgaaatgccaagaggcatatgtattttccctccctcaccttccaattttcttatgcaacaagttggcaagcctagtggtttatgaggaaatctgttagagagtaagtagtggacacactgtcttatgataacatttgctctttctttctccagtctaaattatatagttcacttgattgttgtagttacgaagttgtatttgttcacgtgtctgtctccccattggacagtgagtccaggagagcagggattatgatttttatctctgtatctaatcacttttctgcccccaggagccagctaccttattcagtaaatggatgctcttccacatggtaatcttgattggtcaatttctgtactatataaggttttgggaagcagagatggacaatgataagagagagtagacgaaaggaagatgaggttatagggagaatgtgggaaaggaaagaaggggatatcttcatagagcaggaagcaaaattggaagtcaaagtgtccagtggcagtggtgaaaagtgttgaccaacctcgatttggtgaaggtggcgtcacatcaatttaaacttttcatggggaagcagggtatttctcaacctaatgcttatggagaattggcctctgtatttccctccagactttcacggactactcagcctagcccaaacatgagccagatgccgaatggactgccaatgtgaaaattattcgatttgattaagaaacaatttaatcttattctggtttgtatttaaagcctgctaatatcaaagtacacagaattttcatttttgtatcagcaacttagatgccatttagaagctgtgccaccctgaaattaaaagcacaagtgctagagtcagctttcaccattcccctagaagagatcagcttttttggtgttaacaatgtgttctatagcaggaaggcaagactactgtccaagatctgacctcctttcctatctcctggagggctgtgatgagggccactgctgctggctgtgagggtctccatttccctgcccctcaaccctgtaccctcagtgcacacaccacctttccttttttacattgcagactagctgtgtcttctggtggccacatagcttcagaagtgtggtttttagtaggtacagatctactaggacctttcattcagttaaagcttctaggaactgaaagacaacaggaggcgaggagagcaggagaaagaggaagcatggagtattagaagataaacgatcctcatttcaaatgaagactgcttaatgaaaaatctccttaaggcactatttcccaaacttgcctgttcatcagtgtgaattacacaggacccctgggaaaaatccagactcctggctgccattttagaaccactaaatagatctgcagaggtaagagtctggataatgtgtattttcaacatgccctggaaattccaacagtcaggcaaattagggaatcactaatttagaagaagtccactccatcaacttaagttgttaagatttgaatagatcaggattagctctcaaaaatgcattgcttcttgaagtaaacatttcaacagaattaaattttgaaagaattaaatcccctaatgctatcccttccctagctccccacaggccccaatgtgtgatgttcccctccatgtgtccatgtgttttcattgttcaactcccacttatgagtgagaacatgtggtgtttggttttctgttcctgtgttagtttgctg

SEQ ID NO: 697802 - DNA, 2570 bp, Homo sapiens
gtaatagttggttttaaaatgtcgtttctggccaggtgtggtgactctaacctataatcccagcacattgagaggccaaggaaggaggctcgcttgagtccaggagtttgagaccagcctgggcaacataataagaccctgtctctacaaaaagagtttttaaaaattagctgggcatggtggcgtgcacctactcaggaggctgaggcaggaggattgcttgagcctgggagttgaaggctgcagtgagctgtgattctgccaccctactccagcccgggtgaaagagtgagaccctgtctcaaaatgaaggaatgaatgaataaaacaaataaaaataaattatcgtttataatacagccaaagagaccatctgctagctcattcggccacttcctaggatcagaaaggagattagtgtaaacatgcatatgcactgattgggcaaagcccttctcaggactttcactcaattcagggttgctgctgttgtttgttctcaatatgtttttaaacagtaaataagttagcatggataaaaaccactatattaaccaaaatacatgtctgaaattaatctaaatgttcttcagtatactcaagaagatgctttgacccatgggtctcaaatactaaactcgaattgcttcagaagaagcataaagtcattaaaaatttcagaaagcaatatgtgtatgtctatgtgtgtacatgcatagacacatacataatttcttctaaagattactatcaattttggtttcaaacttattgaatcaacatgatgatatcattaatagttacattatttatgtatttacagaatgaaatgccaagaggcatatgtattttccctccctcaccttccaattttcttatgcaacaagttggcaagcctagtggtttatgaggaaatctgttagagagtaagtagtggacacactgtcttatgataacatttgctctttctttctccagtctaaattatatagttcacttgattgttgtagttacgaagttgtatttgttcacgtgtctgtctccccattggacagtgagtccaggagagcagggattatgatttttatctctgtatctaatcacttttctgcccccaggagccagctaccttattcagtaaatggatgctcttccacatggtaatcttgattggtcaatttctgtactatataaggttttgggaagcagagatggacaatgataagagagagtagacgaaaggaagatgaggttatagggagaatgtgggaaaggaaagaaggggatatcttcatagagcaggaagcaaaattggaagtcaaagtgtccagtggcagtggtgaaaagtgttgaccaacctcgatttggtgaaggtggcgtcacatcaatttaaacttttcatggggaagcagggtatttctcaacctaatgcttatggagaattggcctctgtatttccctccagactttcacggactactcagcctagcccaaacatgagccagatgccgaatggactgccaatgtgaaaattattcgatttgattaagaaacaatttaatcttattctggtttgtatttaaagcctgctaatatcaaagtacacagaattttcatttttgtatcagcaacttagatgccatttagaagctgtgccaccctgaaattaaaagcacaagtgctagagtcagctttcaccattcccctagaagagatcagcttttttggtgttaacaatgtgttctatagcaggaaggcaagactactgtccaagatctgacctcctttcctatctcctggagggctgtgatgagggccactgctrctggctgtgagggtctccatttccctgcccctcaaccctgtaccctcagtgcacacaccacctttccttttttacattgcagactagctgtgtcttctggtggccacatagcttcagaagtgtggtttttagtaggtacagatctactaggacctttcattcagttaaagcttctaggaactgaaagacaacaggaggcgaggagagcaggagaaagaggaagcatggagtattagaagataaacgatcctcatttcaaatgaagactgcttaatgaaaaatctccttaaggcactatttcccaaacttgcctgttcatcagtgtgaattacacaggacccctgggaaaaatccagactcctggctgccattttagaaccactaaatagatctgcagaggtaagagtctggataatgtgtattttcaacatgccctggaaattccaacagtcaggcaaattagggaatcactaatttagaagaagtccactccatcaacttaagttgttaagatttgaatagatcaggattagctctcaaaaatgcattgcttcttgaagtaaacatttcaacagaattaaattttgaaagaattaaatcccctaatgctatcccttccctagctccccacaggccccaatgtgtgatgttcccctccatgtgtccatgtgttttcattgttcaactcccacttatgagtgagaacatgtggtgtttggttttctgttcctgtgttagtttgctg

SEQ ID NO: 697803 - DNA, 2570 bp, Homo sapiens
gtaatagttggttttaaaatgtcgtttctggccaggtgtggtgactctaacctataatcccagcacattgagaggccaaggaaggaggctcgcttgagtccaggagtttgagaccagcctgggcaacataataagaccctgtctctacaaaaagagtttttaaaaattagctgggcatggtggcgtgcacctactcaggaggctgaggcaggaggattgcttgagcctgggagttgaaggctgcagtgagctgtgattctgccaccctactccagcccgggtgaaagagtgagaccctgtctcaaaatgaaggaatgaatgaataaaacaaataaaaataaattatcgtttataatacagccaaagagaccatctgctagctcattcggccacttcctaggatcagaaaggagattagtgtaaacatgcatatgcactgattgggcaaagcccttctcaggactttcactcaattcagggttgctgctgttgtttgttctcaatatgtttttaaacagtaaataagttagcatggataaaaaccactatattaaccaaaatacatgtctgaaattaatctaaatgttcttcagtatactcaagaagatgctttgacccatgggtctcaaatactaaactcgaattgcttcagaagaagcataaagtcattaaaaatttcagaaagcaatatgtgtatgtctatgtgtgtacatgcatagacacatacataatttcttctaaagattactatcaattttggtttcaaacttattgaatcaacatgatgatatcattaatagttacattatttatgtatttacagaatgaaatgccaagaggcatatgtattttccctccctcaccttccaattttcttatgcaacaagttggcaagcctagtggtttatgaggaaatctgttagagagtaagtagtggacacactgtcttatgataacatttgctctttctttctccagtctaaattatatagttcacttgattgttgtagttacgaagttgtatttgttcacgtgtctgtctccccattggacagtgagtccaggagagcagggattatgatttttatctctgtatctaatcacttttctgcccccaggagccagctaccttattcagtaaatggatgctcttccacatggtaatcttgattggtcaatttctgtactatataaggttttgggaagcagagatggacaatgataagagagagtagacgaaaggaagatgaggttatagggagaatgtgggaaaggaaagaaggggatatcttcatagagcaggaagcaaaattggaagtcaaagtgtccagtggcagtggtgaaaagtgttgaccaacctcgatttggtgaaggtggcgtcacatcaatttaaacttttcatggggaagcagggtatttctcaacctaatgcttatggagaattggcctctgtatttccctccagactttcacggactactcagcctagcccaaacatgagccagatgccgaatggactgccaatgtgaaaattattcgatttgattaagaaacaatttaatcttattctggtttgtatttaaagcctgctaatatcaaagtacacagaattttcatttttgtatcagcaacttagatgccatttagaagctgtgccaccctgaaattaaaagcacaagtgctagagtcagctttcaccattcccctagaagagatcagcttttttggtgttaacaatgtgttctatagcaggaaggcaagactactgtccaagatctgacctcctttcctatctcctggagggctgtgatgagggccactgctgctggctgtgagggtctccatttccctgcccstcaaccctgtaccctcagtgcacacaccacctttccttttttacattgcagactagctgtgtcttctggtggccacatagcttcagaagtgtggtttttagtaggtacagatctactaggacctttcattcagttaaagcttctaggaactgaaagacaacaggaggcgaggagagcaggagaaagaggaagcatggagtattagaagataaacgatcctcatttcaaatgaagactgcttaatgaaaaatctccttaaggcactatttcccaaacttgcctgttcatcagtgtgaattacacaggacccctgggaaaaatccagactcctggctgccattttagaaccactaaatagatctgcagaggtaagagtctggataatgtgtattttcaacatgccctggaaattccaacagtcaggcaaattagggaatcactaatttagaagaagtccactccatcaacttaagttgttaagatttgaatagatcaggattagctctcaaaaatgcattgcttcttgaagtaaacatttcaacagaattaaattttgaaagaattaaatcccctaatgctatcccttccctagctccccacaggccccaatgtgtgatgttcccctccatgtgtccatgtgttttcattgttcaactcccacttatgagtgagaacatgtggtgtttggttttctgttcctgtgttagtttgctg

SEQ ID NO: 697804 - DNA, 2570 bp, Homo sapiens
gtaatagttggttttaaaatgtcgtttctggccaggtgtggtgactctaacctataatcccagcacattgagaggccaaggaaggaggctcgcttgagtccaggagtttgagaccagcctgggcaacataataagaccctgtctctacaaaaagagtttttaaaaattagctgggcatggtggcgtgcacctactcaggaggctgaggcaggaggattgcttgagcctgggagttgaaggctgcagtgagctgtgattctgccaccctactccagcccgggtgaaagagtgagaccctgtctcaaaatgaaggaatgaatgaataaaacaaataaaaataaattatcgtttataatacagccaaagagaccatctgctagctcattcggccacttcctaggatcagaaaggagattagtgtaaacatgcatatgcactgattgggcaaagcccttctcaggactttcactcaattcagggttgctgctgttgtttgttctcaatatgtttttaaacagtaaataagttagcatggataaaaaccactatattaaccaaaatacatgtctgaaattaatctaaatgttcttcagtatactcaagaagatgctttgacccatgggtctcaaatactaaactcgaattgcttcagaagaagcataaagtcattaaaaatttcagaaagcaatatgtgtatgtctatgtgtgtacatgcatagacacatacataatttcttctaaagattactatcaattttggtttcaaacttattgaatcaacatgatgatatcattaatagttacattatttatgtatttacagaatgaaatgccaagaggcatatgtattttccctccctcaccttccaattttcttatgcaacaagttggcaagcctagtggtttatgaggaaatctgttagagagtaagtagtggacacactgtcttatgataacatttgctctttctttctccagtctaaattatatagttcacttgattgttgtagttacgaagttgtatttgttcacgtgtctgtctccccattggacagtgagtccaggagagcagggattatgatttttatctctgtatctaatcacttttctgcccccaggagccagctaccttattcagtaaatggatgctcttccacatggtaatcttgattggtcaatttctgtactatataaggttttgggaagcagagatggacaatgataagagagagtagacgaaaggaagatgaggttatagggagaatgtgggaaaggaaagaaggggatatcttcatagagcaggaagcaaaattggaagtcaaagtgtccagtggcagtggtgaaaagtgttgaccaacctcgatttggtgaaggtggcgtcacatcaatttaaacttttcatggggaagcagggtatttctcaacctaatgcttatggagaattggcctctgtatttccctccagactttcacggactactcagcctagcccaaacatgagccagatgccgaatggactgccaatgtgaaaattattcgatttgattaagaaacaatttaatcttattctggtttgtatttaaagcctgctaatatcaaagtacacagaattttcatttttgtatcagcaacttagatgccatttagaagctgtgccaccctgaaattaaaagcacaagtgctagagtcagctttcaccattcccctagaagagatcagcttttttggtgttaacaatgtgttctatagcaggaaggcaagactactgtccaagatctgacctcctttcctatctcctggagggctgtgatgagggccactgctgctggctgtgagggtctccatttccctgcccctcaaccctgtaccctcagtgcacacaccacctttcctttyttacattgcagactagctgtgtcttctggtggccacatagcttcagaagtgtggtttttagtaggtacagatctactaggacctttcattcagttaaagcttctaggaactgaaagacaacaggaggcgaggagagcaggagaaagaggaagcatggagtattagaagataaacgatcctcatttcaaatgaagactgcttaatgaaaaatctccttaaggcactatttcccaaacttgcctgttcatcagtgtgaattacacaggacccctgggaaaaatccagactcctggctgccattttagaaccactaaatagatctgcagaggtaagagtctggataatgtgtattttcaacatgccctggaaattccaacagtcaggcaaattagggaatcactaatttagaagaagtccactccatcaacttaagttgttaagatttgaatagatcaggattagctctcaaaaatgcattgcttcttgaagtaaacatttcaacagaattaaattttgaaagaattaaatcccctaatgctatcccttccctagctccccacaggccccaatgtgtgatgttcccctccatgtgtccatgtgttttcattgttcaactcccacttatgagtgagaacatgtggtgtttggttttctgttcctgtgttagtttgctg

SEQ ID NO: 697805 - DNA, 2570 bp, Homo sapiens
gtaatagttggttttaaaatgtcgtttctggccaggtgtggtgactctaacctataatcccagcacattgagaggccaaggaaggaggctcgcttgagtccaggagtttgagaccagcctgggcaacataataagaccctgtctctacaaaaagagtttttaaaaattagctgggcatggtggcgtgcacctactcaggaggctgaggcaggaggattgcttgagcctgggagttgaaggctgcagtgagctgtgattctgccaccctactccagcccgggtgaaagagtgagaccctgtctcaaaatgaaggaatgaatgaataaaacaaataaaaataaattatcgtttataatacagccaaagagaccatctgctagctcattcggccacttcctaggatcagaaaggagattagtgtaaacatgcatatgcactgattgggcaaagcccttctcaggactttcactcaattcagggttgctgctgttgtttgttctcaatatgtttttaaacagtaaataagttagcatggataaaaaccactatattaaccaaaatacatgtctgaaattaatctaaatgttcttcagtatactcaagaagatgctttgacccatgggtctcaaatactaaactcgaattgcttcagaagaagcataaagtcattaaaaatttcagaaagcaatatgtgtatgtctatgtgtgtacatgcatagacacatacataatttcttctaaagattactatcaattttggtttcaaacttattgaatcaacatgatgatatcattaatagttacattatttatgtatttacagaatgaaatgccaagaggcatatgtattttccctccctcaccttccaattttcttatgcaacaagttggcaagcctagtggtttatgaggaaatctgttagagagtaagtagtggacacactgtcttatgataacatttgctctttctttctccagtctaaattatatagttcacttgattgttgtagttacgaagttgtatttgttcacgtgtctgtctccccattggacagtgagtccaggagagcagggattatgatttttatctctgtatctaatcacttttctgcccccaggagccagctaccttattcagtaaatggatgctcttccacatggtaatcttgattggtcaatttctgtactatataaggttttgggaagcagagatggacaatgataagagagagtagacgaaaggaagatgaggttatagggagaatgtgggaaaggaaagaaggggatatcttcatagagcaggaagcaaaattggaagtcaaagtgtccagtggcagtggtgaaaagtgttgaccaacctcgatttggtgaaggtggcgtcacatcaatttaaacttttcatggggaagcagggtatttctcaacctaatgcttatggagaattggcctctgtatttccctccagactttcacggactactcagcctagcccaaacatgagccagatgccgaatggactgccaatgtgaaaattattcgatttgattaagaaacaatttaatcttattctggtttgtatttaaagcctgctaatatcaaagtacacagaattttcatttttgtatcagcaacttagatgccatttagaagctgtgccaccctgaaattaaaagcacaagtgctagagtcagctttcaccattcccctagaagagatcagcttttttggtgttaacaatgtgttctatagcaggaaggcaagactactgtccaagatctgacctcctttcctatctcctggagggctgtgatgagggccactgctgctggctgtgagggtctccatttccctgcccctcaaccctgtaccctcagtgcacacaccacctttccttttttacattgcagactagctgtgtcttctggtggccacatagcttcagaagtgtggtttttagtaggtacagatctactaggacctttcattcagttaaagcttctaggaactgaaagacaacaggaggcgaggagagcaggagaaagaggaagcatggagtattagaagataaacgatcctcatttcaaatgaagactgcttaatgaaaaatctccttaaggcactatttcccaaacttgcctgttcatcagtgtgaattacacaggrcccctgggaaaaatccagactcctggctgccattttagaaccactaaatagatctgcagaggtaagagtctggataatgtgtattttcaacatgccctggaaattccaacagtcaggcaaattagggaatcactaatttagaagaagtccactccatcaacttaagttgttaagatttgaatagatcaggattagctctcaaaaatgcattgcttcttgaagtaaacatttcaacagaattaaattttgaaagaattaaatcccctaatgctatcccttccctagctccccacaggccccaatgtgtgatgttcccctccatgtgtccatgtgttttcattgttcaactcccacttatgagtgagaacatgtggtgtttggttttctgttcctgtgttagtttgctg

SEQ ID NO: 697806 - DNA, 651 bp, Homo sapiens
tttgaaagatggtggcgatgatagtatttccacagaagccctggtcaatggccatgccaactcagcagtcccgaacagtgtcagtgcagaggatgcagaatttatgggtgacatgcccccgtcagttacgcccaggacttttgacagcccccagaactccacggactctgtcagtgacattgtgcctgacagtcctttccccggagcactcggcagtgacaccgggactgcagggcagcaggaggggggtcccggggttgattttggtcagtcctgcttccctgcaggggctggcagagacaccctgtcaaggacagctggggctcagccctgcgttggtaccgatactactgaaaaccttggagttgctaatggacaaatactcgaatcctcgggtgagggcacagctaccaacggggtggagttgcacaccatggaaagcatagacttggacccagccaaacccgagagtccatcacctcctgctgacggcacgggctctgcatcaggcacccttcctgtcagccagcccaggtcctggaccagtctctttcacgattctaagccctcttcctcctggccggtggcctatgtggaagctaagtattcccctcccgcyatatctcccctggtttctgaaaagcaggttga

SEQ ID NO: 697807 - DNA, 582 bp, Homo sapiens
cctgtgttacaagcaataataaagctgagcgctgggtactatggggcacttgggaaggctgcctaagccagagagcttcacagggagccttgatgtctgagtaagaattaaccaggtgaagcagaaggggaaataggctctaggaacagagagctttgagcgcaaaggcaggcagagtgtgaggagaggaggccttacttccttgtgactgcagcatgaaggtaaggggagggctgagagaaatgaggctccacaggtgctcctggatgtcctaattaattttgaattaacaaatcataagtatgactttttctctgtttttttttaaaaaaactttgttccttawttgcatgcaaaatgtatctgttgagataaaataatttcatacctatttctaattagttgctcaaataattgttatccttggagagcagtaaatgacagatgaacattaaaaattttgtaaaaatgtcaattgcagtttgttcatatatcacgtagcaattaccagccttgtctggctgacatatacctgagggagtgtggaaagtgccgaatgcctgaagataaatcaactcttcc

SEQ ID NO: 697808 - DNA, 582 bp, Homo sapiens
cctgtgttacaagcaataataaagctgagcgctgggtactatggggcacttgggaaggctgcctaagccagagagcttcacagggagccttgatgtctgagtaagaattaaccaggtgaagcagaaggggaaataggctctaggaacagagagctttgagcgcaaaggcaggcagagtgtgaggagaggaggccttacttccttgtgactgcagcatgaaggtaaggggagggctgagagaaatgaggctccacaggtgctcctggatgtcctaattaattttgaattaacaaatcataagtatgactttttctctgtttttttttaaaaaaactttgttccttaattgcatgcaaaatgtatctgttgagataaaataatttcatacctatttctaattagttgctcaaataattgttatccttggagagcagtaaatgacagatgaacattaaaaattttgtaaaaatgtcaattgcagtttgttcatatatcaygtagcaattaccagccttgtctggctgacatatacctgagggagtgtggaaagtgccgaatgcctgaagataaatcaactcttcc

SEQ ID NO: 697809 - DNA, 2583 bp, Homo sapiens
tgaatggggcagggaatatttttttctgggaaacataaagacaggagctttgtgatcatgaatttcagttgaaacaaattaacctgattccctcttactctattttaaatttcagttttatttatttaaaaatctgaacgtaatatccataattatagtattatacagaagagtttcactgccctaaaattcctctgtgctccatctgtgcgtccctctgtcccccataactcctggcaaccactgattttttttaactgtctccatagttttgcctttcccagaatgtcatgtagctggagtcatacagtacgtagcatttcctgattggcttcactcagaaacatgtatttgagattgcttaatgtctttttatggcttgataggtcatttctttttaatgctgaataacatttaattatttggatgtattacagtttatccatttacctaatgaaggacatcttggttgcttccaagtttggcaattatgaattaaaccgctataaacattatcgtgcaggtttttgtgtggacatgttttcaatttctttgggtaaatactaaggagcattattgctagattatatgataagagtttgcttagttttgtaaaaagctgaccaactgtcttcgtaagtggtgtaacatttgcattcctaccagcatcaccagcatttggtgctgtctgcctttcatattcaccaggcttaatcttcataattgtgctgcacttacttttaaaacgaaagtcttcaattcatcccctgctttgtttcttaaacaatcttgaatgagttctttaaagtctaaaaatctccagaaaataaaagtattaactatatattgagagctgaagtttgcagagcaaaggagtgacactaaattggtgatgatataaaacctcagctgaaaattctaatagctaaagaagaggtatgatattttcatttatagttccttctcatttacatgtgtaaacttaagaaagtcaggagtattgtattcttaggaaaatcagagcacttcaaaaaattgttgtttataatgtttagaaatttagaccgaacattttcatggtatagactagagtagtcttagctaaacagaaccatttattagtctgttgtacatattgtttcagacacatttattatattataaacaaaaggagaataaagtaatgtaaaactactttgagaaggtgtctaataaaaataagataattatgggatttctattatccacactcaattaagactaatatttttaatttaaaaaagttttttaaagaagaattcctgaatggtaattgataatacattaccttggcttttctgataaaaatccttgaagaataaaaataatttcttcctacttctatattacgatcagcataattgcaataatatgcttcaattgttagtaaagtaacatttatgttttgggatcaatgaatttaagccagcactaagaattttattactattcctccactacatttcagagagttatttcttcatccttaaacataccacaataataagtctgctaggtccatttagattttcaacccaaccctaaaagaaagaaggtttctattggttacacatttcagaagattgttgtatctttgaaacatctgcagtctcatcttaataaatttcaaacaagagcactgagaccccagccaacagaactatctaattcagtattattaagatctgaaggatcagtggcaaagcattggctattttctgcaccttgactatgcaaaaattaaaatttggccaggattgttgttcgtagcaggagtcatgaatggttttgtggtgttttatgacatcttaagggccacattgaaccttgttcttatattatgatctgctaagcaattcaccaaccatacttctccacctcagtcctgactttagcctccttaggagaatattggakacatgattggtagtaatggcccattccttgacatttttgaccagctatagagcccatgccagatacacatatgtatgtgtgtgtgtgtatatgtagtgtgtgtgtgtgtatatgtagtgtgtgtgtgtgtgtgttgacttgcttaaagatgttacagggaagattatgtttaagaacaattagagggaaatgtctttttgagtttgtttcctaaaccctaagccattcagctgaccttattatgtctctttacctcatagtgtaaaagtcaaaatgtgtgtgtataatgggaaaggagagaggcaggaggagaagatgaagggattaatatccatgagccttttagtaaggacctgccttttactagagactgagcactcctcatacattgtctcattaaaccaggtctccaaaatagtatccctcctgttttatggaagggacaactcaaaaattttgcattgccagtaagtggtggagctggaatttatccgccccaaagcttcacagacttgctttacagaagatggtataattctatctcacaccagttagaatggcgatcattaaagagtcaggaaacaacaggtgctggagagcatgtggagaaataggaacacttttaca

SEQ ID NO: 697810 - DNA, 2063 bp, Homo sapiens
ggagtctcactgtgatgcccaggatggtctcagactcctggcctcaagtcatcctcccgcctcagcctcacaaagtgctgggattacaggtgtgagccaccacgctccgcctccctaatctttactgtattacctactgggcaatgtaagtgattttttgactgccagtctagggagtcagatgactgcccagcttgtggtggccggcctccaagaccatcccatgatccctgccttctgttcttcagaccctgtgtaggcccttcccacactggatcagacttgctctgtgtgaccagcagacatggggaaggaatggtagaagaaactaggtcataaaagacagtttggctttcatcttccccctctcttggttcactcactctggaggaagccagctgcagtgtcttgaggccacccaaggagaggccctcttggctaagagctgaggcctccagccaccagctttctgtccccagatgaccgcagccccagctgacagcaagatggctcacgagaggccccgaggcggaactacccagccaagctactctcattcctgatctacagaaactgagaaaataaatgttttaagccaacaaagtttgaagtaacttgttatgtagcaataagttactaacatacagacttaactttaaaagttatatttagttgggcacagtggctcatgcctgtaatcccagcactttgggaggctgatgtgggcagatcacctgaggtcaggggttcgagaccaacctggccaacatgggaaaccccatctctactaaaaatacaaaaattagccaggcgtggtggcaggtgcctgtagtcccagctacttgggaagctgaggcggaagaattgcttgaatccaggagggggaggttgcagtgagtggagatgacaccacttcactccagcctgggcgacagaatgagactccgtctaaaaataataataataatgttatatttagatataaagaatttaagggactaaagagtttccacagttttttttcaaacttttgaaatttgatatttcaaaaaataaatcttggccaggcacagtggctcatgcctgtaatcccagcgttttgggaggctgaggttagcagatcacttgaggtcaggagatcgagaccagcctgggtaacatggcgaaaccccatctctacaaaaaatacaaaacactagccgagtattgtggtgcatgcctgtagtcccagcaacttggagagagacaggaggttgaggccacagtgagccatgatcatgccactgcactccagcctgggtgacagggtgagaccctgaatcaattaatccatcttacatcagccacttcttaggaatgctttaaaccaactcaacctttttagattaagcatagatgagcgaaatacaatatggaaatattagttttacttaaaattctgaaaaagcaacaaaatattatattcatgtagagtcaattgtgaaaaaaactgattcctgaagccacaaagtctacacctttattgtatcaactttatgttcaattaatatttttaagaatatttctatgattaaaaattaattataaatcctatcaagaatcaaacttactaaatgttaactttaaaagccagtaagatctacaacacagatgaaccttgaaacatactaagagaggctggttgtggtcgctcatgtctgtaatcccaggactttgggaggctgaggtgggcagatcactggagcccaggagtttgaaaccagcctggctaacatggtgcaascttgtgtctacaaaaaaatacaaaaaatgagcagggcatggtggtgcacccctgtagtcccacgtacacagaagactgaggtaggaggatcacttgagcccagggaggtcaagactgcagtgagctatgattgcaccactgggctccagcctgagcaacagagcgagaccttgtctcaaaaaagaaaaaaaaaaaaaaaacccactacgtgaaagtcagtcacaaagggccacatcttactgtttcatttatctgaaatgtctagaattggtaagtctat

SEQ ID NO: 697811 - DNA, 2063 bp, Homo sapiens
ggagtctcactgtgatgcccaggatggtctcagactcctggcctcaagtcatcctcccgcctcagcctcacaaagtgctgggattacaggtgtgagccaccacgctccgcctccctaatctttactgtattacctactgggcaatgtaagtgattttttgactgccagtctagggagtcagatgactgcccagcttgtggtggccggcctccaagaccatcccatgatccctgccttctgttcttcagaccctgtgtaggcccttcccacactggatcagacttgctctgtgtgaccagcagacatggggaaggaatggtagaagaaactaggtcataaaagacagtttggctttcatcttccccctctcttggttcactcactctggaggaagccagctgcagtgtcttgaggccacccaaggagaggccctcttggctaagagctgaggcctccagccaccagctttctgtccccagatgaccgcagccccagctgacagcaagatggctcacgagaggccccgaggcggaactacccagccaagctactctcattcctgatctacagaaactgagaaaataaatgttttaagccaacaaagtttgaagtaacttgttatgtagcaataagttactaacatacagacttaactttaaaagttatatttagttgggcacagtggctcatgcctgtaatcccagcactttgggaggctgatgtgggcagatcacctgaggtcaggggttcgagaccaacctggccaacatgggaaaccccatctctactaaaaatacaaaaattagccaggcgtggtggcaggtgcctgtagtcccagctacttgggaagctgaggcggaagaattgcttgaatccaggagggggaggttgcagtgagtggagatgacaccacttcactccagcctgggcgacagaatgagactccgtctaaaaataataataataatgttatatttagatataaagaatttaagggactaaagagtttccacagttttttttcaaacttttgaaatttgatatttcaaaaaataaatcttggccaggcacagtggctcatgcctgtaatcccagcgttttgggaggctgaggttagcagatcacttgaggtcaggagatcgagaccagcctgggtaacatggcgaaaccccatctctacaaaaaatacaaaacactagccgagtattgtggtgcatgcctgtagtcccagcaacttggagagagacaggaggttgaggccacagtgagccatgatcatgccactgcactccagcctgggtgacagggtgagaccctgaatcaattaatccatcttacatcagccacttcttaggaatgctttaaaccaactcaacctttttagattaagcatagatgagcgaaatacaatatggaaatattagttttacttaaaattctgaaaaagcaacaaaatattatattcatgtagagtcaattgtgaaaaaaactgattcctgaagccacaaagtctacacctttattgtatcaactttatgttcaattaatatttttaagaatatttctatgattaaaaattaattataaatcctatcaagaatcaaacttactaaatgttaactttaaaagccagtaagatctacaacacagatgaaccttgaaacatactaagagaggctggttgtggtcgctcatgtctgtaatcccaggactttgggaggctgaggtgggcagatcactggagcccaggagtttgaaaccagcctggctaacatggtgcaaccttgtgtctacaaaaaaatacaaaaaatgagcagggcatggtggtgcacccctgtagtcccacstacacagaagactgaggtaggaggatcacttgagcccagggaggtcaagactgcagtgagctatgattgcaccactgggctccagcctgagcaacagagcgagaccttgtctcaaaaaagaaaaaaaaaaaaaaaacccactacgtgaaagtcagtcacaaagggccacatcttactgtttcatttatctgaaatgtctagaattggtaagtctat

SEQ ID NO: 697812 - DNA, 659 bp, Homo sapiens
tccatgggaattgactgttccctactgagtacggtgaagagtttaaagggagtttgatatagtctttcccccagcctgggatggacaggtatttattgattttttgatcaagtatgaaacaatgaaatgtatgtattgatcaagtatgaaactcgtttaacaaaggcagcttgatctagtatacccaagtggtgagttacagggcagagagaacagagaaaatggaggggagggcacctggcaagtggaaaggggatgtgagtcttcaggacaggagtccagggggtgttgggggagattgggggagacccaggcagggcaccggagagcacaggctccattcccccagaggcagagtgagtggtgtttggaagacagcgggcacattggcctcacgtgcgcagttacacacaaaccctgttttgtttgtttattttgttccttttaagggratacaactttttcctttttgctttactcttaatgtaatttccttctgcctgaactagcattgggtacattgaaaatttaaatcaatgttaatatttttctggtttgttagttgtaagtgtactaagagttcttagtgtttgcttttttctcccagaatgaaagcggtttattgtttttctgagtatgaaagtaatacatgctcattg

SEQ ID NO: 697813 - DNA, 659 bp, Homo sapiens
tccatgggaattgactgttccctactgagtacggtgaagagtttaaagggagtttgatatagtctttcccccagcctgggatggacaggtatttattgattttttgatcaagtatgaaacaatgaaatgtatgtattgatcaagtatgaaactcgtttaacaaaggcagcttgatctagtatacccaagtggtgagttacagggcagagagaacagagaaaatggaggggagggcacctggcaagtggaaaggggatgtgagtcttcaggacaggagtccagggggtgttgggggagattgggggagacccaggcagggcaccggagagcacaggctccattcccccagaggcagagtgagtggtgtttggaagacagcgggcacattggcctcacgtgcgcagttacacacaaaccctgttttgtttgtttattttgttccttttaagggaatacaactttttcctttttgctttactcttaatgtaatttccttctgcctgaactagcattgggkacattgaaaatttaaatcaatgttaatatttttctggtttgttagttgtaagtgtactaagagttcttagtgtttgcttttttctcccagaatgaaagcggtttattgtttttctgagtatgaaagtaatacatgctcattg

SEQ ID NO: 697814 - DNA, 575 bp, Homo sapiens
aggcccaagaaccagggccatgaatgtctaaggggaaagaaggatggatatccaggctcaaacaaaaagtgtaagtttatcctttctctgccttttcattctaytcaggctttcagaagattggatcatgtgtacccacattggtgagagtcatctctactcagtctacttactcaaatgttactctcttccagaaatactctcactgacatacccagaaataatgtttcaccagctagctggacatcccttagcccagtcaagataacacataaaattaaccatcacagggtgaagaagttgatttttaagttatagcatatagctggtagttgaatgcatgtgaatagatgagactgcctttgggtagagggtatccagagaagaccatgaagttaaggcaaaaactctgctaacaccaacatttaaggaagaaacgcctgttaagggcaatgagaaattattaaactgagtggttattaagttaatcaaaataaaacaaaatagatttactaagggcttcccatggaccaggcactgtgctgtggcttataattctgccatgaacaaggcag

SEQ ID NO: 697815 - DNA, 635 bp, Homo sapiens
cagaaggcagcaggaagaacaccaaaaacaaaacaaaacaaaacaaaaaactaaacaaattttaaaaactcgaatctctttmatgctaaagaagagtttccaaagcttaaactttagcaaattatcatcctcaaatggaaatgggtgaagaacacacatgagccctgcatgaattgggaaatacagttaactgctcataactgttaggtgaagttcaaatatgaataagcccatgtgaccgaatgacttccttgtgtgagaggtgaggttatactttggtcttaatgcatcgacagagcagattgaagataaatctcagctgttctggttggagtggtatgttggctactttcttcatgttctcctcttccttttacatacaagactggactgcatctggctcttccacattggaatggaaagataaggggagccagaagttttgatttggtgtcactgttgttagatagccttgaactctctgggcctggcaggtgcctgtaacatttttccttctggatgtttctgtggatttttcagaaactacccaccccctaacatcccccaaccccctctgctttctgcccttaccctttgccaccctgatcatggggtgttttcatctctagcttctg

SEQ ID NO: 697816 - DNA, 635 bp, Homo sapiens
cagaaggcagcaggaagaacaccaaaaacaaaacaaaacaaaacaaaaaactaaacaaattttaaaaactcgaatctctttcatgctaaagaagagtttccaaagcttaaactttagcaaattatcatcctcaaatggaaatgggtgaagaacacacatgagccctgcatgaattgggaaatacagttaactgctcataactgttaggtgaagttcaaatatgaataagcccatgtgaccgaatgacttccttgtgtgagaggtgaggttatactttggtcttaatgcatcgacagagcagattgaagataaatctcagctgttctggttggagtggtatgttggctactttcttcatgttctcctcttccttttacatacamgactggactgcatctggctcttccacattggaatggaaagataaggggagccagaagttttgatttggtgtcactgttgttagatagccttgaactctctgggcctggcaggtgcctgtaacatttttccttctggatgtttctgtggatttttcagaaactacccaccccctaacatcccccaaccccctctgctttctgcccttaccctttgccaccctgatcatggggtgttttcatctctagcttctg

SEQ ID NO: 697817 - DNA, 593 bp, Homo sapiens
tttttttttttttgatggattctcactctatcacccaggctggagtgccatggagcaatcttggctcacagcaacctctacttcccggtttcaagtgattcttctgcctcagcctcccaagtagctgggattacaggcacgcaccatcatgcctggctattttttgtgtttttagtagagatggggtttcaccatgttggccaggctgktctcaaaccttagatttcaactgtagtagcatgttacaataagaagtgagcaaagccagtttttctttgctggtctgtttagataatgtcattgataaaaatagcaataaacatgtatccaatcctcactataagctagactttatgtatgtaaactcatttaatgctcacaaacccctaggaagtacatgttattgcatccctgttgtcttagttccttttgtgtgctgtaaagggatacctgaggctacataatatgtaaagaaaaatggtttatttggcttacaattctgatggctggaaagttcaagattgggcatctggtgagagtctcaggctgtttagactcatggtagaaagtgaaggggatcaggcatgtacaga

SEQ ID NO: 697818 - DNA, 1563 bp, Homo sapiens
tgtacccatcacctgaatagtgtacattgtccccagtgggtactgttttcatcccctaaccccttcccgccttttggagtctattattccactctctatgtccatgcgtactaattatttagctctcacttatgagtgagaagatgtgatatttgactttatgtctctgagtgatttcacttaggatatcggcctccggctccatccatgttgctgcaaaagacgtgattgtattcttttttatgactgagcagtatttcatggtgtatatgtgccacacaaaatgtatatttttattgggccagtaccaaagttgaattttatacttatttaagcatgtcattgaaaggtcaaggcagtgaaaagctcttctcaaacaccttcggcctgaaaaaatgccaggtgaatgaggcaataactgtggatgcttttatagacagcatgagaaagtgttaaaccctaatagtgatggcgtggtaattactgcttactcatttactgtggttttgggtatttcattctcttcaggtatgccaccaaaaattttaggatttgagaatgggctggagacctatgagttgagaatcattgagccaaaccactagtatgtcaagactaagaggaagcaatattatgggaattgagtgaaaggctgatagattttatgaccctatctgcaaagtttctgctttcatgatcaggagctaggcaaaaacacttctgggcccatccaggccatttcaagaaatagctcataagttgagaattcatctccaaccaactgatctcagaagagagaaatgaaggggtggagggaaagcaatgtttcatctcactgagccttagaccactgtcaacactgtaattatattacgtgcactggctattttggtcatttattgaaataaggtacatgggataatttaaaaactaaattcagtcagtcacttccaaaaacatccagctggtttgtgtgtgcagcaataaagtgtgaaagtgacattgcattcaaattgtagccatgtgtgacttggcttttttatttgagagaaagaaaatggctaggcccaaaggcttgtatttctctgtgtcactctgacttgcaggaataatgaattcctgcttgtgacacagtgtcttgaggaagcaaggagagaggtggtttggtgcacttccaaagttgtgtgtgagccttcaccacaagaaccctggttctgtgggaaggacacgcagagcaccttgctgaagcaggagctgggagtgccacacattcgcatgcagactcccctgagatcccgaagcacttctcaaacatgaattaacttgagcactttcactgcagggcactgtgcacagttactcattcaggtattcatcaaagattcacacagtcaacaacacagggcccccccattaygttccagatgttgtgccaggtgagggggccattcttgagttccctggaaagcagatcccaagatagataaaccttcacttccctccctcaccaccattcttgatttcactcaccattggccggcactctggggagtccaggctgcc

SEQ ID NO: 697819 - DNA, 1563 bp, Homo sapiens
tgtacccatcacctgaatagtgtacattgtccccagtgggtactgttttcatcccctaaccccttcccgccttttggagtctattattccactctctatgtccatgcgtactaattatttagctctcacttatgagtgagaagatgtgatatttgactttatgtctctgagtgatttcacttaggatatcggcctccggctccatccatgttgctgcaaaagacgtgattgtattcttttttatgactgagcagtatttcatggtgtatatgtgccacacaaaatgtatatttttattgggccagtaccaaagttgaattttatacttatttaagcatgtcattgaaaggtcaaggcagtgaaaagctcttctcaaacaccttcggcctgaaaaaatgccaggtgaatgaggcaataactgtggatgcttttatagacagcatgagaaagtgttaaaccctaatagtgatggcgtggtaattactgcttactcatttactgtggttttgggtatttcattctcttcaggtatgccaccaaaaattttaggatttgagaatgggctggagacctatgagttgagaatcattgagccaaaccactagtatgtcaagactaagaggaagcaatattatgggaattgagtgaaaggctgatagattttatgaccctatctgcaaagtttctgctttcatgatcaggagctaggcaaaaacacttctgggcccatccaggccatttcaagaaatagctcataagttgagaattcatctccaaccaactgatctcagaagagagaaatgaaggggtggagggaaagcaatgtttcatctcactgagccttagaccactgtcaacactgtaattatattacgtgcactggctattttggtcatttattgaaataaggtacatgggataatttaaaaactaaattcagtcagtcacttccaaaaacatccagctggtttgtgtgtgcagcaataaagtgtgaaagtgacattgcattcaaattgtagccatgtgtgacttggcttttttatttgagagaaagaaaatggctaggcccaaaggcttgtatttctctgtgtcactctgacttgcaggaataatgaattcctgcttgtgacacagtgtcttgaggaagcaaggagagaggtggtttggtgcacttccaaagttgtgtgtgagccttcaccacaagaaccctggttctgtgggaaggacacgcagagcaccttgctgaagcaggagctgggagtgccacacattcgcatgcagactcccctgagatcccgaagcacttctcaaacatgaattaacttgagcactttcactgcagggcactgtgcacagttactcattcaggtattcatcaaagattcacacagtcaacaacacagggcccccccattatgttccagatgttgtgccaggtgagggggccattcttgagttccctggaaagcagatcccaagatagataaaccttcacttccctccctcaccrccattcttgatttcactcaccattggccggcactctggggagtccaggctgcc

SEQ ID NO: 697820 - DNA, 1061 bp, Homo sapiens
gggcctctttttctgcagctccccagtctgtatcaccawccacctcactgctcatgctagagacttaggaaacatcctgttcctctctttcactcactccccacagccaatccatcagcaggtcctgcctgccagtctcgtccagacactcacaccaaccccctaccatgtgttcaatttctgtctacatcacccccaatccctacaacacacaagtgcctcttggctgcccctttgcttctgggcacattgggtagggaattccagggtcctgggcacaaacatggacaagcaggggttggtgtgggctctgaatactcacagcaccttgaggccgaggactcctcacctcagcaaggctcaggtgggggaggccggccgggacctcctaaagctggggtccctgttgtcagggcaaggaaagggatgcccttgattctatctccaactctcctcctgaatgagggtacccacttctcccttctccactgccagcattctaggccaagtcaccaacagctggtccgtgctctcggtgacccctccctgctctctattctcctcgcagcccccagagtgaccttgtgaaaatataaagcagatcatctcaacaccttgcttaaaacctccccctcacgcttagaataaaatcccaactccctgaccttctaggctctctctggggtgaccgggtaccgtagggaggggcacacactttcggtgactatccttggagttaatggcatcaggtttggcaccagacggcctgggctcggattccactgagctactttttacttgtgtaaacctcagcaagttactcaaaccttctaagccttaatttcctcgtctataaactggcgatgacattgtaagtagctgcttcatagagctgctgtcaggattcattgggacgttggtgaaaagtgctcagtacattcactttcaatactagctgataaaagaatcctaacaatagaaacattaacttaaacactcagggtctcaccttcaaatactagcttttcatgtccttacttggctgataagccacgctgtct

SEQ ID NO: 697821 - DNA, 1982 bp, Homo sapiens
caacaccggtgtgtttgggagagtggcagcaggtaatgagtaagaagtacagggctcctgagtttctgcaaacaaacagcatttgtgcaacaactcaaaaagtcctggtcacaaaacaaaactgatgtgctttttctccaaatccctgcagtctcagagcctggtaattgcaaacattttcacatcagctcctctccaccatccaatctgactccaagtggcttctctaacaacaccgaatctactagccaggacttacacaacctactaacctactcagtggcttctccaataacatgtactgatttcatcagggcctacagaagccatattatgggttgaaaagtaaaaattcatccaatttagggttttctccactgaatctctttttctggttttggctctattctgccaaaatttaccacaaggccctggccaaggccagtcaacatagatgtctttgtgtgagttagaaaaacgtgtcccctccagatggaccagcccttctggaagcctttctgcaaagcaaaacctgcacaactgacaactgaatgcagccgccttggcaagagctcataggccttttctttccagaaaccttgaaaagtgacgagaactctaaggtttgtttgccttaactgggaaaggccacacttggatgattaaatgcaagaggccaaaagcttgagtcaaaacccactctccacctttgcctgtgttctcaatgttggactgcactgagggcaggttggagaggccagcctgggtgatgtacaccacccaggtcccacgaatgcatctcctaccaccatctgtcaagtgacctggaatgcccagtcagctctggaaccagatcttggatggaccttgttgctttgttgagtttgtgtctactttccctggatccttccttagttctgtgtatctatagaaagacaaggagatttcctgtccttctgatttgtacagtatgtcctccaagttctttccctcttatccgtggcttctatcatccattcagactttgtttgcaggcaggtttgtcctctgaggccaccacccctacttttgaacatcaaccttagtcaatgacattccctaagcagtaggttccaagcattttgaacatacacccccaccccatgctctattttattcattatttatttgggacctaataaattatctacacaggccattatcattacttaatagtccaaggcgcaaaatatactttgagtgtaagatatatgataacaattatagatgtagatttttcatccctgtgtcctagttagatttttataattttgaagggttttttgtttctttgttttggccagctgcttggcacatcagatcatcagtctttctttcttgtaatggtgtctggcaaagagcttttgggaaggggagcagaagtgctacctttgctgtttttgtcagtttggttttttgggtggcctgtgttattagtctatctttaacccatggtttcttcagaggaggctttttaagccatgtgtccatcttgtgaaggttaaagctagataatacctcactgataagtccatttaacccggtacaagtatccaggtccactagactctctgcccttgaatttgagaacttgtagaaaaggccaaagattggcccattcagttagggttaaaatcgtgtcacccagccaggaaaaaatgtaaaggattttggagctgccagagaaggatagtttcacagttgattccatatctacaccatttctagtttagagaactttttaaaaagggaagggaagttacagatacaaaatatgtccaaatgtcttaaatacttacacaggtccatggcccaggtctatgacctaactttctatgttaccaaaaaaacacaaaaaaacagcaaaaagcagaacatgtcttcatgcatctttgcctcacaggcactttcaagaaagcatcgaaactaygagaaactggaga

SEQ ID NO: 697822 - DNA, 1290 bp, Homo sapiens
tctagagaaagactaaagaagcaaactctttatggctcttatgttgaagttaataaacttattcctaaagctggatagaatagaaataatagaaataattrgtccctaagatataaaagctacagcctacactcggttaacctcttctttctccttcctcgtagaaccaaaattgttaatagctgttaaacccactctttttcccagaaaccccatacatctcaagcgaagtctacctcagctttaggggtggacttgacaactataggtgacctcaaacctcttgccagtaatttcttcaggaatggttacatgacttacaccgagcaaatggtataggggagtggtttactggaagcgtctaggaaaattcttcctaactcttctgagaaatttttctaaaacaacctcccctccctttgcttgaacactgccaagcatggatatgaggccatatatctacagacatcttaccagcctcaggatgaagccaacatacagagaagtataaacaccaagactcctgaaaaagagaaatgaagcccaaatcatggaaatcctgaccaatacctcatatccaaatattccattaagttagagaatacttttttttatttttaaatatgagttgggtttctattaaaactgaaagaatgttaacagatacaaaggtttagggcaagcttgccttctcacaattactaaattatgcactattaaattcattgttttttgttaagatactctcttcaaagagcccatgtttaaatggaatatttagtagattaaggcatatctcttgactaaaatcttagtacattatcattggcacctactagaaagaacacacttgtcagattgatagttatcatcaagaaacagggattttttttcattaattaagcattacttttaaacatagtatttattgagtgcctacaatgtgcccaatcatactctaggcaatgaaaatacagtaatgaacaaaacacacaaaaatccttgccctcatgaagcttacatgctggagggggaaacatacaatgacatatttataaaatatatagtatgccagatggtggtaagtgttaagaagtaaaatcatacagaccagagagatagagagtctgaggatgaaaagacaatctaatctcaaaaagagagtcaaggaaagcctcacttcttgttcacatttgagcaaatgcctgcaggaagttagagagcaagagcatcgctggggatagggagatagctacaggcaaagagaagagggtgtgtgaaatgccctgg

SEQ ID NO: 697823 - DNA, 655 bp, Homo sapiens
ctactcaaatctccatttagatatctaaaaaaaaaaaaaaagaaaatctcaaacccagaaatgtcccaaacagaactcttggttaccccttgaaaaacctccacatgcaacttattttaatctcgactgatacaaaattatcttagttgtttgggcaaaaattttggagctakccttgacttctttattttatatcccatttctgatctgactgaaaatcctatttgttctacatttaaaacctttttaaaatgcaattctttttaccatcttcatttttatcatcctagtcttaaccaccatcatcttttttctgtataacagcatagtttcctggatgacactgtagtttctggtactaatttcctacagctgctgtaacaaattaccatgaacttgatgtcttagaagaacagaattctattctcttatggttttgagccaagagtccaaaatcaatatcactgagccaaaattaagctatcagcaggactgagaaattatttcctttggataaaatctttatttatataatgaggggtccaaaacacttaaatatttttatgggctctgaaagatacagctacattgctctccaatatgttcatatcatgttatatttttatcaatatgtttatctgtctcatcatcatct

SEQ ID NO: 697824 - DNA, 655 bp, Homo sapiens
ctactcaaatctccatttagatatctaaaaaaaaaaaaaaagaaaatctcaaacccagaaatgtcccaaacagaactcttggttaccccttgaaaaacctccacatgcaacttattttaatctcgactgatacaaaattatcttagttgtttgggcaaaaattttggagctagccttgacttctttattttatatcccatttctgatctgactgaaaatcctatttgttctacatttaaaacctttttaaaatgcaattctttttaccatcttcatttttatcatcctagtcttaaccaccatcatcttttttctgtataacagcatagtttcctggatgacactgtagtttctggtactaatttcctacagctgctgtaacaaattaccatgaacttgatgtcttagaasaacagaattctattctcttatggttttgagccaagagtccaaaatcaatatcactgagccaaaattaagctatcagcaggactgagaaattatttcctttggataaaatctttatttatataatgaggggtccaaaacacttaaatatttttatgggctctgaaagatacagctacattgctctccaatatgttcatatcatgttatatttttatcaatatgtttatctgtctcatcatcatct

SEQ ID NO: 697825 - DNA, 655 bp, Homo sapiens
ctactcaaatctccatttagatatctaaaaaaaaaaaaaaagaaaatctcaaacccagaaatgtcccaaacagaactcttggttaccccttgaaaaacctccacatgcaacttattttaatctcgactgatacaaaattatcttagttgtttgggcaaaaattttggagctagccttgacttctttattttatatcccatttctgatctgactgaaaatcctatttgttctacatttaaaacctttttaaaatgcaattctttttaccatcttcatttttatcatcctagtcttaaccaccatcatcttttttctgtataacagcatagtttcctggatgacactgtagtttctggtactaatttcctacagctgctgtaacaaattaccatgaacttgatgtcttagaagaacagaattctattctcttatggttttgagccaagagtccaaaatcaatatcactgagccaaaattaagctatcagcaggrctgagaaattatttcctttggataaaatctttatttatataatgaggggtccaaaacacttaaatatttttatgggctctgaaagatacagctacattgctctccaatatgttcatatcatgttatatttttatcaatatgtttatctgtctcatcatcatct

SEQ ID NO: 697826 - DNA, 1993 bp, Homo sapiens
atttctaaatttcacagttataaataagaagcctgaaagtatgccctccttattgattatccctcaaaacctaacacatgtgaaaaataatgtaagcttttgaggtatacatggtactagctaaagatgtaaaagtatcctggggataagtcttcaaatttgagttagaaagcttgaatttgtacccacaatactcatgctttgtataaccctgaaaatatttaattccttttaaaaaaaaggtataaatagtatctacttcagtatttattatgactattaagcgagataggctttgtaaagagtcattcatagatgaggaactaccattattgacagtttattcatttatttagttagtttatgtaactgaataaatatgtaggagccacatgacaaattattttatttgtggtaagattctttcagtatcaaaagacacaaaatccaattggggctttagtagaaataagggaacatattgtctgatctggtctgggaggagagagagaaatggcttcctagtgatttaatcagggcgttaaactacaccacacactcacaggctccaacttggctggaaccccggggtaggcttcctgctcagcccagtcatcccaggtaggaagatgctcagcacttccagcctcacttcatcatccgcccaatctaggagatgcatacatacaatccaggttgaagtacacattgatcgattcattggctgcaaaagccttttttccctcaaagcccaacaaaaaagcttcccgtggcctctaatgggattatgtgcttcccatggggagaaaaaccattgagaccatggaggagtggaaaccttgattgtcataagcccctgggaatggggatgagagcccactcaagtcgcatggatgagcctgaagaagagttgatctgcacctccaaagtgagctctggatgcaatcatcaagaatgaatactagaaggcaagacagcccatgtttgtatcatcaggtacatctgatgatagccakccttactggcccctaagaaaatatggcagtgcctagaatgtcccgggattcctgcagccacctgcagcccattatcaccctgaggtgaatcttgcagctgattttcatgtcaccttcagttctgctcagttctcgatgctcctgtggtcttgtttccatatccgttccacacaattctggggttaatcaccactctgaagctccttttcttcatatgttaaagcaaacactttccttcttgaatactcatcatttttttaatctcttctctgactaattgtagaccagaagcatcaatgatatttaatcgtcctggcaaaactggaaaacaagtaaaaagaaaactacgtataccaatacccttttacatacaatttaaggaaaaagattaagttgccgtctattgacgtcactcgctgcaacacactgcttgtagccccacactcatcgcctggttcctgcctctatatattttttgtgtgctgtttcattgcctcagactccattcccaccttttttaacctggctgaatgtttgtgtttcttccacgctcagtacaggctccagaagttcaaggtagcttctctggaactcatctctttgtcccctcttccctggtgatacctctctcagcacttaccatattatgttgatatttggtatagggggctagtctctaccactggtctacacattccttgagagcaggaattgtcatatgtatcccatggcatagtgattgaccattaacacacagacaataaatgttgtctgttgaagtatacattgattgattcattggctgtcaccattttagcctgtatactgtttaaaattgtagttacattctaactgggtttagcattgcaaattacatctgtaatccaccaatgtgtgataaataggtgctggtgatgttttctgcttagaaaacatattcgtgagtgacttacagaaagaagatttagtaataaaca

SEQ ID NO: 697827 - DNA, 585 bp, Homo sapiens
tggtgacattttaatggaggttaccatgctttatataatttaaccgaggatataatcktattatttgcattacaacaccaatctcagtccaataattatggagtggcattatttgtacacctccagattgtcactgtttaacccctctgatgaagtaatcaagtgtctggttttcaatattgtttaaaatactcttaatgtctctagatagtggaaattaggttaagctgaagcatcttaaagcttcataacaccaaacagatgttcttaaagcttcataacatcttaaagcttcttaacaccaaacactatgatcaggaggtagtggttcatttccaccctatttcctcttacctttcatgaactccattcaaacatatgcatgttgctgagatatagtatggtgcttaatatcgctggggaaggaaatagaaaaataataactacattgcattgaaatatgtgcaagtaatagtgttctaataaaggtgtaatatattttgttgaatatagaaaaattgtgtagtgtaaaacattttccaaactttctgtctattgtattatatttgtaagatttaaactgat

SEQ ID NO: 697828 - DNA, 680 bp, Homo sapiens
tccctaaagttttaactcacttcagcattaagtcaaaagtccgtagtccatctaagttactttcctccagtattatggttttgtcgtttttcaacttcttgaattattagtatttgtgcacatatatatatatatatatatatagacagagagagagagaaaatatatatatacagatatatatawatatatatacagatatatatatacagatatatatatatatatatagagagagcacactctgtatttaccattaattttctcactcttcttgcatttcagatagattctggaatttttttcttctttttgtattatattctattaataaaggcatttgtatataagctatgtgttttttactaaaaatattttatttaacatttattatactttattgaagcaaaattctagattgacactttattttatttcaatattttgaagatattatcccatcatcttcaggcattcattgttgttgagaaatatactgacactatatttctacagaaggttttggccttcgttgataatatgcaaatctatatctgatgtaaaattgtttcggtcttagtcatttggggcaggtttaacaaattaccataaactaggtgtcttataaactgcagaaactcatttctcacagttctgtgagggctggaagttttagatca

SEQ ID NO: 697829 - DNA, 680 bp, Homo sapiens
tccctaaagttttaactcacttcagcattaagtcaaaagtccgtagtccatctaagttactttcctccagtattatggttttgtcgtttttcaacttcttgaattattagtatttgtgcacatatatatatatatatatatatagacagagagagagagaaaatatatatatacagatatatatatatatatatacagatatatatatacagatatatatatatatatatagaragagcacactctgtatttaccattaattttctcactcttcttgcatttcagatagattctggaatttttttcttctttttgtattatattctattaataaaggcatttgtatataagctatgtgttttttactaaaaatattttatttaacatttattatactttattgaagcaaaattctagattgacactttattttatttcaatattttgaagatattatcccatcatcttcaggcattcattgttgttgagaaatatactgacactatatttctacagaaggttttggccttcgttgataatatgcaaatctatatctgatgtaaaattgtttcggtcttagtcatttggggcaggtttaacaaattaccataaactaggtgtcttataaactgcagaaactcatttctcacagttctgtgagggctggaagttttagatca

SEQ ID NO: 697830 - DNA, 680 bp, Homo sapiens
tccctaaagttttaactcacttcagcattaagtcaaaagtccgtagtccatctaagttactttcctccagtattatggttttgtcgtttttcaacttcttgaattattagtatttgtgcacatatatatatatatatatatatagacagagagagagagaaaatatatatatacagatatatatatatatatatacagatatatatatacagatatatatatatatatatagagagagcacactctgtatttaccattaattttctcactcttcttgcatttcagatagattctggaatttttttcttctttttgtattatattctattaataaaggcatttgtatataagctatgtgttttttactaaaaatattttatttaacatttattatactttattgaagcaaaattctagattgacactttattttatttcaatattttgaagatattatcccatcatcttcaggcattcattgttgttgagaaatatactgacactatatttctacagaaggttttggccttcgttgataatatgcaaatctatatctgatgtaaaattgtttcggtcttagtcatttggggcaggtttaacaaattaccataaactaggtgycttataaactgcagaaactcatttctcacagttctgtgagggctggaagttttagatca

SEQ ID NO: 697831 - DNA, 558 bp, Homo sapiens
tttaaaataatagactgagttaaaaaatatccaccctcatcagtgtgggcaggcatcatccaatctgttgaaggagaaatagaataaaaaggcaaaaaaggacaggttatttctcacttcttgagatagaacatctatcttttcctgcccttagacatcagagcttctatctcccacctttgggttcaagttctgacatgtacaacatgatgactacagttaataatcctgcattgtttacttaaaatttgctaacagagtaaatcttaagtgctcttaccatcccccccacacacatatatgcaccagtggtaattacaggtagtgatggatatgttaattaatttgacagtggtaatcactacacaatgtatacatatatcaaaaaattacattgtacaccttgartgtatacattttttagcaatatatgatttaaactgaaatttaaaaaataatagaggaagaaaatggcattgggatggggtgaggcagaggtggaataaacagcttcttttcccacaaaaaaattgcattcaaaaatcattgtttataata

SEQ ID NO: 697832 - DNA, 666 bp, Homo sapiens
taaaaatcatatttggaaaaatacattattaggccgaacttactttcatccattgctgccctctctaaggtaaaacacaaaaacaaataaaatctatcaaakaattgtataacttttactagtattgaaaaagggtatttgagttgctttaaattttatttttataatgtatcttgagaagattgcagttttaccactagtcaaacttttataaacacatcagaaattacatttaaaaaccagatcaggaattatttttctaagaaactagaagaaatcaaagacaaattaataataactaatagtttgaagcccgcttatctacaagactctaaagatataaaaacaagaacataagttaaaggcagcttcatttcacgcttcagaaagctggtctttggcacacaagtttgcttgccttgtatgatcattttgcatattcagaggtgaatccctggcggggacaggaaaacatgtgtgggtgaagctcagagtagcagcacgtcatcagcagcttgacattcttcaaagaaaaaaaaggtccttgcattttggctatatcacttacagttcacttttttgtgtaattctctatcggtaagatttattctaatggtttaaagtggatttgttacccattctttcccattctggtgtggaatctcc

SEQ ID NO: 697833 - DNA, 916 bp, Homo sapiens
tgcctgtattattttaacctgtagaatcttaagaagattcaagaaatggaaaagagcgatgaatctagcacagacttggaagagctgaaaaacgctgactgggtaagagctggaaatgctttctgatctgtttactgtctaagaaatagtataatttttttttttttttgagacagagtctcattctgttgctcaggctgcagtgcaatggtgcgatctcagctcactgcaacccccacctcccgggtactgcaacccccgcctcctgggttcaagtgattctcctgcctcagcctcccragtagccaggactacaagcatgtgccaccacgcctggctaattttgtatttttagtagagacggggtttcaccatgttggccaggctggtctcaaactcctgaccttatgtgatcctcccacctgggcctctcaaagtgctgggattacaggcatgagccaccttgcccaacctgtataatatttttaaaaatgctagttattggccaggcatggtagctcacttctgtaatcccagcacttggggaggccaaggcaggaagattgctggagcttaggaattcaagaccagcctggacaacatagtgagaccctatcactaaaataggaggatttttattattattaaaaaataaaataaaaaaattagccgggctggtggcatgtgcctgtggttccagctacttgggaggctgagttagaaggatcacacgagcccaggaggttgaggctgcagtgaactatgatcacaccactgcactccagcctggtcaatagagtgagactctgtctcaaaaaaataaaaaataaaatactcgtcattaaggactgtagtatgaattgatatgtaaatttgaatgcttagtcttacatttgaggaaatatctattccccat

SEQ ID NO: 697834 - DNA, 587 bp, Homo sapiens
tttgacmttttatttgatttcaaaacatgttccagtttccatcattatagtgggtcctgtatgccatgtttatgttttgaaaggctgaaattatgtgtgatcaacaaatttattttatatcaagagcatctgtacatattaaatcctaaatgtgtcttgaaaaataccccctcacctttctctatcctgcattttatctgaagcattgtaagtcttcatgaaaaacagaggaaaaaatgaaacacagtaactaactaggaaccattagaattattttctttgacatttcctttttttttttttttttggagacagagtctcgctctgtcacgcaggctggagtgcagtggtgcaatctcggctcactgcaacctccgcctcctgggttcaggcgattctcctgcctcagcctcccaagtagctgggactacaggcgcctgccaccatgcctggctaattttgtatttttagtagagatggggtttcaccgtgttagccagaatggtctcgatctcctgacctcgtgatccacccaccttggcctcccaaagtgctgggattacaggcacaagccaccatgcccggcc

SEQ ID NO: 697835 - DNA, 1017 bp, Homo sapiens
ttatatttcttctgtctgccccttgggctctggttcttggttaagaaatgtctcataaatttcagaagaggaggaaaacagaaggtgatggtacagaacattctattttcaagactataaatatttcaacttctcgaagagatcacctatcatgaaaacttcagatcttcctaagtaagtcttataaaaattaactataaagtttatgacagtttccacaatcaagtactgtatgccagattggcttaaagcatttagaaatgagcagcctgaatgttggcaaaaggtcacatactggaaaagagtaatgtccaattcaaaaagtgaaaagtaagagacgctgccaatccaaaaattgaatgcccaaactttactgaattctgttaataaaatcaacaagttgttccactgtacaggcagggttactactttatgctgataatccaataagtgtttattaagcacctgctatttacaaagcactgtgctggacgctgtagagagaattgataaaatatctcaaggaacttagaaggtaaccagggaaaaggacaagtacaaaaataaataatagaactcttaccaattaacgtgagcraccaaataacctgattttaaacatgggcaaaagaacagacacttaacagaagaacatgtaggaatggtcaggaagcacatgacaggtcgctcagcaccattagtcatcagagaaacggaaattaaaactacatcaagatgccatttcacacccactagagtcgctcaaataaaaatgattgacaatgccaaatgttggccaagatgtagagaaaccggaactatcttatattactaggggagagtaatggtacaatcatgttaaaaaactgtttggcaattctcttaaagctaccctattgcccagcaattccatttctaggtatgaatacttaccccaaagaaatgaaaacctatgtctacagaaagcgtatgcaagaatgtttatagctgctttatttacaatagccttcttcccca

SEQ ID NO: 697836 - DNA, 666 bp, Homo sapiens
cttcttggtagtttgggcggcggtcctgacaggaagaagggaggccgccttggcgtggctgttttggtagctggaccgtgaatcatggaggcctggcyggctcccacacggtggcgtccttgagttccagatcctctttctgttctctgtgtctcctctctctctttgcacattcatggaggttctctgggcaccgcccccatggccctgcctgagaggtggaggtggtgccaggctgaccctccagggacagctctgccacctgcaggagcactggccacagtgcatcggagcgtgcaggtggcttctgtgccatggtgtgggtggcagccccagcacggccggccccggtcggcagctcctgtttcaagggcaggttggaggctggctggccgcttgccccaccctgggcagcctgcacccagagtcgaggggtaggcagtctccatccgaagaatgcgcccctccttatcccgaaacctcagaggcctccttcctcagatgccagctgttttctcagtgcccttggccgtgccctcacccctctctcaccggaagccccaccccagcctgtcgtccccggtctcctgaaagccagcaagcctcgtcggtgccgcccacacccctgacctcacgcagccccacgtcaggctcgatcttttgtcc

SEQ ID NO: 697837 - DNA, 666 bp, Homo sapiens
cttcttggtagtttgggcggcggtcctgacaggaagaagggaggccgccttggcgtggctgttttggtagctggaccgtgaatcatggaggcctggctggctcccacacggtggcgtccttgagttccagatcctctttctgttctctgtgtctcctctctctctttgcacattcatggaggttctctgggcaccgcccccatggccctgcctgagaggtggaggtggtgccaggctgaccctccagggacagctctgccacctgcaggagcactggccrcagtgcatcggagcgtgcaggtggcttctgtgccatggtgtgggtggcagccccagcacggccggccccggtcggcagctcctgtttcaagggcaggttggaggctggctggccgcttgccccaccctgggcagcctgcacccagagtcgaggggtaggcagtctccatccgaagaatgcgcccctccttatcccgaaacctcagaggcctccttcctcagatgccagctgttttctcagtgcccttggccgtgccctcacccctctctcaccggaagccccaccccagcctgtcgtccccggtctcctgaaagccagcaagcctcgtcggtgccgcccacacccctgacctcacgcagccccacgtcaggctcgatcttttgtcc

SEQ ID NO: 697838 - DNA, 865 bp, Homo sapiens
agagagaggtgttctgtgggctggaagcagtggctgatgcctgtaatcccagcactttgggaggccgagtcaggcagatcacctgaggtcaggagttggagaccagcctggccaacatggtgcaaccccatctctactaaaaatacaaaagttagctgggcgtggtggtccacgcctgtaatcccaggtactccgggaggctaaggcaggagaatcacttgaatctgggaggcggaggttgcagtgagccgagatcatgtcactacactccaacctgggcaagagagtgagaccgtgtctgaaaaaaaaggaaaaaagagagaggggttcgctctctgcattaggcacctgcttcatccagttgccttctgaacagaattcraaactcacatatgtaattatgtgttcctcgtgtccattttcagttgctttattcaaatacctcactccatggtgtgtacaacactgtgccaggttctcaataccagaggaggactcccacttcctggaggataacaaagctcatcccaatgccagcattaggaataaaagtccaaacacttttgcccactgcatcttggtaacagagttgccaagggaaacacaacagcatcaagcacaggatggagcaatgcttttactcacatcagaagagacaaggtgagatcagctccaacagcgtgtgcccatccctcatagctagcgggtccccaggttgccacacaaggcaatgagactatgcacacccttctggagccacagtaaaaggacccctccccatcacccatggagtctgagatactgaaagctaggagcacgtcttgcctgagagccattgacttacaatcttaggcacacactgagc

SEQ ID NO: 697839 - DNA, 611 bp, Homo sapiens
tggtgtatacacacatatacattatgtgtatacgtgaggggtttttttgtttgtttttttcagacagagtctcgctctgtcgccaggttggagtgcagtggcgcaatcttggctcactgcaacgtctgcctgccgagttcaagcaattctcctgcctcagtctcctgagtagctgggactacaggygggtgccaccacgcccagctaatttttgtatttttaatagagacagggtttcaccatgttggccaggatggtctcgatctcttgacctcgtgatctgcctgcctcggcctcccaaagtggtatacatgagttttaatcatgttattcatatatttatgtgacatataaagtaaatgtttgggctctacttttttggggtagtagcttgttttttttaattaaattttatttttttagagacagcatctcactctctcaggcttgagtgcagtggtgtgattatagctcactgaaacctcagactcccagcctcaagcaatccacctgcctcagcctcccaaaacattgggattgcagacatggaccattgtgccccaccaggttctcctttttaaacttaacattattttatatgtattttctta

SEQ ID NO: 697840 - DNA, 1130 bp, Homo sapiens
tgccaggtatttaagagacgagctttacttaaagaaattgatccatactcttaactcagaatctatggcttgttttgaggtaactaaagataagatcattaaggatattcaatgagtgccacaccttatgtcaccttcaagatgttatcatctctaagcaatgacctgtgccacatgcaagtccttgataactcatgaawaccaaggtttaaggcagtattcatggttcagctttttttttctcatacagaagtgatataaagaatagagaagactgtgctcagatttaaaggggaaaatgtttttacaaggaagaactgtatgattgaagctcaaggaaattgagcatctcacttgcttggcaggcccctgtcaagagctcacaccttagctctttccttgcttgtttcccagggttgaaatggagcccttgccagcctacctgtgtggtgaaaacagtgtcagcattatatggaaagcgtctgctgcccagtgtggctctgggccctcaagctgggcgggagctgtggaggagcacgggggccctagtacgcacctgctgttctgatgggagtggaagaactgctctctccataagcaaatgtggccccatgctgcatgaacagctgcagggctgcagtgagggccttctccattcttccctcaagaacataggaaaacaaaattagagtatcaatccagaatgcccaatatcaatctcacagcagtgttttaaagacagcgaagaggaaaccaaaaggaggaagttatcagataactaatgtattacatttttccattacaggaaatgggtctctgccgtgaatggattcttcaagtgcactgcacaatgcactggaaaaaagagaaattctcataaaagccatgagcatcaaaatgagatcaggcttctcaacagccatggtgggcaggagagaagaagagcaatacctcccatttcagatggaaaattacttttcacctagaattttctatccaacaaatataagtcaaatatgagaatacaagaaagatattttcagaaatgaaaagtaaaaaaaaaaaaaatgtagtcttcacgcacactttctcagacaattactgaaagttctgttccatcaaagcaagag

SEQ ID NO: 697841 - DNA, 1069 bp, Homo sapiens
tctatttgtctttttgtacacagagatcagatcagtgcttggcataaactgctcaagaaatatttgtggaatagactaccaattcctatgataaattcttagcaaaaatcatgtgtgtctgccctctagaccattgagttgataaactataatttccttaaaaattcctcaattgctggtttccatattgttactacactacaattaacattttaaacgtattttttctgtgtttcagattgtttttaaacttaagattcataaatgagaaattctaggtctcaatattttttaatgaattttgacatgtattttccaattgcttttaaagaacttggatctactttcatcactttcaagctatatcccagagttcatcaagactacattaagacaggatggatactctttcctccaggaagccacctctgtttccctacccactctacctgttaagcttaggtgtgtctcctctgtgcttctatataacccttcactatagagttaggatgttttgttatggttatatatttacttgtctttcttccaaagaagactatgagctcctttaaaggaagaggcaaatgtaataaattattacaatccctagcgcctagaagtgtaacagattcacaatacattcttattgactgtaagaaaccagtgcttaatccaactatataaaaaaaatgacccatgaatgaagataataatggcaatgattatgtaccaaacataaattggaggatgagagagatgaggagactaccgatttattctttactctggaaactttgacagaattaatgttcagtacatgctataatgttcgattattcaacagttcacacactggagtcaggaagttgcccaacactgaattttcccttctccatcagcctgcctttactccattttatatgtcaggtttccttcctctaaaaattcttagggtttaccacttcagcatgcagatttaattactggtagtgctgyctaaggcaagcagtcctatcagtgctaaatctgtttaaaaaaagtccacacttttcttggggaaaaaaaaggt

SEQ ID NO: 697842 - DNA, 646 bp, Homo sapiens
agagcattgagtttaaataaaaaatattaaaagtccctaagattgttaatagacccaatgtgagatacatataaaacacacacacacaacgcgtgtatgtgtgcrcacacacacagttatttggaaaatgaaaatttttaggagcatagaagagttggaagccactctagaagtcatataatctaggttttttttaaaaataatctgtttgatcatcataatcatctggggagatttgtggaaggatcatttacgaaaatctcctccctaactactgaatctaaatttcagagaggggccctaggactccgtatggtttaaaattttgaaaacacataccatgactcatgtgggaatactaatttttcttcccaagagtccttgttctttcagtgcttccttggatggtgtggcttcctgccattgatcatctggtcactgtcctttgaacaaatccgtctgcctgtttctcactgaaagcacagaggcaggtgtggagttgagaggtggcatctttccccagattctggactgtggtctaccagagcaccaagatccagttaactatttggcaatgtttttacatttttggctgatattgatctagcaagcagttaaccaaaaatgttgggttttgtttgtttgt

SEQ ID NO: 697843 - DNA, 646 bp, Homo sapiens
agagcattgagtttaaataaaaaatattaaaagtccctaagattgttaatagacccaatgtgagatacatataaaacacacacacacaacgcgtgtatgtgtgcgcacacacacagttatttggaaaatgaaaatttttaggagcatagaagagttggaagccactctagaagtcatataatctaggttttttttaaaaataatctgtttgatcatcataatcatctggggagatttgtggaaggatcatttacgaaaatctcctccctaactactgaatctaaatttcagagaggggccctaggactccgtatggtttaaaattttgaaaacacataccatgactcatgtgggaatactaatttttcttcccaagagtccttgttctttcagtgcttccttggatggtgtggcttcctgccattgatcatctggtcactgtcctttgaacaaatcygtctgcctgtttctcactgaaagcacagaggcaggtgtggagttgagaggtggcatctttccccagattctggactgtggtctaccagagcaccaagatccagttaactatttggcaatgtttttacatttttggctgatattgatctagcaagcagttaaccaaaaatgttgggttttgtttgtttgt

SEQ ID NO: 697844 - DNA, 1051 bp, Homo sapiens
ttatattatttaagctacccagtctgtggcatattgttatggcagcttaagtgcgcagagacaatatacaaaaaaatcacaatctgtaaaatgcattcaaattttattgagccaaaccmgtaccattcaaacgtattaatgagagactttgatttggaagtgagcgaattgaggaaggaaactctaaggagatgggaattaatttttggctaattcagcaggcatcttaatttcaggagcagctgtggattgagttttgggcacagaaaaggcatcaatgaagctggcagtatcattagaagcagcagttgcctccagggctcagtgaggcaatggcaatcatgatgtttccctgacgggcaatttttttctccatcatgttgtcgagttctgaggctagttccccaactctacaaacaattctgcgaactgattttatttttctttttttttaatgaccattttcgcttcattagcagaatcactttcattgactgctattaagatccctgactgatactgtggaaataaacaatgaataaataaatatgtaatgtatcattatgattttatatacacaataaaaataaaccatgataaagagacgaagtgattggagctatgatttcaaataggaatatgaaggaaagttggacctaaaaagactcatgtttctgcatgtttcaatttgggagaaggagacaatatttcaaaagacttgattatagtttagtaatgagctctaaaagatctggataagtatagttcatgcctaactaacaggcagtagaaaggcccagaggtaaaaatatgctttgtatacatgagaaggaatatatcatccagaatatttttcaaataataaaatattacttatcaaaattttttataagtacatcaggcacatttagtataataatcttttaaattgaaaagacataataatctaagaaatggatatactctctttgtttaataacaacaaaacaaaacaagaaaaccataagaattagcactatatttaatgctttgcctaaaaatatatgtcatt

SEQ ID NO: 697845 - DNA, 616 bp, Homo sapiens
ccgcatcatatgatgctttgaagatccatgctctgttttaccctggagctgtgattctcttattttttctatgtgaatgagtacattgtgctgttttcctaggcgccaatcagtacatacttgactggtctccggcaawctgccagggttataaggcggagtcctctgatctctgcattgacccaggcttcagggatcggtcctgtgttggcagcccctcagctgacctgtctttttgcaatgctaatgccaagctttcccatctcttctcctactcctatgtagaatatggcttccttcctttaacttcttcattacatgcacacaccccacatgtacacactcaactctcctcatcaaaatttattagagacacccattcgataaatatgtttcaggtatcttctgtgtgccaggcactgtgctaagaattaggaatataaattaaacaagacagatcttgaccttgaatgtactagacagtaggaaatagacagcagacaaatatgtgaataggtaactaaaacattttcagactatggttagtgctttcagggaaataagtggggcgatgggccagaaagcaaccggggcatttactccagttggagtgaac

SEQ ID NO: 697846 - DNA, 569 bp, Homo sapiens
aagaactcactgatttaagtggctaaactcagggttcctttggaaatgttaatagcagtgcattgaaattttgttttgagaacatttagtagagaaaattttaaattatttcctgcaattaataaattttatgtgctaatactttaacattatcagtgaaaatcaaggtagaaaatagattatatgtgtatttcttccaaaattaaaataacaattaaatacagttttatgcttgaggaaaaaagagatattccaaattcctctgccacttacagtgcatagttacatwaaaaaacataatctaatcctatctcattctaaacaaaagctttagaaaaatattcttagcgaatacaaacacatacaggcttcatttatcatttggctctgtaactgcccaagagatgccatcatgaccatcattaggagacgcccttccacaatttcttctcattaaaatgttgggcttccagatggaagactaaaagataatacaggagtaatgatggatgaaggcagaataatggaaaagcaacaaaagcaatatatagctggaatacacattctca

SEQ ID NO: 697847 - DNA, 2411 bp, Homo sapiens
tactgtatagtatctaaaacaccacctcagtgttactgaccaagaagactaagtgtcactccaatttattatagtaaggctacattggaaaaataacgaaaaaaaaattaaaagaaaaaccgaccaacttcatgatcccacattttcattttaaagatctagcagttgatacatgtaaagagatgggattgaatgctgaccactacattttaatcagtttatgatcctaataagaatttaccagaatgtttattatcttaggtattaaaatggcaaaggagaaaaacattcgttttctaatacttatatagtaatacaagtattacttggggaatgtgtttgggctttggaggaattttactattattgtacaatttttgtttgaattatatacgatggtttgaaaagaggtaatttagctattctgataaaatttaggttagggaatttgtggaggaaggaatacaaccagggaattagtttctataaggacatgggaaatgctagtgacttcacctgccaagggagtgctttaaagttgggatttataaaataaaaaaaaaaagaaaagaaaaaagtaatctttttatgatatcttcaaagagtgttgaacattctctgttttaactgtggagtacattttggtactttaaaggctggtagcatcatacaatggttctcagaatgggcagcttcttacagtcaccttggggatcctttaaaatctgatgcctgggctccccttatagattaggatttaattggtacaggatgcagacctgggcatgaatacatattgttaagctctccaggtgattccagtgcacaaccattgttaataataactaatccagacctctatagcaaattaaaatcaggatggttatttattggaaagagttaatattcaaataacagtgtctctatgtcacatcccagtttcttgccaattttcccttctagtaaatacctagagtattaatattgaaagaaattgttccttgttctcagtgaacctctaatgaaatgaatcagcattgaaaaccctaggctatttctaggaagagaaaatgaattttattattttgaaagttgttcaccaaatactgtcattttagcacttctgcagcctatttttaaaaataagtttatgacttggagtgggagggatggctgtacaccacacttacagatgcatttgtctgaggtgataggggagtcagcactaatttagtcagtgtggacaagtgacatcgtattttcagtwggatgagagtaatgtgcatatgcaaaataatgatacatttcccagacatttgatagtacctcaaagcaagttaaaatgacaatttaatcttctgcagttatgaaataaaatctaacatttaacacactcttacaaaaaccgatattcactataggtgggttttatttttatttttcagatttttggctgaaattaataagaatgcctgtctaaaaatcacgttcatccatatgttgtagatgtcatttttgttctatacttcattacttttgagagtagttggagattagcaaagactcatgttgaaaggtcttcaaacttaaggcacgtggttatgagccattttcttcaggtactcaatttcatctttagctaactttcttgtaatgactcctgtctagcatgacttttgaaattgcaatcttccttctagaattatttctactttacttgtaaaaaattgccttttcctttatattttctagcttttatggaaaaataattatcaacatttattatttgcttttcactttcaaagtcagccatacgatcactttgagaaatggtttagtcacatctcccaaagcttgtgttgtagtatcacccagctgttctactcttccatatacttgcagcagaaataaagtatattcatagcagcactattaaaaatagccccaaattggaaactatgtgactgccaatcagtattaaagtggtgagtgtattgtatcatgttcacacataaatttactgtgcagtaatgagaaataacatctaaaggaatatgcataaaagtgggtaattttcaatatatcatattgaagaaaaggaataagaagaaagtgtaatatatagttccattaatatacaataaaaatgcagcccgaactaacattttagaagacaggatcgtgatagccaggtcaaagtgaggaaagcagattgcagtggtaataacataagagatgcttctggagcactgatgcggttctctttcttgacatagattctagttattttcagtctgtgacagttcatagagaagtaactttataatgcatgaggggttttttttgttgttagaggagcattatgacatagacaaaacaaattatcgctagtcccattataaagagaagtg

SEQ ID NO: 697848 - DNA, 587 bp, Homo sapiens
cagcatgtttaatgaagtagataatgtaaagcagtggttcattcctagctgcacgattgaatcctttaaggagatgcagtcactccagattttctttttccagtattctagagcagcaggtctcaaataatggtctctggacttacagcttcagcatcatctggggaatttttagaaatctgaattctcagatatttctctagaccttctaaatcagaaaatatggatgggtctcaaaatcrtgttaaaaaaagacttccaggtggtctaactgtatcccaaacttgagaatcagtatctgggatgaggtctatgcatcagtgtcgcttaaatgtttcttgcaagtctcatggaatctggagttgagaagcacaagccttacaggaccttctttaaaaggggaaggagcatagcatagtggttttagagagtcgtgaggagccaaggctggctttggagctggaatatcagggttaaaattcatgttcctccacttcccagttttgtgactttgtataaattaatctgtgcttcagtttaccaccatataaatctggtgataataattgtacacatttcttagtgta

SEQ ID NO: 697849 - DNA, 596 bp, Homo sapiens
gattatttctaactttgcttgttttccttccatcagggtctctgaagtgcagtttcccagcctacagctgacctgtataagaggtgtagccgtcccaccagcagctccctcctgctgctccttccaccatatctctgggttcacctaccacagatgccaagccttgtcgccccatcctgcttttgcaagatggtgagatcctaaactaatggagatgatgttctttgggttgaccrttctggtatagaagttcagctgtggagcaatagaagcagcttcatgtaattgtgagaagggcccaagttcagaaacagaggcccacattgaggaaaggctgcagcatcctcacaagatgtcatggtggttccctaagccatctgggggtttagttgggaataaacagctgtgggttacattctgtaagtttcatacatcccctccacttatttcctaagctacaagaccaattcagttttcatctcgtttcttctttgaacctttattttagcaaggatgtgctttctctgagtacagagagaattagtccaatttcgtctctgctggcttcctgctcctgccctttgcaggagcggttg

SEQ ID NO: 697850 - DNA, 2901 bp, Homo sapiens
ctaggttctaccatctatagtgtatgttctttcatttatcagcatttgatttatttgtttcagactctagaaatccgattctgaagtctaacataatccttttagattgccgttggtttcctaacctcacagaaggcacaggttgatggtgtgtccaactcaacacttaagttctgacagtctaggggtatgaaacatagaccaacttcaacggttcaatgaacaaaatcctatctacttgttagtcttctataagacatttcagctgctaagctgacagtagtggtcgagatattaagttggacaagatactttctgaagtgtctagtttcagaccaatgaatacttggatttgttttctaggctacaggaacttcagttttgttctactgctactgcctctaagaagcatcttataaaggccgacaatgtcatgcatgtatttagaaccttggtgtgtatcttagactatgccagattgtagacactctcttgccctcccttctctttgttgcattaggtatgatagatgatcttgaactctgactatgaataataactcttgaccagaatacagcacctcactaacacagaatagacatttcaaagggattcagaatgactgctttaaaccaatatatggaggaaaagccaatgatattagtatgaatgggtttatttgaaaacgacttagttatgaactttgaaggcctttggagaaagggtggaattctgaggctaaagtgacaaattgaagtaagtaaataatagagtattttgattatcctggaggtttttctccagaaaaagtaatttatttgatgaatttggttacttctactaaatagattccaaaacaatttttcaattttctattttattttaattacatataaaaccaaaatataatgagaaggcatttatccagctatccaataatgttgccataaatattctttatgattatcacagcctgttttattcatgtggaccatgccgtgattcccaatcaaaccctaaagataacaaaatctggtgtccatattccttgcttagggatgcttaagtgtattgatatttcttttaaatataacatctgcattccttgttttctttcttgtgatacctgaaatgcattttattgatagaattcctagattaagctctttattatcatcatcagattatacttcaggactccctggagggaaaataatatgcatacacacacatacacccagtgctccaagatccacggagagaatttcagacaaggagaatttttcaaagataatcaycctcgtgttgctgttcctaagctactcttcagccaacacctctcagtctgttgtccactatagattgcaagaccctggggaagtgaacgttgctgagttcatgagatttctggagtttaattaagctgtagacaaactcctcatagattacctctagcccatagacaatcccttttgcttcttttgtttttgtttataacaaaataatgccactttactcccaccctagaaagtaaggacaagcattattaatgatttctttgctaatctttctgtcttttggcagaatgaagaatagttcttctggtgtgaggatccactgggttgccactgacccattgcctgagggtatgcgatgaaaccagaatcagcaactgtagatggcagctcagaaggggaaacgacacatctaataaccaacaggaatggctattaattagctgaaatgacaataattaacagaaatgacaagtctaataaattttcacttaagtgttgtcacatggcactttgagttttagctttccattttaaatattaatctcggtggggtttactttagatgaagagtcatatcaagtatgactatggaaataattctgtacagacactccatcaaattatgtttaatccatttcacttatgctatgatcagtagagagtgtattaaaagctcacattgtcaccctaaaaatatattctttttgtgtgtatctaatttatgctgctcagaaacattcagccacagggatcagagggaaggtggttgtttttaattttctttgatatcttcaaagataggaaagtctcacccctctgctctttccccctcttcagcaacagacaaagaaggttaaatcttattagcatgtcctatatagctagttgtaacctaagtgacctgtcatggcactaaatgcctactagaactttctctgtacttgcaagatggaaattttatgcatcaatgcttttatgtatgcatctgatttgggaagttcactgctttatggatatgaacattgtgatcaagtaaattgatctacataatgggattttgtgtgtgtgcgtgcatatatctatatggatatggatgtatgcaagtgtattctaagaggaaatataatacatgaaatgttaactttaatgatatgaaatgcattaaattcaaactatcttgcatgtgtatgcagatgcattatgtctctatcattgtactctgcagggatttaaggtagaaaaaattcatcgtattctctgatgtgccatgctaaataagagtgcaacatggtactattataagcaataaataataatctcagagaccaagacttatgaagcttttaagaacatcccttagcaaaacagtgataaaaatgaaattgtattcagggacatacagctctttctttcagataccctgactaagctcctttgtctctaaactatcatctactgataaccaagatttctaaattactgaattctaacagccaaaaagtacattatgttctcagctctctttcctccaaaattcattaaccactgggtctcattacttcaggacctaatagtagattcatcagataagctattggagcca

SEQ ID NO: 697851 - DNA, 1104 bp, Homo sapiens
atttctgataaattacaaatatatactcttgcttatcagatatctggcccagaaaacttggaaagcacagagttttagtttaagtctaatttatgattagcatagtaaacacatattttgaggtgtgtgcgtgtgtatatatatatgtatatataatcaatctattgtaagtacaagtaattgctttctgcttagagatgtctagatgttgatcatgcctactagtcaacagaggctaggttattctacagcaacaagtatctccatattttggaacaacacaacttattgatctacctccattcagcgagaataaaatgctctttctctgttttgtccacattctggtaccctgtctaacagatcagctactgtctgcgatattgccactgccattgtrgaagtaaaggagagaagactgcagaatctaaaatgagcaatcaaacatctcacttccactgacaggctttcgaacagaactagacactttactccacctgacaaaatatcaagaagaacaatcccaccatgagcccaggaggagagagaacactaagaacatgaggaaaagcacagaaggtcccagcatcatgctgtgtcctcacagattctgagaaaaatcccttatacttcttcatatttctatcctgtagaagaatgtggtactccataagttgtatttgttgatgaatggatggatcatatttgccaagctaactaactaatttaaaatatctggataagatggttttctcttgcacagttgtcttctgattccagctgccttcaaaatgagttctatttggaaatatagtgccattataggaaatatcaatatgaattcagaatatcataaaactaaaaattgagttcttttttttgagatagggtcttgctctgtcactcagggtgtgcagtcaggggtgtgatcatggctcactgtagccttgactgccttggttcaagtgatgcatcctctcacctcagcctcctgtgtagccaggatcacaggcatgtgccaccatgccaagctaattttgttttttagtttttgtaaggatggggtctccctatccttggtggtcttgaactcctgggctcaaa

SEQ ID NO: 697852 - DNA, 629 bp, Homo sapiens
tagggaagtaaaagtatacaggtagtggaaatcttggggccatcttagaatcctgcccaccacaagcagcaaaatattcctactccattatgtttcccatagctaccttgtgtcttccaacttcgtgtgagtggtgtgtttgttgctttgcttatgggcaaagatgattttttgggggagatatttgattaaccttctaatttcttttatctttgacaccttcagtcttccttcatttacctttatacagacttttttataaggccacttttcttttcctttttcctttagggtctcttccctttgcatagattattggaactctccacttacaaagactagcttttatgcttccaactcttgatataaagtttttatctagcatcagaacttgaatgtgagttgtccatgtgtcagaactgtctttcaaaatcaaaagtttcacataccattttcaattawcccaaaggaaatgctaggcacctatttattccacaattatttttaaagtctgtatgtattaattgtgtacatactattttattatttacaaagtgagttaagcacagtattcctgttcaaaatatgaaaataagtatcatggaaaagtggcaaatgtgtcttgtgtt

SEQ ID NO: 697853 - DNA, 628 bp, Homo sapiens
tgctcaaaataaatatgtaaccaaaaaatggaaaagtaaaaatgagcaatgctaagaaatggtrgaagaacagtatttaacctagtatgaggaagaaaagaaagttctctccaatgaaacctataaaacgatcatgaagaatgaatagattaaaaaagtgaaagcacatttagataaagacaatgccagacagaggtaagatggagtgtgctatgttcgtggaaataaatgcaagccagggaggatgaaacaaaaagaataaagaaagagtggagggagaggaggttggagacagtagctaagtgcagatcatcctgggccattctaatggcaaggactgtgtccggaatttattccttctggtgggttcttggtctcactgactttaagaatgaagccccagaccctcgcggtgagtgagtgttatagctcttagggacccaaagagtaagcagcaataagatttattgtcaagagcgaaagtacaaacgtaccacaatctggaaggtaacccaagcggattggcagtgctagctccggtggccagcgtttattcccttatttggccccacccacatcctgctgattggtccattttacagagtgctgattggtccattttacagag

SEQ ID NO: 697854 - DNA, 642 bp, Homo sapiens
gacaaacagttgcatgtaaagttaacaaaagagtaaaaaatcaagctaacactccacactcactatggtaatgaaaagcaacagcaatactactctggaatcatatctgtacaaaggaacaatataaraagttatgtcagtataaaaataagccaaaatccttctctttggctagcataagtggcaactgcctttttaccaatggcaactctagccctgcttcattcctctcaccttatagataagaattatttcgatatccaattgttgaattgcccctcttttttggcagcatgttatccagaacaaattgttgcttctttgaatcccctccgaaatcacttaatacaagtgaaaatcctatagcaagacccttctaactctcttactgacacattctcaattcctttaatgccatctcttctttagttaagcaagttaataagcctagctttttttttttttaaccaagttgttttctaggttgtcttttggcactagactttaacaatactgtgccaaaaaataagttcagtgttgttggaacttaattttcaacagagttgtatgtgacaatattgaaaaggctaaaaagggtcagtttatgcaaagccaaataggcatcattaacgtttattttct

SEQ ID NO: 697855 - DNA, 600 bp, Homo sapiens
cgagtagctgggactacaagcacgtgccaccacgcccagctaattttttgtatttttagtagagacagcgtttcccatgttggccaggctggtagcgaactcctracctcaagtaatccacccaccttggcctcccaaagtgctgggattacaagcgtgagccaccatgcccagcctggacagctttttttaaaaaagcaagattctgaacctcactccaaaccttctgaagccagaacctagagatcagcagttctggcacctggaactggtgtgcagggcctctgggctacccactcaacccagctgaactcacccctaatggctcctttggttttaaagggccagttttctcccccactgagagcaggggcagaacttgatggcctccactttgagccttgcatagcactatgaagacaggagcttgaacctgtcactgattagccacaaggcttcagccaacacacctgcaccctccactcaggataactaccttaagaggaaaaaaaaaatcagggaacgtctacctttcttcccttctgcaccctcatcagaatctctctcttaacatgggggtttcgttggtttcttgtttcg

SEQ ID NO: 697856 - DNA, 644 bp, Homo sapiens
cttttcttctccttcacttcctcctaggcctgcacctctcaatgaaagcatctataccttcacccttgcctcaggctcatctttccagaggacctaggcttagagagatggyactcatagtttatctttgctttccaagttcatctcaataaacaatttctgcagagtatactttagcagaataaatagaactgtactcacctttgataattcacatagtcagtgtcacatattatcatgtgtcatattctgccacattttggatgtcttctcaaagacatctaagtttctcaaactctatgctaatggtaatggatgttaaaactgactgatttaggaaacagtcaatttgaaggaaacaattgaacacatagtttgcaggtggctcctagatttcataatggttggacagagggagttaaaatacttttaaaagtgggcaattttctaactttccacgtgtaactcaattatgaattttacttttgcttttgcctgcatcccatgtcaccatcctgccaggcttcttgcaatttctgccattgctcttcaggcccttgaaaatataaggagatttgttgaaagggcaactcgtaaagaatggcagagaccagtgttagttggtttaactcccttctctaacc

SEQ ID NO: 697857 - DNA, 1111 bp, Homo sapiens
cagctatgcccactgtctctctcctggttgatgctcaccactgattttatgctgtcaggcattccattcacacagagtttaggttcttatccttagtggcactggcccatcaaggagttttatttttacccaaaccccttaatatctttatctctaaagacattttccttctcctaaagatgttctctatctttcacttacgtcacctgcaactatggccataatctaccagcctataactgctgcctccaaaatccctaaatcaaggctcctgattttttatcacaaaattatatcatttctagactaacttctagtatacttatgagaactctttaatatggaagagatgtgtgtatgtttaaaagccagtgaaaatggtccatttgtttgaggccagctgaagctacaagaaaacaaagataccagctgataaggtaaaagtctagtctatcaacacctctaacctctcttagcccatcagacctcccaattcatcactctatagattccatgagccataaatttagtactttattttctgagccgtgaamccttttctccctttgtctttgcacccgtttagcaaaagtctagctccagttgatctcctttgctttctcttctcatgcctatgttaaacataggagactatcaaaaaaccattccatccacctgtgccttggatcctgtcttttctcatcttcccattaatttgtgctattatctatatcttcctccttttgtatatttaacctctcctattgacttctaaacaggctcacatttctctcatcctaaaaagaaagttaaactcaagctctcattccccaactgctttcctgtctctttttcactcttcaaatgcaaatctcttaaaaaatttgccttcacccactgatttcattttctcacctacctctcactccccacccacgccaatatgacttccattcccaccactcaaccaaatagctccaagctcactaatgtttccattctgataaatttgatggtattttggggtagcaaaataccttcaaataccttccagacagtgtcttctatgaggttccatgttttctagaatggtattttggggtagcaaaat

SEQ ID NO: 697858 - DNA, 1111 bp, Homo sapiens
cagctatgcccactgtctctctcctggttgatgctcaccactgattttatgctgtcaggcattccattcacacagagtttaggttcttatccttagtggcactggcccatcaaggagttttatttttacccaaaccccttaatatctttatctctaaagacattttccttctcctaaagatgttctctatctttcacttacgtcacctgcaactatggccataatctaccagcctataactgctgcctccaaaatccctaaatcaaggctcctgattttttatcacaaaattatatcatttctagactaacttctagtatacttatgagaactctttaatatggaagagatgtgtgtatgtttaaaagccagtgaaaatggtccatttgtttgaggccagctgaagctacaagaaaacaaagataccagctgataaggtaaaagtctagtctatcaacacctctaacctctcttagcccatcagacctcccaattcatcactctatagattccatgagccataaatttagtactttattttctgagccgtgaaaccttttctccctttgtctttgcacccgtttagcaaaagtctagctccagttgatctcctttgctttctcttctcrtgcctatgttaaacataggagactatcaaaaaaccattccatccacctgtgccttggatcctgtcttttctcatcttcccattaatttgtgctattatctatatcttcctccttttgtatatttaacctctcctattgacttctaaacaggctcacatttctctcatcctaaaaagaaagttaaactcaagctctcattccccaactgctttcctgtctctttttcactcttcaaatgcaaatctcttaaaaaatttgccttcacccactgatttcattttctcacctacctctcactccccacccacgccaatatgacttccattcccaccactcaaccaaatagctccaagctcactaatgtttccattctgataaatttgatggtattttggggtagcaaaataccttcaaataccttccagacagtgtcttctatgaggttccatgttttctagaatggtattttggggtagcaaaat

SEQ ID NO: 697859 - DNA, 1111 bp, Homo sapiens
cagctatgcccactgtctctctcctggttgatgctcaccactgattttatgctgtcaggcattccattcacacagagtttaggttcttatccttagtggcactggcccatcaaggagttttatttttacccaaaccccttaatatctttatctctaaagacattttccttctcctaaagatgttctctatctttcacttacgtcacctgcaactatggccataatctaccagcctataactgctgcctccaaaatccctaaatcaaggctcctgattttttatcacaaaattatatcatttctagactaacttctagtatacttatgagaactctttaatatggaagagatgtgtgtatgtttaaaagccagtgaaaatggtccatttgtttgaggccagctgaagctacaagaaaacaaagataccagctgataaggtaaaagtctagtctatcaacacctctaacctctcttagcccatcagacctcccaattcatcactctatagattccatgagccataaatttagtactttattttctgagccgtgaaaccttttctccctttgtctttgcacccgtttagcaaaagtctagctccagttgatctcctttgctttctcttctcatgcctatgttaaacataggagactatcaaaamaccattccatccacctgtgccttggatcctgtcttttctcatcttcccattaatttgtgctattatctatatcttcctccttttgtatatttaacctctcctattgacttctaaacaggctcacatttctctcatcctaaaaagaaagttaaactcaagctctcattccccaactgctttcctgtctctttttcactcttcaaatgcaaatctcttaaaaaatttgccttcacccactgatttcattttctcacctacctctcactccccacccacgccaatatgacttccattcccaccactcaaccaaatagctccaagctcactaatgtttccattctgataaatttgatggtattttggggtagcaaaataccttcaaataccttccagacagtgtcttctatgaggttccatgttttctagaatggtattttggggtagcaaaat

SEQ ID NO: 697860 - DNA, 1111 bp, Homo sapiens
cagctatgcccactgtctctctcctggttgatgctcaccactgattttatgctgtcaggcattccattcacacagagtttaggttcttatccttagtggcactggcccatcaaggagttttatttttacccaaaccccttaatatctttatctctaaagacattttccttctcctaaagatgttctctatctttcacttacgtcacctgcaactatggccataatctaccagcctataactgctgcctccaaaatccctaaatcaaggctcctgattttttatcacaaaattatatcatttctagactaacttctagtatacttatgagaactctttaatatggaagagatgtgtgtatgtttaaaagccagtgaaaatggtccatttgtttgaggccagctgaagctacaagaaaacaaagataccagctgataaggtaaaagtctagtctatcaacacctctaacctctcttagcccatcagacctcccaattcatcactctatagattccatgagccataaatttagtactttattttctgagccgtgaaaccttttctccctttgtctttgcacccgtttagcaaaagtctagctccagttgatctcctttgctttctcttctcatgcctatgttaaacataggagactatcaaaaaaccattccatccacctgtgccttggatcctgtcttttctcatcttcccattaatttgtgctattatctatatcttcctccttttgtatatttaacctctcctattgacttctaaacaggctcacatttctctcatcctaaaaagaaagttaaactcaagctctcattccccaactgctttcctgtctctttttcactcttcaaatgcaaatctcttaaaaaatttgccttcacccactgatttcattttctcacctacctctcactccccacccacgccaatatgacttccattcccaccactcaaccaaatagctccaagctcactaatgtttccattctgataaatttgayggtattttggggtagcaaaataccttcaaataccttccagacagtgtcttctatgaggttccatgttttctagaatggtattttggggtagcaaaat

SEQ ID NO: 697861 - DNA, 934 bp, Homo sapiens
aagggcatttgtctatcttgcccctttggataaactcaaatatagaaaaaatgacatgttgtgttgctgtataaccagcagctcatcctggaaacaaacatgaaaggtcaaaacttgcctccctggtcccattttcaggtcttgttcttctgctggttctcctactaggaatggaaaggtaattacccccataagtaaagtacaaaatagccaaaagatagggaaatatttttcatgacaaggacaacctaagcagaagattgctggacaagaaatctcccagctcctccccttttatttaatctttcatgaaatttgttttctttttaaaacattgttcatagaacaattttaatttattaaaaacagaacatcacaaaataatgaactctaacctatttggaaatatacaaatacaaaatgcttatttcagtcctctgttgccatcttccaggaataattaatctataattttttatcttcctagatgtttttctacatttacataaaaacaaatatgtatatttatattatctatacatacatatctatatcaatataggtagatgatatagatacaaatatagatatagatgtatagatatagataatgggaatttrtggtcaaaaatagcttctattacttatattcaaagatatctggaagtgcttactgaaaattgtggaaccatttattgagtggaatttgacaaattagaatattaatttaaatttcattaaatgtgtattttgattttaaaatattgctatcttgatcatgcaagtcttcccatctaagatacatggtctaattcaggtcatgttctctgtcctttctgagaattttagaggtttccttatgttaggaactttaacattttcctggggatttcatagttcttgttggttcttcaaatataacttaatttccttt

SEQ ID NO: 697862 - DNA, 607 bp, Homo sapiens
tgaaaatcgatcagtattcttttcatcctctcctagtttatatattttgattttttttcttacttgytgatgtcctgtgtgaacatcagcattattaccttaacttatccttggacttccatggaattaatgaactgttgcaatagccaatcataatttgtgtttatggtttagcattctgtctggcttataattatttttagtacagatctgctagttcagtaaatgctttcattattcttagagctgaagaagcttttggttatgcagagcttgtcttgtccctgcaccttacttcttggccaccgcttgtagtaaacatcgtttttgctccattttaatagagctgcctgcagaaggtcatttattaggtaatcacttgtctgtgaaaaattctaattactctatgtttgtcaaagggaggaaaatagcattggatgtgaatgctgaatgagaagcaaaccagaatgcagataagggaatcagaagttttttaaattggtagataaaaagatgtgttaagtgcacctacattttgagggttaaaaagaaaagatacactatcagctataataaagataaaaaagcatagagtttatggtgttat

SEQ ID NO: 697863 - DNA, 633 bp, Homo sapiens
tgcagtaacattttcaagcattttgcacttggagtgcttttagaagtactttaatgacatcatttgtatgtacaccgtttagtaaagcttgtaacaagacttttcatttagttagctgtctacctgaaactattaaaaaatatagcagtagctgcgtttttggaaaatttcctatatctgattttacagataaagacaatgttaagttttscaatggggatttatgaacttttatggtaatataatattaccaggatcacattgttcccaaaagtttgagataaattagaacttggaaatttggataatagactacctaagttagagccataatcagatttgtcattttctcagtaactagtatatatcgagtaggtggaccctagctttaaaaattaagctacaacttctcttcttgttgaaaactttaaaaaaggttcccccactcccctttgctctttgccattaacttggatttcttgaactttttcagttttgcctccagtattagtgccccgacacaccgagatcctaacagaacttccgcctctggatgactatactcactccattccagaaaacactaacttcccagcaggaattgagccacagagtaattatattccaggtatt

SEQ ID NO: 697864 - DNA, 1226 bp, Homo sapiens
tgaaatttaattgccattgtaacagtattaagaggcttagcctttaagtgatgatgacgtctttattcttatggggatgcttggtgccattatgatagggcaagtttggctcactcttgctctagctttccctctcgcctctgccatgtatctacgcagcaagaagtccctcaccagatgctggcaccatgatattagacttctcagcctccagaactgtgaaccaacaaatttctgtttattataagttacccagtgtcaggtattctgctatagcagcatagaactaactaagacatgggcttatattaaatcttcatgtatttccttgaattgaaatttcgtaagcccatggtctgaaaggtctcttgcaacagcacttatttcaggctaaccctgaagcctttgcatgattagaaagaaaatacttgggctaatctcagtgtttctccattcatattctctacttcctattagtaattgatgaatcacttatccactataattcgagcagaagttggctttatatgaaagaagaagaaatttgctgatctttgagtttgccactgttatttcaatagctgaatactatgttcacttttggactagatctacccattaattaacttggttttacaccattgaaaccatagcttctaagaccaatgtagaatcaggcttttccaagaaaatatatatggccaagaactactaacctctgagtaagtgaaattgaggacattcatgcagagttgtgtaattgtgtactgcactaggccccacatctaagtgtgagtcattcacgttgtagacatcatagatgtgtatattsattatgaaaaatttcctggaacatggcagtaaagtatcattttaagaaaatcaatacattatgcaaattttcctataagtggaagtgaagtatctggagatagggatgctttttagtaatttttacaaatgtaccatatgagccactggtaaccctgagtaccttcaaatgactcagtagcgcatgatgtccactcagccataaagctttatttcataagaaagcatggcctacttagcaatagaattctctccaaaagtcactcttatgctaatcctgaaaaatacaattcaactatcaccacaaaaaagattccggaaaaaaagtacctatattgttacaaccctaagcataccctttttagttgctaatcattggaagaacaattatacca

SEQ ID NO: 697865 - DNA, 483 bp, Homo sapiens
ttttaaaaccatttagttgtgagtggcagtaattgaaatattcatgcggcagcttttaaaatgaaaattaactttcttacagatactgaaaacatttgcaaaaatattactgacattcttggcaattaagtgaatacatgaagaaaggaatcttgatttaatgtggatgtgggtgtaaggtaatacaattctatgcaaataagaaaaactttcaaagagtttctgaagaatatatgaaaaacaaatcattactcaaagatataaaatgctgtttaatgaaggtactactcctaaaygttatagccaaaaggacagaagaaaatgatagaatgatgaaaagtggaaagcttagtagttcaatatttgaaaacaaaccaaaaaaccttgattgtaatgactttatcaccaggctctaaatgaaacttgagcaagtaagaaaatcttgtttttttataatcagattccttcactgtcataagtcta

SEQ ID NO: 697866 - DNA, 636 bp, Homo sapiens
agcttacttatcaccaaggagatggcccaagctattcatgggagatccacttccatgacccaaacacctcccaccaggccccacctccaacgctgagaattacttttcaacgtgagatttgagttggtacaactatccaaactataacaattacacattctgtgttacatgaaatagtaattttattgcaatttgaraagacaagaatatatatgtacacacacacatttgtcatatatatatatatatatatatagagagagagagagagagagagagagagagagacggagagagagagagacatgaactagtaattctaacagtaatttcctgtgcattcttggattaagaaaccacgaaaatatatttttggtattgagaacaatgttcttcaatgtcagaagagggagttacaatatgggtatagagaattttggaataaactttatgtgttcaaatgaaattagagatataagtataaattcatagttttcaacatctatctatctggtaataaatatagtgtacttatataagtatataagcaaatatatatctattcacacatataaacatacatttatctatgtttacatatgtgtgaataggtatatatgtttttgctaatatact

SEQ ID NO: 697867 - DNA, 636 bp, Homo sapiens
agcttacttatcaccaaggagatggcccaagctattcatgggagatccacttccatgacccaaacacctcccaccaggccccacctccaacgctgagaattacttttcaacgtgagatttgagttggtacaactatccaaactataacaattacacattctgtgttacatgaaatagtaattttattgcaatttgagaagacaagaatatatatgtacacacacacatttgtcatatatatatatatatatatatakagagagagagagagagagagagagagagagacggagagagagagagacatgaactagtaattctaacagtaatttcctgtgcattcttggattaagaaaccacgaaaatatatttttggtattgagaacaatgttcttcaatgtcagaagagggagttacaatatgggtatagagaattttggaataaactttatgtgttcaaatgaaattagagatataagtataaattcatagttttcaacatctatctatctggtaataaatatagtgtacttatataagtatataagcaaatatatatctattcacacatataaacatacatttatctatgtttacatatgtgtgaataggtatatatgtttttgctaatatact

SEQ ID NO: 697868 - DNA, 636 bp, Homo sapiens
agcttacttatcaccaaggagatggcccaagctattcatgggagatccacttccatgacccaaacacctcccaccaggccccacctccaacgctgagaattacttttcaacgtgagatttgagttggtacaactatccaaactataacaattacacattctgtgttacatgaaatagtaattttattgcaatttgagaagacaagaatatatatgtacacacacacatttgtcatatatatatatatatatatatagakagagagagagagagagagagagagagagacggagagagagagagacatgaactagtaattctaacagtaatttcctgtgcattcttggattaagaaaccacgaaaatatatttttggtattgagaacaatgttcttcaatgtcagaagagggagttacaatatgggtatagagaattttggaataaactttatgtgttcaaatgaaattagagatataagtataaattcatagttttcaacatctatctatctggtaataaatatagtgtacttatataagtatataagcaaatatatatctattcacacatataaacatacatttatctatgtttacatatgtgtgaataggtatatatgtttttgctaatatact

SEQ ID NO: 697869 - DNA, 636 bp, Homo sapiens
agcttacttatcaccaaggagatggcccaagctattcatgggagatccacttccatgacccaaacacctcccaccaggccccacctccaacgctgagaattacttttcaacgtgagatttgagttggtacaactatccaaactataacaattacacattctgtgttacatgaaatagtaattttattgcaatttgagaagacaagaatatatatgtacacacacacatttgtcatatatatatatatatatatatagagagagagagagagagagagagagagagagacggagagagagagagacatgaactagtaattctaacagtaatttcctgtgcattcttggattaagaaaccacgaaaatatatttttggtattgagaacaatgttcttcaatgtcagaagagggagttacaatatgggtatagagaattttggaataaactttatgtgttcaaatgaaattagagatataagtataaattcatagttttcaacatctatctatctggtaataaatatagtgtrcttatataagtatataagcaaatatatatctattcacacatataaacatacatttatctatgtttacatatgtgtgaataggtatatatgtttttgctaatatact

SEQ ID NO: 697870 - DNA, 636 bp, Homo sapiens
agcttacttatcaccaaggagatggcccaagctattcatgggagatccacttccatgacccaaacacctcccaccaggccccacctccaacgctgagaattacttttcaacgtgagatttgagttggtacaactatccaaactataacaattacacattctgtgttacatgaaatagtaattttattgcaatttgagaagacaagaatatatatgtacacacacacatttgtcatatatatatatatatatatatagagagagagagagagagagagagagagagagacggagagagagagagacatgaactagtaattctaacagtaatttcctgtgcattcttggattaagaaaccacgaaaatatatttttggtattgagaacaatgttcttcaatgtcagaagagggagttacaatatgggtatagagaattttggaataaactttatgtgttcaaatgaaattagagatataagtataaattcatagttttcaacatctatctatctggtaataaatatagtgtacttatataagtatataagcaaatatatatctattcacacatataaacatacatttatctaygtttacatatgtgtgaataggtatatatgtttttgctaatatact

SEQ ID NO: 697871 - DNA, 765 bp, Homo sapiens
ttaaaatcatgaaaaaagtgtcattgccaaccttcaataattattgtaactatatattcctactaacaaatttttcactaaaacttgaattgtttcatatttatgagcttattgatccagccacctggatttctattactacttataataatgatttattatwtttttaagaaaaataaatagagccactaagaccgcatccttggttcatcaagtaagcatatttccactaaatagtgggaactggatttggggaaaactggcaagatcatgttgtgaataagttaagaaaaaagtaagattaagtgggtttcttaaaaaatgttattaacaccaaaaaaagttgaggtcatctggagggctacaggaagagtcttcttcagcactttgtcaactcgtgttaggagtaactgtctcagagggcagaagtgatagcctggcatttggagaggaaatatgcaaagattgtataaccttggtagtgtgacaaccttcccagcctaactccttttctcccagctcgcccatctctacggcagagtcctcttcacctctatctgtgtgtagcccttgagttaaactgcagaatgtaagaagccagatgtcagtgaaactggaacatcatttctagcataaattatgtcattcacccaggtttatataattagacattacgttgcttcctaagaggtctcaaatctgacttattaagcccccgaatgctagtttattattttaaatatttgggcttattcacatagcttc

SEQ ID NO: 697872 - DNA, 634 bp, Homo sapiens
agtatatgagaagatagagataaataaaataagttaatagtttgttatttaagaatttgattattgaaatggatgatgccaatcttaaattacttcttttagaataatgtactaataggatttttaaagtactcagcatttttttaaattattattatactttaagttttagggtacatgtgcacaatgtgcaggttagttacatatgtatacatgtgccatgctggtgtgctgcacccattaactcgtcatttagcattaggtatatctcctaatgctaccctcccccgtccccacaccccacaacagtccccagagtgtgatgatccccttcctgtgtccatgtgttctcattgttcaattcccatctatgagtgagaacatgcggtgtttggttttttgtccttgcaataggttactaagaatgatgatttccaatttcatccatgtccctacgaaggacatgaactcatcattatttatggctgcatagtattccatggtgtatatgtgccacattttcttaatccagtctatcattgttggayatttgggttggttccaagtctttgctattgtgaatagtgctgcaataaacataggtgtgcatgtgtctttatagcagcatgattta

SEQ ID NO: 697873 - DNA, 597 bp, Homo sapiens
tctctgctccttcttcaccaaaacactgtgtccctcttgcctctaaatctccttctaacaatcacacacacacacacacacacacacacacacagacacaccacmaaaaaaaaccccatgcccccaaaagaccctgttttgcagagctttatgctctttgctttctggggtcaaaagtctatcttattctcctttttttccccttagtctttgaaccaaatcatctatgtgaggagtgtgcgatttttacactagttgcatttcaaggatgtgtgaaatcttccacgtagcctggcacaagatcagcagcaaggctacttcattgtcagcgtgttcacaatgattgatctcaaggagaatttcctttcatcagccagagaggagaatcatttggctgatttattattatggctcatcaccttggaaggttccttaagagacctttctgcatgacatgtaatctccatcagtgagtatatttaccatgacatctacagtttgatacatacctggaatataaactgttctaagattttagttactgttttacattgcacaaattgctgttttatcacttattgcttgaccatatttctc

SEQ ID NO: 697874 - DNA, 623 bp, Homo sapiens
tttactgtgtcatacaccaaccatggtctactttaatcatcaatatgctgttctctgaacataccttatactttcctagttcacatctaagataatatgcttccctctgcctgacacaccttacccattcttaagaacccagctttgacatcacttccatgaatcctaacctgaaattaactctgtcaatcttaattacagtcatctctgacctctataaagctgtacttgtttgtagttatttatctagcaatcttttctccactattagattgttagatcctagaggacagagatcatcttttataratcctgggtctcctttcacaatgtcaggctatagaaaaaatgatattacctataataatagctcagttaatatggccattggaaatggcctgaatgctctgttctagggtttcccatggtatgtgccactgccattttgggtgtgactgccccatgcattgcagggtatgtagcatctctggctccagatagtaagtgctagtggcaccccatagccattgtgacaaccacaaaattttaaaaatgaaaaacctcttaagtttattggaaaatgacagtatattaattaggcagtatttttagaaacctattta

SEQ ID NO: 697875 - DNA, 623 bp, Homo sapiens
tttactgtgtcatacaccaaccatggtctactttaatcatcaatatgctgttctctgaacataccttatactttcctagttcacatctaagataatatgcttccctctgcctgacacaccttacccattcttaagaacccagctttgacatcacttccatgaatcctaacctgaaattaactctgtcaatcttaattacagtcatctctgacctctataaagctgtacttgtttgtagttatttatctagcaatcttttctccactattagattgttagatcctagaggacagagatcatcttttataaatcctgggtctcctttcacaatgtcaggctatagaaaaaatgatattacctataataatagctcagttaatatggccattggaaatggcctgaatgctctgttctagggtttcccatggtatgtgccactgccattttgggtgtgactgccccatgcattgcagggtatgtagcatctctggctccagatagtaagtgctagtggcaccccatagccattgtgacaaccacaaaattttaawaatgaaaaacctcttaagtttattggaaaatgacagtatattaattaggcagtatttttagaaacctattta

SEQ ID NO: 697876 - DNA, 623 bp, Homo sapiens
tttactgtgtcatacaccaaccatggtctactttaatcatcaatatgctgttctctgaacataccttatactttcctagttcacatctaagataatatgcttccctctgcctgacacaccttacccattcttaagaacccagctttgacatcacttccatgaatcctaacctgaaattaactctgtcaatcttaattacagtcatctctgacctctataaagctgtacttgtttgtagttatttatctagcaatcttttctccactattagattgttagatcctagaggacagagatcatcttttataaatcctgggtctcctttcacaatgtcaggctatagaaaaaatgatattacctataataatagctcagttaatatggccattggaaatggcctgaatgctctgttctagggtttcccatggtatgtgccactgccattttgggtgtgactgccccatgcattgcagggtatgtagcatctctggctccagatagtaagtgctagtggcaccccatagccattgtgacaaccacaaaattttaaaawtgaaaaacctcttaagtttattggaaaatgacagtatattaattaggcagtatttttagaaacctattta

SEQ ID NO: 697877 - DNA, 2357 bp, Homo sapiens
aaaaaaggctctttgaatatagttttaatttctctctacagttttttttgtttggtttgtgggctgttggaattgtaatttttaattgccttctaaaaaatggaaatttaacaatgtctgatctcagctgaacaaattagatgtttcagttgctcttgggtcaactggcttacagatttacatgtgcacacacacacaaatttcttatcacattttcgacttcttcacttgacctaactgattatgcgaaatacccaagattcatgctactgtaccacagatttgttttcacagcaataaatcttcagttctttgtttatgattccacttaacaaaaggcctgcagaagtgatttattatttgggtatttggagataatacatttgatggttttttggaaaacctttttcactccatactcagatatgcttcattgtcaaatgcatatttagattagattattgaattgtaatgtttatctgctgctttttttaaataaaatttgactgaaaatgtttaattggcattttttaatgacttagccaaagaagtgcagctattattccatattaataggcttgcatttcttttcctaaatcttatttaggctaaatcagttttatttttctctgattttttttaataccacagaatcacctgagtgtcaattgaaagttgtcaattaaaaggtaaccttttaatctcgtaggaggaatctcattaagacatttttcctgatatgtagagcagtctgttggcaaaaatgcatatattttctttcatatttgtaaaattatatttaatggaattcttttctttgattatcaaggactttcactgcaggcagtgctatttcttgtgcctaagaatgtttccaaaagtcgcatcgctaatgatatttgccaagttgagtgtacacaaagtttctcatatcctgttcaagttaatcaacatcaagcacatggggatgctttagggtgagtctatagtacaaaatgcataaaccatgtccccaggaaatttgaaaggaagcaggtgctgaatggaatttttttccttttccatgagctgtgttaattctatctccagtaggcctaatgcttgaataagcaagatgtctaatcaataaattattttcatgctcagaatttcaggtttttgtactccagcatagcttggtcttatttcttactgtatgaaagcttaacagcaatgtgatttaaggttttgttttaaatgggagatgtaagtgatttaattcatgggtacttttagaacctgatagataatcccattgcctttatttttctaattaaagaattcctaaatactttgaaaatacaaaatattcctgaatagttgtgccttacattggttttatttgaagttagagtggatccctgtttatcataattacttgtaattaggcagatgcttatcactctattataactcaaattgggaagaaaagaatgaaaaagaaaacaatggctgggtactggctcatacctgtaattttagcattttgggaaggtgagacgataggaccacttgagggcaggagtttgaggttgcagtgagctatgatggtgccactgcactccagcctgggcaacagagaagaaaccatgtatcttaaaaaaaaagaaaaaatgaaggatgaaaaagtgggattattatttaaccagtgaagaattcataaatgtgacaattaaggataatttgaatctcacaaatctattcaccccaccccagtcaaggtctattttaatatatctatcttcattggcattcttgagaaatagtgctgccattgaacattgggaatattcatccattctgcagatggaggacatcgtgcaggccatgtcctcattgctcccattctacatttagctgagaaacagaggttcctcttygtaaggatttgatgctcttctcatcttccaagaagtataccaagagcaaatttaactctatagttacctgttcttcaaagaaaaaagaaacttagaaggtagtgtttctgaggtcataactgtgaggggttgtatacaaagaatgagtcactttttaagccatttggaaaattagatctgtttctaattagatgacattttctccattctctgatttcctgaagattgccaagcatttgcttgataatctaccaggactgataattttgcagaatatgaggcaaatatatgaaattcagttgtgtatctatatcctagcaacaaacacttgaaaatataacgttaaaatatgccatttgtaatagcatcaaataagtcaaacttctaagtaggaagaaagttaacaacaagacctctactctgaaaactacaaaacag

SEQ ID NO: 697878 - DNA, 635 bp, Homo sapiens
ggtctttaagatgttaactctgaaaaaaaactagagagagtatacagaatgtctctgtattatttcctagaaatgcaagtgaactgacaattatcttcattaaaagtttaattaaaactacaaggagtaagactatcagactagatttttaattttcttaaaattcaatggtattatatttgaaagagataaaactgaaataaaaggacacaaaaatgtaasggtgaggagaaattttttaaattaggcaaaactgacaaaaaaagaaaaataacctagaaggccgggtgcggtggctcaggcctgtaatcccagcactttgagaggcccaggtgggcagatcacctgagatcaggagttcaagaccagcctggccaacatggtgaaacaccatctctactaaaaatacaaaaattagccaggcatggtggcaggcacctgtagtcccagctactcaggaggctgaaacaggagaatcacttgaacccacgaggtggaggttgcagtgagccgagatcgcgccactgccctccagcctgggtgacacagcaagactccatccgtctcaaaaaaaaaaaaaaaacagagatgggggtctcactatggtacccaggctggtctcaaactcttgggct

SEQ ID NO: 697879 - DNA, 635 bp, Homo sapiens
ggtctttaagatgttaactctgaaaaaaaactagagagagtatacagaatgtctctgtattatttcctagaaatgcaagtgaactgacaattatcttcattaaaagtttaattaaaactacaaggagtaagactatcagactagatttttaattttcttaaaattcaatggtattatatttgaaagagataaaactgaaataaaaggacacaaaaatgtaacggtgaggagaaattttttaaattaggcaaaactgacaaaaaaagaaaaataacctagaaggccgggtgcggtggctcaggcctgtaatcccagcactttgagaggcccaggtgggcagatcacctgagatcaggagttcaagaccagcctggccaacatggtgaaacaccatctctactaaaaatacaaaaattagccaggcatggtggcaggcacctgtagtcccagctactcaggaggctgaaacaggagaatcacttgaacccacgaggtggaggttgcagtgagccgagatcgcgccactgcmctccagcctgggtgacacagcaagactccatccgtctcaaaaaaaaaaaaaaaacagagatgggggtctcactatggtacccaggctggtctcaaactcttgggct

SEQ ID NO: 697880 - DNA, 3726 bp, Homo sapiens
catgatgtcattaatactgggcagaattatttgggaaatgttgaaagggagagaagaaaccccaaccttcccccttttcccccttaatttaataaagttgctcagccttctgagcccagtgtggttttcttgaattgcacagctgttgcacagctgggaataacctagatcaatgctgatctttggctaaaatgaaacaaaggactcggtagaatgaaaagttaagtgcccagccacttggaccatctttgggtatattcccctccatggaaggcaagaagcctaaagaagatgtactaaacattaaagaaaaaagaaaaatcttcaaacaattggcttgggaacagacacataaggaaatccaccagaaagctactgtgtttctcatctttcacccatcagcatggaatcagattctttttggaggattttgggctgggagcacatgctgagacccgaagtaggagctgtgttattttgcaggctcccacctcaccccacctagactaatgctgtaggttggagtgggtaggaaagaattaggtcgttctagtctatttttttaggattttcattcctcttgctcatttcaaacagccaagtctcctccaaaccttcaggttcctgaatctttcctttgccttttattagggctagaaggattgttaaagttgatagaaagtaaatacatattgtactgatttcagttactggygttgatgaagagagtaccagtctagatctttcttccacccctgagttttttcagcattttcatttttaaaatataatatagggccctatctagcagaagaggaaataagtgacaaattatcttattaaatgttttagtttcttagcgaaagtttacagacagatcaattattaaataattgttattatataacattatataacagtttagatatatatgagatctaaaacataaatatatttgataaataatggatcacattgcatgttttttgaaaagctctgaattcacccctttctgacaaagacattaagtccatttacctgggagataagaagcagtcatgctggacttgccttagctgccagctcactgtacatgatcatttgaaaattgctcgataacttgctgctgttgttttcccattggagaggaaatcaattgcctgcctgcttctcacattcccgtcagaaggcaggaggtacagccaactggactaatacttttcctccttggccaactgttccagccaaggatccctgcatggctccactcaccatttcaggctaacccattctccacacagcaacttgatttattacacgctctggctaatagactctgactgctgtttcaacctttactaactcttctggctgtggcttctttcttgccatttctatctaaacaaacttctggtcttagaccctaccatcaatcctatcctgtcgacgcctgcgctagataattttgttggcctcccaagcatccctcctccttctcccatccacataacctttcttcctgttggggaatttgcctgtcccctcttctctgtgtgagtttgctcactgttgtccctagttctacttttaggggtgatgcctgattggctcaaaacagtaagtgtatcctacccctccttggccacagggattaaagaatgagcagagcagagatagagataagggaaagtatttgatggaacacctgtgaaagaaaaacttgtccatattttcctggagatactggggagaatgcttcctttttcctactagatgggacaaggacagaagtgcctggagatctgctagcagccacttgtgactctaagggaagagcctgtgaagaatgaaaccaacaccaaagaggcagagctgagaaggacagagaaagaaaccggatcctggttacagtctcggagctgctgcttatttaggagacattgaaatagttgaaatggacagataaggaagtcccagagaaggcagtagcagtgagagaaattaagggagtagacttcatagaatgtgaacatgagagagggagccattgaagatgcagggggaaaagattcattcttagagtaaggttttgatctagtaggggtggatagggtccaggttattggtagagggctaaattgtgggtagggagaggtctactactactccaaataagggaggaaagcaagaaaaaataggcatgttgataaattcacaactagtttgattttcagtttgcactaagttgttgcacactttagctcattcaatcatttattcatttacccatttaactactacgtattgccaagtattgagttacatgctaggcatacaaaatggttccttcataatccttcttcccacaattagctatgtcaagctgaaatttctgtgaagatttggaaccttccagaaggtgtccttgcatattgtatcccattttccaaattcgaaatcagatccaagctagtcatactagaatttcatgcatttctcctagagacacatttaaattccttcaaagccttagagagtgaacccaatgctttaagtacagattttggatcacaactctattgcttcttttgtaatgtaatgtgaggccaacatcttagcaaaggggccccatggttttcttccctaaaagtagcaaacccccaattcctcagactttgcactagccaactttgccaaagttcacaagatctgcagttagccagcaatttgtggacatcacattatttttagacaatgttgagccctgatgggtggagaagcaagaatgcttttcagtggtctcctttgcaagcctttgatgttccctctaagtcatattgtgtcagtggaaatgttggtctgaggagactctggcaattctttcaaaaatgcacaaatgctgagtgtatgtttttaatggcttcaagcaattaaaataatgtttaaaataattataagtagcagctcattaaagcaaggaggctgagggcccggatggccactggcttgtagctgtgctagggacagtgttgtgaaagggatgcttaggtcaatggaagttcctgctgagaaaattctggtgtaatctaaatcagctgctgcctctgtggtgcagatgcccctgaaaatgggccattagacattaactggggagaaacgtggtcccttaggaaaaggacaattaaacacaaatgcaggaatgagcatattaaatgtttcacaaaactaaaaactaaaatttaaaaaaagcccaataaagtgatttcttcaaactagaaacctacagagattgaagctaagtgcccaaaatactaagccaaagcaaattctctaagggtatgttcagcagatagtgagctgatggagaagaaaagaagcttccagaaaccgtgcaggctatggtcaaccaaggaagaaatgagtggattaagatgtaagcatattaagatgataagaaattccagcatcagaaagaataaaggagtcggtcattaaaatgaattagagattaatcaaaataaaacttaagaaggctgagcctgttgatctgctatcagtggggcttgttttagcagggaatttcaggggatttatcacaagataatatggataaaaagttgctcttaagtctttaaagggatacaaccaaataaagtaatcctgcaagatgactttccttttacaacgacccatattcaagacaaaaatatatatatatatatatgc

SEQ ID NO: 697881 - DNA, 1682 bp, Homo sapiens
tttcatatacttattttagaagaaatatacaggatggaggagtgggttataaaacacatcaacctagaatgagaaaaagaatccagcttcatgagatgtaactgagaagagcctacagttctttatgtgatcaatacagaagtgatcaactggaagacagttctttaagatgagtttgtgcccacaaaaaaggtggtcatataaacgagacatcactagaagtttacagatcttggtatcctttctgaaaaaaaaatccccaaactgatccttaggtactaaaatcaagactcttacatatcaatgtttatgcaatgatttttatttcattaaaatcacagggtcttatttccactggctgtaagttttaaagtatttactgggaaacctgtctatggtgaattgactctaaaactgggaagtttcatatgaaaccaagggaactagctctgtggttcttgagtgagctcagattcatagaacagctgctagaggagggacgccttgttttcacaactgaatgtatgccgagtacaaaaaaacaggagctgcaggagcatgagtcatgattacttagggagaagactttgtcaatatttcagtgtatgcccataaatatggataccatatactcctatctatttagcaacaaataatttaaggtatgtattttaatctttcttctggacagaggatatatattttttttaatttttatgggtatagtaggtgtagatgagatatttatggggtagatgagatattttgatacaggcgtacaatgcataataatcacatcagggtaaatggggtgtccatcaccttaagcatttatcctttgtgttacaaacaatccaattgcactactttagttatttttaaataactagtaaattatttaaaataagtaagtataattatagtaaattatggctaattattatttggccatattacttggccaaatttaatggccaattaaaattatggccaaatattatagccaccacaacatggtggctatttgactatagtaaaatacagtttctcagtatgatgccaccatgttgtgccatcaaatgctaaatcttattcattctttctaaaaactacgccgtacccattagccatccacacttcctccccatgacctcactatcctttctagcccctggtagccatcactgtattctctatttccatgagttcaattgttttaatgtttacctcccataagtaagtaagaacatgagaagtttgtccttctgtgcctggcttaattcacttaacataataacctccagttccattcatgttgttgaaaatgacaggatctcattctttcttagggctgattagtactccattgtgtatatctaacacattttctttmtctatttttctgttggtgaacacagagggttgcttccaaggcttgtctattgtaaatagtgcagccataaacatgggagtgcagatatctcttcaatgtactgttatcctttttttttaagtacatacctggcagtgggattgctgtatcatatattaggtcaatttttagctttttgagtgacatccaaactgttctccacagtggttgtgctaatttacatttctacgaacagtgtatgaggattcccttttctccacctcctcgccagtatttgttattgcttgtc

SEQ ID NO: 697882 - DNA, 1095 bp, Homo sapiens
cactatccagagaactggacagccatccttttttctacgaggttgacagatgttcccaaataccttgccctcatctcccagtagcttgataaacaaaaaataaaaatgcccaaaatttactctgctaggaaatttatgtgcatacacacgtgtttgtgtttttataggtgtgtgagctgacagagcagcaggaaattatgagatgtatagtcctcaccaggagagaactataggaagtaggccaacaggaaacctagtagcatagatgctggggattatattttttccttgtaccatgttgcttaaggccacatagtctaaggattgcttaagtcaaagattgcgtaagcatagcacaaagattgcttagtacaaaattgcttaaggcaattgaaaagtatgaagaaaataataaagattcatttatattttaaaatctcacctttcttttgtattttcatagaaattcaataatgtacatcacatgttagcacaacaatacgtcattatatttatarataaattcagtacatttatttatgtcatgagttcttacggaatataatttgatgattgttgcacaatcaaaaatgtttggagaccattaaagtagagaagcagaaaatcatgcagtgaggaaaggaaaaaatctaaaaaatataggtgactgtagagatgagttacattattgattctacagaggcttgctattgattataaggagctctgatagcttaggcaaacttgctgcctcacacatgggttgattttttaaaaagaaaacaattgtattgagctataattcacataccatacattccacccatttaaaatgtacagttcaatagttttagtatattcacaaaattgtgccaccatcatcacaatcagttttagaacacttttatcaaccaagataaaataaaattaagaaagaaaccctgtgtgcatcagcagtcactcctgatctctcactatcctcaactgtaggcaaacaattatctactttctatccttatttatttgcagattctgcacattctatataaatgaattatacaatacgttgtttttttcactgacttcttttactta

SEQ ID NO: 697883 - DNA, 1095 bp, Homo sapiens
cactatccagagaactggacagccatccttttttctacgaggttgacagatgttcccaaataccttgccctcatctcccagtagcttgataaacaaaaaataaaaatgcccaaaatttactctgctaggaaatttatgtgcatacacacgtgtttgtgtttttataggtgtgtgagctgacagagcagcaggaaattatgagatgtatagtcctcaccaggagagaactataggaagtaggccaacaggaaacctagtagcatagatgctggggattatattttttccttgtaccatgttgcttaaggccacatagtctaaggattgcttaagtcaaagattgcgtaagcatagcacaaagattgcttagtacaaaattgcttaaggcaattgaaaagtatgaagaaaataataaagattcatttatattttaaaatctcacctttcttttgtattttcatagaaattcaataatgtacatcacatgttagcacaacaatacgtcattatatttatagataaattcagtacatttatttatgtcatgagttcttacggaatataatttgatgattgttgcacaatcaaaaatgtttggagaccattaaagtagagaagcagaaaatcatgcagtgaggaaaggaaaaaatctaaaaaatataggtgactgtagagatgagttacattattgattctacagaggcttgctattgattataaggagctctgatagcttaggcaaacttgctgcctcacacatgggttgattttttaaaaagaaaacaattgtattgagctataattcacataccatacattccacccatttaaaatgtacagttcaatagttttagtatattcacaaaattgtgccaccatcatcacaatcagttttagaacacttttatcaaccaagataaaataaaattaagaaagaaaccctgtgtgcatcagcagtcactcctgatctctcrctatcctcaactgtaggcaaacaattatctactttctatccttatttatttgcagattctgcacattctatataaatgaattatacaatacgttgtttttttcactgacttcttttactta

SEQ ID NO: 697884 - DNA, 590 bp, Homo sapiens
catagtttagaacgtgaacacagactaaatctcactctctcaagccaacctccaaagatcaaaaatgagaaaaaaataaaatcactggtagctgcaaacctgtcaacacaataaagaggcttagacttatagaaacttgacggatatgtaagaggtgcaataaatgtctgagggcagcagagacttctctggagaccatgtgggagcagagtcagatggggatggtgcagaagagaaaacatgcgctatggtggatgtcctgtaaaggtagccacatcaccttaagcagggaaataactgagaacagatctcagacctggagagccagaacacaagctactatcagaaatgtaataaaggagattagaaagtacaagggtcattgttttcaggtttttcaaggtcatgggtagcactctagattgcaaggggtatcttggaaagcagggctgtcatttagaaacttcctggaaagggacaggaggaaagcaakaagttgatattaagggaattatcaaagaatcataagacaaattgattttcatcctcctacccaaaagcttggatttttaaaaagtgtcccttcactg

SEQ ID NO: 697885 - DNA, 426 bp, Homo sapiens
ccttctttggtttgttgtcactaaacacaaggtaatgattggtaatttaactttcttaaactagactatccacagtgattagttttaacaaattgtgtttactccatctatgtgattccaaagacatagtttggcatggttaaaaaaaaaaaaagaatgacagatgaaacacagaaggaaggcaggaaagaagacacagaaaaaaaggaaaacaagaaggaagggaggaagggaaaaaaaaagcaaagaaagaagagtaaaggaaagaggaacaaaagaaaawgtaaggcaattagttgtaggtaggaatgcatcatggtatctgtttgtgtaaattaaaaggaaaaaaataacgatctagtctactatttttatttcaaaacagttatttttgccaatatatccctcccctccccaaatgaccta

SEQ ID NO: 697886 - DNA, 3228 bp, Homo sapiens
  misc_feature 2823, 2824, 2825, 2826, 2827, 2828, 2829, 2830, 2831, 2832,2833, 2834, 2835, 2836, 2837, 2838, 2839, 2840, 2841, 2842,2843, 2844, 2845, 2846, 2847, 2848, 2849, 2850, 2851, 2852,2853, 2854, 2855, 2856, 2857, 2858, 2859, 2860, 2861: n = A,T,C or G
  misc_feature 2862, 2863, 2864, 2865, 2866, 2867, 2868, 2869, 2870, 2871,2872, 2873, 2874, 2875, 2876, 2877, 2878, 2879, 2880, 2881,2882, 2883, 2884, 2885, 2886, 2887, 2888, 2889, 2890, 2891,2892, 2893, 2894, 2895, 2896, 2897, 2898, 2899, 2900: n = A,T,C or G
  misc_feature 2901, 2902, 2903, 2904, 2905, 2906, 2907, 2908, 2909, 2910,2911, 2912, 2913, 2914, 2915, 2916, 2917, 2918, 2919, 2920,2921, 2922: n = A,T,C or G
aaatgagttttcatagatgcgtgaagagagggaagctaggctctagaagtcaggatgaatggatatctaattgacataattgagaggcacagacagaggggagtttcacacacagaaaagcgtaattctggagttaaatatcttcccctgggcttgagaaatcaaaaaagaactttagatacctccctgatcctaaaccatttttatgctcttacactccctttcctccctttgttcacatttttgaaatttcaggagggcagagaaaagatgtaagacaaatgagaggaagggaaatgaaaagtggggtctgtgctcactacaaaaggattagacataataaccagtgagagaacaaacactcaagtgtaatatttatcaagagaagtcttgatatttctgtgacaaaaatgtagaattgcaatttccagacattatttttatatgatctatggcataaatagtatgatctatagtatctatagtgtaaatactgatttgctttgtccaacatatgacacaaaatcttctttataatagctcaattcttccactgataagcagtctatgtattctctatttcaaacaatacttttgaaaatgaaaagttatgggaaaaagtggtccatattcttttgagaaaagtcccatgtctcaggcaaagtgttttggaagcttgtttactgaaatcattctggcaactgaatcccttcattcagatcacataatggatcgctttcagaaagtcagtgtgcccgggcagtaatgatgtgtcttaggaaactgatgaattcatctaaaagtggaaagtscattaaagttgattcctaatgaatttgcattaatgacagtagtcaatattcaaggaattacaatgtgtttattttgtttagtaactttggcttcaaaaatagtttatttcatcagtggtttagcaggcaaacctatcaatttgttaaattttcctcatatgatatgttgtttttcttccaaatcttactattatttataaaatcattcacttaagaatacacaattacagtttttactgttataaaatagaaattattatagataacattatattggatcatttcttgtttatctttaactgtttacatagattctatagctgaaataccctagaaattctatttttaaatgtagctgttaataaaaatttacgttattatggagaggttttgatatatggaaaagttcaagtttttaaaatataaaatgtgttatattttggtaattaaattggaaaatcatttattttgaagaatgtcctgcttgcaggaagtgctaagctacatgtaggtcctgcgtaaattcataatttagttattgcatgaaacatagaaatacatccatgattttgtgtacattttaaagtgtataggtgggattattgggttgagtggaacaatggtcttttgccaagtaatttctgaagttagcagagataaagaatcatagttttaaagtactatttcttaatgccatgtagaaagcatgtactgaaagttccctactggtttgaaacaatcaataaattgcaaaagtagtatgacatttaccctaatgtaatatgattgctcatgcctactctcaaatgcatgcacacacacacacacacagaattgaattttaccaatctaattctaaaataggagatttattcttttccctgttatatgattctctgctgaagcaaacttaagtggataaggttttgcatatatgaaacgttattactaagaataaattagtgataagataagttttacatccttttactttcatattctcttatactattcactgctatgttttgctaaaatcatgaattttaaatctcagtccctactaaatatagtgtttggcacatcctcataactgtgtgttaaatgcataagtttaagtattgatgcttctgttattactatttgaatttaattatgtttcctgatttgttttcaactcttatacttttattctatcagtaaggcaaatataaggttattggaagtttatattattctttaaaatctccttcatgtgtatcaaacaggtgatatgttaacccatatccaattaaaacaaagatgcaaaatttgacaatttaaatcacttatatttaataaaataccatagcaaaaattatgacatttacgaatgtcagctgtgaaattatatattttttaatgtttgatgtaactagcatactactaataatccactatattattacaaaataatgagataaataattatttaccttcctatttaaaaggacataaaacactattgttacaaagattatttaaaattaaaactaaaatgcaagtttgagttaaaatcataagattagtgtaaactcagattaatagatctgagccattcactattcttttttcttctctttttcattaaagtgaaatttcataacataaaattaaccattttaaagtgaacatttagtggtatttagtagattcacaatgttatgggaccgccctgtctagccctgtctatttaattccaaagcactttcatcaccctataaggaaacaaagcaagcgtgatgcagtaactcctcattcctccctcccctaagctcctagcaaccgcacttctgctttctgtcattctggatttcgggatatttcatataaataatggaatcatgtgatatataatcttttatgtctggcttttttttttttttttttttttttttaaaaaaaaattatacctttccccccaggggggggaaccgggggggcacccccgcccacgggaaacccccccccccgnnnnnnnnnnnnnnnnnnnnnnnnnnnnnnnnnnnnnnnnnnnnnnnnnnnnnnnnnnnnnnnnnnnnnnnnnnnnnnnnnnnnnnnnnnnnnnnnnnnngaattccattattacgtacttcagattagatttcagatcatcattacaataggtcagattctcttatccattaaaaatataaaaatacaaaaaatttagtgccgtgttttctttctcttaaaaaattctatatttacttctaagtatccctagggttcaaaggtactaacccaattatgaaagtcaattaatattacatttaattaggttattcatttttatagacttagtccaagaggatcacttagatacttttccaggactccgaagaaatattttggaccttatttgtagttattatgccat

SEQ ID NO: 697887 - DNA, 3228 bp, Homo sapiens
  misc_feature 2823, 2824, 2825, 2826, 2827, 2828, 2829, 2830, 2831, 2832,2833, 2834, 2835, 2836, 2837, 2838, 2839, 2840, 2841, 2842,2843, 2844, 2845, 2846, 2847, 2848, 2849, 2850, 2851, 2852,2853, 2854, 2855, 2856, 2857, 2858, 2859, 2860, 2861: n = A,T,C or G
  misc_feature 2862, 2863, 2864, 2865, 2866, 2867, 2868, 2869, 2870, 2871,2872, 2873, 2874, 2875, 2876, 2877, 2878, 2879, 2880, 2881,2882, 2883, 2884, 2885, 2886, 2887, 2888, 2889, 2890, 2891,2892, 2893, 2894, 2895, 2896, 2897, 2898, 2899, 2900: n = A,T,C or G
  misc_feature 2901, 2902, 2903, 2904, 2905, 2906, 2907, 2908, 2909, 2910,2911, 2912, 2913, 2914, 2915, 2916, 2917, 2918, 2919, 2920,2921, 2922: n = A,T,C or G
aaatgagttttcatagatgcgtgaagagagggaagctaggctctagaagtcaggatgaatggatatctaattgacataattgagaggcacagacagaggggagtttcacacacagaaaagcgtaattctggagttaaatatcttcccctgggcttgagaaatcaaaaaagaactttagatacctccctgatcctaaaccatttttatgctcttacactccctttcctccctttgttcacatttttgaaatttcaggagggcagagaaaagatgtaagacaaatgagaggaagggaaatgaaaagtggggtctgtgctcactacaaaaggattagacataataaccagtgagagaacaaacactcaagtgtaatatttatcaagagaagtcttgatatttctgtgacaaaaatgtagaattgcaatttccagacattatttttatatgatctatggcataaatagtatgatctatagtatctatagtgtaaatactgatttgctttgtccaacatatgacacaaaatcttctttataatagctcaattcttccactgataagcagtctatgtattctctatttcaaacaatacttttgaaaatgaaaagttatgggaaaaagtggtccatattcttttgagaaaagtcccatgtctcaggcaaagtgttttggaagcttgtttactgaaatcattctggcaactgaatcccttcattcagatcacataatggatcgctttcagaaagtcagtgtgcccgggcagtaatgatgtgtcttaggaaactgatgaattcatctaaaagtggaaagtgcattaaagttgattcctaatgaatttgcattaatgacagtagtcaatattcaaggaattacaatgtgtttattttgtttagtaactttggcttcaaaaatagtttatttcatcagtggtttagcaggcaaacctatcaatttgttaaattttcctcatatgatatgttgtttttcttccaaatcttactattatttataaaatcattcayttaagaatacacaattacagtttttactgttataaaatagaaattattatagataacattatattggatcatttcttgtttatctttaactgtttacatagattctatagctgaaataccctagaaattctatttttaaatgtagctgttaataaaaatttacgttattatggagaggttttgatatatggaaaagttcaagtttttaaaatataaaatgtgttatattttggtaattaaattggaaaatcatttattttgaagaatgtcctgcttgcaggaagtgctaagctacatgtaggtcctgcgtaaattcataatttagttattgcatgaaacatagaaatacatccatgattttgtgtacattttaaagtgtataggtgggattattgggttgagtggaacaatggtcttttgccaagtaatttctgaagttagcagagataaagaatcatagttttaaagtactatttcttaatgccatgtagaaagcatgtactgaaagttccctactggtttgaaacaatcaataaattgcaaaagtagtatgacatttaccctaatgtaatatgattgctcatgcctactctcaaatgcatgcacacacacacacacacagaattgaattttaccaatctaattctaaaataggagatttattcttttccctgttatatgattctctgctgaagcaaacttaagtggataaggttttgcatatatgaaacgttattactaagaataaattagtgataagataagttttacatccttttactttcatattctcttatactattcactgctatgttttgctaaaatcatgaattttaaatctcagtccctactaaatatagtgtttggcacatcctcataactgtgtgttaaatgcataagtttaagtattgatgcttctgttattactatttgaatttaattatgtttcctgatttgttttcaactcttatacttttattctatcagtaaggcaaatataaggttattggaagtttatattattctttaaaatctccttcatgtgtatcaaacaggtgatatgttaacccatatccaattaaaacaaagatgcaaaatttgacaatttaaatcacttatatttaataaaataccatagcaaaaattatgacatttacgaatgtcagctgtgaaattatatattttttaatgtttgatgtaactagcatactactaataatccactatattattacaaaataatgagataaataattatttaccttcctatttaaaaggacataaaacactattgttacaaagattatttaaaattaaaactaaaatgcaagtttgagttaaaatcataagattagtgtaaactcagattaatagatctgagccattcactattcttttttcttctctttttcattaaagtgaaatttcataacataaaattaaccattttaaagtgaacatttagtggtatttagtagattcacaatgttatgggaccgccctgtctagccctgtctatttaattccaaagcactttcatcaccctataaggaaacaaagcaagcgtgatgcagtaactcctcattcctccctcccctaagctcctagcaaccgcacttctgctttctgtcattctggatttcgggatatttcatataaataatggaatcatgtgatatataatcttttatgtctggcttttttttttttttttttttttttttaaaaaaaaattatacctttccccccaggggggggaaccgggggggcacccccgcccacgggaaacccccccccccgnnnnnnnnnnnnnnnnnnnnnnnnnnnnnnnnnnnnnnnnnnnnnnnnnnnnnnnnnnnnnnnnnnnnnnnnnnnnnnnnnnnnnnnnnnnnnnnnnnnngaattccattattacgtacttcagattagatttcagatcatcattacaataggtcagattctcttatccattaaaaatataaaaatacaaaaaatttagtgccgtgttttctttctcttaaaaaattctatatttacttctaagtatccctagggttcaaaggtactaacccaattatgaaagtcaattaatattacatttaattaggttattcatttttatagacttagtccaagaggatcacttagatacttttccaggactccgaagaaatattttggaccttatttgtagttattatgccat

SEQ ID NO: 697888 - DNA, 3228 bp, Homo sapiens
  misc_feature 2823, 2824, 2825, 2826, 2827, 2828, 2829, 2830, 2831, 2832,2833, 2834, 2835, 2836, 2837, 2838, 2839, 2840, 2841, 2842,2843, 2844, 2845, 2846, 2847, 2848, 2849, 2850, 2851, 2852,2853, 2854, 2855, 2856, 2857, 2858, 2859, 2860, 2861: n = A,T,C or G
  misc_feature 2862, 2863, 2864, 2865, 2866, 2867, 2868, 2869, 2870, 2871,2872, 2873, 2874, 2875, 2876, 2877, 2878, 2879, 2880, 2881,2882, 2883, 2884, 2885, 2886, 2887, 2888, 2889, 2890, 2891,2892, 2893, 2894, 2895, 2896, 2897, 2898, 2899, 2900: n = A,T,C or G
  misc_feature 2901, 2902, 2903, 2904, 2905, 2906, 2907, 2908, 2909, 2910,2911, 2912, 2913, 2914, 2915, 2916, 2917, 2918, 2919, 2920,2921, 2922: n = A,T,C or G
aaatgagttttcatagatgcgtgaagagagggaagctaggctctagaagtcaggatgaatggatatctaattgacataattgagaggcacagacagaggggagtttcacacacagaaaagcgtaattctggagttaaatatcttcccctgggcttgagaaatcaaaaaagaactttagatacctccctgatcctaaaccatttttatgctcttacactccctttcctccctttgttcacatttttgaaatttcaggagggcagagaaaagatgtaagacaaatgagaggaagggaaatgaaaagtggggtctgtgctcactacaaaaggattagacataataaccagtgagagaacaaacactcaagtgtaatatttatcaagagaagtcttgatatttctgtgacaaaaatgtagaattgcaatttccagacattatttttatatgatctatggcataaatagtatgatctatagtatctatagtgtaaatactgatttgctttgtccaacatatgacacaaaatcttctttataatagctcaattcttccactgataagcagtctatgtattctctatttcaaacaatacttttgaaaatgaaaagttatgggaaaaagtggtccatattcttttgagaaaagtcccatgtctcaggcaaagtgttttggaagcttgtttactgaaatcattctggcaactgaatcccttcattcagatcacataatggatcgctttcagaaagtcagtgtgcccgggcagtaatgatgtgtcttaggaaactgatgaattcatctaaaagtggaaagtgcattaaagttgattcctaatgaatttgcattaatgacagtagtcaatattcaaggaattacaatgtgtttattttgtttagtaactttggcttcaaaaatagtttatttcatcagtggtttagcaggcaaacctatcaatttgttaaattttcctcatatgatatgttgtttttcttccaaatcttactattatttataaaatcattcacttaagaatacacaattacagtttttactgttataawatagaaattattatagataacattatattggatcatttcttgtttatctttaactgtttacatagattctatagctgaaataccctagaaattctatttttaaatgtagctgttaataaaaatttacgttattatggagaggttttgatatatggaaaagttcaagtttttaaaatataaaatgtgttatattttggtaattaaattggaaaatcatttattttgaagaatgtcctgcttgcaggaagtgctaagctacatgtaggtcctgcgtaaattcataatttagttattgcatgaaacatagaaatacatccatgattttgtgtacattttaaagtgtataggtgggattattgggttgagtggaacaatggtcttttgccaagtaatttctgaagttagcagagataaagaatcatagttttaaagtactatttcttaatgccatgtagaaagcatgtactgaaagttccctactggtttgaaacaatcaataaattgcaaaagtagtatgacatttaccctaatgtaatatgattgctcatgcctactctcaaatgcatgcacacacacacacacacagaattgaattttaccaatctaattctaaaataggagatttattcttttccctgttatatgattctctgctgaagcaaacttaagtggataaggttttgcatatatgaaacgttattactaagaataaattagtgataagataagttttacatccttttactttcatattctcttatactattcactgctatgttttgctaaaatcatgaattttaaatctcagtccctactaaatatagtgtttggcacatcctcataactgtgtgttaaatgcataagtttaagtattgatgcttctgttattactatttgaatttaattatgtttcctgatttgttttcaactcttatacttttattctatcagtaaggcaaatataaggttattggaagtttatattattctttaaaatctccttcatgtgtatcaaacaggtgatatgttaacccatatccaattaaaacaaagatgcaaaatttgacaatttaaatcacttatatttaataaaataccatagcaaaaattatgacatttacgaatgtcagctgtgaaattatatattttttaatgtttgatgtaactagcatactactaataatccactatattattacaaaataatgagataaataattatttaccttcctatttaaaaggacataaaacactattgttacaaagattatttaaaattaaaactaaaatgcaagtttgagttaaaatcataagattagtgtaaactcagattaatagatctgagccattcactattcttttttcttctctttttcattaaagtgaaatttcataacataaaattaaccattttaaagtgaacatttagtggtatttagtagattcacaatgttatgggaccgccctgtctagccctgtctatttaattccaaagcactttcatcaccctataaggaaacaaagcaagcgtgatgcagtaactcctcattcctccctcccctaagctcctagcaaccgcacttctgctttctgtcattctggatttcgggatatttcatataaataatggaatcatgtgatatataatcttttatgtctggcttttttttttttttttttttttttttaaaaaaaaattatacctttccccccaggggggggaaccgggggggcacccccgcccacgggaaacccccccccccgnnnnnnnnnnnnnnnnnnnnnnnnnnnnnnnnnnnnnnnnnnnnnnnnnnnnnnnnnnnnnnnnnnnnnnnnnnnnnnnnnnnnnnnnnnnnnnnnnnnngaattccattattacgtacttcagattagatttcagatcatcattacaataggtcagattctcttatccattaaaaatataaaaatacaaaaaatttagtgccgtgttttctttctcttaaaaaattctatatttacttctaagtatccctagggttcaaaggtactaacccaattatgaaagtcaattaatattacatttaattaggttattcatttttatagacttagtccaagaggatcacttagatacttttccaggactccgaagaaatattttggaccttatttgtagttattatgccat

SEQ ID NO: 697889 - DNA, 3228 bp, Homo sapiens
  misc_feature 2823, 2824, 2825, 2826, 2827, 2828, 2829, 2830, 2831, 2832,2833, 2834, 2835, 2836, 2837, 2838, 2839, 2840, 2841, 2842,2843, 2844, 2845, 2846, 2847, 2848, 2849, 2850, 2851, 2852,2853, 2854, 2855, 2856, 2857, 2858, 2859, 2860, 2861: n = A,T,C or G
  misc_feature 2862, 2863, 2864, 2865, 2866, 2867, 2868, 2869, 2870, 2871,2872, 2873, 2874, 2875, 2876, 2877, 2878, 2879, 2880, 2881,2882, 2883, 2884, 2885, 2886, 2887, 2888, 2889, 2890, 2891,2892, 2893, 2894, 2895, 2896, 2897, 2898, 2899, 2900: n = A,T,C or G
  misc_feature 2901, 2902, 2903, 2904, 2905, 2906, 2907, 2908, 2909, 2910,2911, 2912, 2913, 2914, 2915, 2916, 2917, 2918, 2919, 2920,2921, 2922: n = A,T,C or G
aaatgagttttcatagatgcgtgaagagagggaagctaggctctagaagtcaggatgaatggatatctaattgacataattgagaggcacagacagaggggagtttcacacacagaaaagcgtaattctggagttaaatatcttcccctgggcttgagaaatcaaaaaagaactttagatacctccctgatcctaaaccatttttatgctcttacactccctttcctccctttgttcacatttttgaaatttcaggagggcagagaaaagatgtaagacaaatgagaggaagggaaatgaaaagtggggtctgtgctcactacaaaaggattagacataataaccagtgagagaacaaacactcaagtgtaatatttatcaagagaagtcttgatatttctgtgacaaaaatgtagaattgcaatttccagacattatttttatatgatctatggcataaatagtatgatctatagtatctatagtgtaaatactgatttgctttgtccaacatatgacacaaaatcttctttataatagctcaattcttccactgataagcagtctatgtattctctatttcaaacaatacttttgaaaatgaaaagttatgggaaaaagtggtccatattcttttgagaaaagtcccatgtctcaggcaaagtgttttggaagcttgtttactgaaatcattctggcaactgaatcccttcattcagatcacataatggatcgctttcagaaagtcagtgtgcccgggcagtaatgatgtgtcttaggaaactgatgaattcatctaaaagtggaaagtgcattaaagttgattcctaatgaatttgcattaatgacagtagtcaatattcaaggaattacaatgtgtttattttgtttagtaactttggcttcaaaaatagtttatttcatcagtggtttagcaggcaaacctatcaatttgttaaattttcctcatatgatatgttgtttttcttccaaatcttactattatttataaaatcattcacttaagaatacacaattacagtttttactgttataaaatagaaattattatagataacattatattggatcatttcttgtttatctttaactgtttacatagattctatagctgaaayaccctagaaattctatttttaaatgtagctgttaataaaaatttacgttattatggagaggttttgatatatggaaaagttcaagtttttaaaatataaaatgtgttatattttggtaattaaattggaaaatcatttattttgaagaatgtcctgcttgcaggaagtgctaagctacatgtaggtcctgcgtaaattcataatttagttattgcatgaaacatagaaatacatccatgattttgtgtacattttaaagtgtataggtgggattattgggttgagtggaacaatggtcttttgccaagtaatttctgaagttagcagagataaagaatcatagttttaaagtactatttcttaatgccatgtagaaagcatgtactgaaagttccctactggtttgaaacaatcaataaattgcaaaagtagtatgacatttaccctaatgtaatatgattgctcatgcctactctcaaatgcatgcacacacacacacacacagaattgaattttaccaatctaattctaaaataggagatttattcttttccctgttatatgattctctgctgaagcaaacttaagtggataaggttttgcatatatgaaacgttattactaagaataaattagtgataagataagttttacatccttttactttcatattctcttatactattcactgctatgttttgctaaaatcatgaattttaaatctcagtccctactaaatatagtgtttggcacatcctcataactgtgtgttaaatgcataagtttaagtattgatgcttctgttattactatttgaatttaattatgtttcctgatttgttttcaactcttatacttttattctatcagtaaggcaaatataaggttattggaagtttatattattctttaaaatctccttcatgtgtatcaaacaggtgatatgttaacccatatccaattaaaacaaagatgcaaaatttgacaatttaaatcacttatatttaataaaataccatagcaaaaattatgacatttacgaatgtcagctgtgaaattatatattttttaatgtttgatgtaactagcatactactaataatccactatattattacaaaataatgagataaataattatttaccttcctatttaaaaggacataaaacactattgttacaaagattatttaaaattaaaactaaaatgcaagtttgagttaaaatcataagattagtgtaaactcagattaatagatctgagccattcactattcttttttcttctctttttcattaaagtgaaatttcataacataaaattaaccattttaaagtgaacatttagtggtatttagtagattcacaatgttatgggaccgccctgtctagccctgtctatttaattccaaagcactttcatcaccctataaggaaacaaagcaagcgtgatgcagtaactcctcattcctccctcccctaagctcctagcaaccgcacttctgctttctgtcattctggatttcgggatatttcatataaataatggaatcatgtgatatataatcttttatgtctggcttttttttttttttttttttttttttaaaaaaaaattatacctttccccccaggggggggaaccgggggggcacccccgcccacgggaaacccccccccccgnnnnnnnnnnnnnnnnnnnnnnnnnnnnnnnnnnnnnnnnnnnnnnnnnnnnnnnnnnnnnnnnnnnnnnnnnnnnnnnnnnnnnnnnnnnnnnnnnnnngaattccattattacgtacttcagattagatttcagatcatcattacaataggtcagattctcttatccattaaaaatataaaaatacaaaaaatttagtgccgtgttttctttctcttaaaaaattctatatttacttctaagtatccctagggttcaaaggtactaacccaattatgaaagtcaattaatattacatttaattaggttattcatttttatagacttagtccaagaggatcacttagatacttttccaggactccgaagaaatattttggaccttatttgtagttattatgccat

SEQ ID NO: 697890 - DNA, 1485 bp, Homo sapiens
cacagctgttcttgaaattaaaaattttcagcagaaccgtgaaatttgataaatacataaaatgtgtagttgcacacatatatgctgtttttgttgtattgacatatattttaagctatgttttgttgcattgacatatattttaagctatgttttgttgtattgacatatattttaagctatgttttgttgtattgacatatattttaagctatgtaggtaaatgtttccatcatccataatatgtatgcaacttataacaaattaaaatacaaaaactaatgttatactatctgtttaaaaatacaaaagtagtactcataatgttgttattagtaatagtaatattaagcatgtactagtccccaggaactgaacttgatatatattgccttagttaatgctaacagtaatcctatatgttaggtattcttatcattatccctcctctacagaaaagggaaccatgttgttaagagacttaagtaacttttctaaattcacaaagataataactggaggaagcaaattttaagaaagttcttgccaaatgcattacctgagtgttaaaccattattgcatctataattataaacctaaaggccattgaaataattgtctaaaaggcaataaactgatagcaagaggtagtaaaggaaagagcagaaaatgtcatagtccaagtatactagaaatcagctacaataatggtagaagcctgatttcccaaaacactacagaaagactccatgttcagagctggtaacataaagagagcacacagaaggcaaggacgaggacaagagataataccacagagttatttgaaagtctgaatatgcaagtccagctcactatcatggaagttaaatagacaatgtggcattagtccctggccaaaagagtataaaacagaggctagcagaagaaaaatgaaagcaaccagttttggtttaggtccaccaaaagaatatcgaattcatttcggtaactgaatgcccccgtttaacytctgaaaccttgtcattaaactacagggaattaaatccaataataaacccttccattgtcaacagaactctcaatgaactgtaccactcaaaagagagaggaggcaggaaagcaagtttttataaacagcagcaaaggaaacccacaccaaatacctcaaataaatccatatcattcatcattgtgagtggaaaaatcaaagatctctgggcatgtgaagaacataagagtggcagaaaagcaaaacaaaacaagaaaaacaggaatagtcaaggctgagattaagaaacagaatgtctataggggaaataaaaaacaagaaaagggaggccacatggagaaggagaaaggacagaggctcttaaaataactgaagtaagagatcatggtggtttttgatcagaataatggtggaaatggagagaaaaaactggatccaatgtaagatataaaagagaatattagttaaaaaa

SEQ ID NO: 697891 - DNA, 1485 bp, Homo sapiens
cacagctgttcttgaaattaaaaattttcagcagaaccgtgaaatttgataaatacataaaatgtgtagttgcacacatatatgctgtttttgttgtattgacatatattttaagctatgttttgttgcattgacatatattttaagctatgttttgttgtattgacatatattttaagctatgttttgttgtattgacatatattttaagctatgtaggtaaatgtttccatcatccataatatgtatgcaacttataacaaattaaaatacaaaaactaatgttatactatctgtttaaaaatacaaaagtagtactcataatgttgttattagtaatagtaatattaagcatgtactagtccccaggaactgaacttgatatatattgccttagttaatgctaacagtaatcctatatgttaggtattcttatcattatccctcctctacagaaaagggaaccatgttgttaagagacttaagtaacttttctaaattcacaaagataataactggaggaagcaaattttaagaaagttcttgccaaatgcattacctgagtgttaaaccattattgcatctataattataaacctaaaggccattgaaataattgtctaaaaggcaataaactgatagcaagaggtagtaaaggaaagagcagaaaatgtcatagtccaagtatactagaaatcagctacaataatggtagaagcctgatttcccaaaacactacagaaagactccatgttcagagctggtaacataaagagagcacacagaaggcaaggacgaggacaagagataataccacagagttatttgaaagtctgaatatgcaagtccagctcactatcatggaagttaaatagacaatgtggcattagtccctggccaaaagagtataaaacagaggctagcagaagaaaaatgaaagcaaccagttttggtttaggtccaccaaaagaatatcgaattcatttcggtaactgaatgcccccgtttaacctctgaaaccttgtcattaaactacagggaattaartccaataataaacccttccattgtcaacagaactctcaatgaactgtaccactcaaaagagagaggaggcaggaaagcaagtttttataaacagcagcaaaggaaacccacaccaaatacctcaaataaatccatatcattcatcattgtgagtggaaaaatcaaagatctctgggcatgtgaagaacataagagtggcagaaaagcaaaacaaaacaagaaaaacaggaatagtcaaggctgagattaagaaacagaatgtctataggggaaataaaaaacaagaaaagggaggccacatggagaaggagaaaggacagaggctcttaaaataactgaagtaagagatcatggtggtttttgatcagaataatggtggaaatggagagaaaaaactggatccaatgtaagatataaaagagaatattagttaaaaaa

SEQ ID NO: 697892 - DNA, 1485 bp, Homo sapiens
cacagctgttcttgaaattaaaaattttcagcagaaccgtgaaatttgataaatacataaaatgtgtagttgcacacatatatgctgtttttgttgtattgacatatattttaagctatgttttgttgcattgacatatattttaagctatgttttgttgtattgacatatattttaagctatgttttgttgtattgacatatattttaagctatgtaggtaaatgtttccatcatccataatatgtatgcaacttataacaaattaaaatacaaaaactaatgttatactatctgtttaaaaatacaaaagtagtactcataatgttgttattagtaatagtaatattaagcatgtactagtccccaggaactgaacttgatatatattgccttagttaatgctaacagtaatcctatatgttaggtattcttatcattatccctcctctacagaaaagggaaccatgttgttaagagacttaagtaacttttctaaattcacaaagataataactggaggaagcaaattttaagaaagttcttgccaaatgcattacctgagtgttaaaccattattgcatctataattataaacctaaaggccattgaaataattgtctaaaaggcaataaactgatagcaagaggtagtaaaggaaagagcagaaaatgtcatagtccaagtatactagaaatcagctacaataatggtagaagcctgatttcccaaaacactacagaaagactccatgttcagagctggtaacataaagagagcacacagaaggcaaggacgaggacaagagataataccacagagttatttgaaagtctgaatatgcaagtccagctcactatcatggaagttaaatagacaatgtggcattagtccctggccaaaagagtataaaacagaggctagcagaagaaaaatgaaagcaaccagttttggtttaggtccaccaaaagaatatcgaattcatttcggtaactgaatgcccccgtttaacctctgaaaccttgtcattaaactacagggaattaaatccaataataaacccttccattgtcaacagaactctcaatgaactgtaccactcaaaagagagaggaggcaggaaagcaagtttttataaacagcagcaaaggaaacccacaccaaatacctcaaataaatccatatcattcatcattgtgagtggaaaaatcaaagatctctgggcatgtgaagaacataagagtggcagaaaagcaaaacaaaacaagaaaaacaggaakagtcaaggctgagattaagaaacagaatgtctataggggaaataaaaaacaagaaaagggaggccacatggagaaggagaaaggacagaggctcttaaaataactgaagtaagagatcatggtggtttttgatcagaataatggtggaaatggagagaaaaaactggatccaatgtaagatataaaagagaatattagttaaaaaa

SEQ ID NO: 697893 - DNA, 1485 bp, Homo sapiens
cacagctgttcttgaaattaaaaattttcagcagaaccgtgaaatttgataaatacataaaatgtgtagttgcacacatatatgctgtttttgttgtattgacatatattttaagctatgttttgttgcattgacatatattttaagctatgttttgttgtattgacatatattttaagctatgttttgttgtattgacatatattttaagctatgtaggtaaatgtttccatcatccataatatgtatgcaacttataacaaattaaaatacaaaaactaatgttatactatctgtttaaaaatacaaaagtagtactcataatgttgttattagtaatagtaatattaagcatgtactagtccccaggaactgaacttgatatatattgccttagttaatgctaacagtaatcctatatgttaggtattcttatcattatccctcctctacagaaaagggaaccatgttgttaagagacttaagtaacttttctaaattcacaaagataataactggaggaagcaaattttaagaaagttcttgccaaatgcattacctgagtgttaaaccattattgcatctataattataaacctaaaggccattgaaataattgtctaaaaggcaataaactgatagcaagaggtagtaaaggaaagagcagaaaatgtcatagtccaagtatactagaaatcagctacaataatggtagaagcctgatttcccaaaacactacagaaagactccatgttcagagctggtaacataaagagagcacacagaaggcaaggacgaggacaagagataataccacagagttatttgaaagtctgaatatgcaagtccagctcactatcatggaagttaaatagacaatgtggcattagtccctggccaaaagagtataaaacagaggctagcagaagaaaaatgaaagcaaccagttttggtttaggtccaccaaaagaatatcgaattcatttcggtaactgaatgcccccgtttaacctctgaaaccttgtcattaaactacagggaattaaatccaataataaacccttccattgtcaacagaactctcaatgaactgtaccactcaaaagagagaggaggcaggaaagcaagtttttataaacagcagcaaaggaaacccacaccaaatacctcaaataaatccatatcattcatcattgtgagtggaaaaatcaaagatctctgggcatgtgaagaacataagagtggcagaaaagcaaaacaaaacaagaaaaacaggaatagtcaaggctgagattaagaaacagaatgtctataggggaaataaaaaacaagaaaagggaggccacatggagaaggagaaaggacagaggctcttaaaataactgaagtaagagatcatggtggtttttgatcagaataatggtggaaatggagagaaawaactggatccaatgtaagatataaaagagaatattagttaaaaaa

SEQ ID NO: 697894 - DNA, 1029 bp, Homo sapiens
tcgttgcagtcttgtgagggaggctgcaggtgtggttaggggtagggacagaatttcgttgaagtagctggtagatggtctgaaaattttctctcatgctgggtagcccctttcctggcccttaggctggagaatacaggcttttgttaatcctttttttgtctgtgcctgggcttttctgctaccagcttctcatccccacgtctgagagaacctaggggaggctctgccccattcctcaggtcctgagctcccaacctgtctgcttttgtctccccaccttccagagtcttcttgggtttgttttacatgtgatatccagggatttcagctgtatttagtgagagggagaagaaaatgtgtgttcactcaccttcctgaaagcagaagtcagtggtgtgtgctttggtgtgtgcttgtcgtgtcattgctcatcctgctgcttgtcttttcactctactgtgtcttttaattaacagaagatcttaattttgatcaattttttgtttttaatattttttataatctgttttgaagaatcttcactgagcccataaagatactttgtcctatgtgattttctagaagctttattatttacttttcacatttaggcctacaattcacctggggttgaatttttttttttggtatggggtggcacaagggccaagtttccagttttgtcctgtggttatcccaatgaccagcaccgtggatcaaaaccaccacccttcccttgctgctctgcaaggttaattggtcataaatcaagtattcatatgtgggtatgtgtgtttcccgactcttcattctgccccacatgtcctttgtctcgctgaaatcacactgtcctgcacgatggcactagggtcacgtcttggcgttgagtgatgtgagcatcaaacttggtcttcaggattgccttggctgttcttgaatctttgcatttccatayaaattttagaacctgctcgtcaacttataaaatagcaatctggatttccatcgtattgcactgaatccatc

SEQ ID NO: 697895 - DNA, 638 bp, Homo sapiens
ggaaaattagatattatcaatttaataatttctatcatatgtgaacactgttaaaacgttgcagtttgtatcatttctgtaaaacatcagttgaaattcttctacagctccagcatgactcattgaataatatcaaaggaggaatgtgctctctatatgcttgcaagaaataaaatgtatgcaattaggatgttttataggctatctctgtagacgactgatgtctgaaaaaaaattttgactagttaataagcagtgtacacctattgatagacctttattgagtcaacttttccctttcctatcatgtgatatacaaatactattttctagcagtgtttttagttccaaattaagtggagttacgatgaataaaaattaagactcgatagtgtgaaaccatgtcatattttattgtcagagtaagctatatgttttcccatctatatttcaacctgaaattcattttcctggttgaaaagtaagatccaggttgtttaaactttttctgagctattgtgttcttagttcaatgtacaacrttttcatttaatattacagacaaaagcactttaagctgtgggggctaactccctcagcatttgaaataagtccccatggtcattagtgattaagtg

SEQ ID NO: 697896 - DNA, 596 bp, Homo sapiens
ttttttgagagggagtctttctctgttgctaggctggagtgcagtggcgccatcttggctcactgcagcctctcctggcttcaagcgactcccctaccttagcctcccaagtagctggcactacaggcacgtgccaccatgcccggctaattttttttgttttagtagagacagggtttcaccatgttggccaggatggtcttgatctccggacttcatgatccacccgcctcggcctcccmaattgctgggattacaggcgtgagccactgcgcctgggctcagttttttttttttggaatattcatagataaatgtaactcaccaaagtcagtgtttgaacatgttcatcatgtccaaaagaaagtttgtaccccgttgggtaccccgggtatgagtacccctatcattttcctaccaaccctatcccatcattttccattccacctatcccccaaccaccatatctatagagttttttcactgtggtaaaatataggtaacttaaaatttaccattttaactatttataacaagtcactaatttcagaatggcacacatttcccaaaatagaaatattagaacatgacaattt

SEQ ID NO: 697897 - DNA, 708 bp, Homo sapiens
aaatccttccccctaaggtgataagattaggagatggggcctttgggaggtgattagttcatgagggtagacccctcatgaatagtattagtgcccttattataaaagggatcccagagaactctcttgctttctctctaccatatgaagatataatgaaaagactgcagtctgttacccagaagagcactcatcagaacccagtcacgctggcaccttgatgttgaacttccagactccaaaactatgagaaataaatgtctgctgtttatcaaccaccctgtttatagtactttgttatagtagcctgaattgactaagacaattatggagctwgaaagaactgtgagctcctcttatggtcaaaggagctgaaacttaggctttgtcctgaaatttccctctttttttccccctgaatcattaattattaattttccctttctttgatcctcggttaaaaaaaaatcctctcttaaccctatattctgctccagctgtgtctcatttttctgttgtcctttatatcaaaactctccccaaagacttgttatgctttgtcttgacttcctctccttttatctctcttgaacctgcttcactcagacatctgacccaaaactccaccaaaatcgcccttgtcaaatccactaggcaatcttcagtcttcattttattggcaagtcaagagcatttcaaccattggat

SEQ ID NO: 697898 - DNA, 708 bp, Homo sapiens
aaatccttccccctaaggtgataagattaggagatggggcctttgggaggtgattagttcatgagggtagacccctcatgaatagtattagtgcccttattataaaagggatcccagagaactctcttgctttctctctaccatatgaagatataatgaaaagactgcagtctgttacccagaagagcactcatcagaacccagtcacgctggcaccttgatgttgaacttccagactccaaaactatgagaaataaatgtctgctgtttatcaaccaccctgtttatagtactttgttatagtagcctgaattgactaagacaattatggagcttgaaagaactgtgagctcctcttatggtcaaaggagctgaaacttaggctttgtcctgaaatttccctctttttttccccctgaatcattaattattaattttccctttmtttgatcctcggttaaaaaaaaatcctctcttaaccctatattctgctccagctgtgtctcatttttctgttgtcctttatatcaaaactctccccaaagacttgttatgctttgtcttgacttcctctccttttatctctcttgaacctgcttcactcagacatctgacccaaaactccaccaaaatcgcccttgtcaaatccactaggcaatcttcagtcttcattttattggcaagtcaagagcatttcaaccattggat

SEQ ID NO: 697899 - DNA, 667 bp, Homo sapiens
ttcagtcttccttattggcaaaccagctgtctttgcttctcagtccacatagtaggcagcctacaaggtagctaactgtagcacctggggtcacatgtttcagccccaaaacatttaatgactgactgaattcctaattctcagaaaagaatctgcttggtccacataagttcaggtgtctacctctggtccaaccagctatgaccagggaratgtccctgaaatatcatcttggtggttggagatctgctctgtgaccttgtgcatcagaacatggggagaggtttcaggagagtttctgtgtgagtgggaaaactattaagtgcctactctacatcccaatatttcactgtttttccctttctctagccccatctcccatccctccacgctccaccccatccactctaaatactcttttactttcttgaatcctcttggtatgtcctgcaactccagtagtcttctctggtcaagtttgcatattttcctatattcagtgcctcagagtcagatcttggaatcctctgacatctccagaccacttgttttctgtccttgtataaagtcatcagctcctttgaggtctacatcatttggctatgcctttctctctcttctctttctgctatctaaccacctcccaggtatccattttcatgcatca

SEQ ID NO: 697900 - DNA, 2831 bp, Homo sapiens
ttttttttttgagatggaatctcgctctattgcccaggctggagtgcaatggcatgatcttggctcactgcaacctctgcctcccaggttcaagcaattctcctgcctcagcctcccgagtagctgggattacaggcatgcaccaccatgcctggctaattttgtattttttgtagaggtggggtttctccatgttagccaggatggtcttgatctcctgacctcgtgatccacccaccttggcctcccagagtgctgggattacaggtgtgagccactgcgcctggcctccaaagtaagtcttaatgaatattacatagtattcaaatgaatgaatgggtgtagaaggtaggaagataaggttccctcaatgttttttaaagcaatatctgacattgaaaaaattgtacattattattttttattttctctttccttttttttttttttttttttaatgcagtcttactctatcacccagcctggagtgcagtggtgtgatctcagctcactgcattctcaaccttccaggttcaagtgatcctcccacctcagcctcccaagtagctgggtctactggtgtgcaccatcatgcctggctaattttttttctttttgtctttttagaaacaggggtttcaccatgtggtccaggctggtctgaaactccagagctcaagtgatctgcctgcctcagcctcccaaagtgctgggattacaggcatgagccactgcacccggccattattttcttcttctttttttttttttgagacagaggttcgcttttgtcacccaggctggagtgcaatggtgcgatcttggctcactgcaacttctgcctcccaggtttaagcgaatctcctgcctcagcctcccaagtagctgggattacaggygcttgtcaccatgcccagctaatttttgtatttttagtagagacggggtttcaccatgttggtcaggctgttgttgaactcctgatctccagtgatccgcctgcctcagcctcccaaagtgctgggattacaggcatgggccactgcacctggcccattattttcttaatatttatgttttgcttcctttcagtagaacagacacacaagaagtaattcttagaaaaatgctgatgagcacctggaggctctgatgtccacactagatgccttagaaaaaagaactatagccattgctattcccatcattgtgctgcacagaggaatgtaggtatccctgggctttacatgtaagggcaaacaggacgtgataaccctccaggatgtgtttgagaagggacatgtgccttgtggagccaagcactccttcctatgctccctccaacaagtttaagaaatatttatttatttatttattttttgagacggagtcttgctctgtcacccaggctggagtgcaatcgtacaatctcggctcagtgcaagctctgcctcccaggttaaattctcctgcctcagcctcccgagtagctgggattacaggtgcccaccaccacgcctggctaattttttgtattttttttagtagagatgggggtttcactatgttggccaggttggtctcgaactcctgacctcatgatccacccgcctcagcctcccaaagtgctgggattacaggcgtgagccaccgcacccggccttattgatttattaatttgttgagcacaggcgagttggacgctaagaatatcaacatagaaaaagcacagaacctgcttcatgggacttattgactagaaacagatgatcagatgagaaaataggcaattacaacatgatgtcatgtgctgtgatagaggtaagcacaggcttccatggtgccaaggagggatctcttacccagcctgcaatggtaagggaaagtccccagacgtaatggcaccagaacttagtcttgaaagaacaggaattacagaggagaagtggagatggttgagggcattcccatcaaaaacccagagagggccgaatgtggtggcacctatattttagggtatatcatatatgataagttgtaaagaaaagcaagagaatgattagcataaaatttagagtagcagcctctttttttttttttttttttgtagagataagagtcttgctatgttatccaggctggtctcaaactcctggcttcaagtgatcctcctgccttggcctcccaaagtgctgggatcacaggtataagccattgcacctggcccagttactatttttaaagtaagaagttggtagaaaactggtacaacttaggacttccatttcctggtgacaattgtccttatcacctcataggtctttgaggaaggttagatgtgatcaacaatgatgtcctgttctgactaaacgttaattgtctagcttcagaggcagagcctgagttaggtccctttctctgtggtcatgagaacctgactcagtgacgttgactcacagaatgtgagcttcatcactagctcttatcaccttgggtctagagggtcagaaatggaagctctcctgcaaaggggggcattgagagttcaagtttctcactagtccaggcaggagtgggtacatgtttactgcagaacagagtaggtgtgacctggcataacagcctaggggtcttcaaagaaagctgggtcttatcttatctcgctagaggaaagccagtctgagtaagggggtggaagagcggtggaccatctagggatccaacaaagtcgcatttcaaagccggatgtgatgccaggcacagtggctcacgcctgttaatcccagcactttgggaggccaggatgagcagatcacttgaggtcaggagtt

SEQ ID NO: 697901 - DNA, 2831 bp, Homo sapiens
ttttttttttgagatggaatctcgctctattgcccaggctggagtgcaatggcatgatcttggctcactgcaacctctgcctcccaggttcaagcaattctcctgcctcagcctcccgagtagctgggattacaggcatgcaccaccatgcctggctaattttgtattttttgtagaggtggggtttctccatgttagccaggatggtcttgatctcctgacctcgtgatccacccaccttggcctcccagagtgctgggattacaggtgtgagccactgcgcctggcctccaaagtaagtcttaatgaatattacatagtattcaaatgaatgaatgggtgtagaaggtaggaagataaggttccctcaatgttttttaaagcaatatctgacattgaaaaaattgtacattattattttttattttctctttccttttttttttttttttttttaatgcagtcttactctatcacccagcctggagtgcagtggtgtgatctcagctcactgcattctcaaccttccaggttcaagtgatcctcccacctcagcctcccaagtagctgggtctactggtgtgcaccatcatgcctggctaattttttttctttttgtctttttagaaacaggggtttcaccatgtggtccaggctggtctgaaactccagagctcaagtgatctgcctgcctcagcctcccaaagtgctgggattacaggcatgagccactgcacccggccattattttcttcttctttttttttttttgagacagaggttcgcttttgtcacccaggctggagtgcaatggtgcgatcttggctcactgcaacttctgcctcccaggtttaagcgaatctcctgcctcagcctcccaagtagctgggattacaggtgcttgtcaccatgcccagctaatttttgtatttttagtagagacggggtttcaccatgttggtcaggctgttgttgaactcctgatctccagtgatccgcctgcctcagcctcccaaagtgctgggattacaggcrtgggccactgcacctggcccattattttcttaatatttatgttttgcttcctttcagtagaacagacacacaagaagtaattcttagaaaaatgctgatgagcacctggaggctctgatgtccacactagatgccttagaaaaaagaactatagccattgctattcccatcattgtgctgcacagaggaatgtaggtatccctgggctttacatgtaagggcaaacaggacgtgataaccctccaggatgtgtttgagaagggacatgtgccttgtggagccaagcactccttcctatgctccctccaacaagtttaagaaatatttatttatttatttattttttgagacggagtcttgctctgtcacccaggctggagtgcaatcgtacaatctcggctcagtgcaagctctgcctcccaggttaaattctcctgcctcagcctcccgagtagctgggattacaggtgcccaccaccacgcctggctaattttttgtattttttttagtagagatgggggtttcactatgttggccaggttggtctcgaactcctgacctcatgatccacccgcctcagcctcccaaagtgctgggattacaggcgtgagccaccgcacccggccttattgatttattaatttgttgagcacaggcgagttggacgctaagaatatcaacatagaaaaagcacagaacctgcttcatgggacttattgactagaaacagatgatcagatgagaaaataggcaattacaacatgatgtcatgtgctgtgatagaggtaagcacaggcttccatggtgccaaggagggatctcttacccagcctgcaatggtaagggaaagtccccagacgtaatggcaccagaacttagtcttgaaagaacaggaattacagaggagaagtggagatggttgagggcattcccatcaaaaacccagagagggccgaatgtggtggcacctatattttagggtatatcatatatgataagttgtaaagaaaagcaagagaatgattagcataaaatttagagtagcagcctctttttttttttttttttttgtagagataagagtcttgctatgttatccaggctggtctcaaactcctggcttcaagtgatcctcctgccttggcctcccaaagtgctgggatcacaggtataagccattgcacctggcccagttactatttttaaagtaagaagttggtagaaaactggtacaacttaggacttccatttcctggtgacaattgtccttatcacctcataggtctttgaggaaggttagatgtgatcaacaatgatgtcctgttctgactaaacgttaattgtctagcttcagaggcagagcctgagttaggtccctttctctgtggtcatgagaacctgactcagtgacgttgactcacagaatgtgagcttcatcactagctcttatcaccttgggtctagagggtcagaaatggaagctctcctgcaaaggggggcattgagagttcaagtttctcactagtccaggcaggagtgggtacatgtttactgcagaacagagtaggtgtgacctggcataacagcctaggggtcttcaaagaaagctgggtcttatcttatctcgctagaggaaagccagtctgagtaagggggtggaagagcggtggaccatctagggatccaacaaagtcgcatttcaaagccggatgtgatgccaggcacagtggctcacgcctgttaatcccagcactttgggaggccaggatgagcagatcacttgaggtcaggagtt

SEQ ID NO: 697902 - DNA, 2831 bp, Homo sapiens
ttttttttttgagatggaatctcgctctattgcccaggctggagtgcaatggcatgatcttggctcactgcaacctctgcctcccaggttcaagcaattctcctgcctcagcctcccgagtagctgggattacaggcatgcaccaccatgcctggctaattttgtattttttgtagaggtggggtttctccatgttagccaggatggtcttgatctcctgacctcgtgatccacccaccttggcctcccagagtgctgggattacaggtgtgagccactgcgcctggcctccaaagtaagtcttaatgaatattacatagtattcaaatgaatgaatgggtgtagaaggtaggaagataaggttccctcaatgttttttaaagcaatatctgacattgaaaaaattgtacattattattttttattttctctttccttttttttttttttttttttaatgcagtcttactctatcacccagcctggagtgcagtggtgtgatctcagctcactgcattctcaaccttccaggttcaagtgatcctcccacctcagcctcccaagtagctgggtctactggtgtgcaccatcatgcctggctaattttttttctttttgtctttttagaaacaggggtttcaccatgtggtccaggctggtctgaaactccagagctcaagtgatctgcctgcctcagcctcccaaagtgctgggattacaggcatgagccactgcacccggccattattttcttcttctttttttttttttgagacagaggttcgcttttgtcacccaggctggagtgcaatggtgcgatcttggctcactgcaacttctgcctcccaggtttaagcgaatctcctgcctcagcctcccaagtagctgggattacaggtgcttgtcaccatgcccagctaatttttgtatttttagtagagacggggtttcaccatgttggtcaggctgttgttgaactcctgatctccagtgatccgcctgcctcagcctcccaaagtgctgggattacaggcatgggccactgcacctggcscattattttcttaatatttatgttttgcttcctttcagtagaacagacacacaagaagtaattcttagaaaaatgctgatgagcacctggaggctctgatgtccacactagatgccttagaaaaaagaactatagccattgctattcccatcattgtgctgcacagaggaatgtaggtatccctgggctttacatgtaagggcaaacaggacgtgataaccctccaggatgtgtttgagaagggacatgtgccttgtggagccaagcactccttcctatgctccctccaacaagtttaagaaatatttatttatttatttattttttgagacggagtcttgctctgtcacccaggctggagtgcaatcgtacaatctcggctcagtgcaagctctgcctcccaggttaaattctcctgcctcagcctcccgagtagctgggattacaggtgcccaccaccacgcctggctaattttttgtattttttttagtagagatgggggtttcactatgttggccaggttggtctcgaactcctgacctcatgatccacccgcctcagcctcccaaagtgctgggattacaggcgtgagccaccgcacccggccttattgatttattaatttgttgagcacaggcgagttggacgctaagaatatcaacatagaaaaagcacagaacctgcttcatgggacttattgactagaaacagatgatcagatgagaaaataggcaattacaacatgatgtcatgtgctgtgatagaggtaagcacaggcttccatggtgccaaggagggatctcttacccagcctgcaatggtaagggaaagtccccagacgtaatggcaccagaacttagtcttgaaagaacaggaattacagaggagaagtggagatggttgagggcattcccatcaaaaacccagagagggccgaatgtggtggcacctatattttagggtatatcatatatgataagttgtaaagaaaagcaagagaatgattagcataaaatttagagtagcagcctctttttttttttttttttttgtagagataagagtcttgctatgttatccaggctggtctcaaactcctggcttcaagtgatcctcctgccttggcctcccaaagtgctgggatcacaggtataagccattgcacctggcccagttactatttttaaagtaagaagttggtagaaaactggtacaacttaggacttccatttcctggtgacaattgtccttatcacctcataggtctttgaggaaggttagatgtgatcaacaatgatgtcctgttctgactaaacgttaattgtctagcttcagaggcagagcctgagttaggtccctttctctgtggtcatgagaacctgactcagtgacgttgactcacagaatgtgagcttcatcactagctcttatcaccttgggtctagagggtcagaaatggaagctctcctgcaaaggggggcattgagagttcaagtttctcactagtccaggcaggagtgggtacatgtttactgcagaacagagtaggtgtgacctggcataacagcctaggggtcttcaaagaaagctgggtcttatcttatctcgctagaggaaagccagtctgagtaagggggtggaagagcggtggaccatctagggatccaacaaagtcgcatttcaaagccggatgtgatgccaggcacagtggctcacgcctgttaatcccagcactttgggaggccaggatgagcagatcacttgaggtcaggagtt

SEQ ID NO: 697903 - DNA, 2831 bp, Homo sapiens
ttttttttttgagatggaatctcgctctattgcccaggctggagtgcaatggcatgatcttggctcactgcaacctctgcctcccaggttcaagcaattctcctgcctcagcctcccgagtagctgggattacaggcatgcaccaccatgcctggctaattttgtattttttgtagaggtggggtttctccatgttagccaggatggtcttgatctcctgacctcgtgatccacccaccttggcctcccagagtgctgggattacaggtgtgagccactgcgcctggcctccaaagtaagtcttaatgaatattacatagtattcaaatgaatgaatgggtgtagaaggtaggaagataaggttccctcaatgttttttaaagcaatatctgacattgaaaaaattgtacattattattttttattttctctttccttttttttttttttttttttaatgcagtcttactctatcacccagcctggagtgcagtggtgtgatctcagctcactgcattctcaaccttccaggttcaagtgatcctcccacctcagcctcccaagtagctgggtctactggtgtgcaccatcatgcctggctaattttttttctttttgtctttttagaaacaggggtttcaccatgtggtccaggctggtctgaaactccagagctcaagtgatctgcctgcctcagcctcccaaagtgctgggattacaggcatgagccactgcacccggccattattttcttcttctttttttttttttgagacagaggttcgcttttgtcacccaggctggagtgcaatggtgcgatcttggctcactgcaacttctgcctcccaggtttaagcgaatctcctgcctcagcctcccaagtagctgggattacaggtgcttgtcaccatgcccagctaatttttgtatttttagtagagacggggtttcaccatgttggtcaggctgttgttgaactcctgatctccagtgatccgcctgcctcagcctcccaaagtgctgggattacaggcatgggccactgcacctggcccattattttcttaatatttatgttttgcttcctttcagtagaacagacacacaagaagtaattctyagaaaaatgctgatgagcacctggaggctctgatgtccacactagatgccttagaaaaaagaactatagccattgctattcccatcattgtgctgcacagaggaatgtaggtatccctgggctttacatgtaagggcaaacaggacgtgataaccctccaggatgtgtttgagaagggacatgtgccttgtggagccaagcactccttcctatgctccctccaacaagtttaagaaatatttatttatttatttattttttgagacggagtcttgctctgtcacccaggctggagtgcaatcgtacaatctcggctcagtgcaagctctgcctcccaggttaaattctcctgcctcagcctcccgagtagctgggattacaggtgcccaccaccacgcctggctaattttttgtattttttttagtagagatgggggtttcactatgttggccaggttggtctcgaactcctgacctcatgatccacccgcctcagcctcccaaagtgctgggattacaggcgtgagccaccgcacccggccttattgatttattaatttgttgagcacaggcgagttggacgctaagaatatcaacatagaaaaagcacagaacctgcttcatgggacttattgactagaaacagatgatcagatgagaaaataggcaattacaacatgatgtcatgtgctgtgatagaggtaagcacaggcttccatggtgccaaggagggatctcttacccagcctgcaatggtaagggaaagtccccagacgtaatggcaccagaacttagtcttgaaagaacaggaattacagaggagaagtggagatggttgagggcattcccatcaaaaacccagagagggccgaatgtggtggcacctatattttagggtatatcatatatgataagttgtaaagaaaagcaagagaatgattagcataaaatttagagtagcagcctctttttttttttttttttttgtagagataagagtcttgctatgttatccaggctggtctcaaactcctggcttcaagtgatcctcctgccttggcctcccaaagtgctgggatcacaggtataagccattgcacctggcccagttactatttttaaagtaagaagttggtagaaaactggtacaacttaggacttccatttcctggtgacaattgtccttatcacctcataggtctttgaggaaggttagatgtgatcaacaatgatgtcctgttctgactaaacgttaattgtctagcttcagaggcagagcctgagttaggtccctttctctgtggtcatgagaacctgactcagtgacgttgactcacagaatgtgagcttcatcactagctcttatcaccttgggtctagagggtcagaaatggaagctctcctgcaaaggggggcattgagagttcaagtttctcactagtccaggcaggagtgggtacatgtttactgcagaacagagtaggtgtgacctggcataacagcctaggggtcttcaaagaaagctgggtcttatcttatctcgctagaggaaagccagtctgagtaagggggtggaagagcggtggaccatctagggatccaacaaagtcgcatttcaaagccggatgtgatgccaggcacagtggctcacgcctgttaatcccagcactttgggaggccaggatgagcagatcacttgaggtcaggagtt

SEQ ID NO: 697904 - DNA, 1010 bp, Homo sapiens
ctacaacaaagaatagtgctcaggttgagaaactatgagagagagtatattaatcagtgttctccagagaaacagaacaaatagattccgtatgtatacatacatgtgatatggtttggctgtgtctccacccatatctcatcttgaattacagctaccataatttccacacactgtgggagggacccagtgggaaataatttaatcataagggcagtttcccccatactgttctcatggtagtgaataagtctcatgagatctgatgattttataggggttttctctttkgcttttctctcattctctcttgactgctgccatgtaagacatgcctttcaccttctgccatgattgtgaggcctccccagccacatggaactgtgagtctattaaacctctttttctttataaattacccagtctcaggtatgttttatcatcagtgtgaaaatggattaatacaacatatgtgtgtatatatatatgtatataatgtatgtgtgtatgtgtgtctctctctctttctatacagacacatttatattctctcttttttaagagatacaaatatgtatcacgttccaaaggctggcaagttcaaatataaagggtgggctggcaggcttgagacccaggaaagccagtgttgcagataaagtgagaagacagcatgctggggaatttcctcttgcagtagaacactgttttttatttttttaattttttttattgtgttattcaggccttcaactgattgaatgaggcccacctacattatggagggtaatctgtttactcaaagttctgatttaagtattaatataatttaaaacacccctaatgttaacacatacaattaaccaacgcagagagtacagctgacacttgaacaattgggtgtcaggtgaacccaccctctgtgcagttgaaaattcacttttaacttttgatttcctcaaaatttaactactatagcctactgttgactggaagccttaccaataaca

SEQ ID NO: 697905 - DNA, 985 bp, Homo sapiens
ggccaagggtgcagctgtaccccaaacatcactgggggatgggcatggtactgccgctactaagtcatagaaattttaaaaaggtggaacagggcccagggaccctcggctatcaagtctcttagaacctactggctggttctgcacaggaccaccagcccaagtaccttcatatattcctgttgcacttagaggttaacaaccctgtaggccatccactctcactcccatctatgcatattaccctgcctgccttaacccattcttcagggaggaaactacagctccagaactgtaagtaggagagtttcaaggacgctgcattggctataaacaagcgctgtttccaatttcccagaaaaaaaaaaaaatctctaaaataaggtatttggttgatttccctcttcctgatccccacacagcactytggttttcatctgtgaaaaataaatggaacaatctctgttttccaaagttccgtgatatacagctacttgtcatggttaaaatataaaatggcgccggctggaacttccagatatccttgtatctttttcaagcactttaaatttcacttcctggtgaaaatattctatctgattccattcttggcaaacaaccgtatgctaaagcttaaagagaaaagagtggatgggagaactaatatgcactttcacaatgcaaaggacaacaggggagacacaattcaaaggtcttttccttgtgcacaggatgggtgggagaactgagtgcctttggatcgtcccttattccatcacactgtagcaagtggtgtaccccaactgccgatgaaggtgcccaggtggggatgcaattgattcctacctgtatgttcgtgctgtaatatttgcccaatgaggtcaaggaacaggagaccaccatgcctcccacaaacacccacacacttaaatgcctccaacctcagccagcaattctgttacttctcacttctgcggatttctct

SEQ ID NO: 697906 - DNA, 985 bp, Homo sapiens
ggccaagggtgcagctgtaccccaaacatcactgggggatgggcatggtactgccgctactaagtcatagaaattttaaaaaggtggaacagggcccagggaccctcggctatcaagtctcttagaacctactggctggttctgcacaggaccaccagcccaagtaccttcatatattcctgttgcacttagaggttaacaaccctgtaggccatccactctcactcccatctatgcatattaccctgcctgccttaacccattcttcagggaggaaactacagctccagaactgtaagtaggagagtttcaaggacgctgcattggctataaacaagcgctgtttccaatttcccagaaaaaaaaaaaaatctctaaaataaggtatttggttgatttccctcttcctgatccccacacagcactctggttttcatctgtgaaaaataaatggaacaatctctgttttccaaagttccrtgatatacagctacttgtcatggttaaaatataaaatggcgccggctggaacttccagatatccttgtatctttttcaagcactttaaatttcacttcctggtgaaaatattctatctgattccattcttggcaaacaaccgtatgctaaagcttaaagagaaaagagtggatgggagaactaatatgcactttcacaatgcaaaggacaacaggggagacacaattcaaaggtcttttccttgtgcacaggatgggtgggagaactgagtgcctttggatcgtcccttattccatcacactgtagcaagtggtgtaccccaactgccgatgaaggtgcccaggtggggatgcaattgattcctacctgtatgttcgtgctgtaatatttgcccaatgaggtcaaggaacaggagaccaccatgcctcccacaaacacccacacacttaaatgcctccaacctcagccagcaattctgttacttctcacttctgcggatttctct

SEQ ID NO: 697907 - DNA, 985 bp, Homo sapiens
ggccaagggtgcagctgtaccccaaacatcactgggggatgggcatggtactgccgctactaagtcatagaaattttaaaaaggtggaacagggcccagggaccctcggctatcaagtctcttagaacctactggctggttctgcacaggaccaccagcccaagtaccttcatatattcctgttgcacttagaggttaacaaccctgtaggccatccactctcactcccatctatgcatattaccctgcctgccttaacccattcttcagggaggaaactacagctccagaactgtaagtaggagagtttcaaggacgctgcattggctataaacaagcgctgtttccaatttcccagaaaaaaaaaaaaatctctaaaataaggtatttggttgatttccctcttcctgatccccacacagcactctggttttcatctgtgaaaaataaatggaacaatctctgttttccaaagttccgtgatatacagctacttgtcatggttaaaatataaaatggcgccggytggaacttccagatatccttgtatctttttcaagcactttaaatttcacttcctggtgaaaatattctatctgattccattcttggcaaacaaccgtatgctaaagcttaaagagaaaagagtggatgggagaactaatatgcactttcacaatgcaaaggacaacaggggagacacaattcaaaggtcttttccttgtgcacaggatgggtgggagaactgagtgcctttggatcgtcccttattccatcacactgtagcaagtggtgtaccccaactgccgatgaaggtgcccaggtggggatgcaattgattcctacctgtatgttcgtgctgtaatatttgcccaatgaggtcaaggaacaggagaccaccatgcctcccacaaacacccacacacttaaatgcctccaacctcagccagcaattctgttacttctcacttctgcggatttctct

SEQ ID NO: 697908 - DNA, 612 bp, Homo sapiens
gactgctgtaagaattaaatacattaattttttcttaccatacagctttctaggatgtgtaaacactttctaggatgtataaataattttgttaaacttagatcagactaatcattttatcagcttttaaattaaaaaaacaaagaatgagcacctcagggagtttctttttctcttcatttcacaaagtccctttatataatcctccttccctctgggattgaaaatagcatcatctccaatggacctagactcagagtagaatgtcaggattttatcaatcttgtgttattagtcgccaaggattccaccatggagaatgacttccgagatgcacaaagactttcccgcctctccctaagctttggcccaatcctccttcacttactctctaatgctagaaatgccgccttkggaattttgtttctttagctcaaggagaagatcctttgctgagatgcaagtgtcttcaaggggagcagatttcagcttaatatcactggttattctcacctcaaattgaggttttattgggaattgagggttagaagacagaatgggaagaatactgagaaggcctgaatgctaccattactgggacaagatcagata

SEQ ID NO: 697909 - DNA, 633 bp, Homo sapiens
tttctccccaccggcaagctagcaatcagttcttcagtggacaccagctgggtgtcccccaattcaattccaacactatttacctggagatagcatcagatcccacatgttgagggacacaagactgccccctccttcccacgagtcatattaataagtccgtgcctccggaacttctgatggactggcttcaagttggggttcccatggtcccctctttgagtttaattaatttgctagaggagctcacagaactcagggaaacacctatttacatttactgtaagggttagggttaggttcatgtaacacttccttacatttattatgaaggacattttcaaggatacaaataaacagccaggtgaaaagatatacagggcatagtccagaaaggtcctgagcacagaagcatctgtccccagggagtgggggcgcaccaccctcctggcacatggatgaattcttattygcccacccagcagtgtgcagcagcctggtcctcatgcctcccatctttctcatgggtggacagtatgtctcatttgctcccacatcccctcctctagcgcagggcctgacactgggcacgtgcccattaggttcatttagtgaaggagataccaaaggaaa

SEQ ID NO: 697910 - DNA, 417 bp, Homo sapiens
cagctgtccagtctcccagttcttccctctctaacaagttttgagttctaagtactccacagtagcaaaaaaacaaacaaacataaaayaaaaactttttattaaaaattagtgtattgttttcattactacctacacactttttctgatagtagtgagactattttctaattgctgatggttttaacacaaattctgattggaaacttcattatccacctagcaaaaaagaaataagaaatcagctcaagaaggaaagtatgtgatttgtatttttttaattaatttcacaaacctgaacctaatgaaatttttaaatttttttctttgaaaatgaaggagtcattatttgtatccaactgaattataagttattagctgccgtctttcataaatagtttggcttgtggtctaatt

SEQ ID NO: 697911 - DNA, 605 bp, Homo sapiens
tgataaatctagagatgatgaattctaggatgctctgctgcagagaaaaataacatggccaaaaagctgttggttcctcggcatgatcagtaaaaggaaaacacacactgagataaacttcatcatggagggtggagggaaaaaagcaagctggattatttaaaatacagtcttgtaattgaaatactaggtatgatattgtacctatttaaatatcaaatatttaatgtatactgcaatataaggtaaatatgagcatgtacggatcagataatatgctcttggagcaagtaaaagactcagattcagcccagctttaaaaataagaaaattaattaatttgaataacagaatatatagcatgaattaggactttaggtttcattgattmggtggcttaatgaagctatcaaagattcagattggttgtgtcattttgctttgcatccacattgttgcttgcatctttacctattccccataattcctgttggatgacaaacagaagctgccaggaaggcaagcactcttgtttatgaacacaaggagagaaaaagaggtcctcttccgcaaatgaagaaaaccttttccaaactattcaggaa

SEQ ID NO: 697912 - DNA, 1347 bp, Homo sapiens
gtttgtttgttttaaagtagttatggttaaaatgcattacaataattattgaattagatcattttttttttttcgaaatgcagtctttgctctgttgtccaggctagcatgcagtggcatgatctcggctcattgcaacacctgcctcccaggttcaagcaattttcctgcctcagcctccccagtagctgggattacagtcacgcgccaccatgcctagccaatttttctatttttagtagagatgagatttcgccatgttggccaggctggtctcaaacttctgacctcaggtggtctgcccacctcagactcccaaagtgctggaattacaggcataagccactgcccctggcctctggtactattttttttgagatacaattcacaaaacctaacgtcaccatcttaaccatttttaaattatacaatcagtgtgttttagtatactcacaattttgtgtaatcatcactactttttaattccagaatatttctattactccaaaaaataaacaaacaaacaaacggcaaacatactttccaattctcccatcctcccatcactacacaatctactttatgttcctatagatttgcctatcttggatawtttaaatgaataaaatctcacaatatgtggcctttggtcaaaggtcctccacgtttttgtatatatacaaactttgttccttttcacagatgaataatatctcattgtatggataatgtgttttgttcatttgtccatagatggacatttgtctttttgatactgtttagttattatgaataatgctaatatgaacattcatgggcacagtttcgtgtgaatatatgtggattagataatattttaaaatttataaagcctaacagtacctaataaaacctaatagtactaatgaaatcacctaaggatgcagttgtgagaatgtagccctgccattacatgccacatacctacctgtatttagcatattcatcacctcatatatttatcatttctttgtgatgggaagcattgtattatttatcattgcattcctatcatctagcactttccatctaagaatgaatgagagtatttaaatatatatatatatattgctaggtcaaaatgtattcttgtcagtatatttgatgttatgacctaggtatcttaggaggccaaagttccaatacatacataatgacattcccattttaatcaccttggaatatattcatcctgcagtaatcagacaatagtagcattgtcaacatatctttttcacagttactatcagtaacttttaaaaacttttaactattccttccttaaaattgaggaaacatatttttttt

SEQ ID NO: 697913 - DNA, 1106 bp, Homo sapiens
cagtgcattttcaacgacagtgatcaataatcatgcttttagtagaatacctatcctaatattccgaagtccctttttcccttaaagaataaattagggacatgaaaaaaaaaatcagtacttcaattatgctaacatctttgagatattccagagactgctctaactataacaggtatgttaaaatcttattaataattcctctgttccataaaaatcagtttctttaaacacttaagttaaagggctaaagggttgctttatgagctgataatgcttactattggacatgatctcacaagtaattacttcgctttatataacacagaaatgtgtatgggaattatatatttgataatttactattgataacttattaataacgttagtattgaatgttggtataagcaggcattcagtgcattttaaaggacttgtgccactgaatggaatcacacttcaaaagatagtgaaaaggtcccccacatcctgggtatcttttagccctgaagttgtcccacaggccacacttatccctgtcctccctcttcactatggtttaaatgtgttccctccaaaattgttgacacttaatggtcagtgtgagagtattaagaaggggggcctttatttgaagtgattaggctgtgagaactcctctctcatgaacaggatgaaggccctgatacacagtgtttgactctcttgtcctctgacttctgccacacacaaggacacagcgttcatcccactaagaagaagatgaraaaggggatagcatgcagccacaaggaacaatctcaaaagcagagagaagccctcaccagacaaccacacctgcagacaccttgatcttgaacttctcagtgtctagaactgtgaaaaataaaactgtggtctttataaattacctggtctaaggtacaatcacatgtcacttaacaatgtagggatggccgggcgtggtggctcatgcctgtgatagcccagcactttgggaggccaaagcgggcagatcacctgaggtcgggagttcaagaccagcctggccaacatggcgaaactctatctctactaaagatatgaaaatacagttggccgggctg

SEQ ID NO: 697914 - DNA, 1106 bp, Homo sapiens
cagtgcattttcaacgacagtgatcaataatcatgcttttagtagaatacctatcctaatattccgaagtccctttttcccttaaagaataaattagggacatgaaaaaaaaaatcagtacttcaattatgctaacatctttgagatattccagagactgctctaactataacaggtatgttaaaatcttattaataattcctctgttccataaaaatcagtttctttaaacacttaagttaaagggctaaagggttgctttatgagctgataatgcttactattggacatgatctcacaagtaattacttcgctttatataacacagaaatgtgtatgggaattatatatttgataatttactattgataacttattaataacgttagtattgaatgttggtataagcaggcattcagtgcattttaaaggacttgtgccactgaatggaatcacacttcaaaagatagtgaaaaggtcccccacatcctgggtatcttttagccctgaagttgtcccacaggccacacttatccctgtcctccctcttcactatggtttaaatgtgttccctccaaaattgttgacacttaatggtcagtgtgagagtattaagaaggggggcctttatttgaagtgattaggctgtgagaactcctctctcatgaacaggatgaaggccctgatacacagtgtttgactctcttgtcctctgacttctgccacacacaaggacacagcgttcatcccactaagaagaagatgaaaaaggggatagcatgcagccacaaggaacaatctcaaaagcagagagmagccctcaccagacaaccacacctgcagacaccttgatcttgaacttctcagtgtctagaactgtgaaaaataaaactgtggtctttataaattacctggtctaaggtacaatcacatgtcacttaacaatgtagggatggccgggcgtggtggctcatgcctgtgatagcccagcactttgggaggccaaagcgggcagatcacctgaggtcgggagttcaagaccagcctggccaacatggcgaaactctatctctactaaagatatgaaaatacagttggccgggctg

SEQ ID NO: 697915 - DNA, 1106 bp, Homo sapiens
cagtgcattttcaacgacagtgatcaataatcatgcttttagtagaatacctatcctaatattccgaagtccctttttcccttaaagaataaattagggacatgaaaaaaaaaatcagtacttcaattatgctaacatctttgagatattccagagactgctctaactataacaggtatgttaaaatcttattaataattcctctgttccataaaaatcagtttctttaaacacttaagttaaagggctaaagggttgctttatgagctgataatgcttactattggacatgatctcacaagtaattacttcgctttatataacacagaaatgtgtatgggaattatatatttgataatttactattgataacttattaataacgttagtattgaatgttggtataagcaggcattcagtgcattttaaaggacttgtgccactgaatggaatcacacttcaaaagatagtgaaaaggtcccccacatcctgggtatcttttagccctgaagttgtcccacaggccacacttatccctgtcctccctcttcactatggtttaaatgtgttccctccaaaattgttgacacttaatggtcagtgtgagagtattaagaaggggggcctttatttgaagtgattaggctgtgagaactcctctctcatgaacaggatgaaggccctgatacacagtgtttgactctcttgtcctctgacttctgccacacacaaggacacagcgttcatcccactaagaagaagatgaaaaaggggatagcatgcagccacaaggaacaatctcaaaagcagagagaagccctcaccagacaaccacacctgcagacaccttgatcttgaacttctcagtgtctagaactgtgaaaaataaaactgtggtctttataaattacctggtctaaggtacaatcacrtgtcacttaacaatgtagggatggccgggcgtggtggctcatgcctgtgatagcccagcactttgggaggccaaagcgggcagatcacctgaggtcgggagttcaagaccagcctggccaacatggcgaaactctatctctactaaagatatgaaaatacagttggccgggctg

SEQ ID NO: 697916 - DNA, 861 bp, Homo sapiens
tatctagaagaaaaggctttgaagatactgtcgtgctggacccttattgatttcaataggagtggcaccatgttcaagaggccaaagaagagacctggagccagcaaatgagacagagggtttattgaggggacttacatacagggcagcacagtggtggtgggctggacagagcaacaactaccatttataaaaagcatgcagtttacatagcattttcacttagcactctccttctagcagtctccacctggccaccttcatttaacccaaaacacagggccttgattccctatatggtgtgtgttccacaggatgggccatgagttcaaatgtttctcttaggtaagcaatgactctccgggtggccactcccagatttcttagctcagaattccgaacacacattcttcttagactatagagtcattctcaaggtgtgcttaagttatggctgtcaggtgcatctgccattcagatacataccagttgttagcagtgatattcttgaaagaataataattgaggaaagactttcacktttttaattttacttttctgtaattttattttttaacattgtgcaaataattttaagactatatttgtaaaactaaaattaatgtcaatttgtaagttatcttacaattcatttgtaagttatcaaaaaacttagtctaagcacatttcatcaaattcatatagataataacaagcttaaaaaactgatgacattaaagcattttctatgttgatttgtgttaacacaacattttttaaattatgtaatataaataccatggtagtgaatgcagatgactttattaatacagtgaaaaacttgtattgagttctttctta

SEQ ID NO: 697917 - DNA, 1775 bp, Homo sapiens
gtgtgagccaccgcgcccagcacagtagcataattttagagaagttcattcatagctgtcccaggaagtaagaagggaagattcaggataaaccatcatgtgacttgctctcaactggatctggtaaaaatcgtcattgagctcaggattgaaaggagaaatcatacaacatgaagcctgaggaagaattgtaatatttgtgagataaactattcctccattcagtatatactgattgaacactccttttatggaagtagcgaatcgtaggatcctttcctcctttaactagcaacattaccccggttcctttgtctctccttcacttgtggtaatgggctagtacaccacgatgcccttcccccctcaaccatattaacgaagctggttacatgtagcagcctgttccaaaagtttactccatccctctaaccacagagtttgatttagaggtaaataaaggccctaaacttgaccaatgtgaactctttctaagacttaaactatcacttggagaaatacagggagaracacactgaactctgacaacattatttaagactctgggtccagtgatgcctataactagatgcacttctgaatttctaatttcttaggccaaacttttccatttattcttaatctagtttctagttttctagttgggttattgtcacttgcagcaaaaaggttactaataacttattatgagtcaggcatagttctgggtatgtactgaagaaattatggtgaagaacatccaggcttcatacttgtgggtgtagttgtagacttggtgtgtatgtgtgcacacatgtgggggaccgatgtcctaggcattgtggtttctacaatcatgttggaggaatgaccaaatatcatagtctactgctgaaactcttcatgcttctgattcctccccaattcacttgagctgctgaatctgaattgatgaggtatgtttgcactaaatacacatgttttcattgcttgtttgatcaagagaaggtctcacaggtctctcaggtttgatcataagctactattagggagttttagaaaaatacctaaaagtatcagtatttagaaaaatatttgcatatgtgcaataaacatcctaacttctgtgactaggaattggagatcaggaaatattgtgggatgatgagaacataatcaccagatagaaaaccatgatggaggtgctgaatggaaaattttattcttttattttttagacagtcacactctgttgcccaggctggagtgcagtggtgtgatctcagctcactgcaagctctgtctcctgggctcaagtgattctcctgcctcagcctcctaagtggctgggattacaggtgcacaccaccatacccggctaattttttgtatttttaggagagacggggtttcaccatgttggccaggctggtctcgaactcctgacctcaagtaatctgcccatctcatcttcccaaaatgctgggattacaggcatgagcctctgtgcctggccttggaaaattttattataatggaaacataaataggatttaaaagaaaaggatgatgaaattagaaatatgaaagaaaataggacagataggaaagtcatacctagaggattcaatctaaattgtaatcagtaccccaaaaggaaaaatagaacagatgagagaatcagaagcaataattagagaaataagagaaaaaacattatcttaaaaatgacattaatctaataaaaaatgctcattcagtgttcagcaaaataa

SEQ ID NO: 697918 - DNA, 1775 bp, Homo sapiens
gtgtgagccaccgcgcccagcacagtagcataattttagagaagttcattcatagctgtcccaggaagtaagaagggaagattcaggataaaccatcatgtgacttgctctcaactggatctggtaaaaatcgtcattgagctcaggattgaaaggagaaatcatacaacatgaagcctgaggaagaattgtaatatttgtgagataaactattcctccattcagtatatactgattgaacactccttttatggaagtagcgaatcgtaggatcctttcctcctttaactagcaacattaccccggttcctttgtctctccttcacttgtggtaatgggctagtacaccacgatgcccttcccccctcaaccatattaacgaagctggttacatgtagcagcctgttccaaaagtttactccatccctctaaccacagagtttgatttagaggtaaataaaggccctaaacttgaccaatgtgaactctttctaagacttaaactatcacttggagaaatacagggagagacacactgaactctgacaacattatttaagactctgggtccagtgatgcctataactagatgcacttctgaatttctaatttcttaggccaaacttttccatttattcttaatctagtttctagttttctagttgggttattgtcacttgcagcaaaaaggttactaataacttattatgagtcaggcatagttctgggtatgtactgaagaaattatggtgaagaasatccaggcttcatacttgtgggtgtagttgtagacttggtgtgtatgtgtgcacacatgtgggggaccgatgtcctaggcattgtggtttctacaatcatgttggaggaatgaccaaatatcatagtctactgctgaaactcttcatgcttctgattcctccccaattcacttgagctgctgaatctgaattgatgaggtatgtttgcactaaatacacatgttttcattgcttgtttgatcaagagaaggtctcacaggtctctcaggtttgatcataagctactattagggagttttagaaaaatacctaaaagtatcagtatttagaaaaatatttgcatatgtgcaataaacatcctaacttctgtgactaggaattggagatcaggaaatattgtgggatgatgagaacataatcaccagatagaaaaccatgatggaggtgctgaatggaaaattttattcttttattttttagacagtcacactctgttgcccaggctggagtgcagtggtgtgatctcagctcactgcaagctctgtctcctgggctcaagtgattctcctgcctcagcctcctaagtggctgggattacaggtgcacaccaccatacccggctaattttttgtatttttaggagagacggggtttcaccatgttggccaggctggtctcgaactcctgacctcaagtaatctgcccatctcatcttcccaaaatgctgggattacaggcatgagcctctgtgcctggccttggaaaattttattataatggaaacataaataggatttaaaagaaaaggatgatgaaattagaaatatgaaagaaaataggacagataggaaagtcatacctagaggattcaatctaaattgtaatcagtaccccaaaaggaaaaatagaacagatgagagaatcagaagcaataattagagaaataagagaaaaaacattatcttaaaaatgacattaatctaataaaaaatgctcattcagtgttcagcaaaataa

SEQ ID NO: 697919 - DNA, 1775 bp, Homo sapiens
gtgtgagccaccgcgcccagcacagtagcataattttagagaagttcattcatagctgtcccaggaagtaagaagggaagattcaggataaaccatcatgtgacttgctctcaactggatctggtaaaaatcgtcattgagctcaggattgaaaggagaaatcatacaacatgaagcctgaggaagaattgtaatatttgtgagataaactattcctccattcagtatatactgattgaacactccttttatggaagtagcgaatcgtaggatcctttcctcctttaactagcaacattaccccggttcctttgtctctccttcacttgtggtaatgggctagtacaccacgatgcccttcccccctcaaccatattaacgaagctggttacatgtagcagcctgttccaaaagtttactccatccctctaaccacagagtttgatttagaggtaaataaaggccctaaacttgaccaatgtgaactctttctaagacttaaactatcacttggagaaatacagggagagacacactgaactctgacaacattatttaagactctgggtccagtgatgcctataactagatgcacttctgaatttctaatttcttaggccaaacttttccatttattcttaatctagtttctagttttctagttgggttattgtcacttgcagcaaaaaggttactaataacttattatgagtcaggcatagttctgggtatgtactgaagaaattatggtgaagaacatccaggcttcatacttgtgggtgtagttgtagacttggtgtgtatgtgtgcacacatgtgggggaccgatgtcctaggcattgtggtttctacaatcatgttggaggaatgaccaaatatcatagtctactgctgaaactcttcatgcttctgattcctccccaattcacttgagctgctgaatctgaattgatgaggtatgtttgcactaaatacacatgttttcattgcttgtttgatcaagagaaggtctcacaggtctctcaggtttgatcataagctactattagggagttttagaaaaatacctaaaagtatcagtatttagaaaaatatttgcatatgtgcaataaacatcctaacttctgtgactaggaattggagatcaggaaatattgtgggatgatgagaacataatcaccagatagaaaaccatgatggaggtgctgaatggaaaattttattcttttattttttagacagtcacactctgttgcccaggctggagtgcagtggtgtgatctcagctcactgcaagctctgtctcctgggctcaagtgattctcctgcctcagcctcctaagtggctgggattacaggtgcacaccaccatacccggctaattttttgtatttttrggagagacggggtttcaccatgttggccaggctggtctcgaactcctgacctcaagtaatctgcccatctcatcttcccaaaatgctgggattacaggcatgagcctctgtgcctggccttggaaaattttattataatggaaacataaataggatttaaaagaaaaggatgatgaaattagaaatatgaaagaaaataggacagataggaaagtcatacctagaggattcaatctaaattgtaatcagtaccccaaaaggaaaaatagaacagatgagagaatcagaagcaataattagagaaataagagaaaaaacattatcttaaaaatgacattaatctaataaaaaatgctcattcagtgttcagcaaaataa

SEQ ID NO: 697920 - DNA, 1775 bp, Homo sapiens
gtgtgagccaccgcgcccagcacagtagcataattttagagaagttcattcatagctgtcccaggaagtaagaagggaagattcaggataaaccatcatgtgacttgctctcaactggatctggtaaaaatcgtcattgagctcaggattgaaaggagaaatcatacaacatgaagcctgaggaagaattgtaatatttgtgagataaactattcctccattcagtatatactgattgaacactccttttatggaagtagcgaatcgtaggatcctttcctcctttaactagcaacattaccccggttcctttgtctctccttcacttgtggtaatgggctagtacaccacgatgcccttcccccctcaaccatattaacgaagctggttacatgtagcagcctgttccaaaagtttactccatccctctaaccacagagtttgatttagaggtaaataaaggccctaaacttgaccaatgtgaactctttctaagacttaaactatcacttggagaaatacagggagagacacactgaactctgacaacattatttaagactctgggtccagtgatgcctataactagatgcacttctgaatttctaatttcttaggccaaacttttccatttattcttaatctagtttctagttttctagttgggttattgtcacttgcagcaaaaaggttactaataacttattatgagtcaggcatagttctgggtatgtactgaagaaattatggtgaagaacatccaggcttcatacttgtgggtgtagttgtagacttggtgtgtatgtgtgcacacatgtgggggaccgatgtcctaggcattgtggtttctacaatcatgttggaggaatgaccaaatatcatagtctactgctgaaactcttcatgcttctgattcctccccaattcacttgagctgctgaatctgaattgatgaggtatgtttgcactaaatacacatgttttcattgcttgtttgatcaagagaaggtctcacaggtctctcaggtttgatcataagctactattagggagttttagaaaaatacctaaaagtatcagtatttagaaaaatatttgcatatgtgcaataaacatcctaacttctgtgactaggaattggagatcaggaaatattgtgggatgatgagaacataatcaccagatagaaaaccatgatggaggtgctgaatggaaaattttattcttttattttttagacagtcacactctgttgcccaggctggagtgcagtggtgtgatctcagctcactgcaagctctgtctcctgggctcaagtgattctcctgcctcagcctcctaagtggctgggattacaggtgcacaccaccatacccggctaattttttgtatttttaggagagacggggtttcaccatgttggccaggctggtctcgaactcctgacctcaagtaatctgcccatctcatcttcccaaaatgctgggattacaggcatgagcctctgtgcctggccttggaaaattttattataatggaaacataaataggatttaaaagaaaaggatgatgaaattagaaatatgaaagaaaataggacagataggaaagtcatacctagaggattcaatctaaattgtaatcagtaccccaaaaggaaaaatrgaacagatgagagaatcagaagcaataattagagaaataagagaaaaaacattatcttaaaaatgacattaatctaataaaaaatgctcattcagtgttcagcaaaataa

SEQ ID NO: 697921 - DNA, 656 bp, Homo sapiens
ttttccaagttgcctcccacccccacttttgccccaggtctgtattttaattaattagtcaaaattttcattgagtgcctactgtatccatgctgtatatgtgggaatgtatcaggcattgtgctgggtactatggatagagtagagaacaaaatggaaatagcttaatgttggtcctcttggagataggtgtgaaacaaacaagtcaacacagggatacgtaattgtaatttccaaaagaactatggaggaaaagttacctacaaacatatctaagttaccttcttgacactcaaggttccttggtactatagcctgaatgtttatattccctccaaattcataggttgaaaccaaaaccagagtgacagtatttggaggtggggccattgggtaatgattacgtcatggtggcggagccctcataaatgggattggtggccttataaaagggacyctagagagctcccttgcccttctgccatgtgaggacacagtgagaagatgctatgaccaggaagcaggatcttaactgacatcgaatctgccttaatcatggactttccaacctctagaactgtgagaaataaatttctgttttttggtaagacacccaggctatggtactctgttagagcagctggaacagcctaaga

SEQ ID NO: 697922 - DNA, 656 bp, Homo sapiens
ttttccaagttgcctcccacccccacttttgccccaggtctgtattttaattaattagtcaaaattttcattgagtgcctactgtatccatgctgtatatgtgggaatgtatcaggcattgtgctgggtactatggatagagtagagaacaaaatggaaatagcttaatgttggtcctcttggagataggtgtgaaacaaacaagtcaacacagggatacgtaattgtaatttccaaaagaactatggaggaaaagttacctacaaacatatctaagttaccttcttgacactcaaggttccttggtactatagcctgaatgtttatattccctccaaattcataggttgaaaccaaaaccagagtgacagtatttggaggtggggccattgggtaatgattacgtcatggtggcggagccctcataaatgggattggtggccttataaaagggactctagagagctcccttgcccttctgccatgtgaggacacagtgagaagatgctatgaccaggaagcaggatyttaactgacatcgaatctgccttaatcatggactttccaacctctagaactgtgagaaataaatttctgttttttggtaagacacccaggctatggtactctgttagagcagctggaacagcctaaga

SEQ ID NO: 697923 - DNA, 590 bp, Homo sapiens
gctgtaaaggcagaaaaccatgtcgtgaaactgaaacaggaaatcagtttgctgcaggcgcaggtctccagcttccagcgagagaatgaagccttgcggtgcgaccagggggccagcctgacagtggtgaagcagaacgccgacgtggccttgcagaacctctgggtggtcatgaacagcgcacaggcttccattaagcaactggtttccrgagctgagatactgaatcttgctgccgaaatccttaaatctgtagacagaatttctgaaattaaagacgaggaggaagactctagaggacccctgggtgttctcagcatgaagctccgtgtatgccctgagatcaccactgcttgatctaaatgtgcagttgtgtccttaaatatgcagccttcacccagagtaaagtgtttatcccaagagtccagtgtcgtgccctcagccagttcttggccaccgcaatgggagcagccctggccgagttgcccctgtggtttctatgcagcccttgttggcaaaattcctgctatcttatagattctaatgagctcttagaagacatcgtcataaaagccagcgattttaagaaa

SEQ ID NO: 697924 - DNA, 590 bp, Homo sapiens
gctgtaaaggcagaaaaccatgtcgtgaaactgaaacaggaaatcagtttgctgcaggcgcaggtctccagcttccagcgagagaatgaagccttgcggtgcgaccagggggccagcctgacagtggtgaagcagaacgccgacgtggccttgcagaacctctgggtggtcatgaacagcgcacaggcttccattaagcaactggtttccagagctgagayactgaatcttgctgccgaaatccttaaatctgtagacagaatttctgaaattaaagacgaggaggaagactctagaggacccctgggtgttctcagcatgaagctccgtgtatgccctgagatcaccactgcttgatctaaatgtgcagttgtgtccttaaatatgcagccttcacccagagtaaagtgtttatcccaagagtccagtgtcgtgccctcagccagttcttggccaccgcaatgggagcagccctggccgagttgcccctgtggtttctatgcagcccttgttggcaaaattcctgctatcttatagattctaatgagctcttagaagacatcgtcataaaagccagcgattttaagaaa

SEQ ID NO: 697925 - DNA, 3314 bp, Homo sapiens
  misc_feature 2695, 2696, 2697, 2698, 2699, 2700, 2701, 2702, 2703, 2704,2705, 2706, 2707, 2708, 2709, 2710, 2711, 2712, 2713, 2714,2715, 2716, 2717, 2718, 2719, 2720, 2721, 2722, 2723, 2724,2725, 2726, 2727, 2728, 2729, 2730, 2731, 2732, 2733: n = A,T,C or G
  misc_feature 2734, 2735, 2736, 2737, 2738, 2739, 2740, 2741, 2742, 2743,2744, 2745, 2746, 2747, 2748, 2749, 2750, 2751, 2752, 2753,2754, 2755, 2756, 2757, 2758, 2759, 2760, 2761, 2762, 2763,2764, 2765, 2766, 2767, 2768, 2769, 2770, 2771, 2772: n = A,T,C or G
  misc_feature 2773, 2774, 2775, 2776, 2777, 2778, 2779, 2780, 2781, 2782,2783, 2784, 2785, 2786, 2787, 2788, 2789, 2790, 2791, 2792,2793, 2794: n = A,T,C or G
cattaccctgatactaaaactggacacagacactacaagaaaagaaagttacaggccaaagtccccgatgaacatagatgcaaaaatactcaacaaaatactggcaatgcgaattcaatagcacattaaaaagatcattcactatggtcaaatgggatttatccctgggattcaaaactattgcaacatatgcagatcaataaatgtgatactctatatgtggttttgatttcacccccccccttctcaattattttctctgtcctataccataagtgtttttttctatatagtcttactatcagccttgaatcatgcttcagaaaaattatcaatctttttgcttttaaagcttatcgatttgttctaattcaagaaacttaaaaaacaatggaatttgggtgattctgagtgaattgattggggtggggcacaggcatcagtatcttttaaacagtcctcacatttgccttcccactgggtacccccttacctgatgaaatcctgtttaccctccagggctcacctgcatatcatttcctcaaggacatcttcctgaagagtttgatctaaatcaggtgctctcatagctccctgtttcctttctttctttttttttattttctaataagactagatttattcaataccctagtaaaagttttgattataagtatccaacagtataaaaagtacaaaacagatctgtagatttctaatatattaatacaaagtgcatgactacatacagtacatcctacaggcaaagagaggtggaaggggaaaaagaagactgtggttgaggtctagtaataaataaataaatacagaagtagagatgatccatattatagtatattctaccaccaatactgcagccaaaatgtacaaaaaaatcatttcaaaataactcaggaggatgataatggctggacttttgtaattcgcctcaaagactgtgggagaagccaactcaactcgctgtatagtctgtgcatatggtggcttgtagcatgtaggttttttccaaaagaaggaaatataaaatgtttagattaagaactataaaactacagggtgcctataaaaggtggcttactccttattgttattatactatccaatttttaaaatgcagtttaaaaaatgagcactgagtcttgttattacaaggcaggcaaatgtttctccctcattctgaaaagaccgaactggcgatgcttttcctgaacatttagaaaagaggcagtaagagtactctggtttaggttcaagtgagaggcttttcatgaaaatcttaggattgaagagctctaagttcaggatatctcaatgttcagaaagcctgactaaaagaagccaaaccaaaaccatttaatgtgaacacaaacctcttttcttttagtaagttttacttttaatacagagtgaaagaaaataaaaacttaataggctaaaacaagtcaaacacccattctacacagataaaaaccttcacaaaggtcaactgaagtaatccagagctgaaactgaattgtaaagattttcaatgaagtcacagaacacaaacaaaagtcgattatatttacacactcagcaagccctctaagaaatgtgccccaagaagcattaacctttgttttgtgccatcctgaggacttgtacattttatttttcagatagcttaacatttttaatcgagtgtgttctctaccatgcggtaatgctttggtactattcatacagggtctcgcctgtcctaaagacttgccatttccccaagaggagctttgattctgctttagaagttttacaaaaattaaaatctttatcaaatattaatatgaagggaggcacaggatgcaacatatatagtcaagttacctctctgtatatttagaagttactttctcctccaaggtatttgcaacagaaagctcagtctgtcctgcttaataatcagtagtacaggtttgaatcatcacaagcttggcaagaccttaatatttcaaaatcattaacaactacctctaggggcaagttcatgttactgagttatgacaaatttattatcatgagggaaaacaagtagccagccatcttaaaaatgccccaaccactgcatctcaatacagaaagactaaaaactacatacagtttatcatacaacaaatcccatctctgtcccctgaaattcccctagtttcattcattagaaggggattaaaaaaaaaaaagacttaaagagtactttacagcagcattcatctttcctatgaaatactcagcatcttaaatattatgtaccactctttttttagtaagctggacactggcttcagagtttgtgggactaggggatatcaacccattcaaaactactgtagaaattgtcttttggcagaatagcaggtatccaagttaaaaataagagggtcatttgagaccagcctggccmatgtggtgaaaccccgtctctactaaaactaaaatattagccgggtctggtggcgggcacatataaacccagctacttgggaggctaaggcaggagaatcacttgaacccgggagacggaagttgcagtgagccaagatcacgccactgcactcctgcctgggtaacaagagcaaaactccgtctcaaaaaaaaaaaaaaaaaaaaaaaaaaagggggcaaggggggggtttggggnnnnnnnnnnnnnnnnnnnnnnnnnnnnnnnnnnnnnnnnnnnnnnnnnnnnnnnnnnnnnnnnnnnnnnnnnnnnnnnnnnnnnnnnnnnnnnnnnnnnatttgttaccattaataataacaacaaccacagtgaaccaaaaagatccctgcctgaggaaccaggcagggtaggtgtgtatgtgtacagaaataaacagtaaacatcataagttatatgacatttataagtcaaatccatgttactttagagggtaataagtaataatgataagctgtagaagagaaaagatcagagtaagtaggatgggtcaggttggggcaggcagtttacgatttcacatagggtggtcagcgtaagcacagctggcccttgaacagcataggtttgaactgtgtgggtccacttacatgtgaatttttttttcaataaatatattggaaagttttttggagatttgtgacaatttgaaaaaacttgcagatgaaccacatagcctggaaatactgaaaaaattaggaaaaagttatgttatgactgcataaaatatatgtagatattagtctattacttactatcataaaatatacacaagtcttataaaggtaaacatttatca

SEQ ID NO: 697926 - DNA, 643 bp, Homo sapiens
agagtgatgcagtcctatttgtctctttttgcttttgttgcatatacttttggggttatattcaaaatattgtccagaccaatgtcatggagcttttcccttatgttttcttttagtagtttaactactaaaataaagtttcagtagtttagtgaaactactaggtttcaggtcttaatttgtctttaatccagtttgagttgatttttgtatatggtgaaaataaggatccaatttcattcatctacatttggatatccaattttccccacaccatttattgaaaaagctgtcctttcctcattgtctcttcttggcacctttattaaaactcagttttccataaatatttggggttatttctgaactctatcctgtttgactggttttgtgtctgtttttatggcagtactgtgctgttttgattactataactttgtaatatattttgcagttaggtactatgatgcctccagcttttttctttttgrtcaagataggtttggctattcagggtcttttgtgtttccatacaaattttaggattgttttttctatttctttaaagaatgacgttggaattttgacagggattacactgaatctgtagattgctttggatattatggatatcctaacagta

SEQ ID NO: 697927 - DNA, 643 bp, Homo sapiens
ctatatcctcccatggcagaaagtggtgggtgtgggaggagagagagaaagagagacagagagagagagagagaagataaagagagaatgagaatgaatgacctagtgtcccttcttataagagcaacaatgacattattaggacctcacaatcatgacttcatctaaatagaattacctcccaaagtttcgtctccaaataccatcccatggggaatgcataaattttcattacattacatgaattttggaggaacacaaacattcagttcctagcaggagctatcagcagaaaagagagctgcaattacattagagtcacaatctgaaaagcagcayagcgtccagaagaaattctaggaacccaggcgatgcagtgttctagaaacctctgaaattactcagggatatttaagggagctactttttaaaaagtatgtgtctgttggaacttataaaatcaagttaaaaatcatttacttttattctataattacaaattggtgagcctgagttcatatggctgattaagagatgttatgtgggatttgatataactttatgagaaagataaaataaaatggtgagcaaaatgcttgcagtcttcacctgaggagaagcgattcttgcttgctggttagca

SEQ ID NO: 697928 - DNA, 627 bp, Homo sapiens
gatgtgcatctcttatttgcatagtgatttgtggactgaagagctagcagtgaattgtgtactttatgcagttacttagagctaatataccatggtaatttgaatgtgctgttgagggaaggtgttatttaacwaaagcatagcggctgaaattcatgcatatcagaactgtgggaagtaaggatgccctattttctactggaatacagagggcagctaaaagtaggttttgtctaagaaattaggatacaaagagtttggcatctaggtaactagaaaccacttgaataggctgatgcatgttaattaattcctttattttggatatacattggatttttgaaaccctacgaacaagtaaatcaaaagcatttaagtccaccattgaaatacttatgaaggtggcagagaaagattgaggttaaacaaagaagtcaagttctctcacaaagaagaaaacatctcagtttccatagctgctgggagacattggaaagagacacggtgcacagtcaagctcctcccccagccccttccctgttctcatgagggcttcaccgatttcctctagcagtagaaactccagaccacatctcacttggctgctctgggatatctgatatcatt

SEQ ID NO: 697929 - DNA, 216 bp, Homo sapiens
ggatagatatagatggtttttcaaaaataggatgtaaacgataatagcaaacagttacagaacatacactatmaaacaggcactcttttaggagtctacccatattaacacataatacaaattgttactcgaaacgctttgatacaaaaaagggtatggtaacccatgtaataccccataataaggggttgtttacttatgtataaatataagaac

SEQ ID NO: 697930 - DNA, 1813 bp, Homo sapiens
caaagggatggctcccaggtcctcgagaaagacatctctccatcaaaagctgacaaaagacttatctggccgttaaaaagatgtgcatgtctttcaaagagacagagacagaactgccaattacaagttttctaaagtcaataccctaagaaaggagggaggagaaatccactggcagactggggctcagcagctggagctcccctggaaggtgctttctagagtagagcagtgtttctcaatgccattctgtggaacaccaacatcaggatcatctggtatgcttgctgaaagacatggattcctgggacttgttcccaggcctaggaatcagggtgatattccacaaggctccatgtggtcatttgtattgttttgttttagagacagggtcttgctctgtcatccaggcctgggactacagtccttaggacggcctgcctgcaaggttggctctctgtgggcatgtgggaacttggatttttggaggctttcaacaattctctgactgctggggtggcttattctgtctaaatgtttatacaacccatgtggtttatgctaaacacctgcttttcttcagggacatcagccagtccttctgactttgcccaggcagtttatccctttgctgatttgctttggatccttctgctgtcataaacctgagctgtgacgtgggtacaggctgaaagctgtgtgtccttccagcaaatcccagatcctggggagggggcaccctgaacacaactgtgaaatagtgtgttggttgccttttaatactgatggctcattttaagatgatatttctattgttataagaacatatacattctcatacttgttttatttgaaacacagtttgcatatacaataggccttatttctgtaggcaataagtaatgacatgtcttatatacatacatcttctaagtttagtaaagcttattccttttatgtaccaagtttttaaattatcatttttagatggaaagaattcgaagctggatagcatgtttctttgccttactaaacagaggacaatagatataaccatcctgtggctgtcctggtgtcctctgagcaccaagtcttgcgctttgctctatgtggtgggatataatgagaagcaagatggttaatccccgctttaaattaccttgtgccattatactcttgtatgtttgtttgtttgaatttggtcccctcgctcactacaaagcatcacctrcctcgtttgttttcctcaatattccatagtctattttttgccatttttctaggttttttttattgttataaaaaacaacggttttaaagttaaagttaaaaaataacttctgttatgacaggaagccagattcccaagagacactttatgagtcaaaggtgacagtatctatgacagtctcactgctatgcttatccaagcagagaacttgttgcatctacttcatcttcttttttatggacttggcatttaatttctaattcctgatttcaatcaagacatgtctacagacatgaacacaaaagcactagaaataaagctaaacagaaacagtcttggctaggctttgactcagagtcaagtgtccataataatcccttggagccaggcgtggtggctcctgcctgtaatcccaatgctttgggaggccatttcagtaggactgcttgaggtctagagttcaaccccagcctgagcaacatagcgagatcttgtctctacaaacaatttaaaaaaatgttagctgggcctggtggcatgtgcctgtggtcccagctacttgggaggctgaggcaggaggat

SEQ ID NO: 697931 - DNA, 1813 bp, Homo sapiens
caaagggatggctcccaggtcctcgagaaagacatctctccatcaaaagctgacaaaagacttatctggccgttaaaaagatgtgcatgtctttcaaagagacagagacagaactgccaattacaagttttctaaagtcaataccctaagaaaggagggaggagaaatccactggcagactggggctcagcagctggagctcccctggaaggtgctttctagagtagagcagtgtttctcaatgccattctgtggaacaccaacatcaggatcatctggtatgcttgctgaaagacatggattcctgggacttgttcccaggcctaggaatcagggtgatattccacaaggctccatgtggtcatttgtattgttttgttttagagacagggtcttgctctgtcatccaggcctgggactacagtccttaggacggcctgcctgcaaggttggctctctgtgggcatgtgggaacttggatttttggaggctttcaacaattctctgactgctggggtggcttattctgtctaaatgtttatacaacccatgtggtttatgctaaacacctgcttttcttcagggacatcagccagtccttctgactttgcccaggcagtttatccctttgctgatttgctttggatccttctgctgtcataaacctgagctgtgacgtgggtacaggctgaaagctgtgtgtccttccagcaaatcccagatcctggggagggggcaccctgaacacaactgtgaaatagtgtgttggttgccttttaatactgatggctcattttaagatgatatttctattgttataagaacatatacattctcatacttgttttatttgaaacacagtttgcatatacaataggccttatttctgtaggcaataagtaatgacatgtcttatatacatacatcttctaagtttagtaaagcttattccttttatgtaccaagtttttaaattatcatttttagatggaaagaattcgaagctggatagcatgtttctttgccttactaaacagaggacaatagatataaccatcctgtggctgtcctggtgtcctctgagcaccaagtcttgcgctttgctctatgtggtgggatataatgagaagcaagatggttaatccccgctttaaattaccttgtgccattatactcttgtatgtttgtttgtttgaatttggtcccctcgctcactacaaagcatcacctacctcgtttgttttcctcaatattccatagtctattttttgccatttttctaggttttttttattgttataaaaaacaacggttttaaagttaaagttaaaaaataacttctgttatgacaggaagccagattcccaagagacactttatgagtcaaaggtgacagtatctatgrcagtctcactgctatgcttatccaagcagagaacttgttgcatctacttcatcttcttttttatggacttggcatttaatttctaattcctgatttcaatcaagacatgtctacagacatgaacacaaaagcactagaaataaagctaaacagaaacagtcttggctaggctttgactcagagtcaagtgtccataataatcccttggagccaggcgtggtggctcctgcctgtaatcccaatgctttgggaggccatttcagtaggactgcttgaggtctagagttcaaccccagcctgagcaacatagcgagatcttgtctctacaaacaatttaaaaaaatgttagctgggcctggtggcatgtgcctgtggtcccagctacttgggaggctgaggcaggaggat

SEQ ID NO: 697932 - DNA, 1813 bp, Homo sapiens
caaagggatggctcccaggtcctcgagaaagacatctctccatcaaaagctgacaaaagacttatctggccgttaaaaagatgtgcatgtctttcaaagagacagagacagaactgccaattacaagttttctaaagtcaataccctaagaaaggagggaggagaaatccactggcagactggggctcagcagctggagctcccctggaaggtgctttctagagtagagcagtgtttctcaatgccattctgtggaacaccaacatcaggatcatctggtatgcttgctgaaagacatggattcctgggacttgttcccaggcctaggaatcagggtgatattccacaaggctccatgtggtcatttgtattgttttgttttagagacagggtcttgctctgtcatccaggcctgggactacagtccttaggacggcctgcctgcaaggttggctctctgtgggcatgtgggaacttggatttttggaggctttcaacaattctctgactgctggggtggcttattctgtctaaatgtttatacaacccatgtggtttatgctaaacacctgcttttcttcagggacatcagccagtccttctgactttgcccaggcagtttatccctttgctgatttgctttggatccttctgctgtcataaacctgagctgtgacgtgggtacaggctgaaagctgtgtgtccttccagcaaatcccagatcctggggagggggcaccctgaacacaactgtgaaatagtgtgttggttgccttttaatactgatggctcattttaagatgatatttctattgttataagaacatatacattctcatacttgttttatttgaaacacagtttgcatatacaataggccttatttctgtaggcaataagtaatgacatgtcttatatacatacatcttctaagtttagtaaagcttattccttttatgtaccaagtttttaaattatcatttttagatggaaagaattcgaagctggatagcatgtttctttgccttactaaacagaggacaatagatataaccatcctgtggctgtcctggtgtcctctgagcaccaagtcttgcgctttgctctatgtggtgggatataatgagaagcaagatggttaatccccgctttaaattaccttgtgccattatactcttgtatgtttgtttgtttgaatttggtcccctcgctcactacaaagcatcacctacctcgtttgttttcctcaatattccatagtctattttttgccatttttctaggttttttttattgttataaaaaacaacggttttaaagttaaagttaaaaaataacttctgttatgacaggaagccagattcccaagagacactttatgagtcaaaggtgacagtatctatgacagtctcactgctatgcttatccaagcagagaacttgttgcatctacttcatyttcttttttatggacttggcatttaatttctaattcctgatttcaatcaagacatgtctacagacatgaacacaaaagcactagaaataaagctaaacagaaacagtcttggctaggctttgactcagagtcaagtgtccataataatcccttggagccaggcgtggtggctcctgcctgtaatcccaatgctttgggaggccatttcagtaggactgcttgaggtctagagttcaaccccagcctgagcaacatagcgagatcttgtctctacaaacaatttaaaaaaatgttagctgggcctggtggcatgtgcctgtggtcccagctacttgggaggctgaggcaggaggat

SEQ ID NO: 697933 - DNA, 1232 bp, Homo sapiens
ccggtgtgtgatgttccccttcctgtgtccatgtgttctcattgtttaattcccacctatggatgagaacatgcggtgtttggttttttgtccttgcgatagtttgctaagaatgatggtttttacmaaaaaaaaaaattttttgagacagggtctcactctgttgcccaggctggagtgcagtggtgtctcagctcactgcagcctcaacctcctcctgggctcaagcaatcctcctgcgctcaagcaatcctcctgcctgagcttcccaagtagctgaaaccaaggcacgtgccaccatgccaactaattcctgtattttttgtagagatgaggtctcaccatgttgcccaggctggtttcaaactcctaagctcaagtgatcctcccaccttggcctcccaaagtgctaggattacaagtgttagccactgcacccagtgtccttcaaatttttaacaaaaatcgtttacaaaccacttcaaacccattcactgtcatgaccccttgtgaatccaggctgaagtgttaatgaacacccaaatggtatttattaaaggagattggtaccgccctgtcctgagaaagccactttaaattgcggctccgcaggactgaatgaagtgaagactgagaggagtcatatccagggtatgattcttttagtcttagtcttgaaaaattacaaatgatcattcatttcaacttcaactgcttttgtacttagaaaaatctcacaattcaaactatttttctaaatttctttctagtgttacttaatgcttatctacttccttatttctcaaggtctttgtaatttcttttcatctataatgtagagagagaacataaactaatatgtttctccaaagagctacccaaatttcccagtacaggaagtttttttcaaatttgatagaggtatagagacttgtgtgcaggcttagagacaaaaagactcgaacaaacataaactgtttctgtctttgatttagtaagatttagaaaaacttaatttatgtgacttaccaatttgcattaagtcaatgttattaattatggaaacataaatggtttacattaaaatactcttatcttctactgcagtagtgagagcacagagtgaatttaggaacattagccaacccattgtcaccaatgtaatccaagaatccaagaacattgcaaacggtttatcaatcataacttctttttttttttttttttttttt

SEQ ID NO: 697934 - DNA, 1475 bp, Homo sapiens
atttatattatgtttcacgggagagaggaaagctttcaaccacagagttgtctatataaacttgccagaactattctataccgcattccatttgggaatcttttgatttatagtagttggagtgctctgatgttttatatgaaatagactctacagttactatgacctttgagttctccttcatgcaagcacacctgagagctagctgtaggatttcacctatgttccgatagaggtgcattcagttgagcaggttgattttataggaaggcagaaattatactattggggttttgtattttgtactcattttatttacatacagagtggctataaaatcatataaaatcagcaggttgcaatgtgtcatggatgaatgtagattaaacataatgggggtcrgtggagtaagaaagagacaagctgtcaatctcgaatatcagagaaaatcaacacctgctgttttgtgtttatcgtgcaccaaaatagaggggcagtatgacattaccactttgtgctttgcagttaacatttttaacacgtttttttttttctaagtaagagatgacttataccagcactatactgttagctagatatggtgatttaaggcaataacttcactgccagatgatttagatgaagaaggagaaaactccatgacaaccttaaccagaaattagcaaacatttagaatttaaaatagaccttttcagatgatgaaacatataaaacttgagactatacataatatctaagtgaaaatacttgattgctaggaaaggaaagcagtctggtgtgtaagttgacagagacttttcttggaagcagaaagattttatagactcgtgatgatgttgatcagcctcacatcgagtcattgtagatacttttgagaaataaaaaactgagggttagaaaagtaggtgaaaataatagaattaactgttacgtatgtaatgttagaagaatttatcaaatttagcagactaaacccagtgactttccactggcttatggaaagtgagggaatatcaggtaagttgcatgatactctcaggaattggagacagagtgtgtctggtttcaaggaatgaggagaactgctgctgatcattgaacttctgaaatgtgcaggataattgacgtctttttctttttaattttttttttttttttttttttgagatggagtcttgctctgtcacccaggctaggctgcagtgactcaatctctgctcactgcaacctctgcctccctggcccaagcagttctcccacctcagcctcccgagtagctgggattacaggtgtgcaccaccacgcctggctaatttttatatttttagaagagacagtgtttcaccatgttggccaggctagtcttgaactcctgacctcaagtgatctgccctcctcggcctcccaaagtgttggaattacaggtgtgagccactacacccggtcgaccttac

SEQ ID NO: 697935 - DNA, 628 bp, Homo sapiens
taatacaggttctcacaggaacatctaccagaaagaaatgtamagactagtaaatcttacgtagggacatgtctgttctgttaactctaactctaatccaagtaatggtaacttaccacttcatgaatggatctgttgaagccatcatcttccgtaaggatcaacaatattataagggccatatacacatggtgtgaattcctttcttcaacatgatacagaatctcaagaattggtaaaacctagagaataaaaattataattgactatttcaatacttcattataaatccaaatgttttaaatctttacactttcattttgtgctctttgctttaatatcagttatatttttcattagagaaaaaaccatataaacccacttctgactgaatgtattttccaaatgtatagctaagatgccagtggagaaaatcaccactaactctgtgaaggtctcttaaggtctaaccaacataaaggttggatctgcaaggaccatttaggctcgttgtttgttttgaagattttaagaagtcacattgccttctcccaacttaaccaaaaagtgggagtagcggggagagcacagctgctcagaagttaactttttaatttatgtgcttagc

SEQ ID NO: 697936 - DNA, 1569 bp, Homo sapiens
aatccatygggcagggaatcagaatcttgcaatattagcagagaccaatacattcttttgtagagatgttatccagatttatttttagattcaaaatatctcaaaaatgttataatactataatagagaaaatagagatgcaagactttacaagccatcattaactcttacaccactcaaatgaagtaggtatgatatctcattcaagagatgaaaaataagttaaataactcagcaaggttttggaaacagaactgaaccattcattacaattcttaccatcagataattccttccctaaagaaataatttcctgactacagtgctaacaataatatgaggttgaaataaaatcgaagtttaaaaaaaaaaaccaactataacacttaatttctagatacaacaaatggcattcgtctgcaataaaaacatatcttaaagaggacttcagcagtggtaggcattcataagtattaaattaaaaataaagtttaatatcaaggattagatataaaaaatattattgtctcaggctaaaagacacacagttcttatcactcttttccaggataatttccacataccatgtattgtaatacctgaacacatccatacctgtctcaaacatgtcagttctaaaaaagtggaaaagaccttcctgtctttgctactataactttaggtacttagatagattgggaggcaggtggaatcagggctaggggaaagcaaactgaatgaccaccaagggcacggctaccttagattgtagagaactgtctgttccagatcaatcccaggagtttggatccatggtcccatggtgagcgagtcactctcagaaagagtattctgccattcttggagtgagccaggcttttgatctggacaaacctgggatagccacttaccagctgtgaagagtcaataccctcgactgtctaaacctccagacttcaactagccttaaatgtaacacaagagagataagtggtgagacactgaggatggcaggtataaatttatcattaaatggactttttaaaaaataaggcaatatttctaaaattatcataatcatatattatgttattacatatttgaattgtgcatgtgtgtgtgtgtaatataaattcatcccaacaaataggtcaatttgcttattaatattccctttcatgtttgagaaaaaaacccatgaaaacttaattcagtgggaacagaagtgaggaagcctgttggggtaagttactattaaagaattatttaaatgaaggctgggggcaaattgtctttctttctttaattccatgagcctgaatggtctaaaagatcttatttgcccaaaatagaggagctgaccacgtagttcaacaaccaacttctgttttgtagtcttcaaaaaaatgctgggtgattaaaatatgtgtcatcatgagtgcagggcaggaaaaggcaactcatataaaatgccagcttgagactactacacggaagttgcacaaccatacacttaaaatctgaagtgtatatactcactcctgatggctgtgagaaaaagtgaaagca

SEQ ID NO: 697937 - DNA, 1171 bp, Homo sapiens
ttttttcatggtcagtaagtagtaaagtgttgaataaacccaatgcacaagtaatctgtggaagaaaaaattgaattcagctcctagggtgtgagggagaaggacgcaaggttatgtggaaagattgtgttctgaataaaagctcttagtcagtaaaagaactcactgatttaagtggctaaactcagggttcctttggaaatgttaatagcagtgcattgaaattttgttttgagaacatttagtagagaaaattttaaattatttcctgcaattaataaattttatgtgctaatactttaacattatcagtgaaaatcaaggtagaaaatagattatatgtgtatttcttccaaaattaaaataacaattaaatacagttttatgcttgaggaaaaaagagatattccaaattcctctgccacttacagtgcatagttacatwaaaaaacataatctaatcctatctcattctaaacaaaagctttagaaaaatattcttagcgaatacaaacacatacaggcttcatttatcatttggctctgtaactgcccaagagatgccatcatgaccatcattaggagacgcccttccacaatttcttctcattaaaatgttgggcttccagatggaagactaaaagataatacaggagtaatgatggatgaaggcagaataatggaaaagcaacaaaagcaatatatagctggaatacacattctcattgttcctgccttagaaattcaggttcatccttagatgtcagctcaagatgatctcctcagagaagtcttccctaaacccctgttgtggattaaattgtgtctccccaaaaagatatgttgaagtcctaaccccatcatgaaagagatttggagacataatgacacacaaggaggaaggccatatgataatgcaggaagagatcagagtgatggagctacaagccaaggaatgtcaaggtttgttggcaaccaccagaagctagaaagaggcagaaaaggacttttccttagagccttcacggagagtatggtcctgccaacacctggatttcagactttcagtttccagaactgtgagagaataaatttctgctgttttcagtgtgtggatgtttgttatggcagccctaggaagttaatttaccccagaatagatctatttcac

SEQ ID NO: 697938 - DNA, 622 bp, Homo sapiens
tttctgattgatttgcttgactcccagggttagtcaagtttatgccaactttatttggtctctcttacatatctatcttttaaattacttttgcttctttgttttttgcatttaagttttcagattttttttttcttcttttctgagacggagtctcgctctgtcgctcargctggagtgcagtggcgcgatctcagctcactgcaagctctgcctcccgggttcacgccattctcctgcctcagcctcccgagcagctgggactacaggcgcccgccaccacgcctggctaattttgtttttgtattgttagtagagacggggtttcaccgtgttagccaggatggtctggatctcctgacctcatgatctgcccgcctcgacctcccaaagtgctgggattacaggcgtgagccatcgcgcctggcagttttcagatttttatcagcctttcttctatgctcccgattcttttataaattgtattacattgtttttgtgtctctatattgcgtttatgtctatggtatttgtattattaacttttgtttcttttgtgaactctggtagcttggtttcactatctttatttcctctttaatttcatatcccttctcagaaa

SEQ ID NO: 697939 - DNA, 622 bp, Homo sapiens
tttctgattgatttgcttgactcccagggttagtcaagtttatgccaactttatttggtctctcttacatatctatcttttaaattacttttgcttctttgttttttgcatttaagttttcagattttttttttcttcttttctgagacggagtctcgctctgtcgctcaagctggagtgcagtggcgcgatctcagctcactgcaagctctgcctcccgggttcacgccattctcctgcctcagcctcccgagsagctgggactacaggcgcccgccaccacgcctggctaattttgtttttgtattgttagtagagacggggtttcaccgtgttagccaggatggtctggatctcctgacctcatgatctgcccgcctcgacctcccaaagtgctgggattacaggcgtgagccatcgcgcctggcagttttcagatttttatcagcctttcttctatgctcccgattcttttataaattgtattacattgtttttgtgtctctatattgcgtttatgtctatggtatttgtattattaacttttgtttcttttgtgaactctggtagcttggtttcactatctttatttcctctttaatttcatatcccttctcagaaa

SEQ ID NO: 697940 - DNA, 634 bp, Homo sapiens
aagtcctatttttcttctttgctaatctgatggacaggcagtgtctcatagtgactttagtttgtattcatattttctcgattatttgagaagataagcatttttccccaaatgtttattcttcacctatgataacccttgttaattatttagattagttttttgcaggccactttcatatatctgtatatgttgttttctctttctgaaatgtgatgcccatgtttctctacctggtgaacaatttgtcaactttaatatcttaccagatgtaaccttcctagggatgctgtttctaactgctgccggccccttcttaccatctctctggttgtgcttctgacgcattccctacacaactggaacgtgtttccaggtcagcctccctaagcacctcccaaggcctccaccccacagtgtcgcacagaacttgacacataccagatgctccaattattaaatattacygagtacttttagaaaattgggaacatacaataaagtataatgaagaaaataaagaaaaccaataatctcacttcccaaagataataactactgccattttggtgtgaatcctttcatgcttttaaaatgcatatatatgtctatttaattgaaatcattctatttg

SEQ ID NO: 697941 - DNA, 618 bp, Homo sapiens
tctaaaattaggattccatcaccaaggagaaacattcattttactacacactgctgtraatttatctcactaaataatgctattgtctttgtccattttctgttgcttataacagaattcctgaggccgggtcatttgtaaagaaagggaatttatttcttccattatggaggctgagaaatctaaggttaaggcaccacatctgatgagggccttcctgctggtggggactctctgcagcacagggtatcacgtgaggggctgagtgtgctagcccaggtgtctctttctcctcttataaagccattaatgccaccaccatgataacctgttactcatttacccattaacccattaatggactaatgcattcatgagagcagagccgtcagaacacaaccacttttttttttttttttttttttttttttttttgagacggagtcttgctctgttgcccaggctggagtgcagtggcacaatctcagctcactacaacctcctcctcctgggttcaagcaattctcctgcctcagcctcctgagtagctgggattacaggcacctgccaccacgcccagctaatttttgtatttttagtagagatggggtttcacca

SEQ ID NO: 697942 - DNA, 618 bp, Homo sapiens
tctaaaattaggattccatcaccaaggagaaacattcattttactacacactgctgtgaatttatctcactaaataatgctattgtctttgtccattttctgttgcttataacagaattcctgaggcygggtcatttgtaaagaaagggaatttatttcttccattatggaggctgagaaatctaaggttaaggcaccacatctgatgagggccttcctgctggtggggactctctgcagcacagggtatcacgtgaggggctgagtgtgctagcccaggtgtctctttctcctcttataaagccattaatgccaccaccatgataacctgttactcatttacccattaacccattaatggactaatgcattcatgagagcagagccgtcagaacacaaccacttttttttttttttttttttttttttttttttgagacggagtcttgctctgttgcccaggctggagtgcagtggcacaatctcagctcactacaacctcctcctcctgggttcaagcaattctcctgcctcagcctcctgagtagctgggattacaggcacctgccaccacgcccagctaatttttgtatttttagtagagatggggtttcacca

SEQ ID NO: 697943 - DNA, 618 bp, Homo sapiens
tctaaaattaggattccatcaccaaggagaaacattcattttactacacactgctgtgaatttatctcactaaataatgctattgtctttgtccattttctgttgcttataacagaattcctgaggccgggtcatttgtaaagaaagggaatttatttcttccattatggaggctgagaaatctaaggttaaggcaccacatctgatgagggccttcctgctggtggggactctctgcagcacagggtatcacgtgaggggctgagtgtgctagcccaggtgtctctttctcctcttataaagccattaatgccaccaccatgataacctgttactcatttacccattaacccrttaatggactaatgcattcatgagagcagagccgtcagaacacaaccacttttttttttttttttttttttttttttttttgagacggagtcttgctctgttgcccaggctggagtgcagtggcacaatctcagctcactacaacctcctcctcctgggttcaagcaattctcctgcctcagcctcctgagtagctgggattacaggcacctgccaccacgcccagctaatttttgtatttttagtagagatggggtttcacca

SEQ ID NO: 697944 - DNA, 601 bp, Homo sapiens
tccagagagccgcctgggcagccccaacagggcactgaggacaccaggcaccatccacacccacactccagcagccaggtgctctctctccaccccctgggcagagcgaatcagatggttctctggctctgcctttcccacgtgctgccgtggctctcacagttgttttcggaaacacagactccactgggaggatttctccctcataaacacacatgtcaaaatcaatgtatcactcgtcaccctgtgtcctcatcttcggcttggaaaacctggcctcagtccctcgggccaagagtctcctgactgcccaggtggcaggccctccgtcccttgcggttytaaactgctacctgggaaagaatcgttgctgcccacaacttccatcttggctacgcctcaaaacccttcaacaggaagcttcccagcagcagcacagtaacaaagcaaccatgggacagagcctagggtctcgcccagctcaggggcatcctgcagcggtgcagggcctcagtgaaatgcagagaggctaggagtacatggaacctctaaaactgaatggaggtggatgtgctaagcgtgggcggttttctggggagcg

SEQ ID NO: 697945 - DNA, 622 bp, Homo sapiens
cccagaggaaaagaaggcattatatgaaaaagacacttgcacacacatgtttacagcagcacaactcgcaattgaaaagatacggaaccaacctaagtgcccatcaaccaatcagtagataaagaaaaggtagtatatrtaaaccatgaaatactactcagctgtaaaatggaacaaagcaatggcctttgcagctacttggatggagctggaggctcttattccaagtgaagtaactctggaatggaaaagcaaacagtgtgtattctcacttataagtgggagctaagctatgaggatacaaaggcataagaatgaaataatggacttcggagactccgggggaaggttgggaggggggtgagggatgaaagactacacattgggtatagtgtacactgtttgggtgacaggtgcaccaaaatctcagaaattaccactaaagaacttatccatgtaaccaaaaaccacctgtaccccaaaaactattgaaataaaaaataaaatgctattgtcattatttttaggtggccaccaagcgactgttatgatttaaatttatttttacacatttctgatttgtatgtcctcttttgtttttttaaatgaatatatataataa

SEQ ID NO: 697946 - DNA, 613 bp, Homo sapiens
tgtgagaactttctggggaggtagaatatttttttttattgtgaaagggagtggagtgggttgtatggatgtttgcattcatcaaaattgttcagttaagatttctatgtaactatgtgtaaattttacttaaaaagaattttaggctgctctgtctacagagtagccattctttattcctttactttctcaataaacttgctttcacttaagaaaaaagaaaaagaattttaaaatcagccatgaaatatatatasaaggtactttgacattctgcaccaataaaatgtaaaaaaaaagttatttgaaagaacaaacatcatagagaaaaaaaagaagaggaaaaagcagtaaaccaactgagatacacaaatgaaatgagccttttctaaagagtggtcaatctgcatttctatgaaaggtagtaacattttatattctattatacaataaagataattctgcttttgacagagtcaaggaaaacttttacaggcttttgagaaatgagaaactggttatatagatagtgataaagaataagatttttgttttgtttttgtttatgtgttcatttttcctgacaatcatttaaggtaatacctagggatgg

SEQ ID NO: 697947 - DNA, 1238 bp, Homo sapiens
tagtcaagaaatactcaaatgggtgattacacctaaaatgtaacagagtagtactagtttattatataactttcaactgaattcctcctaggagacagcaccatgcattcaactctgctgcctaagggagaagatcccatttcttaggattcttaatgactctgactccccatgggggaacttatttttagtgttctatggatatgttcactggaaaaaaaatttgtgctaagcccaaacctataaattgcatcttattacagtcaagtcaacatgaccagctaccactatccaattctgtctagcttgatatgtatttcatctgacaacactagttgtatcacttcccctaactaaattttattttttataaagtaagttatagaactcttgttttggccacatctggaaaaaaaagccatatgtacatttctgaaatttctctatgattgctcactctgaaacaaataactcagatttttgaacttccattgacaaaatctataggtttcttacctatttgtctttgcactcatatgtagattcaagaacctaaaaactgtgattagtggaacaatatgtagtacttagtaggatccacaagtgtctgccttgaagactgaatcaagaagcccaccaaagtcttcacttacttgccacagtgacccttgacaagttcagaaaagtagagggccttgtttctatattgtccacaaaatgtcccttctggaatctgtttcctaacagagtccaagctcagacttgaaacccattggttagtatttttttaattatgtgctagttcttcataaatatctcagagcacacattgtacttgaagagatctttaaccctcaacsattggtggatgtggtagtcactgaagaaatctttacaattaatgtaaatccccacctgtgtcaacataccacacatatttcaaaaaggctcaatagaatatgtgcccggtcagggacaatttcaaactagtttctcacctggcaatctggggtgtgaagttacgtctcacgcaatgccctgccaatgacaataattccacctgagtgtacactagagacttcaaagttcatgtcagctactaccttttccactggttgttaaggattacctactttgccaatcactaactgtgtgatcttgttgtatcatatctagggttaccagattcgggaaataaaaatgcagggcacccagctaaattcgaatgcagataagta

SEQ ID NO: 697948 - DNA, 650 bp, Homo sapiens
ataatagacataataataggcctcagtttcaccatcctaaatattagcatattgaattataaaatcagatattctataaatgtttgatgaatatgtatgcaacttaattttatgtagttttagatgcgttgtcctttgggatatcgaaaggygaaggcatttggcactaacgtgctgctttatttagttgtgcctgtatgcgtgtgtctgctaaatgtgcagccattagagtgtttcattccaggaatcatcaaatagaccaattgactgaaaaataattacaagtttattatggccatctaagtctacatcattatcatgtctgaaatgaggcttctgattcttttgtgctcctaatagaggtgcatgcacggccagagtttattgctctgactcagacatgctgtccacaagctacgttcatcctatcgccacctctcaatgctgggaaattgtctaacactgctgacctcaatatggtttggattgtactcaatatccagaaaaacaatatagatcattcttacttgatcataacaaggcagctcagctctattttataatggtcataagtaaaaataaataaccaattttgcctgaatgaaataaaatcaatacttctcttttgcaatatgcttctgaggaagaaa

SEQ ID NO: 697949 - DNA, 650 bp, Homo sapiens
ataatagacataataataggcctcagtttcaccatcctaaatattagcatattgaattataaaatcagatattctataaatgtttgatgaatatgtatgcaacttaattttatgtagttttagatgcgttgtcctttgggatatcgaaaggcgaaggcatttggcactaacgtgctgctttatttagttgtgcctgtatgcgtgtgtctgctaaatgtgcagccattagaktgtttcattccaggaatcatcaaatagaccaattgactgaaaaataattacaagtttattatggccatctaagtctacatcattatcatgtctgaaatgaggcttctgattcttttgtgctcctaatagaggtgcatgcacggccagagtttattgctctgactcagacatgctgtccacaagctacgttcatcctatcgccacctctcaatgctgggaaattgtctaacactgctgacctcaatatggtttggattgtactcaatatccagaaaaacaatatagatcattcttacttgatcataacaaggcagctcagctctattttataatggtcataagtaaaaataaataaccaattttgcctgaatgaaataaaatcaatacttctcttttgcaatatgcttctgaggaagaaa

SEQ ID NO: 697950 - DNA, 650 bp, Homo sapiens
ataatagacataataataggcctcagtttcaccatcctaaatattagcatattgaattataaaatcagatattctataaatgtttgatgaatatgtatgcaacttaattttatgtagttttagatgcgttgtcctttgggatatcgaaaggcgaaggcatttggcactaacgtgctgctttatttagttgtgcctgtatgcgtgtgtctgctaaatgtgcagccattagagtgtttcattccaggaatcatcaaatagaccaattgactgaaaaataattacaagtttattatggccatctaagtctacatcattatcatgtctgaaatgaggcttctgattcttttgtgctcctaatagaggtgcatgcacggccagagtttattgctctgactcagacaygctgtccacaagctacgttcatcctatcgccacctctcaatgctgggaaattgtctaacactgctgacctcaatatggtttggattgtactcaatatccagaaaaacaatatagatcattcttacttgatcataacaaggcagctcagctctattttataatggtcataagtaaaaataaataaccaattttgcctgaatgaaataaaatcaatacttctcttttgcaatatgcttctgaggaagaaa

SEQ ID NO: 697951 - DNA, 1043 bp, Homo sapiens
tgagaataaatttcttaagcatataaaggtcaatgtcatgagaacaaaaattgtctaccccacatactgccgggactgcctggacactgaggacaaagccacccctttctgtttacattactgtgactttgctattttcacagcttcattgtcccttctttacctttgcaggactgttcctcccacacaaatggtatgattactcataacaggaacttccttaaaatccactaactcttcaatgtaccgcatcatttggagtcctgagatgctttcagtcttttacctcaaaatcctcaccttgtgattcccacaaattcatggctattgtattgggattcttatccaatcttcaccaatttcctgtggcgaaaggcctgctttaagccaaattttcacctctcaacaaattctgaacttattttcctatttctaacatccaaagctttgcggagttggtgccttcctttactgcagtaaataatgaattcagccttgtcttataaacaggtcatgttggtcctttttgggtgttggtccatatttagtatagaggttcactttttcagatgtccagagagcccctcagagctggctccctgactgcctcccagcctcgtgtgcctggcctgctggcctccttgtgctagcaatgtgagccactcagcttccctgggacaccatgytcttcaatatctccacatctctgcccatgctgtttcctctgcatacccaggagtcttcatttatgcttaagttccagaaaaagcatcatttcccttatgagaacttcgctgatcgactccaccctcagacagaggtaatcatttccttttctttcccactgctattttgtgcccatgtatttgctatcagatgaatacaaaactcactctcacactgtattgtaattacacattttcctgtccttgaagtacttgagatctgagtgtgtgtgtgtgtgtgtgtgtgtgtgtgttttaatatctgtgtccttaatagcaggtacaggaaggccacttggataagtgatttaagagaaa

SEQ ID NO: 697952 - DNA, 1043 bp, Homo sapiens
tgagaataaatttcttaagcatataaaggtcaatgtcatgagaacaaaaattgtctaccccacatactgccgggactgcctggacactgaggacaaagccacccctttctgtttacattactgtgactttgctattttcacagcttcattgtcccttctttacctttgcaggactgttcctcccacacaaatggtatgattactcataacaggaacttccttaaaatccactaactcttcaatgtaccgcatcatttggagtcctgagatgctttcagtcttttacctcaaaatcctcaccttgtgattcccacaaattcatggctattgtattgggattcttatccaatcttcaccaatttcctgtggcgaaaggcctgctttaagccaaattttcacctctcaacaaattctgaacttattttcctatttctaacatccaaagctttgcggagttggtgccttcctttactgcagtaaataatgaattcagccttgtcttataaacaggtcatgttggtcctttttgggtgttggtccatatttagtatagaggttcactttttcagatgtccagagagcccctcagagctggctccctgactgcctcccagcctcgtgtgcctggcctgctggcctccttgtgctagcaatgtgagccactcagcttccctgggacaccatgttcttcaatatctccacrtctctgcccatgctgtttcctctgcatacccaggagtcttcatttatgcttaagttccagaaaaagcatcatttcccttatgagaacttcgctgatcgactccaccctcagacagaggtaatcatttccttttctttcccactgctattttgtgcccatgtatttgctatcagatgaatacaaaactcactctcacactgtattgtaattacacattttcctgtccttgaagtacttgagatctgagtgtgtgtgtgtgtgtgtgtgtgtgtgtgttttaatatctgtgtccttaatagcaggtacaggaaggccacttggataagtgatttaagagaaa

SEQ ID NO: 697953 - DNA, 1027 bp, Homo sapiens
taaacttggttctggaacagtacattacaatatccatgtatttattttggaagcacataatcaagaaaagagtttggaaatgcaattcaattgaccscacatcccactggtggctaaaaaacacacagaacactgtaattgtatttcctagccctagaggcccgtggcatgtgttttggctaaatttcacagtcctgccatgagtaatgtctgcaagttcaatatgctacacacaaagggtgtggaaaatatgttgtaaggttacacatgatcatctgcaggtaggcaggggtgcgggtctggctctatgatgtgacgctcttttgactttgttattaagggataaagtttggccctcccattgtatatgtaacagtcatgacatataacttctttgtaatgctttgggtcacccccactgttgtaatcatgaacatgcccaacacattttccagagagtcactttcgtaggattgtccccacattgagggaatttctgaatcggtaaaagccatagagagtgaagaatgtccaaggaggatgaatttggatgacagaggctcaggtctgctctgttacatagtaactttaggagagttactcatccgcttaccctcatttcttaacctttaaaaggaagtccacaatacacaccctgaccacctgcagaagatattatgagaatcaaactaatgtcatatgtcaatgagatttttaaagctataaaatacaagtccaaagcaagattcttcagtgccatgtttttttaaaagaatctaatacatttggtcagatagttgctccattaagaaattcttttgaaacaatgttgggtttgattgacttatttgattgaattggaagattaactacattgcttcaatggatgtagttcatgtggtcgactaactgtctgggataagctgagcaggcatgtgatgaaatactatcttgctcttgaaggagcatggcccacctgcactccactgagctgcccatccagacatcagttattctcttgagcctc

SEQ ID NO: 697954 - DNA, 439 bp, Homo sapiens
accccagtgaagacggcctgttttgcaaatctgtgaatcccaaactatcaactctggactgctatctttatcataacattttattctttcaggctgattaggttgggcagatattattaacccttccttccctacttagtgaacattgcacagcggagaagtgcagacccaggtccaagcctatgtctccccctgtgctttctcacttttgcaccatagctatggccacatgtgggggatgaggaggaaactgagaaggtaagttgtcacacctgcaagagrcagggttacccagattcagtcctgtagtgtaacttcatgtttgttctttctacacatcagacactgggcttttcccctgtgaacctgtggtgaatgtagatttgaattcactccaggtaggtgtaggcattcaccctgtgatctaaggggttactca

SEQ ID NO: 697955 - DNA, 439 bp, Homo sapiens
accccagtgaagacggcctgttttgcaaatctgtgaatcccaaactatcaactctggactgctatctttatcataacattttattctttcaggctgattaggttgggcagatattattaacccttccttccctacttagtgaacattgcacagcggagaagtgcagacccaggtccaagcctatgtctccccctgtgctttctcacttttgcaccatagctatggccacatgtgggggatgaggaggaaactgagaaggtaagttgtcacacctgcaagagacagggttacccagattcagtcctgtagtgtaacttcatgtttgttctttctacacatcagacactgggcttttcccctgtgaacctgtggtgaatgtagatttgaattcactccaggtaggtgtargcattcaccctgtgatctaaggggttactca

SEQ ID NO: 697956 - DNA, 2202 bp, Homo sapiens
ggtggaaagtgggattgggtaattgttttccagctccctccacaaaacgttaggttcttgtcacaggaccttctctgatctccccttgcttctttacccctagaggtggtaagaccaccttgttctaaccagctttggtgatgatctcttgtgggttcccattcctcctgccaacatctctggaaatgtccctttattacatttttctcaaattactcacctcaaatttgatagtggcaacttcttcctgcgaggcccttcacagatgcatagctataacacctgttggtggtatgaagctaagagaaaggttttcttttaactgactggatgaaaaagtaaaatgttgtgatctttggaagcatctagcaacatctattatagttaaaaataaccatcatatctataaacctgtttctgaaatcctatttcacagatagcttaaaaagcacatgttgataaatatgtaagtacaaggatgtttgttgtagcattattcttagttctccacttggatacagtaaatatccatcggtagtatgggaacagctgaaaataattggcctatgaacacactatgacagtaatgcaagccttacaaaaaagtcatgccctctttatcctcctctccctagtacctttcccagccagtagtaaccatcattctactctctatttccatgatggttagtggatataaaaatgcagttagatataaggattaagatctactgttagatagcacaataggtcaactgtagctaataatgatttatttatttcaaaataactaaaacagtgggattggaacatttctaacacaaggaaattataaacactttaggtaatggataccccaattatcctggttacacatgattgcccttattacacattatatgtctgtatcaaaatatcatatataccacatacatatgtacaactattacatatctataatttaaaaaattgttaaaaattaagaatgttatggcgctatagcagttgacttagttgagagcaatcttcatgagttattgctaagtgagaaaaaagcatgcaaaaaagtgtatacactgggatgcagtatttcacaaaaatgtatattgcaacaaaaatcactgtgtgtgtaaatatatatgaatgtttctatgattttctgatcacgaagaaaaatttggatgactaaatgttagatatgacaagattaaatggaggggcagggatttatgtgagtggaggagagaggtgagggagaggataaaaacaaaaacggtakaaaaaacacacttgcctcttaatatgcatttgtttataaatatttgatgatagaacctaggcacattatttttaagactccccaggtaattcaaacgtgtagccaagttggagaatcactgctctcgaagaataaataattggaagatcttttgtctatgtttcccaacttgaatgtatttcaatattctttcccaaaaatgtccattttgttgttttgcattgaaaatcaaaaactcaaatgacaattatgtttctatatttgatgtgaaagaagtaaattctaaataaaacaaattacattgtttgcataaaatatagatttcttatataaaattatttataaatgcatgttttaaatgtacatatatttgtataccaagaaagttccctgaaaatttcagtgacttaaatttcctttctgattactggcctagcattccagactgactttagtcttaatttatgatgtcagtcttcacttatttgttaccttgttcaatccttggttggattaaacttcttcatgtttcttaaacaagaaatttccatgttttcttgctttggaatatttactcttacttttactggattccacaacttcatttatccaaatctttcctaatgattccatctaaaatcaaatatcattgcttttattatgtcttccctaattaagctagctttaaaatttaatgaatgcctactatgttccagatgttgtgctagatgctaaccttctactattttatggtatcctgtttaattttccacaaggcatgagttatttgcaatattacttaaaatactgagaagtcaccatgttagcagagccttggcttaaactcatttgtacaatcctcaaattcaaaacactttgtaataagaacagtcagtcatgatctgtcaagcttctgagtaccc

SEQ ID NO: 697957 - DNA, 1834 bp, Homo sapiens
ttagtgcacagaaacactactgatttttgtatgttgacttttttatcctgaaattttgaaattttttttcagatctaaaggtttttgatgaagtttttaaagttttctaaatataagcttacatcatttgaaaatagggataatttgatttcctctytttcaatttggatgtcttttatttctttctttggcctgattgctctggttggaactttccagtactatgttgaataggagtggtgggagtggccatccttgtcttgtgccaaagactgaaaaggctgtcacctgtttttttgttgttggttttttgaagctggaaggaaagtttaaagattttaattcaaaatatttttctaaacgtacaaatatatatttaagtgtcttcaaattccttttgaactaacaaaagtagtggattgttaacttatttgattttaaggcgagaaccgttcatttcctggtacctattttaacctgcaggcaatctggaagtggaacttgtccattccttcctaagacagtacatttatatggcttttgatacaacaggctcagaaatgcccttctcattttcacatttgtaactttgtttagatgaagacggtacatatatatttatttggggccaaataaaattatcaggaaaattttttttctcatattaatttatctcagagatgaattaaatattttttgtactactgaaagggcataaaatatgcatatttgataactttatgtaagagttaattgagaaatcagaaagccttgaatttgttttgcatttaaactatcccttgaagccctatgaagacactatttggaaaagtattgcactaacattcagactcctttcaaagacaaattttatcataaaataataatagactgggagcctggtaaacctgacgggcaaagtgcaaagcttctatgttaaattatgcttcccaggcccaagctggggtgtggtagttctggaaggagaaaagaaagacacaagagaaggaagggagagtgccattctgatttgtcttaggactggacatgattagtgacgtagagaggagacacaattttattttagtttactttacaaaagatacaagtcaccaaaaactgagaaagactttagtattaatctattttgtgttactacaaaggaatatctgagactgggtaatttataaagaaaggtggcttatttggctcatagttctgttgactgtacacacagcaccagcatctgcttggcttcttatgaggcccaggaagcttttactgatgcctgaaagcaaaaggggagcaggcttgtgacagggcaaaaggagagggagcaagagagagaggaaggaggttccagtctctctaacaacaggatcttgcgtgaactcattaccatgggaagagcaccacttcattcatgaagagtctgcccccatgaccccaacacctcccacctggcctcatccccaacactgggggtcacatttcaacataagatttgtaggggacaaaatccaaattgtatcagcttcttctctggaatggcttatagaggtattttccaagcctaacagagtaaatgaaagcattctctgagtctcaccacaggtaatagaaaatgtgatttacaactcagccacttcaggaagcacctaggaattcaggaattattaatttagcaacatttttgtttttacatattatagaagtgaattatctaagttatgtagtcatgttttattaatcatttttatgcccaaggatccaagcaggagtcaactatatcaaatctgcggtttactatatttttgcaggtatcgcatcagaa

SEQ ID NO: 697958 - DNA, 1834 bp, Homo sapiens
ttagtgcacagaaacactactgatttttgtatgttgacttttttatcctgaaattttgaaattttttttcagatctaaaggtttttgatgaagtttttaaagttttctaaatataagcttacatcatttgaaaatagggataatttgatttcctctctttcaatttggatgtcttttatttctttctttggcctgattgctctggttggaactttccagtactatgttgaataggagtggtgggagtggccatccttgtcttgtgccaaagactgaaaaggctgtcacctgtttttttgttgttggttttttgaagctggaaggaaagtttaaagattttaattcaaaatatttttctaaacgtacaaatatatatttaagtgtcttcaaattccttttgaactaacaaaagtagtggattgttaacttatttgattttaaggcgagaaccgttcatttcctggtacctattttaacctgcaggcaatctggaagtggaacttgtccattycttcctaagacagtacatttatatggcttttgatacaacaggctcagaaatgcccttctcattttcacatttgtaactttgtttagatgaagacggtacatatatatttatttggggccaaataaaattatcaggaaaattttttttctcatattaatttatctcagagatgaattaaatattttttgtactactgaaagggcataaaatatgcatatttgataactttatgtaagagttaattgagaaatcagaaagccttgaatttgttttgcatttaaactatcccttgaagccctatgaagacactatttggaaaagtattgcactaacattcagactcctttcaaagacaaattttatcataaaataataatagactgggagcctggtaaacctgacgggcaaagtgcaaagcttctatgttaaattatgcttcccaggcccaagctggggtgtggtagttctggaaggagaaaagaaagacacaagagaaggaagggagagtgccattctgatttgtcttaggactggacatgattagtgacgtagagaggagacacaattttattttagtttactttacaaaagatacaagtcaccaaaaactgagaaagactttagtattaatctattttgtgttactacaaaggaatatctgagactgggtaatttataaagaaaggtggcttatttggctcatagttctgttgactgtacacacagcaccagcatctgcttggcttcttatgaggcccaggaagcttttactgatgcctgaaagcaaaaggggagcaggcttgtgacagggcaaaaggagagggagcaagagagagaggaaggaggttccagtctctctaacaacaggatcttgcgtgaactcattaccatgggaagagcaccacttcattcatgaagagtctgcccccatgaccccaacacctcccacctggcctcatccccaacactgggggtcacatttcaacataagatttgtaggggacaaaatccaaattgtatcagcttcttctctggaatggcttatagaggtattttccaagcctaacagagtaaatgaaagcattctctgagtctcaccacaggtaatagaaaatgtgatttacaactcagccacttcaggaagcacctaggaattcaggaattattaatttagcaacatttttgtttttacatattatagaagtgaattatctaagttatgtagtcatgttttattaatcatttttatgcccaaggatccaagcaggagtcaactatatcaaatctgcggtttactatatttttgcaggtatcgcatcagaa

SEQ ID NO: 697959 - DNA, 1834 bp, Homo sapiens
ttagtgcacagaaacactactgatttttgtatgttgacttttttatcctgaaattttgaaattttttttcagatctaaaggtttttgatgaagtttttaaagttttctaaatataagcttacatcatttgaaaatagggataatttgatttcctctctttcaatttggatgtcttttatttctttctttggcctgattgctctggttggaactttccagtactatgttgaataggagtggtgggagtggccatccttgtcttgtgccaaagactgaaaaggctgtcacctgtttttttgttgttggttttttgaagctggaaggaaagtttaaagattttaattcaaaatatttttctaaacgtacaaatatatatttaagtgtcttcaaattccttttgaactaacaaaagtagtggattgttaacttatttgattttaaggcgagaaccgttcatttcctggtacctattttaacctgcaggcaatctggaagtggaacttgtccattccttcctaagacagtacatttatatggcttttgatacaacaggctcagaaatgcccttctcattttcacatttgtaactttgtttagatgaagacggtacatrtatatttatttggggccaaataaaattatcaggaaaattttttttctcatattaatttatctcagagatgaattaaatattttttgtactactgaaagggcataaaatatgcatatttgataactttatgtaagagttaattgagaaatcagaaagccttgaatttgttttgcatttaaactatcccttgaagccctatgaagacactatttggaaaagtattgcactaacattcagactcctttcaaagacaaattttatcataaaataataatagactgggagcctggtaaacctgacgggcaaagtgcaaagcttctatgttaaattatgcttcccaggcccaagctggggtgtggtagttctggaaggagaaaagaaagacacaagagaaggaagggagagtgccattctgatttgtcttaggactggacatgattagtgacgtagagaggagacacaattttattttagtttactttacaaaagatacaagtcaccaaaaactgagaaagactttagtattaatctattttgtgttactacaaaggaatatctgagactgggtaatttataaagaaaggtggcttatttggctcatagttctgttgactgtacacacagcaccagcatctgcttggcttcttatgaggcccaggaagcttttactgatgcctgaaagcaaaaggggagcaggcttgtgacagggcaaaaggagagggagcaagagagagaggaaggaggttccagtctctctaacaacaggatcttgcgtgaactcattaccatgggaagagcaccacttcattcatgaagagtctgcccccatgaccccaacacctcccacctggcctcatccccaacactgggggtcacatttcaacataagatttgtaggggacaaaatccaaattgtatcagcttcttctctggaatggcttatagaggtattttccaagcctaacagagtaaatgaaagcattctctgagtctcaccacaggtaatagaaaatgtgatttacaactcagccacttcaggaagcacctaggaattcaggaattattaatttagcaacatttttgtttttacatattatagaagtgaattatctaagttatgtagtcatgttttattaatcatttttatgcccaaggatccaagcaggagtcaactatatcaaatctgcggtttactatatttttgcaggtatcgcatcagaa

SEQ ID NO: 697960 - DNA, 1834 bp, Homo sapiens
ttagtgcacagaaacactactgatttttgtatgttgacttttttatcctgaaattttgaaattttttttcagatctaaaggtttttgatgaagtttttaaagttttctaaatataagcttacatcatttgaaaatagggataatttgatttcctctctttcaatttggatgtcttttatttctttctttggcctgattgctctggttggaactttccagtactatgttgaataggagtggtgggagtggccatccttgtcttgtgccaaagactgaaaaggctgtcacctgtttttttgttgttggttttttgaagctggaaggaaagtttaaagattttaattcaaaatatttttctaaacgtacaaatatatatttaagtgtcttcaaattccttttgaactaacaaaagtagtggattgttaacttatttgattttaaggcgagaaccgttcatttcctggtacctattttaacctgcaggcaatctggaagtggaacttgtccattccttcctaagacagtacatttatatggcttttgatacaacaggctcagaaatgcccttctcattttcacatttgtaactttgtttagatgaagacggtacatatatatttatttggggccaaataaaattatcaggaaaattttttttctcatattaatttatctcagagatgaattaaatattttttgtactactgaaagggcataaaatatgcatatttgataactttatgtaagagttaattgagaaatcagaaagccttgaatttgttttgcatttaaactatcccttgaagccctatgaagacactatttggaaaagtattgcactaacattcagactcctttcaaagacaaattttatcataaaataataatagactgggagcctggtaaacctgacgggcaaagtgcaaagcttctatgttaaattatgcttcccaggcccaagctggggtgtggtagttctggaaggagaaaagaaagacacaagagaaggaagggagagtgccattctgatttgtcttaggactggacatgattagtgacgtagagaggagacacaattttattttagtttactttacaaaagatacaagtcaccaaaaactgagaaagactttagtattaatctattttgtgttactacaaaggaatatctgagactgggtaatttataaagaaaggtggcttatttggctcatagttctgttgactgtacacacagcaccagcatctgcttggcttcttatgaggcccaggaagcttttactgatgcctgaaagcaaaaggggagcaggcttgtgacagggcaaaaggagagggagcaagagagagaggaaggaggttccagtctctctaacaacaggatcttgcgtgaactcattaccatgggaagagcaccacttcattcatgaagagtctgcccccatgaccccaacacctcccacctggcctcatccccaacactgggggtcacatttcaacataagatttgtaggggacaaaatccaaattgtatcagcttcttctctggartggcttatagaggtattttccaagcctaacagagtaaatgaaagcattctctgagtctcaccacaggtaatagaaaatgtgatttacaactcagccacttcaggaagcacctaggaattcaggaattattaatttagcaacatttttgtttttacatattatagaagtgaattatctaagttatgtagtcatgttttattaatcatttttatgcccaaggatccaagcaggagtcaactatatcaaatctgcggtttactatatttttgcaggtatcgcatcagaa

SEQ ID NO: 697961 - DNA, 622 bp, Homo sapiens
aacagataccatgaccctaagcttcagatagtttgcagggggtctgctgtttcccactcccaccggtttttaggtagaaaatacgcacgcattgaaacagaagatccctggagagaaaggaagatgctgcgtaggtgactgtctcctttgagcatctttaaggaggatcatttaatcacttaaacaaggtttctggggatgtcaaggatctctgtgagccacaaaagaagtgtgatgtagggaaaatggcagaaaaggtgcatctatttcatctagaactamattttacgattcctaattcaaaaaatatactgaagaagcatattatcactttcacaagaaaaaaattatatcaaatatacctctgttctttcttatcatggcagctcagaaaaacagtgacaccactatctcctgtggttctgaacaggccacacagattcatccctgagctctctgtctctgagttttttcagattaacttctgagctctctggtatctgcacttcctgagagtgccagaagaatcaaatattactctgggaggtaaaaagagtaaaaagcaaattcattcgcccttcactctcagggccactgctgaaaccgtcgaaatgaacagcag

SEQ ID NO: 697962 - DNA, 622 bp, Homo sapiens
aacagataccatgaccctaagcttcagatagtttgcagggggtctgctgtttcccactcccaccggtttttaggtagaaaatacgcacgcattgaaacagaagatccctggagagaaaggaagatgctgcgtaggtgactgtctcctttgagcatctttaaggaggatcatttaatcacttaaacaaggtttctggggatgtcaaggatctctgtgagccacaaaagaagtgtgatgtagggaaaatggcagaaaaggtgcatctatttcatctagaactacattttacgattcctaattcaaaaaatatactgaagaagcatattatcactttcacaagaaaaaaattatatcaaatatacctctgttctttcttatcatggcagctcagaaaaacagtgacaccactatctyctgtggttctgaacaggccacacagattcatccctgagctctctgtctctgagttttttcagattaacttctgagctctctggtatctgcacttcctgagagtgccagaagaatcaaatattactctgggaggtaaaaagagtaaaaagcaaattcattcgcccttcactctcagggccactgctgaaaccgtcgaaatgaacagcag

SEQ ID NO: 697963 - DNA, 671 bp, Homo sapiens
tattgttattggcatagttgaagcgcgatagacacagatgtggtcccagaagatgctaagaaggaagagaattttgaggagtcacagtagtgctacacggcccagggctaagagtagctcccagaacttccacctgcagctctctggtgagatatcagccatgtgaacaaacctacccctaatagaggctgggagatacagggcagccatagcacaagatgtgtttggttggacaactagctctttccatcctgtgtgtaatatttggacaagctaatcaggtgcatacctgtgttcaggcaaaggtagcacattcagagaaaagttagcctcattaatgcaaaattatgaagtggggttcctaaacatatcatgcttccctactctgagcactaaaaccttaactctagtattaacgtctacccatcaaggtatctattttgctgtaatagtatctcctagaaaggctctttaacttggagcctgttggggacaaaggaagagtttgcgcagaatgactgaatccacacactacacygaaaatattcaacacttcagaggacactataaagctcatatagagggtcttgcactggtccgcagggccttctccatgatgggcaggtaagaatgtaatgacagtggctttggggacattccagaatctgcta

SEQ ID NO: 697964 - DNA, 1623 bp, Homo sapiens
tattttttgaatgaataagtaaatgaatgacttccccttctggaatgttttcttttctgcctatgtaaacctgttatattctttagccccctgttgaaatctcatccttctgtggaggcttcattcatctcagtttgtgtgaaggcatcatcttgcactgttcaagtggcagcaaatgctactacggtttaatttttcttgtgtgtaggatgtgtcctcccaagtggatttgaagcttcacaagggcagagacaggattccaagcctcctgtgcccttcatgtccaggggtctcaccaagcaagtgcttggtacctactggagtgattggtgaagatcgtcacatgggcaggtgtgkccatctacagctttgggtatcagtgaatgcattctcaatggatcaatatggccccctgggggcaaaaataggtttccagggctgtgatgaaaaaagtctcagcattactagtttgtggcccactaaaggccagttctacccaacaaaacttattccttagtattgcattttatgtggggtgggtgggcgtggcaatcaggaaagaaagtctaaaaagattccacagggaggagaaaatggaaaaatatgtttgagaaatcctggtttagtactatgggaagctggaacactgaaggcaaatagttatgcgagaattgcatgatgaatgtaagaaaggaatctatggataattgaatttaatgaggaaactcaaactgggctttctcccgcacctctgcaacgggtgcgtccctctgggcccgaggtctgtgctctcttgggttaggtactcactctggggaaagcggggtgggttatcattgacatctgagagggtgatgttcactgttgtggtcccagctaatcctccaagctgccctcccatgtccttggcttggataatcacttcgtagtattctttggcttctctgtccatgttcatgagcgctgtcctaattacacctggaggatagaaatgactttgtttataaaaataaaaccacaggtccagtttttaaagattggtttctaggtgtctccctggtgcaccattaatgcctagaagtgaggtgcaagtcacctgtgcttttaaatttgaggtaaaaaaatctcagcttcaaaaatgggctgtactgaaaccagtggtgaatgaaaacttttattccagcaggaagagctcagagggctggtttcttctggcaacattactgaaagtgaacaggaggtggcagcaatgtttctcttacagatctgggaaattgtggtccaaggcgatttcagacagtgctgtctcaccaaggaaaactgggggctttgggtccagaaaacaaagcctcataagtctacaaatctgtgaatttagataattctccctcagtttcttcagcccctagagcccttgtagtgtgaatggctcttctttaggtaactcattcctgctttttcttgcttccctactacctgtaagcagggttggaattctaattggattttcctgttgttacatattcattctgttttgtgacattcttctgtttacctctgtgcttttaattttgtgagctaggacatgaaagatgctctgtgagctgtttatttttaccatgc

SEQ ID NO: 697965 - DNA, 626 bp, Homo sapiens
tctgcttttttttctttttctatagatctkcctggtgcagaattcacattctacatttcactatgtgctggtaaattcactccatcaaatcatcaccaatgtaagtccaataggcattgctaaactactaaaaaaaaaaatttcattattttctttgcatatttctttttacgaaacgcgctcttggttttcaaaaaggttctgaatttagatgtacggaataggaaaatttctccacggtgattatatttgataattgataaatacttgtatttttcatagtaagccttgaccgaagggcccatattaaggaagatggagttaataagatgctttggaaagataaatctaaagcattttattcagatcaaaagccctagagaaaaatggcactgaaaatataatataaaattttcatcccaaagcttttcaaacatattatttgaatactcttagccctttcacagcatttgatacattgacttgccaccttaccatttaagttaaaagtaatagtatttatgttgtagtccagtatagcacactgacaaaatgatgggactatatttgatggtactttaaaaccttttgatcttaaatttattcatattgtaaaatttcatttt

SEQ ID NO: 697966 - DNA, 626 bp, Homo sapiens
tctgcttttttttctttttctatagatctgcctggtgcagaattcacattctacatttcactatgtgctggtaaattcactccatcaaatcatcaccaatgtaagtccaataggcattgctaaactactaaaaaaaaaaatttcattattttctttgcatatttctttttacgaaacgcrctcttggttttcaaaaaggttctgaatttagatgtacggaataggaaaatttctccacggtgattatatttgataattgataaatacttgtatttttcatagtaagccttgaccgaagggcccatattaaggaagatggagttaataagatgctttggaaagataaatctaaagcattttattcagatcaaaagccctagagaaaaatggcactgaaaatataatataaaattttcatcccaaagcttttcaaacatattatttgaatactcttagccctttcacagcatttgatacattgacttgccaccttaccatttaagttaaaagtaatagtatttatgttgtagtccagtatagcacactgacaaaatgatgggactatatttgatggtactttaaaaccttttgatcttaaatttattcatattgtaaaatttcatttt

SEQ ID NO: 697967 - DNA, 626 bp, Homo sapiens
tctgcttttttttctttttctatagatctgcctggtgcagaattcacattctacatttcactatgtgctggtaaattcactccatcaaatcatcaccaatgtaagtccaataggcattgctaaactactaaaaaaaaaaatttcattattttctttgcatatttctttttacgaaacgcgctcttggttttcaaaaaggttctgaatttagatgtacggaataggaaaatttctccacggtgattatatttgataattgataaatacttgtatttttcatagtaagccttgaccgaagggcccatattaaggaagatggagttaataagatgctttggaaagataaatctaaagcattttattcagatcaaaagccctagagaaaaatggcactgaaaatataatataaaattttcatcccaaagcttttcaaacatattatttgaatactcttagccctttcacagcatttgatacrttgacttgccaccttaccatttaagttaaaagtaatagtatttatgttgtagtccagtatagcacactgacaaaatgatgggactatatttgatggtactttaaaaccttttgatcttaaatttattcatattgtaaaatttcatttt

SEQ ID NO: 697968 - DNA, 464 bp, Homo sapiens
cccagtttaaggcctgaggccagctggcccccctccttggggtcagtgggaggaggtggccaggaccctgcatgctgctaggtctcttgtgacattggggtttgatacagcagtgggactggagcagccacgtgcagatggggaggcccccagaggggaggcagcaaggccattgggctggccctgagccccgtctgagcaggtggcacagcccaggtctgtacccttgattctagacagcagcaccaggaccccagcattgagatgtgtgtgggtgggttgttggcaggaagccattctggggcctgatcagagccsctggcccccaggcccctagtcaggccgagaggctcccccagacaaggctgagagctccaggcgagcgacagctggcttccaacactggtgtccccggtgcttgaaggagctgtggcaggaccacacaaggcagagcgggccccttc

SEQ ID NO: 697969 - DNA, 630 bp, Homo sapiens
ggactccacggcttcgcaaagcccggcccagggtctgctggcaggcactgttttccttgggaagttttttccccggactgcctcaacgtctcctttaaaacctggcctcctgttcccttcccccgggggtcttcttgccgctttctggtgcccctagtgggggcgacacacaccctgggtgtaagccagggactccacggccccccgcggcttctgtccttgtttatggtaaaagtagggaactctgcttatgcacatcaacggaatcattattatacgcagaggccttggactggggcattttgtaccccattggctcacctttcgttttaccagagaaggctttcttactgagttttggtcacactccttccccgcccgttgcccctcgttgtgcctgaagattcgctcwtgaacgcctgaggaagaaagtggtctgccttacgaccaaaagcctgtggcaaattttgagtgctttccatcagggccgttgcctggtgtgcatgcactcacccctaaagtccctccctttatccacctttctctctggggcaaaagtcctccccgaggcccatacaccacggtagtacacagaatcttaccacaatcactccgggtacttgcgcgcac

SEQ ID NO: 697970 - DNA, 706 bp, Homo sapiens
cagatttcaaacacatctcttattttttaaagtttgtcattgatttcactgttgtaattttccagtgtcatttatcatccttacttcatttttttttaaatccattatggtttctttcttttcttttttttatttttaagtgtatacctccgtttcattttcttccttttattttaagccatttcctccttcttgtcctgtatgatagggawcatggctttgtgaattttatttaaaatccctgttttcacctgttttaatagtagtatatttacttattgctctccttttaaaaatgttcttatcccattttctctgtagtatttgtgtataggctccacctttatatttgtttttttattggctcaacactctggattagcttagatctatccaatgtcatgtttacaaccagataactcctgttgttttcttactattcacttcttgctggttaaatcccattcatgctgattaaatccacttcatgttgctccagctgggtgacacgttggtgtgtggacctcccagcagctagagaccaggacacatctatgcaatctgactttgctctcaatagtaagtaggtctcttatgtcccaaaccttgttatatcacaaggatgaaaagctactattcctagtacagtaagttcatttcttcaccatcttcctctctctcctactgtataactcattttaactaa

SEQ ID NO: 697971 - DNA, 706 bp, Homo sapiens
cagatttcaaacacatctcttattttttaaagtttgtcattgatttcactgttgtaattttccagtgtcatttatcatccttacttcatttttttttaaatccattatggtttctttcttttcttttttttatttttaagtgtatacctccgtttcattttcttccttttattttaagccatttcctccttcttgtcctgtatgatagggaacatggctttgtgaattttatttaaaatccctgttttcacctgttttaatagtagtatatttacttattgctctccttttaaaaatgttcttatcccattttctctgtagtatttgtgtataggctccacctttatatttgtttttttattggctcaacactctggattagcttagatctatccaatgtcatgtttacaaccagataactcctgttgttttcttactattcacttcttgmtggttaaatcccattcatgctgattaaatccacttcatgttgctccagctgggtgacacgttggtgtgtggacctcccagcagctagagaccaggacacatctatgcaatctgactttgctctcaatagtaagtaggtctcttatgtcccaaaccttgttatatcacaaggatgaaaagctactattcctagtacagtaagttcatttcttcaccatcttcctctctctcctactgtataactcattttaactaa

SEQ ID NO: 697972 - DNA, 630 bp, Homo sapiens
attgaaggtcgccagagttatatggtagatatgaggtgtggtaaggggtcaaaatgacaataactggactattctgactggtgaggygccaattaacgacacccatcttttaattgtagtttactggtaagatcatcgagaaaggagagctcatgtctactgttttgtaatatatatgaagagaacactgtaaataaccttctcttaatctcacaaaaatccctctcctccccacaccagcatgaaaaatcagcttcatccccatgcacaatagccaccaaagtaaaacaagcctttctagttgataacgaaagagaatatagtttgctcctgaacttacccaaaagaagtgctgaaaaattgtgaatatataaaattctgataaaccctttctgtatttccagtttaattttatgatgatatcagttcttttgtctttattttctattattgtttactcatccctcagcattttggactttagggtctttgtctcttatgagctggaaaatcatcatttgacacctgatgcttaaataaacctgaagaggagtcattaaaggaatctctccaaaatgctaagactcactgatatatgtatcaaagagtgagatttctaagaattaaaca

SEQ ID NO: 697973 - DNA, 630 bp, Homo sapiens
attgaaggtcgccagagttatatggtagatatgaggtgtggtaaggggtcaaaatgacaataactggactattctgactggtgaggcgccaattaacgacacccatcttttaattgtagtttactggtaagatcatcgagaaaggagagctcatgtctactgttttgtaatatatatgaagagaacactgtaaataaccttctcttaatctcacaaaaatccctctcctccccacaccagcatgaaaaatcagcttcatccccatgcacaatagccaccaaagtaaaacaagcctttctagttgataacgaaagagaatatagtttgctcctgaacttacccaaaagaagtgctgaaaaattgtgaatatataaaattctgataaaccctttctgtatttccagtttaattttatgatgatatcagttcttttgtctttattttctattattgyttactcatccctcagcattttggactttagggtctttgtctcttatgagctggaaaatcatcatttgacacctgatgcttaaataaacctgaagaggagtcattaaaggaatctctccaaaatgctaagactcactgatatatgtatcaaagagtgagatttctaagaattaaaca

SEQ ID NO: 697974 - DNA, 1503 bp, Homo sapiens
atcccagtgctttgagagtcagaggcaggaggataacctgagaccaggagttcaagaccagtctggacaatgtagtcccccatctctacgaaatatttttgcaggaggattgcttgagcccaggagttcaaggctgcagtaagtcatgatcacaccactacacaccagtctgggcaacagagttggagtgtctctgtttcaaaaaaacagaaattaaaaaaaaaaaaaaaaaaaagcccrggcgcagtggctgactcctgaaatcccaacactttgggaggccaaggtgggcagatcacgaggtcaggagatcgagaccatcctggctaacacagtgagaccccgtctctactaaaatatacaaaaaattagctgggcatggtggcgggtgcctgtagtctcagctgctcaggaggctgaggtgggagaatggcgtgaacccgagaggcggagcttgcagtgagccaagatcatgcactgccctgcagcctgggcaacagagcgagactctgtctcagggaaaaaaaaaaaaaaaaagtcaaagagagcatgattttgctacaaatttctattattaagtgcctctatataatttcccaattagagcctgccttagacttcatacagcatccagatctgccatagacatttgaatctacagaggcatgaagaatacatgacagatcccctggtccagctaaagaggtgtctcttccagagcctgctctgagttggctggcagcctttcaggacacttagttaaaggtttggaatagatgtacagtccccttctaaaatccatagaagacctctaaacattgtgctgcttttttggtacaggagtggaggaagaaaatatagacattgaaaaacagacagaaccagatggtttttgttcatgtctatgctctatccaggaaagatttccatcttacagatctgagaacaaaattaaaatttttttaaagcacactatctgaaaatttaacctggaattaatctgtggaagggagaaataagcaggaaaaaaaatggtttaatgtaagaaaaaggagcctaataatacccattctgcaagttattttaccttattcattaattatttaatctaatatttaatcccctgcacttttgaaaaatacagagattaataaggcacctgtgcaaaaatgactcaaactcataaaacatttcatatttttccaatacctatcagggtatgtggctgtttttacaatctcaagaattgtttctttgaatgactgataagatcattctaaaagaatctcacatcattgctaatatgatagagcagaaatagtctgaactttggaaccagaagacatctagatccaaatcttaccttgaacccttaccagctttgtgacccgggggaaattagttaggcactgtcataggctgaataatggccccccaaagatgtccacatcctaatccccagaacctgtgaatgtgttattttacatagcaaaagggacttta

SEQ ID NO: 697975 - DNA, 1503 bp, Homo sapiens
atcccagtgctttgagagtcagaggcaggaggataacctgagaccaggagttcaagaccagtctggacaatgtagtcccccatctctacgaaatatttttgcaggaggattgcttgagcccaggagttcaaggctgcagtaagtcatgatcacaccactacacaccagtctgggcaacagagttggagtgtctctgtttcaaaaaaacagaaattaaaaaaaaaaaaaaaaaaaagcccgggcgcagtggctgactcctgaaatcccaacactttgggaggccaaggtgggcagatcacgaggtcaggagatcgagaccatcctggctaacacagtgagacccygtctctactaaaatatacaaaaaattagctgggcatggtggcgggtgcctgtagtctcagctgctcaggaggctgaggtgggagaatggcgtgaacccgagaggcggagcttgcagtgagccaagatcatgcactgccctgcagcctgggcaacagagcgagactctgtctcagggaaaaaaaaaaaaaaaaagtcaaagagagcatgattttgctacaaatttctattattaagtgcctctatataatttcccaattagagcctgccttagacttcatacagcatccagatctgccatagacatttgaatctacagaggcatgaagaatacatgacagatcccctggtccagctaaagaggtgtctcttccagagcctgctctgagttggctggcagcctttcaggacacttagttaaaggtttggaatagatgtacagtccccttctaaaatccatagaagacctctaaacattgtgctgcttttttggtacaggagtggaggaagaaaatatagacattgaaaaacagacagaaccagatggtttttgttcatgtctatgctctatccaggaaagatttccatcttacagatctgagaacaaaattaaaatttttttaaagcacactatctgaaaatttaacctggaattaatctgtggaagggagaaataagcaggaaaaaaaatggtttaatgtaagaaaaaggagcctaataatacccattctgcaagttattttaccttattcattaattatttaatctaatatttaatcccctgcacttttgaaaaatacagagattaataaggcacctgtgcaaaaatgactcaaactcataaaacatttcatatttttccaatacctatcagggtatgtggctgtttttacaatctcaagaattgtttctttgaatgactgataagatcattctaaaagaatctcacatcattgctaatatgatagagcagaaatagtctgaactttggaaccagaagacatctagatccaaatcttaccttgaacccttaccagctttgtgacccgggggaaattagttaggcactgtcataggctgaataatggccccccaaagatgtccacatcctaatccccagaacctgtgaatgtgttattttacatagcaaaagggacttta

SEQ ID NO: 697976 - DNA, 1503 bp, Homo sapiens
atcccagtgctttgagagtcagaggcaggaggataacctgagaccaggagttcaagaccagtctggacaatgtagtcccccatctctacgaaatatttttgcaggaggattgcttgagcccaggagttcaaggctgcagtaagtcatgatcacaccactacacaccagtctgggcaacagagttggagtgtctctgtttcaaaaaaacagaaattaaaaaaaaaaaaaaaaaaaagcccgggcgcagtggctgactcctgaaatcccaacactttgggaggccaaggtgggcagatcacgaggtcaggagatcgagaccatcctggctaacacagtgagaccccgtctctactaaaawatacaaaaaattagctgggcatggtggcgggtgcctgtagtctcagctgctcaggaggctgaggtgggagaatggcgtgaacccgagaggcggagcttgcagtgagccaagatcatgcactgccctgcagcctgggcaacagagcgagactctgtctcagggaaaaaaaaaaaaaaaaagtcaaagagagcatgattttgctacaaatttctattattaagtgcctctatataatttcccaattagagcctgccttagacttcatacagcatccagatctgccatagacatttgaatctacagaggcatgaagaatacatgacagatcccctggtccagctaaagaggtgtctcttccagagcctgctctgagttggctggcagcctttcaggacacttagttaaaggtttggaatagatgtacagtccccttctaaaatccatagaagacctctaaacattgtgctgcttttttggtacaggagtggaggaagaaaatatagacattgaaaaacagacagaaccagatggtttttgttcatgtctatgctctatccaggaaagatttccatcttacagatctgagaacaaaattaaaatttttttaaagcacactatctgaaaatttaacctggaattaatctgtggaagggagaaataagcaggaaaaaaaatggtttaatgtaagaaaaaggagcctaataatacccattctgcaagttattttaccttattcattaattatttaatctaatatttaatcccctgcacttttgaaaaatacagagattaataaggcacctgtgcaaaaatgactcaaactcataaaacatttcatatttttccaatacctatcagggtatgtggctgtttttacaatctcaagaattgtttctttgaatgactgataagatcattctaaaagaatctcacatcattgctaatatgatagagcagaaatagtctgaactttggaaccagaagacatctagatccaaatcttaccttgaacccttaccagctttgtgacccgggggaaattagttaggcactgtcataggctgaataatggccccccaaagatgtccacatcctaatccccagaacctgtgaatgtgttattttacatagcaaaagggacttta

SEQ ID NO: 697977 - DNA, 1503 bp, Homo sapiens
atcccagtgctttgagagtcagaggcaggaggataacctgagaccaggagttcaagaccagtctggacaatgtagtcccccatctctacgaaatatttttgcaggaggattgcttgagcccaggagttcaaggctgcagtaagtcatgatcacaccactacacaccagtctgggcaacagagttggagtgtctctgtttcaaaaaaacagaaattaaaaaaaaaaaaaaaaaaaagcccgggcgcagtggctgactcctgaaatcccaacactttgggaggccaaggtgggcagatcacgaggtcaggagatcgagaccatcctggctaacacagtgagaccccgtctctactaaaatatacaaaaaattagctgggcatggtggcgggtgcctgtagtcycagctgctcaggaggctgaggtgggagaatggcgtgaacccgagaggcggagcttgcagtgagccaagatcatgcactgccctgcagcctgggcaacagagcgagactctgtctcagggaaaaaaaaaaaaaaaaagtcaaagagagcatgattttgctacaaatttctattattaagtgcctctatataatttcccaattagagcctgccttagacttcatacagcatccagatctgccatagacatttgaatctacagaggcatgaagaatacatgacagatcccctggtccagctaaagaggtgtctcttccagagcctgctctgagttggctggcagcctttcaggacacttagttaaaggtttggaatagatgtacagtccccttctaaaatccatagaagacctctaaacattgtgctgcttttttggtacaggagtggaggaagaaaatatagacattgaaaaacagacagaaccagatggtttttgttcatgtctatgctctatccaggaaagatttccatcttacagatctgagaacaaaattaaaatttttttaaagcacactatctgaaaatttaacctggaattaatctgtggaagggagaaataagcaggaaaaaaaatggtttaatgtaagaaaaaggagcctaataatacccattctgcaagttattttaccttattcattaattatttaatctaatatttaatcccctgcacttttgaaaaatacagagattaataaggcacctgtgcaaaaatgactcaaactcataaaacatttcatatttttccaatacctatcagggtatgtggctgtttttacaatctcaagaattgtttctttgaatgactgataagatcattctaaaagaatctcacatcattgctaatatgatagagcagaaatagtctgaactttggaaccagaagacatctagatccaaatcttaccttgaacccttaccagctttgtgacccgggggaaattagttaggcactgtcataggctgaataatggccccccaaagatgtccacatcctaatccccagaacctgtgaatgtgttattttacatagcaaaagggacttta

SEQ ID NO: 697978 - DNA, 1503 bp, Homo sapiens
atcccagtgctttgagagtcagaggcaggaggataacctgagaccaggagttcaagaccagtctggacaatgtagtcccccatctctacgaaatatttttgcaggaggattgcttgagcccaggagttcaaggctgcagtaagtcatgatcacaccactacacaccagtctgggcaacagagttggagtgtctctgtttcaaaaaaacagaaattaaaaaaaaaaaaaaaaaaaagcccgggcgcagtggctgactcctgaaatcccaacactttgggaggccaaggtgggcagatcacgaggtcaggagatcgagaccatcctggctaacacagtgagaccccgtctctactaaaatatacaaaaaattagctgggcatggtggcgggtgcctgtagtctcagctgctcaggaggctgaggtgggagaatggcgtgaacccgagaggcggagcttgcagtgagccaagatcatgcactgccctgcagcctgggcaacagagcgagactctgtctcagggraaaaaaaaaaaaaaaagtcaaagagagcatgattttgctacaaatttctattattaagtgcctctatataatttcccaattagagcctgccttagacttcatacagcatccagatctgccatagacatttgaatctacagaggcatgaagaatacatgacagatcccctggtccagctaaagaggtgtctcttccagagcctgctctgagttggctggcagcctttcaggacacttagttaaaggtttggaatagatgtacagtccccttctaaaatccatagaagacctctaaacattgtgctgcttttttggtacaggagtggaggaagaaaatatagacattgaaaaacagacagaaccagatggtttttgttcatgtctatgctctatccaggaaagatttccatcttacagatctgagaacaaaattaaaatttttttaaagcacactatctgaaaatttaacctggaattaatctgtggaagggagaaataagcaggaaaaaaaatggtttaatgtaagaaaaaggagcctaataatacccattctgcaagttattttaccttattcattaattatttaatctaatatttaatcccctgcacttttgaaaaatacagagattaataaggcacctgtgcaaaaatgactcaaactcataaaacatttcatatttttccaatacctatcagggtatgtggctgtttttacaatctcaagaattgtttctttgaatgactgataagatcattctaaaagaatctcacatcattgctaatatgatagagcagaaatagtctgaactttggaaccagaagacatctagatccaaatcttaccttgaacccttaccagctttgtgacccgggggaaattagttaggcactgtcataggctgaataatggccccccaaagatgtccacatcctaatccccagaacctgtgaatgtgttattttacatagcaaaagggacttta

SEQ ID NO: 697979 - DNA, 1503 bp, Homo sapiens
atcccagtgctttgagagtcagaggcaggaggataacctgagaccaggagttcaagaccagtctggacaatgtagtcccccatctctacgaaatatttttgcaggaggattgcttgagcccaggagttcaaggctgcagtaagtcatgatcacaccactacacaccagtctgggcaacagagttggagtgtctctgtttcaaaaaaacagaaattaaaaaaaaaaaaaaaaaaaagcccgggcgcagtggctgactcctgaaatcccaacactttgggaggccaaggtgggcagatcacgaggtcaggagatcgagaccatcctggctaacacagtgagaccccgtctctactaaaatatacaaaaaattagctgggcatggtggcgggtgcctgtagtctcagctgctcaggaggctgaggtgggagaatggcgtgaacccgagaggcggagcttgcagtgagccaagatcatgcactgccctgcagcctgggcaacagagcgagactctgtctcagggaaaaaaaaaaaaaaaaagtcaaagagagcatgattttgctacaaatttctattattaagtgcctctatataatttcccaattagagcctgccttagacttcatacagcatccagatctgccatagacatttgaatctacagaggcatgaagaatacatgacagatcccctggtccagctaaagaggtgtctcttccagagcctgctctgagttggctggcagcctttcaggacacttagttaaaggtttggaatagatgtacagtccccttctaaaatccatagaagacctctaaacattgtgctgcttttttggtacaggagtggaggaagaaaatatagacattgaaaaacagacagaaccagatggtttttgttcatgtctatgctctatccaggaaagatttccatcttacagatctgagaacaaaattaaaatttttttaaagcacactatctgaaaatttaacctggaattaatctgtggaagggagaaataagcaggaaaaaaaatggtttaatgtaagaaaaaggagcctaataatacccattctgcaagttattttaycttattcattaattatttaatctaatatttaatcccctgcacttttgaaaaatacagagattaataaggcacctgtgcaaaaatgactcaaactcataaaacatttcatatttttccaatacctatcagggtatgtggctgtttttacaatctcaagaattgtttctttgaatgactgataagatcattctaaaagaatctcacatcattgctaatatgatagagcagaaatagtctgaactttggaaccagaagacatctagatccaaatcttaccttgaacccttaccagctttgtgacccgggggaaattagttaggcactgtcataggctgaataatggccccccaaagatgtccacatcctaatccccagaacctgtgaatgtgttattttacatagcaaaagggacttta

SEQ ID NO: 697980 - DNA, 666 bp, Homo sapiens
ggccactatttccaactgcgtaactattcaacttccattcgaatacctaacactcttcactctccaagtacactcacctgttaattaagtgatacttaatgtactgatactactatgtgcaaagccatgtgccaggtgcccctacaatagaacatgacattgcaagttgcaaaagctttggcagaattttccagtcagatggtacagcttttgcaaagacatagagatctgaagggtttgatatgtcttgggagttgagtagttcagtgcatgtaaggcacctaaccagtgcttctcaaactttgtgcatctgaatgattcttacaaggaagtctaggtggggcttgtgagtttgcattttaacaagttttacatgatgtcactgctgaccacgttttgtgtgggcaaagatctaaaggccatactgagagcttggtgggagctgacaggtctgtcaggttatgcaccctaaccccacggtactaagacatttgtggaagtgtcgagaagtaaggttatacgctgagatttattttattgaatggtagctatgtagcagttctcaaggaaggtagaactratagagctaacacaggaatcctctgggatgatctggacgtaagcagtccctgttgaaacgcagcagaagagagttgggcttctgct

SEQ ID NO: 697981 - DNA, 646 bp, Homo sapiens
ggcaaagctgatattgtttgaaattaaagagataatttcatcattatcctattttttttcctatgcatacaataaactagaggaagagaaagggagaaaaacagggtaccatcctctgtttgctgtttcaaaaaagacgtttaatttataaatgttattatttatagcaatcaatttttatcatcctcattgatcctcattgcaataaaacacaaatttcattgctgcctttacgattttctgataatttgtgatctatagacagtaaagatattggaattaaaaagtaaaatgtggctgggtgtggtggttaatgcctgtaattctagcactttgggagggcaaggcaggaggattgcttgagcccaggaatttgagaccagcctgggagatatagtgagaccctggctcaaaaaartaaataagtaaataaataaataataaaacgtaattatattcaaagtgtacaaaatttgatgatgaacatgtacaaagtataccaaatttgattattactttcatcaaaatatggaaattaaagaaacatgaaagatcaaaacatgaacagttttcatatttttttaaatgttattttttgaaaactacaaatgagaattaaggaatatcacaatttcaaatcaaaatt

SEQ ID NO: 697982 - DNA, 599 bp, Homo sapiens
ctcttcttcyttctaccaccctccacctttatcttccttccttctcccttctcctcctcctcttccttctctctttcttcccctccccctctttctctttcatcctttttcttccttcttgctgctatttttcttaaatcttcatggacactgtgtacagaaaatagatagggaggaactaacatcatttgtctttgctacactcttgttatctttatactctcagttccctgcagattcacatcccctccccaatatagatcaattgagctgagaggctgcaaccagaccgaagtttgttgatttttaaaaataatttatattgtatatattaaaggtagacaacatgatgttataatatacatacagatggcaaaatggttaatatagtaaagcaaatcaacatattcattatctcacttagtaacctgctttttaaaatgtgttttgtttttcttgagcaaaagcagctaaaatctattaatttagcaaaaatggtgaatacaatacaatattattaactattgtcctcatattttatattagatctctaggcttgtttatcctctatatctgccactttgtatcctttgacctac

SEQ ID NO: 697983 - DNA, 308 bp, Homo sapiens
ttaatacagattcctaactaagcctaaagtcaaagtaatgtctgttttaggccaagagctaattacaaaactagttattgtatatcgctttatagtttataacacatttttgcacacttcactgagttactaaattagtaagaattgtagttagttaaaggtaaaatccttgactattcaaagacctaggctttgaacctgtacagcatatgactgtactgaatactataggcaattataaggcaatgtatttgtgtatctggacatactaaaggwatagtaaaaatactgtataaaagaaaaaaatg

SEQ ID NO: 697984 - DNA, 587 bp, Homo sapiens
tctttagtctgcasagcaatatcactctcaacctttatgctataccaggccatggaactaactttgagaagctaaaatattcattaacaactttcttaaacaaaattgtcatttacctctgaagcagatgctgcctttgcctggaaagtgaaaacacattttattttttaaaaataacaacgatggtatatagatgcatgcgtatgtgtatatatgctttcttttatacctagaggtgctgcccttactgtgagaaattgttcattcaggtagctgtgtctttaccattatgatagcttatatggatgtacatctaactgtattatatacacatgtataacacatgtatatacagtgtatgttttgatgtttacccacaataagaacactttcttgctgaatacaattttaaaaactcaatttgtctctggaaatttagggaccaaaaaaaacctccaaaaatcagtacttttgtctgaaaattacccaggaattaaaatatgtattgtcaggttcattttgcccttcctatgaaacagcattttgttacacaacttcattattaaaacattattttttatgtgtcc

SEQ ID NO: 697985 - DNA, 655 bp, Homo sapiens
tagatatcaataagtagaattctttttatatgggagttactgggtgagtccaacttgaagttgaggatattttagacaaagacaaaagcataatgtagataaatgcatcaagcataaaaaggaaaagatcaaagtgaagaaaagaaaagtaatggagataaacccagaaaggtggacttggagtaatcatggggacccttgagctttatttggcaagtaaaggctaaacttactgaaggtttatatgcaggaagtttgcatgatcattgctgagctttataaataatttagtagaagtatataaaattaaataaaatatataaatactaacaatggggagtaaaattaggaagaccattttcataaccttctcaaacatgtgaaaaaagaaaaaatgtgccactccacacactrgagtgaaatgaatggaatgaacagcagtagagaaaagacattctgagtgtccaaatcttagtgtctgagacatagtattatcattagaaatgggcaacacagaagatgattggatttgcttaggtttttaaaggaggatgatgaaattttgctggaaactgagaattggagttgacagcatgctatacacatgacacttccctagcggcatttggaaatgcctagagaagttaaagcttga

SEQ ID NO: 697986 - DNA, 579 bp, Homo sapiens
tttacagtgtgcaaaagtattttacctttgcataagtgtttgataaaaatgaactgttctaatatttatttttatggcatctcatttttcaatacatgctcttttgattaaagaaacttattactgttgtcaactgaattcacacacacacaaatatagtaccatagaaaaagtttgttttctcgaaataattcatctttcagcttctctgcttttggtcaatgtctaggaaatctcttcagaaataagaagctatttcattaagtgtgatataaacctcctcaaacattttacttagaggcaaggattgtctaatttcaattgtgcaagacatgtgccttataattatttttagcttaaaattaaacagattttgtaataatrtaactttgttaataggtgcataaacactaatgcagtcaatttgaacaaaagaagtgacatacacaatataaatcatatgtcttcacacgttgcctatataatgagaagcagctctctgagggttctgaaatcaatgtggtccctctcttgcccactaaacaaagatggttgttcggggtttgggattgacactgg

SEQ ID NO: 697987 - DNA, 579 bp, Homo sapiens
tttacagtgtgcaaaagtattttacctttgcataagtgtttgataaaaatgaactgttctaatatttatttttatggcatctcatttttcaatacatgctcttttgattaaagaaacttattactgttgtcaactgaattcacacacacacaaatatagtaccatagaaaaagtttgttttctcgaaataattcatctttcagcttctctgcttttggtcaatgtctaggaaatctcttcagaaataagaagctatttcattaagtgtgatataaacctcctcaaacattttacttagaggcaaggattgtctaatttcaattgtgcaagacatgtgccttataattatttttagcttaaaattaaacagattttgtaataatgtaactttgttaataggtgcataaacactaatgcagtcaatttgaacaaaagaagtgrcatacacaatataaatcatatgtcttcacacgttgcctatataatgagaagcagctctctgagggttctgaaatcaatgtggtccctctcttgcccactaaacaaagatggttgttcggggtttgggattgacactgg

SEQ ID NO: 697988 - DNA, 579 bp, Homo sapiens
tttacagtgtgcaaaagtattttacctttgcataagtgtttgataaaaatgaactgttctaatatttatttttatggcatctcatttttcaatacatgctcttttgattaaagaaacttattactgttgtcaactgaattcacacacacacaaatatagtaccatagaaaaagtttgttttctcgaaataattcatctttcagcttctctgcttttggtcaatgtctaggaaatctcttcagaaataagaagctatttcattaagtgtgatataaacctcctcaaacattttacttagaggcaaggattgtctaatttcaattgtgcaagacatgtgccttataattatttttagcttaaaattaaacagattttgtaataatgtaactttgttaataggtgcataaacactaatgcagtcaatttgaacaaaagaagtgacatacacaatataaatcatatgtcttcacacgttgcctatataatgagaagcagctctctgagggttctgaaatcaatgtggtccctcwcttgcccactaaacaaagatggttgttcggggtttgggattgacactgg

SEQ ID NO: 697989 - DNA, 543 bp, Homo sapiens
ggtgtatctgttgcgttagcatttttagaatatatttttgctatatgttttgaaatgcagaagaaatgtggaacaatcttcaggtactaaaaaacaaataataccctgctggtcagtctatctttcccaactgttgttagaatcagaccattggaaaggtrttaaaaggaatcgtgtgtttagtggtgatacgatttggctgtttccccacccacatctcaccttgaattgtaataatccccatgtgtcaagggtggggccaggtggagataattgaatcatgggggtggtttcccccatactgttctgatggtagtggataaggaaagtggaaaggaaatggaagaagttctcctgcatacgctctcttgcctgtctccatgtaagacatgcctttgctcctcctttgccttccaccatgattgtgaggcctctccagctatgtggaactgtgagttcattaaatgatgtctttctttcctttataaattacccagtcttgggtatgtctttattagcagtaagaaaatggactaaaacacg

SEQ ID NO: 697990 - DNA, 647 bp, Homo sapiens
aagtttagcctacacctgcctccttacatattttaagtttggcttaaaggtttctctgtatttagtgaactgtaacttaactggatgtataaacagactgtaactttctcttgggccaatcgccatgtttcagctgatcagaggctcaaattstgttcaaataaggcaaagctgagcagtaagcagtctggctgtctctgttttgtgtatgtcagttttctttttctattcataattcttcaaccatgtggaaaccctggagtctctttgaacctattctggataaggacctgctcaattctccaatcattttttgctcagttaaactctgtgaaacctaattcgtctaaggtttttcttttaaaaaacttaagatttagttttcctggtttgaaattgagtgttgagaaaatatttttgcgtgtctgcacagtcatggctttctcaaaacattttcctgaaaaagtggaatcttggtcttatagccagacttgcaagttaatttgcagctgtattcatagtgaaagaactccttggaaatttagctaactccaaagatatttgtttatatttcaagggcaaatgaggcccattactttggagacaaatctggctgcagatactggacttatcagccctttggaaaa

SEQ ID NO: 697991 - DNA, 647 bp, Homo sapiens
aagtttagcctacacctgcctccttacatattttaagtttggcttaaaggtttctctgtatttagtgaactgtaacttaactggatgtataaacagactgtaactttctcttgggccaatcgccatgtttcagctgatcagaggctcaaattgtgttcaaataaggcaaagctgagcagtaagcagtctggctgtctctgttttgtgtatgtcagttttctttttctattcataattcttcaaccatgtggaaaccctggagtctctttgaacctattctggataaggacctgctcaattctccaatcattttttgctcagttaaactctgtgaaacctaattcgtctaaggtttttcttttaaaaaacttaagatttagttttcctggtttgaaattgagtgttgagaaaatatttttgcgtgtctgcacagtcatggctttctcaaaacattttcctgaaaaagtggaatcttggtcttatagccagacttgcaagttaatttgcagctgtattcatagtgaaagaactccttggaaatttagctaactccaaagatatttgtttrtatttcaagggcaaatgaggcccattactttggagacaaatctggctgcagatactggacttatcagccctttggaaaa

SEQ ID NO: 697992 - DNA, 1287 bp, Homo sapiens
attctacttttataaaaagaaaaaccgtactatttaaaaaaaaacattttaaagcaaaggaatgttaatattcttagtcaggggaagagatttttcttcttaaaagcaaagtaaaagaagatggggggagtggggagtgtaagtaatcatctctataagaatacgtatgaattctctcattctatgttcagggtttttcacgttttcctaatatacattctcacgtaagaactccagagagtttcctcatttcatttgcttgatacatctttacttggaaagtaataatttggtctttttatatcaatcccatggctacagaagataaaatattcttttaagtcatcatgggagttcatagaatcatgtttcccctatgtaaaaaatacctccttctatcttttcctcccatggatgcctttgttctctcatgctctttccacaacaattttcaaaaatttttaatgaatttcaaagtgggatacacatttaatacaatgtaggagaaaatttgaaagaaaagtaatcagacaaatgataatatcagaaaatacaatgagacggggatggaggataccatgttttacttttttcatataagttgaatagcatatatatatacatatatatatatatatatatatatatttgaggtgtattaactatcattgtaacataataatgattgtaaaatgaccccaagatttccaacctttgttccacatgatttatataatttcctcatcttaagtgtactcagaacctttgagtttgatgcaataatactctcatgattatgccatattacgtgaaaaaggagattttgcagatgtactaaagtcactaattagttgaccttgaaaaataaaataggagattatatatgttggcctgacctacgtgagtcttttgtatataggtctagaagtcagagtgaaggaaattcaggttaaaagcracaaagatattttctttctggccttgaaggaacaactgccatgttgtggagagagcagaaaacagcaggcaatctcccagccctgagaatggcctcctcttcccaacagccagcaggaaggctggaatctcagtcctacgaccaaaagaaactctattctaacaggccaaatcagtctggaagaagatcttaagcttcaggtaaggcaccttgctttcagaccattagcaaaaaatgtacccactttgtgcaaactactttcaagaaaagctggactaatttacattcccaacaacagtgtataagcattttttttatccacaattttg

SEQ ID NO: 697993 - DNA, 1287 bp, Homo sapiens
attctacttttataaaaagaaaaaccgtactatttaaaaaaaaacattttaaagcaaaggaatgttaatattcttagtcaggggaagagatttttcttcttaaaagcaaagtaaaagaagatggggggagtggggagtgtaagtaatcatctctataagaatacgtatgaattctctcattctatgttcagggtttttcacgttttcctaatatacattctcacgtaagaactccagagagtttcctcatttcatttgcttgatacatctttacttggaaagtaataatttggtctttttatatcaatcccatggctacagaagataaaatattcttttaagtcatcatgggagttcatagaatcatgtttcccctatgtaaaaaatacctccttctatcttttcctcccatggatgcctttgttctctcatgctctttccacaacaattttcaaaaatttttaatgaatttcaaagtgggatacacatttaatacaatgtaggagaaaatttgaaagaaaagtaatcagacaaatgataatatcagaaaatacaatgagacggggatggaggataccatgttttacttttttcatataagttgaatagcatatatatatacatatatatatatatatatatatatatttgaggtgtattaactatcattgtaacataataatgattgtaaaatgaccccaagatttccaacctttgttccacatgatttatataatttcctcatcttaagtgtactcagaacctttgagtttgatgcaataatactctcatgattatgccatattacgtgaaaaaggagattttgcagatgtactaaagtcactaattagttgaccttgaaaaataaaataggagattatatatgttggcctgacctacgtgagtcttttgtatataggtctagaagtcagagtgaaggaaattcaggttaaaagcgacaaagatattttctttctggccttgaaggaacaactgccatgttgtggagagagcagaaaacagyaggcaatctcccagccctgagaatggcctcctcttcccaacagccagcaggaaggctggaatctcagtcctacgaccaaaagaaactctattctaacaggccaaatcagtctggaagaagatcttaagcttcaggtaaggcaccttgctttcagaccattagcaaaaaatgtacccactttgtgcaaactactttcaagaaaagctggactaatttacattcccaacaacagtgtataagcattttttttatccacaattttg

SEQ ID NO: 697994 - DNA, 1287 bp, Homo sapiens
attctacttttataaaaagaaaaaccgtactatttaaaaaaaaacattttaaagcaaaggaatgttaatattcttagtcaggggaagagatttttcttcttaaaagcaaagtaaaagaagatggggggagtggggagtgtaagtaatcatctctataagaatacgtatgaattctctcattctatgttcagggtttttcacgttttcctaatatacattctcacgtaagaactccagagagtttcctcatttcatttgcttgatacatctttacttggaaagtaataatttggtctttttatatcaatcccatggctacagaagataaaatattcttttaagtcatcatgggagttcatagaatcatgtttcccctatgtaaaaaatacctccttctatcttttcctcccatggatgcctttgttctctcatgctctttccacaacaattttcaaaaatttttaatgaatttcaaagtgggatacacatttaatacaatgtaggagaaaatttgaaagaaaagtaatcagacaaatgataatatcagaaaatacaatgagacggggatggaggataccatgttttacttttttcatataagttgaatagcatatatatatacatatatatatatatatatatatatatttgaggtgtattaactatcattgtaacataataatgattgtaaaatgaccccaagatttccaacctttgttccacatgatttatataatttcctcatcttaagtgtactcagaacctttgagtttgatgcaataatactctcatgattatgccatattacgtgaaaaaggagattttgcagatgtactaaagtcactaattagttgaccttgaaaaataaaataggagattatatatgttggcctgacctacgtgagtcttttgtatataggtctagaagtcagagtgaaggaaattcaggttaaaagcgacaaagatattttctttctggccttgaaggaacaactgccatgttgtggagagagcagaaaacagcmggcaatctcccagccctgagaatggcctcctcttcccaacagccagcaggaaggctggaatctcagtcctacgaccaaaagaaactctattctaacaggccaaatcagtctggaagaagatcttaagcttcaggtaaggcaccttgctttcagaccattagcaaaaaatgtacccactttgtgcaaactactttcaagaaaagctggactaatttacattcccaacaacagtgtataagcattttttttatccacaattttg

SEQ ID NO: 697995 - DNA, 612 bp, Homo sapiens
ggttcaacttttattacagagtaaaggttacacatgtctttttcttaaagcagttgagttgggggcaaacagggaacaagacatcagggagcatggagtggggaacacctcctcaccaatatgcctgccacgtttgtttttcatgtgatgcagagagatgaatcaagtgtcttttattttcagtttagccctctaccagcttttgacgcctttaccatctattatacctccttcctagaaaagtaagtataagaaaaaggctcatttatgtgacttggtacaatcatcctactcctcagcattactaaaactcaaggtagttggggtggaccttacctacaccccactccctttggccacaactggggctccagggagtattcttacgtcccacaacttggcccatatagggcccttgttctttcctttttcagaaaactctgtctctgtcataattccatcctccgatcrtctcaaaaattgccaaggtttgtcaacggtctaagattttactctactggcaagctaacacatttggttgtcacaatttcatggaaactggcagaaggcatgagactcctgggtcagagacaaagaactttattaattatg

SEQ ID NO: 697996 - DNA, 2151 bp, Homo sapiens
tcctgacataaagttctttgtggcttctatcctggcattgtaatggactttttcttacaaatgattaaattactcatatttttagtgagcatttaaggtcactagagtccatttgaggaatattctcattcaaatataccagtgactcacttttagaaaggaacaattcattcatttatgaatcaacctggatccaatgctctgatattttaaaagggaccaatgttaattattgaagagtagatttcatattcataaatattttattaatatgcctttatgaaatggttgtaagtccaattctgatcaagatcatctgtgtatttttccctgttttaaaatattgaatcaacgacttgaagagttatttatttgaaagagaatagagacgataaatttaacattttagaaagtaacctattatttaaatggattttagatatttgaagggtgatattgctctgtaattagaaaactgaagaagcagatatttcaaaacaatatgaacttaattggaaaagacagcattttaaactccacatgaaaagccatcctgtttctcaacctaactaatatgtgtttcagtgagatagatgctactttctttttcttttactttcttatcatactaataattttttaaaatttgatgtaagtggctgggcgctgtggctcacgcctgtaatcccagcattttgggaggccgaggtgggtggatctacctgaggtcaggagtttgagaccagcctggcccaccaggtgaaaccccgtctctactaaaaatacacaaatattagctgggtgtggtggtgcatgcctgtaatcccaactacttgggaggctgaggcaagataatcacttgaacccgggaggcgggggttgcagtgagtcaagatcgcgccactgcactccagcttgggctacagagggagactccatctaaaaaaaaaaaattgatgtaatgtgtacaggaaatgcatacaactcttaggataaaatagagatagacagcagaaaaactctgtcttgacaagaatggatgcattcagggcagtatggccacagatgaaactcgtcttagattgtgtagtgtccatttcaactctgcagacagtaaagcaaaaccagacatgtttattcttaacatgggacttgatgagaatccttctcaataacaagaagacataacctgcaaatgcatgttgtatgcagaaaagatctttaggcgacactgaaataaataaatgaaatgtaaaatgtgagagacctttttgaattcacatttaattttatattatacttaatagagacatatatttctattaatgaatcatttttgtgatttcattagtatcatgaagcgtatttcccatctcaacaaaaggcaaaatgattcagaatttgattaggcaaatgttatggcccctgtagctattcatagacctctcaagggaatgggtagataaaaatgaaaatacctcctagaaagagtggtgccaaaaatctccaagggttgtgtcaaagaaagtgaacagggccaggtttggtggctcacgcctgtaatcctagcactttggaaagccgaggcgggcagatcacgaggccaagagttcgagaccagcctggccaacatggtgaaacccctgctctactaaaaacacaaaaattagctgggtgtggtggtgggtgcctgtagtcccagctaytcggaggctcaggcaggagaattgcttgaacccgggaggtggaggttgcagtgagccgaggtcacgccactgcactccagcctgggcgacagagcaagactccgtctcaaaaatacatacatacatacatacatacatacatacatacatacatacatacgaaagtgaatacatgaaaaaagtaaggcgaatatagaaagtggagtgagagaaaggctgggcaaattgcatcctatgtttcattagtaaatttaagacatagcaccagacggtactagattatctgattgttcaaacactgtaagcacacatgtacaaacaacataaaaccaagacttatcttctggttttgggaatcatttattttgttttagatttattcctccttcactttcctcccattcctctcctttcctcttcttctccctccccttcaaattctttt

SEQ ID NO: 697997 - DNA, 2151 bp, Homo sapiens
tcctgacataaagttctttgtggcttctatcctggcattgtaatggactttttcttacaaatgattaaattactcatatttttagtgagcatttaaggtcactagagtccatttgaggaatattctcattcaaatataccagtgactcacttttagaaaggaacaattcattcatttatgaatcaacctggatccaatgctctgatattttaaaagggaccaatgttaattattgaagagtagatttcatattcataaatattttattaatatgcctttatgaaatggttgtaagtccaattctgatcaagatcatctgtgtatttttccctgttttaaaatattgaatcaacgacttgaagagttatttatttgaaagagaatagagacgataaatttaacattttagaaagtaacctattatttaaatggattttagatatttgaagggtgatattgctctgtaattagaaaactgaagaagcagatatttcaaaacaatatgaacttaattggaaaagacagcattttaaactccacatgaaaagccatcctgtttctcaacctaactaatatgtgtttcagtgagatagatgctactttctttttcttttactttcttatcatactaataattttttaaaatttgatgtaagtggctgggcgctgtggctcacgcctgtaatcccagcattttgggaggccgaggtgggtggatctacctgaggtcaggagtttgagaccagcctggcccaccaggtgaaaccccgtctctactaaaaatacacaaatattagctgggtgtggtggtgcatgcctgtaatcccaactacttgggaggctgaggcaagataatcacttgaacccgggaggcgggggttgcagtgagtcaagatcgcgccactgcactccagcttgggctacagagggagactccatctaaaaaaaaaaaattgatgtaatgtgtacaggaaatgcatacaactcttaggataaaatagagatagacagcagaaaaactctgtcttgacaagaatggatgcattcagggcagtatggccacagatgaaactcgtcttagattgtgtagtgtccatttcaactctgcagacagtaaagcaaaaccagacatgtttattcttaacatgggacttgatgagaatccttctcaataacaagaagacataacctgcaaatgcatgttgtatgcagaaaagatctttaggcgacactgaaataaataaatgaaatgtaaaatgtgagagacctttttgaattcacatttaattttatattatacttaatagagacatatatttctattaatgaatcatttttgtgatttcattagtatcatgaagcgtatttcccatctcaacaaaaggcaaaatgattcagaatttgattaggcaaatgttatggcccctgtagctattcatagacctctcaagggaatgggtagataaaaatgaaaatacctcctagaaagagtggtgccaaaaatctccaagggttgtgtcaaagaaagtgaacagggccaggtttggtggctcacgcctgtaatcctagcactttggaaagccgaggcgggcagatcacgaggccaagagttcgagaccagcctggccaacatggtgaaacccctgctctactaaaaacacaaaaattagctgggtgtggtggtgggtgcctgtagtcccagctattcggaggctcaggcaggagaattgcttgaacccgggaggtggaggttgcagtgagccgaggtcacgccactgcactccagcctgggcgacagagcaagactccgtctcaaaaatacatacatacatacatacatacatacatacatacatacatacatacgaaagtgaatacatgaaaaaagtaaggygaatatagaaagtggagtgagagaaaggctgggcaaattgcatcctatgtttcattagtaaatttaagacatagcaccagacggtactagattatctgattgttcaaacactgtaagcacacatgtacaaacaacataaaaccaagacttatcttctggttttgggaatcatttattttgttttagatttattcctccttcactttcctcccattcctctcctttcctcttcttctccctccccttcaaattctttt

SEQ ID NO: 697998 - DNA, 2151 bp, Homo sapiens
tcctgacataaagttctttgtggcttctatcctggcattgtaatggactttttcttacaaatgattaaattactcatatttttagtgagcatttaaggtcactagagtccatttgaggaatattctcattcaaatataccagtgactcacttttagaaaggaacaattcattcatttatgaatcaacctggatccaatgctctgatattttaaaagggaccaatgttaattattgaagagtagatttcatattcataaatattttattaatatgcctttatgaaatggttgtaagtccaattctgatcaagatcatctgtgtatttttccctgttttaaaatattgaatcaacgacttgaagagttatttatttgaaagagaatagagacgataaatttaacattttagaaagtaacctattatttaaatggattttagatatttgaagggtgatattgctctgtaattagaaaactgaagaagcagatatttcaaaacaatatgaacttaattggaaaagacagcattttaaactccacatgaaaagccatcctgtttctcaacctaactaatatgtgtttcagtgagatagatgctactttctttttcttttactttcttatcatactaataattttttaaaatttgatgtaagtggctgggcgctgtggctcacgcctgtaatcccagcattttgggaggccgaggtgggtggatctacctgaggtcaggagtttgagaccagcctggcccaccaggtgaaaccccgtctctactaaaaatacacaaatattagctgggtgtggtggtgcatgcctgtaatcccaactacttgggaggctgaggcaagataatcacttgaacccgggaggcgggggttgcagtgagtcaagatcgcgccactgcactccagcttgggctacagagggagactccatctaaaaaaaaaaaattgatgtaatgtgtacaggaaatgcatacaactcttaggataaaatagagatagacagcagaaaaactctgtcttgacaagaatggatgcattcagggcagtatggccacagatgaaactcgtcttagattgtgtagtgtccatttcaactctgcagacagtaaagcaaaaccagacatgtttattcttaacatgggacttgatgagaatccttctcaataacaagaagacataacctgcaaatgcatgttgtatgcagaaaagatctttaggcgacactgaaataaataaatgaaatgtaaaatgtgagagacctttttgaattcacatttaattttatattatacttaatagagacatatatttctattaatgaatcatttttgtgatttcattagtatcatgaagcgtatttcccatctcaacaaaaggcaaaatgattcagaatttgattaggcaaatgttatggcccctgtagctattcatagacctctcaagggaatgggtagataaaaatgaaaatacctcctagaaagagtggtgccaaaaatctccaagggttgtgtcaaagaaagtgaacagggccaggtttggtggctcacgcctgtaatcctagcactttggaaagccgaggcgggcagatcacgaggccaagagttcgagaccagcctggccaacatggtgaaacccctgctctactaaaaacacaaaaattagctgggtgtggtggtgggtgcctgtagtcccagctattcggaggctcaggcaggagaattgcttgaacccgggaggtggaggttgcagtgagccgaggtcacgccactgcactccagcctgggcgacagagcaagactccgtctcaaaaatacatacatacatacatacatacatacatacatacatacatacatacgaaagtgaatacatgaaaaaagtaaggcgaatatagaaagtggagtgagagaaaggytgggcaaattgcatcctatgtttcattagtaaatttaagacatagcaccagacggtactagattatctgattgttcaaacactgtaagcacacatgtacaaacaacataaaaccaagacttatcttctggttttgggaatcatttattttgttttagatttattcctccttcactttcctcccattcctctcctttcctcttcttctccctccccttcaaattctttt

SEQ ID NO: 697999 - DNA, 663 bp, Homo sapiens
cctgctaatttttgtatttttagtagagacgggatttcacactgctggtcaggctggtctcgaacttctgacctcaaatgatccacctgcctcggcctcccaatgtgctgggattataggcatgagccaccacacccggyaactcaggtaattcttttactctaggagtgctgtgaaagatgaaacacttatggcaccatgaatgcagaatgtttggtaaaagctgccacaaatcctcagaggatgagttgagttactgccaagtgcttcctctactgtgtatggaactgaactatttcagatttcaatagcaaatgctcatcctggctaggaaaaaagaaattttaataggaccaattgtattcttttatccatggcattgtttagatatttaaattaccaaacttatttttttctggctaaattatctcaggccttgtaaacaaaacatggtaagatctgtggaagaaaaagagaagtttattttctattttgctataacaaaagcaacaacaaaaacccacctgcagattgggaaggcacagccttcagtgtaagtgaagtgtgctctctgaaggataaagaaaagactataggttttataaaaaggagaaatgttacacatggttctttgggaaatttcattggcactaataatgtttt

SEQ ID NO: 698000 - DNA, 663 bp, Homo sapiens
cctgctaatttttgtatttttagtagagacgggatttcacactgctggtcaggctggtctcgaacttctgacctcaaatgatccacctgcctcggcctcccaatgtgctgggattataggcatgagccaccacacccggtaactcaggtaattcttttactctaggagtgctgtgaaagatgaaacacttatggcaccatgaatgcagaatgtttggtaaaagctgccacaaatcctcagaggatgagttgagttactgccaagtgcttcctctactgtgtatggaactgaactatttcagatttcaatagcaaatgctcatcctggctaggaaaaaagaaattttaataggaccaattgtattcttttatccatggcattgtttagatatttaaattaccaaacttatttttttctggctaaattatctcaggccttgtaaacaaaacatggtaagatctgtggaagaaaaagagaagtttattttctattttrctataacaaaagcaacaacaaaaacccacctgcagattgggaaggcacagccttcagtgtaagtgaagtgtgctctctgaaggataaagaaaagactataggttttataaaaaggagaaatgttacacatggttctttgggaaatttcattggcactaataatgtttt

SEQ ID NO: 698001 - DNA, 663 bp, Homo sapiens
cctgctaatttttgtatttttagtagagacgggatttcacactgctggtcaggctggtctcgaacttctgacctcaaatgatccacctgcctcggcctcccaatgtgctgggattataggcatgagccaccacacccggtaactcaggtaattcttttactctaggagtgctgtgaaagatgaaacacttatggcaccatgaatgcagaatgtttggtaaaagctgccacaaatcctcagaggatgagttgagttactgccaagtgcttcctctactgtgtatggaactgaactatttcagatttcaatagcaaatgctcatcctggctaggaaaaaagaaattttaataggaccaattgtattcttttatccatggcattgtttagatatttaaattaccaaacttatttttttctggctaaattatctcaggccttgtaaacaaaacatggtaagatctgtggaagaaaaagagaagtttattttctattttgmtataacaaaagcaacaacaaaaacccacctgcagattgggaaggcacagccttcagtgtaagtgaagtgtgctctctgaaggataaagaaaagactataggttttataaaaaggagaaatgttacacatggttctttgggaaatttcattggcactaataatgtttt

SEQ ID NO: 698002 - DNA, 663 bp, Homo sapiens
cctgctaatttttgtatttttagtagagacgggatttcacactgctggtcaggctggtctcgaacttctgacctcaaatgatccacctgcctcggcctcccaatgtgctgggattataggcatgagccaccacacccggtaactcaggtaattcttttactctaggagtgctgtgaaagatgaaacacttatggcaccatgaatgcagaatgtttggtaaaagctgccacaaatcctcagaggatgagttgagttactgccaagtgcttcctctactgtgtatggaactgaactatttcagatttcaatagcaaatgctcatcctggctaggaaaaaagaaattttaataggaccaattgtattcttttatccatggcattgtttagatatttaaattaccaaacttatttttttctggctaaattatctcaggccttgtaaacaaaacatggtaagatctgtggaagaaaaagagaagtttattttctattttgcwataacaaaagcaacaacaaaaacccacctgcagattgggaaggcacagccttcagtgtaagtgaagtgtgctctctgaaggataaagaaaagactataggttttataaaaaggagaaatgttacacatggttctttgggaaatttcattggcactaataatgtttt

SEQ ID NO: 698003 - DNA, 1281 bp, Homo sapiens
ggtaatcctcatagcataatcctgctttgtgaaaatacaaaccagatattgctaacattaatcccttattttagaggaaaaaagctaacagataatatttaaaagattagcggagaaagcaatgaatttatttgtgatttcaatactgaagtctttgttactcatttttaaactatagctttcttgtagggagagcatgtccattttatgaatgtaaacctggcactctatctagatactccaaccgtgaaagccaaattacaatctccaacttctcaatacaaatccaccaatcatttgctctgcaatgttgcccttcacaatagtgatgaaacttccttcatgaaaacacttttgagtattaaaatttactttaaatatatatcacagaaatagacactttgtaaaggaggacaagagactcataatttgttaaatatgtttcatgactgtacataactggaaaattactgtatggatgtccaaaagtttgacttcaaatttgagaaatctaagctggtaaataacatattttagcataatttggcttgtttggaaaagttggtgggctggtatgcaaatgttgttgggaaaataagttatgttaaatcatcagagttctgttatgaagaagaagatacatattgacttcctaaatgtaagaagaagtataaactctgcaaatctactcagatagttaggggctgttctttttaaaatcctacttctttaattattggaggcaaggggacttaatgccaggaaatttctgtaaaatgtatggcaattctaggagcattgtaacatatattctcattctattcagtattaaaatacactactactattacagacatttaattaaatttggttgatgttggaagagtggtgtcgaatgttayattaaactatttcccaaattgcagtgtttatttattgaatttaagaggtattattatggaattacagctgcattaccacctgtgtgacttttgattgaaattaggaaagtgttgaaagtttgtttcagttatcagacaaatttttttatcaatcactgacacagctgtgatgaggcatacatacagcagcaagaataagagaaaaataaaacaatgatgtttttcttattttccttctcaattcttataagttacacatgagaaacattaatagggttatttgggaatgttatggagttgtgagtatttcacttcttaaggacatgaaatgtgtatttttaaaaatgtgaacactcaagtttgtttatggtgggaaaaa

SEQ ID NO: 698004 - DNA, 1281 bp, Homo sapiens
ggtaatcctcatagcataatcctgctttgtgaaaatacaaaccagatattgctaacattaatcccttattttagaggaaaaaagctaacagataatatttaaaagattagcggagaaagcaatgaatttatttgtgatttcaatactgaagtctttgttactcatttttaaactatagctttcttgtagggagagcatgtccattttatgaatgtaaacctggcactctatctagatactccaaccgtgaaagccaaattacaatctccaacttctcaatacaaatccaccaatcatttgctctgcaatgttgcccttcacaatagtgatgaaacttccttcatgaaaacacttttgagtattaaaatttactttaaatatatatcacagaaatagacactttgtaaaggaggacaagagactcataatttgttaaatatgtttcatgactgtacataactggaaaattactgtatggatgtccaaaagtttgacttcaaatttgagaaatctaagctggtaaataacatattttagcataatttggcttgtttggaaaagttggtgggctggtatgcaaatgttgttgggaaaataagttatgttaaatcatcagagttctgttatgaagaagaagatacatattgacttcctaaatgtaagaagaagtataaactctgcaaatctactcagatagttaggggctgttctttttaaaatcctacttctttaattattggaggcaaggggacttaatgccaggaaatttctgtaaaatgtatggcaattctaggagcattgtaacatatattctcattctattcagtattaaaatacactactactattacagacatttaattaaatttggttgatgttggaagagtggtgtcgaatgttatattaaactatttcccaaattgcagtgtttatttattgaatttaagaggtattattatggaattacagctgcattaccacctgtgtgacttttgattgaaattaggaaagtgttgaargtttgtttcagttatcagacaaatttttttatcaatcactgacacagctgtgatgaggcatacatacagcagcaagaataagagaaaaataaaacaatgatgtttttcttattttccttctcaattcttataagttacacatgagaaacattaatagggttatttgggaatgttatggagttgtgagtatttcacttcttaaggacatgaaatgtgtatttttaaaaatgtgaacactcaagtttgtttatggtgggaaaaa

SEQ ID NO: 698005 - DNA, 639 bp, Homo sapiens
cctgtctggcactgtggcctgtgaactatagccaatatccacttctctgtactattagcactacctccgcactcagagagacctctaaactccaactgagatcctcattcctgtgctgcaatctagaaactctctctagacagtaagctgagacacagcaggactcacctcatttccccccatattttaggaatttctattgaatgatttcattgactgattcacaaagtcttgaaaaacagttgttttatacaatgtttctgacatttttagctgtttcaggtgctaagataaattgggtatacgtttctgcatcttggttggaaactgatatttttagatatatgtttcagtacagcaaacaaaatttcagtgttctaaggttttgaaaaatgtatcctagtaataggaagacctgacttctaaatattttaatctctcattctgtactaaactcaaagcaatttcagatagctatgtctgaatttcactttcttcctactttatccatrcatcttgttctataataaattatttttattaattaattactttaattctccctcaggtttgccagtgaatttttaacagcagggtatcacaatggttttttcaaaatatgtagcactatgaactgaa

SEQ ID NO: 698006 - DNA, 640 bp, Homo sapiens
tggcttttgaatgaaccaattaagtaatgagtaaattgttagatatttctttgattatagatgtcgattttatttgggtaatcactgttaccatgtgctactgaaaacctacacatgccttgtaatattctttctaaattgtttattttaaagaagggtatgcctttagaaatattttggaatgtgtaatataaagttcatgttacagtaattttatgattggcacttaacaaaagaaattagtatattctcacattaatggtaacatctttcataagtctctcattttagtgcttctaattaaaatcattatttttctaatgtggaagagggtgttttcctttttytctacaatattttgtagtagcatttgcagtactctgataagtttcacattttctgacaatgtacatcaaagtttactgttaagcaatgtaagtgttgaatatctagtagtatcatataattcatgaaagaaaggaaggcaaaaccttctgactgaacctttatgtgacagatatgtttgatttctgatttgtcaggtttctacacaaggtttatgctaaccttagtctggagagagaatacccacattggggaagacaaagcacttacataagcatctggagacttaggtatt

SEQ ID NO: 698007 - DNA, 758 bp, Homo sapiens
taataataaaatatttaataacatttatcaataagtcacatgatattctaataagatactctgagaagtagtgtcaatattatttgaaaaatatattgtatgacaatatttcagctaaatataaaattttatttacataatgattaatattaaaaaataaacaggtctcataacaggaatttctgtcgaataggatttatcttcctttgaaaggtccaagcattatttggaagtttaaacaaaatagaacttcatttttataaagtgggcaaggtacctcgtttacagttttaaaaaatcaagattttaaaatatagatgaggactaacagttctgtgagcataaggacagtgctggatatcagttattattttcattttattgtattagtatgaacttggtttggccttgactaacggagacttaatagtgacttcaataaaattaaagcttatttctgtcataagcagcatccaggtgtggtgtgtcacttccatgaatawcagggtctctggctcccattttctttctgatgtgccatccacagaatgcagcttccacctcgtgatgcaatatgtttgttcttactgaagctgtaatttcagcattccaactaacaggagggaggaaaagcctataccctctctctttttcagacacttcatagaatttatattaagtgatttatgtgtctcccaaaccacaaataagtccaaggccacacagctaactttgagaaaggctgggtaacgtaattt

SEQ ID NO: 698008 - DNA, 600 bp, Homo sapiens
taggacagtatgccattaaaataaataaataaataaaaacaaaaccaaaatagttgatttaggtaaaaaagtaaatatgatatttgtagtatttcmaaagtagatatctgaaacggtatttttctttcttcctaaaatagacattactacattcccccataattcaatacaatctagcaaatatgagtagaagtaaggagcagaacatacctaaaacttaacacattctagcaaagaaattcactcactattctcttttaaattacccagcacatagcagatttttagtttgctttgaattgaaagaactgatttctctgagaaatagcataatatgtttgcttaggtgtaccattccaacaaataattcaaatactcaaagtcagtagaacctaaatcaaaagcagaaatattaatttccttttaaaatatttaaatgtttaaaatgttacattactttaggtttataatctgaaaaaaaaagtatatattcatagtactgcttatgcatatttaatcacatatttctaaagcagataatctaaactcagtatagtaatcaaattttagagaaaatctaaaattttagtataatatgta

SEQ ID NO: 698009 - DNA, 633 bp, Homo sapiens
tccagccttagagattgagtgaaatcttgtctcaaaaaagaaaaaaataaaagaaataaaagaaaaaagatattgaagtaattgcaagaatttcacttaaaagtaagccctttttataagaactttttaaaggcatttatacacattttaggtttgtatttgtttgtttgtttgtttggacagagtcttgctctgtcaccacagctggagtgcaatggcgtgatgttggctcactgcaatctccacctcccgggttcaagcaattctcctgcctcagcctcccgactagctgagattacaggtgcccgccaccatgcccggctaattttttgtatttttagtagagacggggtttcaccattttggccaggctggtcttgaactactgacctcaggtgatccacctgcctcggcctctcaaagtgctgggattacaggcgtgagccactgtgcctggccattttaggttgatttttatatttctgtttaaattattatgttttttaaattggaaaaaaaatgaatcttaaatacatacatayatatatatatatatatattttttttttttaaagactcttctatgaccacagagtcaagtataaatccaggactctgattgaggcaatcaaa

SEQ ID NO: 698010 - DNA, 617 bp, Homo sapiens
tggaagcatttaataaattagggagtgtcagagaggtatgtggaggtagagaagatgatatagattttttttttcttaatttgataatggaataatggtcatgaaataagactagtgagaaagtaagacaacaaatctaccttgcagtcctcaggtgtaagagagagggaataaggaataccatttaggaggacttcaaaaaaaaaagatttccttggagaagagctaagcttcagttaaggtaaactggcagaacatagcagtttaaaataacagcttaaggccaggcgcagtggctcacgcctgtaatcccaggccgccgtggcgcgggggsttgtggggggggtggtgtcacctgagttcaggagtttgagaccagcctggtcaacatgttgaaaccctctctactaaaaaaatacaaaaattagccgggcgtggtggcgggcgcctataatcccagccactcaggaggatgaggcagaagaatcacttgaactcgggaggcagaggttgcagcgagcggagatcgtgccactgcactccagcctgggagacagagcgagattatgtctcaaaaatacataaataaataaataaaatgacaatttaagatatta

SEQ ID NO: 698011 - DNA, 610 bp, Homo sapiens
gagaaaattcagttaaacaaatgctttccaaaatggctttttgactcaacttaaccgtgataaatttgggttctcttaatgttgtaagagttttgacacaaatcagcatactcaaactgagtaacctgagaatcattaataaaaggggattaagataatagcagagtacagggaaactgcaaggacagtttagtaactcagyagtaggcctaaaggttaagacaggggtaagttacctaaactacataaagatatctgcatggtgaaagccttctgtctggaattctgaattttcatggagagagccaggaacacgaatacagaaaaaaagaagagaacttatataaaaattccaattttctactaaataatggtacatattatgtatatatatattttgagtaaaacatgttaatacatgtaaacatatatcattcagggggaaaagtgaaatgaattttaattaataaattttattttcttgaagcgctttcaggttcacagcaaaattgagtacagagggttcccatatgcaccttgtccccacagatacacaacctacatgactatcaacatgctataccaccatagtaaatttatcacaatcaag

SEQ ID NO: 698012 - DNA, 666 bp, Homo sapiens
agcactcaaattcctgagctaatactaatgtcaatcaggttgtgcgattgtaatgcaacataatggtcacaatatgtaactgatacaatagygcagagaagtgaataaaataactatataagaaacttttctgaaaggacattaatccattttgaggcttgagtctcagcatttggaagtcttcggtattaaaaatatcttaatcatcataggcttatggattaaaatagcaaagaggattactttcctatttcccatttggaaccctagagaaagtttcacaaaatgtgagaggtctaagtgatgcaaaggggttggaaattgcaggacagaaaatcctccaagtttgttaacatttctcattctatacacaccctactcttccccctccatgactgtcactacccttctgttttgtttttacaggacctgggatggaattctgaaattattgtgagccccacttcaaatccacaccccctccaaaacaatacatgagagataccttgtagtattgatacagtgagttacctgaaggtctgtagaagtttgcgtggggctgagaacagaatgtaatcttaaaaggagattctttgggaggccgaggcgggcggatcacgaggtcaggagattgagaccatcctggctaacacggtgaaaccccgt

SEQ ID NO: 698013 - DNA, 651 bp, Homo sapiens
tcccacctaaactttctttttcatttattattgttgtcgttgagagtttgaatatgaggttcagacttatatcatttattgtttgcatgtagacgtctttttataggtttttattctatctagcataactttatctcaagtgcaatattataaaacacactactgtttacaacctataaccttggtcttctctaattgatagaggcacaaggaccttcagagcccattttgccttcactcagaggcccttacagatctattaagaattayaaggcacaatatgaaaaaaagaaccccctggtgtatttcagggaatgtcgaaaaaaattctcttatattcaacccacagcctgttttatgttttatttattgctaagaagtctctttccatatgtctagacgttgaatattttttaaagttccacatcaacactgcatctttatctaagattagtataccatgttctgattgctgaggcattaaactgttttcaattctagaaaaatggaggtatactgttattttcattagctttctccatggtactatttggattatatttaaattgttctcagttggctcgatgacagcagaaatgccaagattttgaacaaaaataactagtctgacagtttcatattcaacttacg

SEQ ID NO: 698014 - DNA, 1172 bp, Homo sapiens
tctagagagactgaaaaaataggactaatagctagaggtaagggttgaataattatggtgatgatgttataagtgatagttacaataatatctaatgtttttattgcttacagtgtactaagtggtagtataaacatattacctctactaagtcattaaatcctcaaaataattttgagttagaagtcatcctcaatttatagactgggaaatcaaggtacagagagtttaagttacttgccaaggtctacataacttatatgtagtagaacccaggctctctgggtccagatctccaacaaaaacactttcctgtaggttttactttatatcccagcataagatgttggtcatatttcttgagaagaagactagctggtattcccattctctgatccatgggctaaaagcattatcctccttggatgatggttcacaaggatcattgggaaatccattcttttaggctgcatacggttcttagacattatcatgactattctttcttcatctggggaaaaaaaatgtgactttctacactatcactgtgagaccacagtttggactatcttattgtttcataaggtaattaatagaattccaacaagaagaacagagccgttgtacatttctgacttcctgtgggagagaaaaccagaatcttagcatactatttctgaaaggaaaagttggaattggctgtcattgwtgtcatcttgtcagttgtcttggatataaaagatggaaataggtcatgtagcccctaggaaagctgaatgcaagttgtgtccatagagcttggctatgaactgactgatctttgcatctcctaagatgctggtggtggtcccagggagttgggagcgaaggaaatcctgtactgttcagacttgagaaacaattgaaaggaccaaataatttcatcagcagagaacagagaaaccaatagagttaaatctggattattaattagtattatgtcaagcagaaatgagagggattttattaaaaattctcttaaatagtctgggcatggtggctcacgcctgtaatcccagtacttttggaggccgaagccggtggattacaaggtcaggagttcaagacaagcctgttcaacatggtgaaaccctgtctctactaaaaataaaaaaatatagctgggcgtggtg

SEQ ID NO: 698015 - DNA, 619 bp, Homo sapiens
gaaaatacctagaaaagtgcaatggacatagtagatgcaaattaaatcttttctttctaattttctaatgctccactttagggaattccggtcaccaattagactaaaaaatattatttgcaatttactttgatgttgtaaacacatagtcctacaataatcattgtgtcctttaaaagtaaatgctaaaaatgaacaattctaccttgtgtagttaagaaaaatgacttgcttgacaacaggctactaatgactcctcttgtataactcaaatccttcagtgtcatatatcattagctagttcctggaagccgtatatgtattgctagcaataaaggctcaatgctcaaattccctggactctaatcctgtttctgatgctcagtttgactaccaygtgtttctgtaacttaatttccacctcttcaaaataaagctaatagtagtatttgctccacaggtggctatgagaattaaataggtagctgtgagaattaatagtagtatttgctccataggtggctgtatttattaaattaaataaatactactaatagtagtatttgctcaataggtgggtgtgagagttggtcaagcacagcataggaaatatagtttt

SEQ ID NO: 698016 - DNA, 604 bp, Homo sapiens
agcaagtgcacagtgtgaatcatttaatctccaatcaatgctgtaaggcaagttctagtataacctccattttacagatgaagaaattgcagcacaggcaggttaaatatactttccagcaaaacaatgcggccaagtgatggaggctgcaaccacatttggtttacctctggaacatgtgctcataactaggagattgtcttattaactttttatatttctctgacatgataaatggctagttaatgaattagggaggaaattgatgaacagattttgccattctgtacttacagagcactgaagctcatagccacattgtcaaatgtttatctcagtctttccctaaagggatgtctcctatttacactccartctgtgaaggatcctttgcttttctgactggtgtcatctacaacatgttattttgtccagaaacttgcctcatacctttagctttggctcaagggaagatactcatagcctaagatgcagaagaaaatatctgactacctgagttccagattccctctgttttgccatttctgaaggaccattaagtcagctgtctgtgtttcaatgaaaaagcaactcttttcaatta

SEQ ID NO: 698017 - DNA, 645 bp, Homo sapiens
tgccacccccacctcaaccactgccacttcagggagatgcagaaaaggggcatggccagggctgtgtactctgcagagctggggacaggcaggagcctcaacccacccttccccaacccattggcagggttggagctccccaggagcaactgtagccacccagctcacggctgtgggcctaggcctcccagtcctcttggggcaggagggccccctccataaccgcagactcgggggtgtctgttcccgctgcctggcctctccccactcccagcacctgctccgatcttgaagcagagttggggcactgttgcagcccagctgggtatgtgcaggctcagggaagtgctgacatgctggtcccatgccacctcagcccctctggactttgggcaccaatggagggaggccaagatggggctcgagagcagctcagaactggcctgcagcagccccttggctccagcagcctggatgccatgggtaggaggatgcacacaggctcttgggtgggaaggggtgggtccccagtkaggccccaccttcaggccagggagggcctgaaggctggggctcaggcttctagtcccacagaccagagtggggacttgtggtgccttttcctacctgcctataactgcccat

SEQ ID NO: 698018 - DNA, 658 bp, Homo sapiens
ttcctatataataagaatagtaaaagtttctgctagagtgtaggggagaaactatggacacaaagacctagagatcaaaatggtattagatatctcaaaagcaaaaatgaaagccagaaaaaaaaagggggcaagtttttcaataaaatgaaagaaaattatttctaacctagaaatccagtcagtctataaactgtcaggttaaaataaaaatatttttagacatgcgggatctcagaaagtttacctgaagagttactagttcagacaaatgctataggatgtgctccaccagaaattaacaaatacaaacacaaattcaggcagmggatgatattaaatggagtggcaaagaggatttgaggcagggcgcagtggctcacgcctgtaatctcagcactttgggaggccaaggcgggtggattacttaaggtcagaagttctagaccagcctgatcaacatggctgaaacccgtctctactaaaattacaaaaattagccaggcgtggtggtgggcacctgtgatcccagctactcaggaggctgaggcaggagaattgcttgaatccaggaggcagaggctacagtgagctgagatcgcgtcactgcactccagcctgggcgacagagagagatcctggctcaaataaacaaata

SEQ ID NO: 698019 - DNA, 567 bp, Homo sapiens
tgaatacacctgtgttaagatgctaactacaatgcagaattcactgaattccagggggtaaagaaatgtggacctacagaaaccctgaattagaactgtttctggcttgttaaattctaacatgtccttcctctgatttatcatcttcttcctaaccccaaaatattaagtacccctcactacacacacacacacacacacacacacacacacacacacacgwatattatctttggctctcagtattatctccttggtattctcagtatactctcctttgataatctcagtacagcaagtatcaattctaggtaaatgactctgaaccaatccatgcctcaatttcttgatatgtataatggggagagcaacacatctactttgtaagacactgtataagacactgtgagattgagttaacccaggaaaagtgtcttaaactgagcccagcacatagtacctgctcaaaaatgttaactataattacggtcatctctaccttcagccctacttacatcttggcccaaggagagaaggcattgcctgaactcagttgctaacttcctg

SEQ ID NO: 698020 - DNA, 567 bp, Homo sapiens
tgaatacacctgtgttaagatgctaactacaatgcagaattcactgaattccagggggtaaagaaatgtggacctacagaaaccctgaattagaactgtttctggcttgttaaattctaacatgtccttcctctgatttatcatcttcttcctaaccccaaaatattaagtacccctcactacacacacacacacacacacacacacacacacacacacacgtatatyatctttggctctcagtattatctccttggtattctcagtatactctcctttgataatctcagtacagcaagtatcaattctaggtaaatgactctgaaccaatccatgcctcaatttcttgatatgtataatggggagagcaacacatctactttgtaagacactgtataagacactgtgagattgagttaacccaggaaaagtgtcttaaactgagcccagcacatagtacctgctcaaaaatgttaactataattacggtcatctctaccttcagccctacttacatcttggcccaaggagagaaggcattgcctgaactcagttgctaacttcctg

SEQ ID NO: 698021 - DNA, 567 bp, Homo sapiens
tgaatacacctgtgttaagatgctaactacaatgcagaattcactgaattccagggggtaaagaaatgtggacctacagaaaccctgaattagaactgtttctggcttgttaaattctaacatgtccttcctctgatttatcatcttcttcctaaccccaaaatattaagtacccctcactacacacacacacacacacacacacacacacacacacacacgtatattatctttggytctcagtattatctccttggtattctcagtatactctcctttgataatctcagtacagcaagtatcaattctaggtaaatgactctgaaccaatccatgcctcaatttcttgatatgtataatggggagagcaacacatctactttgtaagacactgtataagacactgtgagattgagttaacccaggaaaagtgtcttaaactgagcccagcacatagtacctgctcaaaaatgttaactataattacggtcatctctaccttcagccctacttacatcttggcccaaggagagaaggcattgcctgaactcagttgctaacttcctg

SEQ ID NO: 698022 - DNA, 617 bp, Homo sapiens
aaaaaaaaactttagtcagaagtgaaattacatagaatttgggatgccttgccataaatggcctctccatagtacctcatcctggcatcacctaaatgggagggttctaccccaatagctgaaagccctgcctgagccttgggggctctgtgctgtggccagtgctggacyatgcagctctggatgcccccgacctgccgttcctctgaccactcatgagaagcccacaggggcagctctgccccctcaccttctacttccattgttcccacttttagagaccagaattttccccaaacaagtcaacatcttgctgtgtttgcagaaaacatcctagcattggagggactaccagatggaaaaatagctccccttttccatttagaagtggcttgtttgatttcaaaatataaaccctgtcctaataataaaaattactttttttctcagagatgtgccaaagtccctcaccatctatccacaggagaatgttccatttttttggatgcctcatagtcacctggtgtgggggacagaccctgtggtggccccacggtccgcacctcctggtattcacacccttgtgtgctgccctccccttgagtgtgggcagaccc

SEQ ID NO: 698023 - DNA, 626 bp, Homo sapiens
tagtcattgcagcagaaatgttccagtggcaacaattctgtcttcttataaaatacatttacaaagcatctgtgttacaattaaataacagaactgtaytgctactcaataagggcccttgacaaccacagggtccactgaatgagttcagaagatatacagcaaatcactgtgagaaagagctttcattttgtcatttcaaaagaattcaattagtttggtacttactttcagctgatgagttgagttctgtcttaatcttcgatttttcaagatcttctttatattccttcttgagcaattttactatctttttgctataacttgatttcttcactttgaaaacttcttcattttcttaaaaaggaaattaaatgaagtctgtagcaactattttctgaaaatattttcccttctttcacatgatcttacgtgctgtccaaattatcccaaatatatatactcatatgccaaaatcattgtataattatttcaagtctgtcacagactcaaaaacagaggtcaacttcctaaattactgtgaagtaatgagatttttgagactttttaaaggaatagcacatgtaacttcacaaaattttcctattattgtcgtccttaaatca

SEQ ID NO: 698024 - DNA, 645 bp, Homo sapiens
ggatgatgaaatagggttcagggtaattgattaatttgtctaatgccacatagctcataaggtgaatatatgactttaaagcacatctatttcaacagtgcacgctcaatcaacgtataatttacttattgggaacatcttctatcaaaaggattgggactaccatatttttattaaaaactcaatcatgttgtccttaaagaaatgctaactgcggccaggcaaggtggctcacacctgtaatcccagcactttgggaggccaaggtaggcagatcacctgaggtcaggagtttgagacyagcctggccaacatggtgaaaccccgtctctactaaaaatacaaaaattagccaggcatggtggcaggcacctgtaattccagctacttgggaggctgaggcaggagaatcgcttgaacccaggagatggaggttgcggtgagctgagatcgcgccattgcactccagactaggtgacagggcaagactttgtctcaaaaaaaaaattgcatggttagatgtgggttaatgtcaacacacttgcttttgtgttgggggtccacaggtgtttattatgttataaaaactaaacaaataaggccaggtgcagtggctcacacctgtaatcccagcactatgggagg

SEQ ID NO: 698025 - DNA, 645 bp, Homo sapiens
ggatgatgaaatagggttcagggtaattgattaatttgtctaatgccacatagctcataaggtgaatatatgactttaaagcacatctatttcaacagtgcacgctcaatcaacgtataatttacttattgggaacatcttctatcaaaaggattgggactaccatatttttattaaaaactcaatcatgttgtccttaaagaaatgctaactgcggccaggcaaggtggctcacacctgtaatcccagcactttgggaggccaaggtaggcagatcacctgaggtcaggagtttgagactagcctggccaacatggtgaaaccccgtctctactaaaaatacaaaaattagccaggcatggtggcaggcacctgtaattccagctacttgggaggctgaggcaggagaatcgcttgaacccrggagatggaggttgcggtgagctgagatcgcgccattgcactccagactaggtgacagggcaagactttgtctcaaaaaaaaaattgcatggttagatgtgggttaatgtcaacacacttgcttttgtgttgggggtccacaggtgtttattatgttataaaaactaaacaaataaggccaggtgcagtggctcacacctgtaatcccagcactatgggagg

SEQ ID NO: 698026 - DNA, 644 bp, Homo sapiens
ttaatttgagacatgatgggggccacagccaggttgaggaggtaactccatgaaaattacatttgaggttgatgacttctgtgtgcttgttcaggatcatgtccttaaacagggaatactcattagcaaactaattaaggaccttaacaggagggacggtaatttgttgggttttagaagacttagtacaataaatatawtgattgagtttgggtttgccaaggaattaaagagtccgcacttccctaataaaaataaaatgaaaatacttttttggaaaactgacagtaaggcagtaatgactataataaaccagaagtccttcgtccacaaaccactgtggttgacaataagggattaaacattacctgaattggtagagaaattattaatagctgttgctttttaaaaatagacatttactgccagtctctggggaggagggagaagcagaaaggtgcaggtgctgatggctttgaagggcattagctgtgcctcttccattctcattttctcttccctcattcccttttccaaactgagaacctggattccatgtccaggtgggcagagggaggaggaggaagacgtgggagatggctggaaagaagaacaagccaaattcttatgtacttctgggcatg

SEQ ID NO: 698027 - DNA, 644 bp, Homo sapiens
ttaatttgagacatgatgggggccacagccaggttgaggaggtaactccatgaaaattacatttgaggttgatgacttctgtgtgcttgttcaggatcatgtccttaaacagggaatactcattagcaaactaattaaggaccttaacaggagggacggtaatttgttgggttttagaagacttagtacaataaatatattgattgagtttgggtttgccaaggaattaaagagtccgcacttccctaataaaaataaaatgaaaatacttttttggaaaactgacagtaaggcagtaatgactataataaaccagaagtccttcgtccacaaaccactgtggttgacaataagggattaaacattacctgaattggtagagaaattattaatagctgttgctttttaaaaatagacatttactgccagtctctggggaggagggagaagcagaaasgtgcaggtgctgatggctttgaagggcattagctgtgcctcttccattctcattttctcttccctcattcccttttccaaactgagaacctggattccatgtccaggtgggcagagggaggaggaggaagacgtgggagatggctggaaagaagaacaagccaaattcttatgtacttctgggcatg

SEQ ID NO: 698028 - DNA, 673 bp, Homo sapiens
accactcttccagatgtgcatgattcaacccaacacagctggcaaggtggaggggcaatatgatgtttcactcgtactaatgttgtagcttcacagcctcttggggtggtccataggcccctccaaggtggccttgggtgggtggaaggaggggcagaggttggcatccaaattgctccagactgagtctactttcaagatctattttgcactggagatgtaaatttccacttaaaaatgcaaagtgagcattaacacagaggcgtggctaaagttayttgctctgaaaaagatgcgcagatatttttgtgtctggtgggaaaggagagagtgtcaaaggatggacaaaggccacctctgtgtgaaggtggcttttgtgattttggcttaaccaaaaggtcctggagatggagtgacttggattctgattatgggggtgtctgctgtgtcccattcttctcattcagttgaatttaattcatcaaggaggaatcgtgtgcctgctctgtgccaggcactgtcaggtgccgggaatgcagcaatgaacaaaatgtagatcaattcctgccctcttgggccttactacctggcagaagatataaaaaagggccacttccacagcattgtgatgacagtgggatgtgaccatccctttcctagctagaactgggga

SEQ ID NO: 698029 - DNA, 598 bp, Homo sapiens
cagagaggggaacaatagacactgggacctacttgaggctggagggtgggaggagggagaggatcaraaaaaatacccattgggtaccatgcttattacctaagtaatgaaataatctgtccactaacccctgtgcacacgatttgcctatataacaaattgcgcatgtacccctgaaccaaaaataaaaattataattaaacaaaaaataaagaataagcatgtctgaaaagaaataccacactgagactgcaagacactgcgagacactcagtaaaaagatgatccccaaccctcgccctcgctgctggttgggaatggattgtctcgcacccatctggttacaccctagtgacactgtcctcctcttgaccctcaggacttcagaatcactcagtgttttagggcagggaaacttattcacattttgccactttcttggaaagtgacctatactgctggtttccacttttagaagatctaattaagggatgattgacactttcccttccccaaaccatcttcagctcttgctttgcttaagttagaatgccatttgccacagacctgttgctttgcaactgggtgagaattttgg

SEQ ID NO: 698030 - DNA, 654 bp, Homo sapiens
tccagaatttcaacatatgccaccaaacccttttcttccctctgaatttttggaggcgcacctcaccttgtgaatttgtagcaccccaaaccagtaagcacacacattcaaatacatgtacatgcccacagctacccactagtaagcaccatcccccatgtccggtcacacagatgtgagaagatggagaaatgttcacctaaacagctggtgtgtgaagtcctgcctctgtcagctgagctcacatgggaaagatccccagtccctaggccccacatcaatgggcacagggccttyggaggaaaggacaaccactccgtcgtggagggagaacactttggactcgggtgtgtgtttgagggattccagagggtagaggttgaggaagaggagttgggagagtgagaaggtaggatgttgcacaggatgagacccttcctctcaaaccaaacctaatagccaataagtacaggaaaagatccttgacatctctagtgatcagggaaatgcaaatccaaaccccaataagaaaccacttcatactctccagggtggccagaatacaaaaggctgagaacaagtattgggaggatgtggagagatcagaacactcctacgctgctggtggcaatgtaaaacggtacagctgccttg

SEQ ID NO: 698031 - DNA, 1456 bp, Homo sapiens
aaaactgggaagaggtaaggaaggattctccccttcctgtttcagaggaagcccggctcttcctgatcttagacttctggcttctaaagttttgaggcaataaatttctgtttgcttaagtcacccagtttgtggtactttgttatggcagccctagggaccaaatacagctaattatattgtaagatccttagaggtagaaaaatgatgaaatattttagcatgattacagcatggctcagaaagaggttcgagaaataattggtacgtaaatgttgaatgggtgcatgaaatggagatgggagttcacaatagtcagaagggtgtagagtcacctgtttttcccaaaggctagtactatagagtgctttccttgtgcatctcgttgggccatggaaaagctgtgcttctctgtcacttaacttattcttatcacagtcattcaaagcaaaaataagggcagaacatatacacaattgttaacagaagttatctctaaatggtaatattttgggtaattttgattaaccttttgctttaattatattttctaataaaaaaattatgtattcctttaataattaaaagtatgtattttaaaaatacaaatgtgcttaatatgaaaagacaggctgtgcgtggtggctcatacctgtaatcccagcattttgtgaggtcgaggtgggcagactgcttgaccccaaaagtttgagaccagcctgggcaacatagtgggaccccatctctacaaaaaaatacaaaaattagcccaagtggtcgcacatgcctgtcagctactcaggaggctgagacaggaggatcccttgaacccagtagggcagtgagccatgatcatgcccctgcactccaacctgggcaacagagtgagacccagtctcaaaaaaaaaaaaaaaaaaaaaaaagacagcacatatttattattgactaaatctgtcagcattttgatctacaacaaacacaaattgtgtttttctacagcacatatttattattgactaaatctgtcagcattttgatctacaacaaacacaaaytgtgtttttctaaagctctttggggtttcttataaagcaggctttttaaccaatgttttgaacatatcaggttaaggtatgtgaaatagtctctccaggtgggatttaacataatgcaataagaactgaagatttaatagaggatttcttttctaagcacaggaagaatggtgaaagcatttagctttcaccattggccagacagataaaacagacattccctaaagacatcagcaccttagagagaaaatcaaaactactcaacagaaaagtgtgaggcaaggaagagctgcagatagtgtctacaaagggtggctcagcagttctggagtggtttctctcactgcatttcctttccccagaggtccctttggctaaagcactgtccaaaggtcagttgc

SEQ ID NO: 698032 - DNA, 630 bp, Homo sapiens
tgtacacatctatatgtgtatatacgtgtatgtatgtaaagatatacaacatggatatataatatatacaatacacatatattatacatgagcatattgcacatatacatgagtgtataatatatacaatacacatgtatattatacatgacaataatgtatacattatagatatacattattacattgtgcatatattatgcatgagtatatatgtatatatgcatgcatatataattatgtatattatatgtatatgcgtatgtgtgtatatctatgtatccctacctcctgattcactagattgtggatggggctcaggaatctgggtctttaaagttccacatgtgattctgattaccagcagtttaggggaccaccctcctcactttttactcctgaagaaacaggctcagagagctagtggcatggctagggtcagcagccggttagaggagaagctggaaatggagcccagccctcccratcctggctcagagcaggttatcataaaccatgctgcccattgtccacactaacctactcagaactgagctctaaaattcttgtttggcagctagttagctagtcagactagattcctctatcattgtcccacgtaacccctta

SEQ ID NO: 698033 - DNA, 652 bp, Homo sapiens
caggatggtctccatctcctgacctcgtgatccgcccgccttggcctcccaaagtgctgggattacacgtgtgagccaccgcgcccggcctgagaacccatgtttgaacccaaaatagagagctactggcctggaaacccaaaggaacagatgatatttgtacatcccacaatacaactcacatacagaaaatgcctggggaagctaattcctgctgtccgagaggggcaaagagctaccacatcgattgctggccacctgcccttttccccagatgtgttgcttatcttttccttaacaagcctgctactttgagaaagaaatattactgtaaaccatatcacacacagctgcatcctgcatggcacagagaaaagtctgcattttggatttttgaaacggtatcacagagcaaacagtcattgacgtcactggtctacagtgtaaatgaacttcttgtattatctaatttggcacagtgggccttaggcaattattgcatcttacagcgctttagtaattgccagctagscccatgggctggggggacctgcattctctattgatttgcaaataacacccttgatgtgatgacatccatacatttcaactatttcttaataataaaaaaacactagatacaaaacccaca

SEQ ID NO: 698034 - DNA, 672 bp, Homo sapiens
gtgcctttgagaaaagctatgtgttaggccgagcatgctggctcacgcctgtagtcccagctacttgggaggctgaggcaggagaatcgcttgaaccggggaagcagaggttgcagtgagccaagatgacaccactgcactccagcctgggtgacagagcgagaatccgtctcagaaaaaagaaagaaagaaagaaaagctacgtatgaacaaacaagcaatcacaaaaggatttcttttttcattactggtactaaaagaaaaaccatacctcctcttgattcagaacttccgcagagttttcgtcttctgatccggcttgttctcccttttcctttctgcatgctaaaactgtagtttcttttttctgaaatacagttctattttttcaaaaaggacaaaactgtaatttctgtggaaatkctcaatctaaaataaaaaacatttctttgatttactttccagttatatgataatcactgttctttgtacctttaagtatacaaatgtatgttttggtaaactgtttctctcaagtgcttttgtacatgaaacgtttatactgtgagctaaatcatgatccctacagtaacagaattcccattatatcagtccctctaaaacagttttatcttgcagacctagtgactacagcttaatctactaaaaata

SEQ ID NO: 698035 - DNA, 759 bp, Homo sapiens
aacatcagagccacttttgttattgtaaacattgaatgcatggagcatgtaaaggtccttcctagagtaggataaatgggagacttccttcttcaaaggcttcactgtttcttaaagctgagtcctcctggctcaaagagagcaaagataaaggaattaggagcagcctctctcaagccaaaacttacccttttgcattgattgcttctgtaacaaattcaagtatccctattggcaaatagatattttgggcagactaaagcaaagataaccaacaatgcaagacttcacattttaaattgtttcaaatgttaaagctaccagcccaagaccaccaggaacacacttgtcaaacacagtgagttgcattagcttgcaagggagcacacactggggagctatagacttctcaaataaggacagtcaggaagggtatcattatgggaactagcaggggatgtggggtcattcttgggaggactggtcaacttgtaaacaaggtgagttgctgggacagcatctttcctttagaatacatgcagtacacttaagcctgtgccgttactgtgagatcagcrtgcccatggtcttcttgagaacatagccatctgaataagggtgaagttagttcaggctgctttaacaaaatgctataaattgagtggtctataaatgacagaaatttatttctcgagcccagggtgggtggatcacttgaggtcaggagctcgagaccagcctggccaacacagtgaaacc

SEQ ID NO: 698036 - DNA, 568 bp, Homo sapiens
tgaaaatgatgtagacattttaagcattttctacacagcgagaaaacttcgtaagaacatgttacgtgtgcaacaggtaaacagaaatcctttcataaagcaccagcagtgtttaaaaaatgagcttccattaatttttactttttatgggttttgcttaaagatctcaacatggaaaaatcctgycatggctctgaactgcacaatgcattgaaccgccgtccttcaattttcttcacactatcaacactgcagcattttgctgctttatcaaaatggtttattttaggaaactttttccacctttctgaatggaaagaggttttcacaaatgttttaaactcatcgttctaaaatcaagtgcacctacaccaactgctctcaaaatgtgaactgacttttttttttttttttttgccaaccctgtgtcacttagtgaggacctgacacaatccctacagggtgtctgtcagtgggcctcatggtaagagtcacaatttgcaaatttaggaccgtgggtcatgcagcgaaggggctggatggtaggaagggatgtgcccgcctctcc

SEQ ID NO: 698037 - DNA, 1392 bp, Homo sapiens
tgatgaactagaactattttggagtcagcttattccacacaaagttatcatggaataagcttgagaacataacaaaaaaatgattttgtttttattgttgaaatttgagaagggaaggaaaaggtaatttttttccagcatacttatttcaaattataacagcgttattgttttattttattatttttaaaattttatttatttttattttaattatttttgagacacggtctcactgtcatccaggctggccagctttattgttttaactggtataatgagcatataataatttataagtaagcttattcatgcgaataatacagaaagataaagaccttctctactataataatgattcaattagaaaacctactaatataatttagttcgttaatatgcatcataagagaaaagttgtcttatcaactcaaagttgctgtaaaggtattggataaaattcaggtcactgtcttgaccaaaactagtaagaaaatgggaattgatgaatatttctcaacatgctaatattttaagccaaaagccatcatcttgcttaatggtaaaacatcaccattaatatttattgttatcctgggtatattaactgagaaagcagatatgagaaagaaagaagatagaaaagaggagatgtgagtatcattatttacagaggctagggctgtgtaccaggaaaatccaaaatgatcaactgaaaacctacactaacctatataaacctatacttgtatataaaaatatatataaacaattacctgttagaaagtatgttgaaagaaaatattttcaataccaaaaaagagataaaatacttaaatgtatataaagaaaaatttttaaatgctatggagagacacatagaagccttaaatgaaaagatatttcatgtacttggataagaacacatattatgataatgagattggttctccctaaagctttttaaaatttaacacaatcccagtatatacatgaacagggcaaattagttatgtatattgctgtatatataacaaacaacctcaaaagctagtggcttaaaacagtaaaatatttcacaattgtgaaatctcacaatttcgctaagtcaggmattcaggagcagtttagttggatgcttctggagattctcatgtagctagccaagatgttgaccagggcttggtcatctgcgggagtaactgggcccagaggttctacttccaagatagctcactcacatggctggcaagcggatgttggcagttgtcaggaagcttcagttccttgccttgtggacctccacctagccctgcttgacctcatggggctggcttttcccagagtgtgtgataccaggcagaagcggcagtgctttaggaagtcacaaat

SEQ ID NO: 698038 - DNA, 1392 bp, Homo sapiens
tgatgaactagaactattttggagtcagcttattccacacaaagttatcatggaataagcttgagaacataacaaaaaaatgattttgtttttattgttgaaatttgagaagggaaggaaaaggtaatttttttccagcatacttatttcaaattataacagcgttattgttttattttattatttttaaaattttatttatttttattttaattatttttgagacacggtctcactgtcatccaggctggccagctttattgttttaactggtataatgagcatataataatttataagtaagcttattcatgcgaataatacagaaagataaagaccttctctactataataatgattcaattagaaaacctactaatataatttagttcgttaatatgcatcataagagaaaagttgtcttatcaactcaaagttgctgtaaaggtattggataaaattcaggtcactgtcttgaccaaaactagtaagaaaatgggaattgatgaatatttctcaacatgctaatattttaagccaaaagccatcatcttgcttaatggtaaaacatcaccattaatatttattgttatcctgggtatattaactgagaaagcagatatgagaaagaaagaagatagaaaagaggagatgtgagtatcattatttacagaggctagggctgtgtaccaggaaaatccaaaatgatcaactgaaaacctacactaacctatataaacctatacttgtatataaaaatatatataaacaattacctgttagaaagtatgttgaaagaaaatattttcaataccaaaaaagagataaaatacttaaatgtatataaagaaaaatttttaaatgctatggagagacacatagaagccttaaatgaaaagatatttcatgtacttggataagaacacatattatgataatgagattggttctccctaaagctttttaaaatttaacacaatcccagtatatacatgaacagggcaaattagttatgtatattgctgtatatataacaaacaacctcaaaagctagtggcttaaaacagtaaaatatttcacaattgtgaaatctcacaatttcgctaagtcaggcattcaggagcagtttagttggatgcttctggagattctcatgtagctagccaagatgttgaccagggcttggtcatctgcgggagtaactgggsccagaggttctacttccaagatagctcactcacatggctggcaagcggatgttggcagttgtcaggaagcttcagttccttgccttgtggacctccacctagccctgcttgacctcatggggctggcttttcccagagtgtgtgataccaggcagaagcggcagtgctttaggaagtcacaaat

SEQ ID NO: 698039 - DNA, 1392 bp, Homo sapiens
tgatgaactagaactattttggagtcagcttattccacacaaagttatcatggaataagcttgagaacataacaaaaaaatgattttgtttttattgttgaaatttgagaagggaaggaaaaggtaatttttttccagcatacttatttcaaattataacagcgttattgttttattttattatttttaaaattttatttatttttattttaattatttttgagacacggtctcactgtcatccaggctggccagctttattgttttaactggtataatgagcatataataatttataagtaagcttattcatgcgaataatacagaaagataaagaccttctctactataataatgattcaattagaaaacctactaatataatttagttcgttaatatgcatcataagagaaaagttgtcttatcaactcaaagttgctgtaaaggtattggataaaattcaggtcactgtcttgaccaaaactagtaagaaaatgggaattgatgaatatttctcaacatgctaatattttaagccaaaagccatcatcttgcttaatggtaaaacatcaccattaatatttattgttatcctgggtatattaactgagaaagcagatatgagaaagaaagaagatagaaaagaggagatgtgagtatcattatttacagaggctagggctgtgtaccaggaaaatccaaaatgatcaactgaaaacctacactaacctatataaacctatacttgtatataaaaatatatataaacaattacctgttagaaagtatgttgaaagaaaatattttcaataccaaaaaagagataaaatacttaaatgtatataaagaaaaatttttaaatgctatggagagacacatagaagccttaaatgaaaagatatttcatgtacttggataagaacacatattatgataatgagattggttctccctaaagctttttaaaatttaacacaatcccagtatatacatgaacagggcaaattagttatgtatattgctgtatatataacaaacaacctcaaaagctagtggcttaaaacagtaaaatatttcacaattgtgaaatctcacaatttcgctaagtcaggcattcaggagcagtttagttggatgcttctggagattctcatgtagctagccaagatgttgaccagggcttggtcatctgcgggagtaactgggcccagaggttctacttccaagatagctcactcacatggctggcaagcggatgttggcagttgtcaggaagcttcagttccttgccttgtggacctccacctagccctgcttgacctcatggggctggcttttcccagagtgtgtgatmccaggcagaagcggcagtgctttaggaagtcacaaat

SEQ ID NO: 698040 - DNA, 1392 bp, Homo sapiens
tgatgaactagaactattttggagtcagcttattccacacaaagttatcatggaataagcttgagaacataacaaaaaaatgattttgtttttattgttgaaatttgagaagggaaggaaaaggtaatttttttccagcatacttatttcaaattataacagcgttattgttttattttattatttttaaaattttatttatttttattttaattatttttgagacacggtctcactgtcatccaggctggccagctttattgttttaactggtataatgagcatataataatttataagtaagcttattcatgcgaataatacagaaagataaagaccttctctactataataatgattcaattagaaaacctactaatataatttagttcgttaatatgcatcataagagaaaagttgtcttatcaactcaaagttgctgtaaaggtattggataaaattcaggtcactgtcttgaccaaaactagtaagaaaatgggaattgatgaatatttctcaacatgctaatattttaagccaaaagccatcatcttgcttaatggtaaaacatcaccattaatatttattgttatcctgggtatattaactgagaaagcagatatgagaaagaaagaagatagaaaagaggagatgtgagtatcattatttacagaggctagggctgtgtaccaggaaaatccaaaatgatcaactgaaaacctacactaacctatataaacctatacttgtatataaaaatatatataaacaattacctgttagaaagtatgttgaaagaaaatattttcaataccaaaaaagagataaaatacttaaatgtatataaagaaaaatttttaaatgctatggagagacacatagaagccttaaatgaaaagatatttcatgtacttggataagaacacatattatgataatgagattggttctccctaaagctttttaaaatttaacacaatcccagtatatacatgaacagggcaaattagttatgtatattgctgtatatataacaaacaacctcaaaagctagtggcttaaaacagtaaaatatttcacaattgtgaaatctcacaatttcgctaagtcaggcattcaggagcagtttagttggatgcttctggagattctcatgtagctagccaagatgttgaccagggcttggtcatctgcgggagtaactgggcccagaggttctacttccaagatagctcactcacatggctggcaagcggatgttggcagttgtcaggaagcttcagttccttgccttgtggacctccacctagccctgcttgacctcatggggctggcttttcccagagtgtgtgataccaggcagaagcggcartgctttaggaagtcacaaat

SEQ ID NO: 698041 - DNA, 679 bp, Homo sapiens
accaagagccttctgtgattggtgcctgcttcatcttccgccttctcccttgccagttctctacattgttctctaatttaatggataatgtttgtcattcgatttctcacttccaaaccttttcccagtaccatcccttctgcctggagtggttttccttctccctgagcctgactccctcctgcttctcctttgggcatcactttcttgaggaaacagttgttgatggcaacctcaggcttgcttacaggcctttgttaatgcagtggtggtaataatgactatgtgagatggtaattatcattttataacatctttattgagatataattaaccatagcataacatttacctattaaaaatagacaacttaatggttttgatatatgcccaggtctgtgtgtagcacaatctaagtttcaaccattttcatcaacctaaaaagaaatcttatacycactagctgtcactccccattctctcctgtatcccagcccttggcaaccactgatttactctctagatttatctattctgggcattttgtataaatggatcatgttacatgtagtcttttataagtgtcttctttcacctatagtgttttcaaggttcatccatgtacatccatctatgttaatatgtatcagtgtgtcattcctttttactgtggaataat

SEQ ID NO: 698042 - DNA, 647 bp, Homo sapiens
ttttttagattagaaaaagcttagtttttttcctgatgattactgaagaatgggatttctgcccatcggytcctaattttccattgacaggactgcttgctgctcctttcccaaaggtgaagatttgggttttagagaaattgtcttaaataattctttctgataaaacaaaggaagagctaattttgggctgaaatcatgcctggcatgtgacagtaaaaccataaacgtaaataagacactgtcatgggggaacggtagtgaggatgaagggaccgcgaccatcactggaaagcatgtgagccaatgctactggccaccagagacctgcccaacggatcagagcacacacagcaggtgtaaccctcacagctacccagaggtcaattctgtctgagcatcagtaatccagggtcaggacagcttgttcctatcagaagcaaaagggccacaatctcatgttgtccttcccagctcaagttcccaggacaagtaagtaggacaacagtgaaggtctccagagcccaccagcttttgctgagactgctagtccaagagccccagctgagtaaattctccaggaggaaaatggcagaaactatcaaaggatagtcagtaaactggtgggtctgtacctttttggctta

SEQ ID NO: 698043 - DNA, 671 bp, Homo sapiens
atcgtgtgatagtgggaggaggatggcctttattatttgtaaatatgatatttaatgcaacccaagttttaattttaagccatttctcattagtgcatcttcatatgaaatttgaatagtatgaaatcaattatgcagaggaaaagtacttgactattgataggaagaaggaatgctgtattaggagtcaggagacatagctcagtacttactcartatgtgactttcaacaaacaattgttcccctctaagcctcagtctcctgagttgtaaaatgaaagaatgacactggatcctgtttctaggttcctttgcactttcaaaatctttaagaatcttttgttgttgttgacaaaaggatttaaagagtagggacaagtgaccatccataagtgatgaaaagaaaagttaacccaagagatacataaagtggggaagcagcagagttacagttggagaaaccagggagtgaagtcgaggtgtgccacattccctctagatgactcttgaagggttgggtttctcttctgtaaaacagagaccatagctcagaggtttgttataaggattaaatgagataatgcataaaacatgcttccaggaataaagaatcatggaagtgaataaggaagaaaggagatggaggaagaggaggaagagaaaatgactta

SEQ ID NO: 698044 - DNA, 671 bp, Homo sapiens
atcgtgtgatagtgggaggaggatggcctttattatttgtaaatatgatatttaatgcaacccaagttttaattttaagccatttctcattagtgcatcttcatatgaaatttgaatagtatgaaatcaattatgcagaggaaaagtacttgactattgataggaagaaggaatgctgtattaggagtcaggagacatagctcagtacttactcagtmtgtgactttcaacaaacaattgttcccctctaagcctcagtctcctgagttgtaaaatgaaagaatgacactggatcctgtttctaggttcctttgcactttcaaaatctttaagaatcttttgttgttgttgacaaaaggatttaaagagtagggacaagtgaccatccataagtgatgaaaagaaaagttaacccaagagatacataaagtggggaagcagcagagttacagttggagaaaccagggagtgaagtcgaggtgtgccacattccctctagatgactcttgaagggttgggtttctcttctgtaaaacagagaccatagctcagaggtttgttataaggattaaatgagataatgcataaaacatgcttccaggaataaagaatcatggaagtgaataaggaagaaaggagatggaggaagaggaggaagagaaaatgactta

SEQ ID NO: 698045 - DNA, 659 bp, Homo sapiens
tgcatattctctaatttgggagtacagagttctagaaaaaaaactcttggtaaggtgtatttaattttaatgtcactgacctatcaattactgagaaatgcaaattaaaatatctcactaaattggacttgactatttctttttgcagttcattacatatttcaaggctatgttattaggtacatrtaagtttatcattattatatatttgtcatgaatttagccttttttcactatgtaatgaccctcaattatctccagttatgctttctgcctgaaagtatatttagtctgctttctatttctatttttgtcagctttttaaaaattcaattttcactagcgtatcttattctgtcaactctcaatctttgtttgtgcaagatttttttgtaaacaacccataactgattgtggagtattttttagtctagtctatcactctctgtctttaatggcaaatttggtctatctacacttattatcactgatctatctgatttttaccatcttattttgtgctttatgttaaactttcttagtccattctctatttctccttgccaagtgtctaatcagattgatctacttttcttcattcacttttttttctttgtttctgtattggttttgctctttgacattctagttctctttcc

SEQ ID NO: 698046 - DNA, 663 bp, Homo sapiens
tgtcgattattagctgcattttatagctaaaggtaggcaggcacagagaagttacgtctcttgcccacagtcacagcaagcaaacagacctcagaccaaagtctttctaactccttatttcacatctaaaacactatgtgacgccacckccaaaaaatgtgggggttactctaggacaaaagaagctcatgaaagcaaagagagaagcatagagcttaaatttagaacaatattcagggtgattgggaaaaatagcctccatacaaatataatcggttcatcaccaggtgaataaaatgagagaggaacctggtacaagtgaagttcattgaatttgcttgcaaaaaaacataattcaagtgtggaagtttggaaactaaaatagtaatcagctaaagaaattttcaggccaacttagacacaatggtgacaaagctcccctgaggagacaggaactatactacttgcaactctaactgaatggacttaacttagcaattaagatcaccgtaagtttgatcagataagtattaaagggtgtcttgggtacatttgcagattcagacactcttagttgtgaaattcttcaccaaaaatttgcaacttatggcttgcacattaaaaacatgatatgaatgaaattcagatatctcttggtaaatt

SEQ ID NO: 698047 - DNA, 889 bp, Homo sapiens
aggggtccatgaaggccaagttccttgggcccacagaagtcaggatgcagcccggggtcgagggattccttccccagtggcctggagcccgagagggtgtggcctggagcccgagacagtgtggaagcccagagaagctgcagagaggcccgatgggggccgctgagctctagtcctgctgtatcggcccccagtcttttctgtggaccagttctgatgagtgggtcggggatacctgggatgctgaattgagcagcaggaggaggccacgtagggacctaaaatgcagtgactgattagcaatgtcggcccggacacaggcgtggcagaggcgcccrgccactggcttgccagcccctgctgagggctttctagctggaaggagcagccgagaccagttccctggggagaatattccttagacactgcgtgtgctgtcctgcttcctaacatcccacaccttgtcttctgtttttctcattcgcctaatgtcctgcaagtcgatgacagcatccagcaccaagtcccacattgagcacaaatctgggggaaattgtcccattttcccagagtcctgatggattaatctgaggcctatgagaaccaagccctgcattcaagcccgggttttgtagccccccgggtggatccctcaccctcaacttcagtttcctcatttatccagtggagaggcgtgatttgccttcagagagccccggggaggctgcaaacatgggcccaggaaacactcctgaacgctggcgcccgcctgcgtccctggccaggtccactccgggatgcagagcagtcctgctggacggccatgctgccctcctgggagggctcttactcgtgggtgggatccagcaggctctgacagtggatgtgt

SEQ ID NO: 698048 - DNA, 889 bp, Homo sapiens
aggggtccatgaaggccaagttccttgggcccacagaagtcaggatgcagcccggggtcgagggattccttccccagtggcctggagcccgagagggtgtggcctggagcccgagacagtgtggaagcccagagaagctgcagagaggcccgatgggggccgctgagctctagtcctgctgtatcggcccccagtcttttctgtggaccagttctgatgagtgggtcggggatacctgggatgctgaattgagcagcaggaggaggccacgtagggacctaaaatgcagtgactgattagcaatgtcggcccggacacaggcgtggcagaggcgcccagccactggcttgccagcccctgctgagggctttctagctggaaggagcagccgagaccagttccctggggagaatattccttagacactgcgtgtgctgtcctgcttcctaacatcccacaccttgtcttctgtttttctcattcgcctaatgtcctgcaagtcgatgacagcatccagcaccaagtcccacattgagcacaaatctgggggaaattgtcccattttcccagagtcctgayggattaatctgaggcctatgagaaccaagccctgcattcaagcccgggttttgtagccccccgggtggatccctcaccctcaacttcagtttcctcatttatccagtggagaggcgtgatttgccttcagagagccccggggaggctgcaaacatgggcccaggaaacactcctgaacgctggcgcccgcctgcgtccctggccaggtccactccgggatgcagagcagtcctgctggacggccatgctgccctcctgggagggctcttactcgtgggtgggatccagcaggctctgacagtggatgtgt

SEQ ID NO: 698049 - DNA, 889 bp, Homo sapiens
aggggtccatgaaggccaagttccttgggcccacagaagtcaggatgcagcccggggtcgagggattccttccccagtggcctggagcccgagagggtgtggcctggagcccgagacagtgtggaagcccagagaagctgcagagaggcccgatgggggccgctgagctctagtcctgctgtatcggcccccagtcttttctgtggaccagttctgatgagtgggtcggggatacctgggatgctgaattgagcagcaggaggaggccacgtagggacctaaaatgcagtgactgattagcaatgtcggcccggacacaggcgtggcagaggcgcccagccactggcttgccagcccctgctgagggctttctagctggaaggagcagccgagaccagttccctggggagaatattccttagacactgcgtgtgctgtcctgcttcctaacatcccacaccttgtcttctgtttttctcattcgcctaatgtcctgcaagtcgatgacagcatccagcaccaagtcccacattgagcacaaatctgggggaaattgtcccattttcccagagtcctgatggattaatctgaggcctatgagaaccaagccctgcattcaagcccgggttttgtagccccccgggtggatccctcaccctcaacttcagtttcctcatttatccagtggagaggcgtgatttgccttcagagagccccggggaggctgcaaacatgggcccaggaaacactcctgaacgctggcrcccgcctgcgtccctggccaggtccactccgggatgcagagcagtcctgctggacggccatgctgccctcctgggagggctcttactcgtgggtgggatccagcaggctctgacagtggatgtgt

SEQ ID NO: 698050 - DNA, 614 bp, Homo sapiens
ccagccaggtgaaccccagccaggggagccccagccaggggagcctcagacaggagagtaccagccaggcgagccccagccagaggagcaccagccaggggagccccagccaggtgaaccccagccagcggagcaccagccacgcgaactccagccaggggagccccagccaggggagccccagccaggagagccccagccaggggagcaccagccaggcgagccccagccataggaacactatcggggtgataggcaccacctcctccccgaaggctactgggtcaacccacagcttccctcctggggccacagatggcccactggccctccctggacagctacagggaaactccaycatggagccaccctcctggccttcccctactgaggaccccaccggccacttcctgtggcatgccacccgttccacccgggaaacacttctgaatcccacgtggctgcgaaatgaggacagtggaccctccggttctgtagacctgccattgacctccaccctcacagctctgaagacccccgcctgtggtgagttcctcgaatggtgcatggggactaggactaataggacccatagcctgtgtgagcctctgggg

SEQ ID NO: 698051 - DNA, 591 bp, Homo sapiens
ggattacaggcacccaccgccatgcccggctaattactgtatttttagtagagacggtgtttcaccgtgttggccaggttggtcttgaactcctgacctcaggtgatccacccacctcagcatcccaaagtgctgggattacaggcgtaagccagcccagcctcatctgagatttttgaatggagactagtgcctttttccattggaaaatatgccccgcgcttctcaggatcctgtcccagggagccgtgaagcacagcctagatccaaaataaaaggtgtcagccctccagatcygtccccttacaaaaaacagaaaaacaaatatccagtaagacctaggagaagacagtgtgcaataccaaagcagtgttcttgtcttctgtatagaaccacagccttctgtccttgtgacagcttaacctaaagcctgatgtcctcagaagcaacccaggggcaccggccccatcagcaggcctgctcttctagctctcggcagaaaccaggaatgggttccagacaggagcatctcagaataacttcttaggtggtatctgaatttatgccaagtgaattttacccccacacttc

SEQ ID NO: 698052 - DNA, 591 bp, Homo sapiens
ggattacaggcacccaccgccatgcccggctaattactgtatttttagtagagacggtgtttcaccgtgttggccaggttggtcttgaactcctgacctcaggtgatccacccacctcagcatcccaaagtgctgggattacaggcgtaagccagcccagcctcatctgagatttttgaatggagactagtgcctttttccattggaaaatatgccccgcgcttctcaggatcctgtcccagggagccgtgaagcacagcctagatccaaaataaaaggtgtcagccctccagatctgtccccttacaaaaaacagaaaaacaaatatccagtaagacctaggagaagacagtgtgcaataccaaagcagtgttcttgtcttctgtatagaaccacagccttctgtccttgtgacagcttaacctaaagcctgatgtcctcagaagcaacccaggggcaccggccccatcagcaggcctgctcttctagctctcggcagaarccaggaatgggttccagacaggagcatctcagaataacttcttaggtggtatctgaatttatgccaagtgaattttacccccacacttc

SEQ ID NO: 698053 - DNA, 591 bp, Homo sapiens
ggattacaggcacccaccgccatgcccggctaattactgtatttttagtagagacggtgtttcaccgtgttggccaggttggtcttgaactcctgacctcaggtgatccacccacctcagcatcccaaagtgctgggattacaggcgtaagccagcccagcctcatctgagatttttgaatggagactagtgcctttttccattggaaaatatgccccgcgcttctcaggatcctgtcccagggagccgtgaagcacagcctagatccaaaataaaaggtgtcagccctccagatctgtccccttacaaaaaacagaaaaacaaatatccagtaagacctaggagaagacagtgtgcaataccaaagcagtgttcttgtcttctgtatagaaccacagccttctgtccttgtgacagcttaacctaaagcctgatgtcctcagaagcaacccaggggcaccggccccatcagcaggcctgctcttctagctctcggcagaaaccaggaatgggttccagacaggagcatctcagaataacttcttaggtggtatctgaatttatgccaagtgaattttacccccrcacttc

SEQ ID NO: 698054 - DNA, 693 bp, Homo sapiens
tgtcagcaccgccaaccccagggggttcccatccgaccagccccgagccgggagtgaggtgatgccaccacgactggcccaggggaaagtctgtcatctcagaaggccaggcagaggctgctggtgctctttacgccaggggagttcaacgtcaggttgaagagcgctggctgagaggagccctcaccctcatgcagcagcagtcatcaaaagtgacattctcagagggaggtgctagaccaataccaccaccgttcaggacctcttcattgaggacgtgggccagtggccaacccgctaactcttccccctgcaggtctgcagaaccggaggccatagaggtgccgccgcagcttacccgtcgcacaggagcgccacgcagttctcctggcaccagaatgcaatcctggacgcggcaaacttctaaaaggagaagaagcccattaacttcacgccacctgcaggggcccgacgccgggcgctctgatccaacaagagcaagaccgaaggacgctcacgcccccacatatcraggaagaggaaacagcactggaacattctggaatcagtggggaaaggagggtagctgattccctgtttcccaagcagatgacaaaagccccccagtggttctggcactccctgcagggcctgcgacagcctccaaagccaacaagataggtcagacagtga

SEQ ID NO: 698055 - DNA, 607 bp, Homo sapiens
tccccaggagctcgactacgccactgtgatggcagctgggggcactggacggctgagcagctccaattagctgagtcctccctacggtcagcccccmaggaagctcgctggcccggccacctcaggagctgcacttgtcacctgcagatggaggctcagggaagaagttgcccctgggcctgcagtgcccgtgcacaccggcatgacctctttcctcacacttgactctcggggcctgaggtcgcaccaccgagggtctgtttgttatgatttcaaaagttctctccaacaattccacctcgctggggggagctgttatttaaactcttgagatgtatttacttttggcccaaggtcaggtgatgatggttttccacggaagcgagcgccaggcccatctgtttagacaagtgtgtatggcgggtggggccgtggggctggtccgggacgttcagtccaaaccgccagggagcggacggcccaggaaaatatccgtaaaccccgagagatgcttattgttctctcacataaaaaaatttggaggcagggatgcccagcctggtgtgccatttagtgacattgggggcgggcttctggtactttgctg

SEQ ID NO: 698056 - DNA, 607 bp, Homo sapiens
tccccaggagctcgactacgccactgtgatggcagctgggggcactggacggctgagcagctccaattagctgagtcctccctacggtcagcccccaaggaagctcgctggcccggccacctcaggagctgcacttgtcacctgcagatggaggctcagggaagaagttgcccctgggcctgcagtgcccgtgcacaccggcatgacctctttcctcacacttgactctcggggcctgaggtcgcaccaccgagggtctgtttgttatgatttcaaaagttctctccaacaattccacctcgctggggggagctgttatttaaactcttgagatgtatttacttttggcccaaggtcaggtgatgatggttttccacggaagcgagcgccaggcccatctgtttagacaagtgtgtatggcgggtggggccgtggggctggtccgggacgttcagtccaaaccgccagggagcggacggcccaggaaaatatccgtaaaycccgagagatgcttattgttctctcacataaaaaaatttggaggcagggatgcccagcctggtgtgccatttagtgacattgggggcgggcttctggtactttgctg

SEQ ID NO: 698057 - DNA, 607 bp, Homo sapiens
tccccaggagctcgactacgccactgtgatggcagctgggggcactggacggctgagcagctccaattagctgagtcctccctacggtcagcccccaaggaagctcgctggcccggccacctcaggagctgcacttgtcacctgcagatggaggctcagggaagaagttgcccctgggcctgcagtgcccgtgcacaccggcatgacctctttcctcacacttgactctcggggcctgaggtcgcaccaccgagggtctgtttgttatgatttcaaaagttctctccaacaattccacctcgctggggggagctgttatttaaactcttgagatgtatttacttttggcccaaggtcaggtgatgatggttttccacggaagcgagcgccaggcccatctgtttagacaagtgtgtatggcgggtggggccgtggggctggtccgggacgttcagtccaaaccgccagggagcggacggcccaggaaaatatccgtaaaccccgagagatgcttattgttctctcacataaaaaaawttggaggcagggatgcccagcctggtgtgccatttagtgacattgggggcgggcttctggtactttgctg

SEQ ID NO: 698058 - DNA, 756 bp, Homo sapiens
tttgagaccagcttgggcaacatagcgagacaccgtctctacaaaaaaataacaaatagtggggcgtgatggcgcgcgcctgtagtctcagctacttgggcggtcgagatgggaggatcgatcgagtctgggaggtcgaggctgcagtgagccaggatcaccgccaagatcgcgccactgcattccagcctgggcgacagagggagaccctgtctcaaaaacaaacaaaaaatcctagaccgtttacaaacagccttccgtctcttcctggycaagtcctaaccctggctaacctcgccgtctacagcctgaattttggcaaccgaaaggcagcgccggcgccacgtgcacacgggctgggccgctccgccagctgccagggccactgccgcgctcactcccagagcgcgctgcgagccgcggcgcctttgtgacgccatcagcccgcgcgccgccgccgccgccttctgtgcagtcgcggcccgggcggacggtggctggctgctccgcagcgctcggctggctgcagcggcaccgcgggttgcgcggccggggatgctccagcgggcgcgatggcccccgccatgcagccggccgagatccaatttgcccagcggctggcgtccagcgagaagggcatccgggaccgagcggtgaagaagctgcgccagtacatcagcgtgaagacgcagagggagacaggtgggcgcacggccgcggtcagccgcgccacatggcgggccgggggccggggct

SEQ ID NO: 698059 - DNA, 583 bp, Homo sapiens
caggtgggaattataaacrctcacttaaaatgaaccaggggaccttgcacttcaaagaaatctcacagtttttaaatcctcttggtaaatatgaacatttttttttagagactggatctcactctgtcacccaggctgcaatgcagtggtgctatcacagctcactgaagcctcaacctcctgggctcaagcaatcctctcaactcagcctcccgagtagctgggaccacaggtgtgagtcaccacgcctggctaattatgaacttttgtacattggctttgctgaaagcaagaaacaggtctattctcctagaatgtgggctgagcttactctgtcagcccactggtatttcattcaagttaattgatcaacctagcaatatgcatttcataattattgccaaaattaccatgactgcatttatctgtgtagagtgtgtgtttcacctgggcctccagtagattaaatagcacagctctagactttattttttctttttcctttttttttgagacagagtctcactcttgtagcccaggctcgagtacagtggcgtgatctcagctcactgcaacctccgcc

SEQ ID NO: 698060 - DNA, 583 bp, Homo sapiens
caggtgggaattataaacgctcacttaaaatgaaccaggggaccttgcacttcaaagaaatctcacagtttttaaatcctcttggtaaatatgaacatttttttttagagactggatctcactctgtcacccaggctgcaatgcagtggtgctatcacagctcactgaagcctcaacctcctgggctcaagcaatcctctcaactcagcctcccgagtagctgggaccacaggtgtgagtcaccacrcctggctaattatgaacttttgtacattggctttgctgaaagcaagaaacaggtctattctcctagaatgtgggctgagcttactctgtcagcccactggtatttcattcaagttaattgatcaacctagcaatatgcatttcataattattgccaaaattaccatgactgcatttatctgtgtagagtgtgtgtttcacctgggcctccagtagattaaatagcacagctctagactttattttttctttttcctttttttttgagacagagtctcactcttgtagcccaggctcgagtacagtggcgtgatctcagctcactgcaacctccgcc

SEQ ID NO: 698061 - DNA, 596 bp, Homo sapiens
gaaaaagtcatcaaatgtttaataagaaacattttcctttaygatataaaatttttgttagttctgtacaatgcatatcctttttggtaagttctcactgctgagttctggcaggttttttcaagattcagcttttgaatcagtactaaagtaccaagtaatacttggcagtgaaagaatcatatgtttaattcttgagtgaggttcaattccaaggaatctcatcttgatgagcaacaaaacaaacaacatttagataatctggaccagtgattttcagactctgttcctttcgggtctctagggttctgcagtggtctcaaagtaagttgagaactgtgctaatttttataatatttcagaggagaggtgtccagctcttggatcaaagataaattttaagtgcctgtttttgttattgttttattggacaaaatactctgtgagccgtcaacccaccaaatacatgatggattgatttctaccctgttagtattacagacaatttccaaaatgaacattactcaaatggggaaactattaaaaatatggcaatttatttagtcagaaatgatttggtcatttaaagtagggaa

SEQ ID NO: 698062 - DNA, 1375 bp, Homo sapiens
tccaaaaattagctcaaaagctgtattaacccccattctgaagcctgactcttcttatcttggtgaatagtcattcagtcatcaaagtcaggagccaggagccaagcccaattcttccctttctctcactgaaaccatgtcccaaagagttaaagaaaccaatgactaacataatttcttgagtttgcataacaaattttaaaacacacacagacacaaaacgctgaaacttcttttgcttgtaagacaacaaaactggctgacatcagttaaaaccagtagagccaactagattatctgcagaacaaccttgctgaaattacagcctgaatttcaacagcatatttcatatgaacgcctcctgaatttgcacatgggacctatgaggtaacatgaaagaatagctgcccatgcctgaggacttttttcctttccttttccttttttcctttcaccaattgcctgctaatcccccaatccacctttaaacgtttttaataaaaatatggccataaagccagcagaaggagacagatttgagctgcacacctggtctccgtgttggtcgactcacaataaaagccagtattggcttccagtgcaccgggcagcgagaccctctgctcagtaacatcacctcctatgtttgcttggtgatcaagtcctgttgaagagtggaaattaaagaatttgtgcactttatttttttctgtagttcctctgtgaaagtaggtttcaagtttagtttctamgagtaacagggacagaaattaaggttattaggctgggcacggttggtcacatctgtaatcccagtattttgggaggccaaggcaggtggatcacttgaggtcaggagttcgagaccaccctggccaatatgacaaaaccccgtctctactaaaagtacaaaacttagccgggcttggtggttcgcactagtcccagctacttggaagactgaggcaggagaactgcttgaacctgggaggtggagcttgcagcaagctgagatcacaccattgcactccagccggggcaacccagtgagacttggtcaaaaaaaaaaaaaaaaagacattaaggttattggctgttaaattcaaaaggcaattttctgagctatacaacatgagagtgggaagtaaaataatctctaagattcccttcagtttatttacattattattaatgatccctgagtgcaaccatttcaaaaacatattttcaggtattttttgaaaatatgtcttcagcgttttatatcacagatgcctcattatggaaatctctccacccttgaaattcaattccactctctgtcataaagaaattatattttaataaaattttctgagttcataaatacatgcaa

SEQ ID NO: 698063 - DNA, 1375 bp, Homo sapiens
tccaaaaattagctcaaaagctgtattaacccccattctgaagcctgactcttcttatcttggtgaatagtcattcagtcatcaaagtcaggagccaggagccaagcccaattcttccctttctctcactgaaaccatgtcccaaagagttaaagaaaccaatgactaacataatttcttgagtttgcataacaaattttaaaacacacacagacacaaaacgctgaaacttcttttgcttgtaagacaacaaaactggctgacatcagttaaaaccagtagagccaactagattatctgcagaacaaccttgctgaaattacagcctgaatttcaacagcatatttcatatgaacgcctcctgaatttgcacatgggacctatgaggtaacatgaaagaatagctgcccatgcctgaggacttttttcctttccttttccttttttcctttcaccaattgcctgctaatcccccaatccacctttaaacgtttttaataaaaatatggccataaagccagcagaaggagacagatttgagctgcacacctggtctccgtgttggtcgactcacaataaaagccagtattggcttccagtgcaccgggcagcgagaccctctgctcagtaacatcacctcctatgtttgcttggtgatcaagtcctgttgaagagtggaaattaaagaatttgtgcactttatttttttctgtagttcctctgtgaaagtaggtttcaagtttagtttctaagagtaacagggacagaaattaaggttattaggctgggcacggttggtcacatctgtaatcccagtattttgggaggccaaggcaggtggatcacttgaggtcaggagttcgagaccaccctggccaatatgacaaaaccccgtctctactaaaagtacaaaacttagccgggcttggtggttcgcactagtcccagctacttggaagactgaggcaggagaactgcttgaacctgggaggtggagcttgcagcaagctgagatcrcaccattgcactccagccggggcaacccagtgagacttggtcaaaaaaaaaaaaaaaaagacattaaggttattggctgttaaattcaaaaggcaattttctgagctatacaacatgagagtgggaagtaaaataatctctaagattcccttcagtttatttacattattattaatgatccctgagtgcaaccatttcaaaaacatattttcaggtattttttgaaaatatgtcttcagcgttttatatcacagatgcctcattatggaaatctctccacccttgaaattcaattccactctctgtcataaagaaattatattttaataaaattttctgagttcataaatacatgcaa

SEQ ID NO: 698064 - DNA, 926 bp, Homo sapiens
tcccagcactttaggaggccgagatgagaggattgtttgagcccaggagttcatgatcagcctgggcaacatggccagaccccaaytctgtattaaaaaaatacaattagccagatgtgatggccaacccctgtagtaccagctacttgggaagctgagttgggaggatcacttgaccctgggagttcaaggctgcggtgagctgagatcatgccactgcactccagcctgggcaacagagggagaccctgtgtcaagaaagaaccaaagtagattcaaaaaatttctatgggacttggtgattatctgcagagaggagtctcaaatggcatgtatatgatgtaggtgactagacagactgatgccatcatctgagatctcaaattaagaggagaaagggttttatcaggaaagatgatgagtccagatttgaatattttgactctaacatacctgctgaatatctaggtggagatatcttataggtgattgaagattttattctaaacctcagaggagagaagtaaagtggtggaaattaaaaactatgagagtggataaagtcaacctgtggagaacaattctgtctcatttatttttattatttcattaatttttattctttaattcttctactttatgtggcgttattttgctgtttctctgctttcctacaccagaaacttaggtttcattttcagactttcttctttttaatataaacacttacgggtatacatttccgagtaccattttttgtttgttgctacattctattcattataaaatgcagtattttcaaaatcattgtttcttattttagacccatgaattacttagaagtgtgttattagaattcaaagcagatattttattcttaaatagcctttatttttagaaccattttagagttacagaaaaattta

SEQ ID NO: 698065 - DNA, 816 bp, Homo sapiens
gataagtcacttgtacatctggaggattcttttcaaagttaaaatatgtgtttgtttacatatatatgtatatatacgtatatatatacatatatacgtatatatatgtatatatatacgtatatatacatatatatatatacatatgtgtatatatatatatataaacaaagttaaaaagagcctctgtattcattggttgtggcagcctgataggaaagatcaagggtgactcctggggtttaggctggagaaactagcaggcaggtgataaaattcctttccttattggtttatgacctctatttgtaaaaatttgtctgtcatacttgtataaattgtttttccaatttgtttccttataaatttttaataattagttttgacattaaaaagttcaaagtggtcaaatctatttaagacttcttacatggatttatgcttagaagatcatttcccatcttcagagaaaagatgccttaatttgcatctttaaaaatattattcttttataggtagctctttaatttagcagaaatgtattctgtggtatgatgtgagcctatatattaatatattttgttaaaatttagctcattccacaaaagcatgattattggattggagggcacataaaagtaaaatgttaaagtcagagaattctcacgctctctttatctgcatctcaygtatcatgagcaaagtaaagagggaaaggttcaaggagaggtgtttgctccatttttactgctcttcaggcaggaagcagtattccttctctgatctcttattcccttttgctgtcactcttcaatc

SEQ ID NO: 698066 - DNA, 675 bp, Homo sapiens
ggttgacagactagtaacatttaacatggtcatttacaactgccacagaggggtctaaaaccgtaacacagcacagtgtttatagaaaagccaaattaggactaggtgcggtgactcacacctgtaatcctagcactctgggaggcctaggtaggtggattacctgaggtcaggagtacaaggccaacctggccaacatggcgaaaccccatctctactaaaaatacaaaacaaytggccaggcatggtggcctgtgcctgtaatcccagatacttgggaggctaaggcaggagaattgcttgaacccaggaggtggaggttgcagtgggccgagatcgcgccactgcactccagcctgggcaacagagcaagactctgtctcaaaaaaaaaaaaaaagaaaagaaaagccaaattaggccagtgttttcccaaaagttggtcaatgaattggtccagagctgatattctcgaaggtctggggtacagtgagtagaatatggacaatgtgctagttctacagaaggcagagcttattcatttcacatagctccgtttttatattttttaaatcattttttagaactaaaatatccttggcctaatgaaagtagaagtggggttcttaataaaaatattttggtcagaaaaggaaagaaagcaatgctgggttgat

SEQ ID NO: 698067 - DNA, 675 bp, Homo sapiens
ggttgacagactagtaacatttaacatggtcatttacaactgccacagaggggtctaaaaccgtaacacagcacagtgtttatagaaaagccaaattaggactaggtgcggtgactcacacctgtaatcctagcactctgggaggcctaggtaggtggattacctgaggtcaggagtacaaggccaacctggccaacatggcgaaaccccatctctactaaaaatacaaaacaattggccaggcatggtggcctgtgcctgtaatcccagatacttgggaggctraggcaggagaattgcttgaacccaggaggtggaggttgcagtgggccgagatcgcgccactgcactccagcctgggcaacagagcaagactctgtctcaaaaaaaaaaaaaaagaaaagaaaagccaaattaggccagtgttttcccaaaagttggtcaatgaattggtccagagctgatattctcgaaggtctggggtacagtgagtagaatatggacaatgtgctagttctacagaaggcagagcttattcatttcacatagctccgtttttatattttttaaatcattttttagaactaaaatatccttggcctaatgaaagtagaagtggggttcttaataaaaatattttggtcagaaaaggaaagaaagcaatgctgggttgat

SEQ ID NO: 698068 - DNA, 2530 bp, Homo sapiens
tgagtttagatcaatgttaacctacatggcaaaacctgccatgtttagtgtatttttttgtataaagtaggtttgatttttatcttacaatatttatcctaatgaaagttataaaaatatatgcatatatttatatgtgagatttaatatagataggtatatagattgttgatttcatatttcatgttccaagaagaggttctagatcaaatttctgtgttcagaatcaccagagaaatcaattaagattttggttcattttaaacattgcaatttttgaaagccaagataattccaaatctaattagggaaagctacattttacttctttgtgtaagttattggtgatttatatgcagtatggaccatcctccccccagaaattattcttatattccaattgtgcattagttttagaaccattttaattttaaaaccrtaagaaaataattttatgtttgcctatgtccaggagctgaagaaatcagcgattactttaaaaaatatatggcaatgtcaaaataaatgccaagaatcatatttctaggaatgcaaaagtgcttctcatatactcatatattaggtttcacagtattggttgcttactatatttgtttttatttttattatatatcataattacacatttttatttgcatttgttgcttattgtagtaaaaaggtaaaaaaaaaatgaacttgttaatgattagcttttatttgactaaccagttgaccaattttgctctgttttcaaattgcatatgatggggtattatgctgaaactgctaatatattgggtatttattgatacttaggaatagtcagtatttataaatatttaagaatgtcatggtccttatgttttgatgtttaaaatgttcactttgttgtacgttacatagtgtcttattcaaaattgaaaataataaaggtatttctaatagatgtagttttcatatgtcagagtgactgtataggaatggaaaggcttagataaattacaaatttctttccctctgtggttccatttcttcacatacatttgctgctggacccatgtaaactaccttaggtccttagtgcttcacagaacttttattctcaaaagttttattctttcatttgacacatattttagtatttgctatgtgcaaccattattgtagatacttgaaatatatctgtgaacactgaaattacattctagcaggcagacacagatgataagcatacgtaattaaattatataatgcattagaaaatggcaagtacagtggaaaaataaacagagtaaggtaagataaatagtaagggtaggcttccttgagcagagacttgaacgaagagagcacatggagttgtcatctgaaggatatgcttcccaggcataaggaacaacctgtgtgtttgcaaaatgtttcagggggagcccaggccagagtaaaagcagcagagaggaggattcgctttaccctgactgaaatggggttgaggccaaagaagtgaagtgatctgacttaggtttcaacaggacctttctggctgctgtgttatgaatagacttggggtgggggtgggggtgagaagaaacagggacaccagttaagaatgcaagaagtggccgggcgcggtggctcacgcctgtaatcccagcactttgggaggccgaggtgggcggatcacaaggtcaggagatcgagaccatcctggccaacacggtgaaaccccgtctctactaaaaatacaaaaattatctgggtgtggtggcacatgcctgtaatctcagctactcgagaggctgaggcaggagaatcacttgaacctgggaatcggaggttgcagtgagccaagatcaccactgcactccagcctggtgacagagcaagactccgtctcaaaaaaaaaagaatccaagaatcagatggcaatgatggcttgcagcactgtggtggaagcagagagtatgagaagtggggattctgaagggtagagcccacgggcttggggatttgagagaaaggtgtctaagatggcaccaaaattattggctcacttggaagcatggggttaccatcaactgggatgaggagtgggttttggagtaggaagaggtctgggaattgaccatggggtttcacacatggggaccactgttaccctgaggagcagtttccgtggagtgatgtagaagcccgactggagtggatctaagagagaagggagaccagaattggaaatcgcaagaacagacagctccttagagaagagtcatcagtggacttttctaaatccttattttcattttcccctaaatatcattgcttttgattatatccttctttaaatgctgttctcccatggccgttatagtcttacatctctgggtgcattttttcagtctcctttactgactggcattaagtaccccagggaccttgaaggaagaacacatttgggtcacaggagaaatgggaagaaggccattccaaagagaaagactacaatgagcagaggtatgaagatgca

SEQ ID NO: 698069 - DNA, 2530 bp, Homo sapiens
tgagtttagatcaatgttaacctacatggcaaaacctgccatgtttagtgtatttttttgtataaagtaggtttgatttttatcttacaatatttatcctaatgaaagttataaaaatatatgcatatatttatatgtgagatttaatatagataggtatatagattgttgatttcatatttcatgttccaagaagaggttctagatcaaatttctgtgttcagaatcaccagagaaatcaattaagattttggttcattttaaacattgcaatttttgaaagccaagataattccaaatctaattagggaaagctacattttacttctttgtgtaagttattggtgatttatatgcagtatggaccatcctccccccagaaattattcttatattccaattgtgcattagttttagaaccattttaattttaaaaccataagmaaataattttatgtttgcctatgtccaggagctgaagaaatcagcgattactttaaaaaatatatggcaatgtcaaaataaatgccaagaatcatatttctaggaatgcaaaagtgcttctcatatactcatatattaggtttcacagtattggttgcttactatatttgtttttatttttattatatatcataattacacatttttatttgcatttgttgcttattgtagtaaaaaggtaaaaaaaaaatgaacttgttaatgattagcttttatttgactaaccagttgaccaattttgctctgttttcaaattgcatatgatggggtattatgctgaaactgctaatatattgggtatttattgatacttaggaatagtcagtatttataaatatttaagaatgtcatggtccttatgttttgatgtttaaaatgttcactttgttgtacgttacatagtgtcttattcaaaattgaaaataataaaggtatttctaatagatgtagttttcatatgtcagagtgactgtataggaatggaaaggcttagataaattacaaatttctttccctctgtggttccatttcttcacatacatttgctgctggacccatgtaaactaccttaggtccttagtgcttcacagaacttttattctcaaaagttttattctttcatttgacacatattttagtatttgctatgtgcaaccattattgtagatacttgaaatatatctgtgaacactgaaattacattctagcaggcagacacagatgataagcatacgtaattaaattatataatgcattagaaaatggcaagtacagtggaaaaataaacagagtaaggtaagataaatagtaagggtaggcttccttgagcagagacttgaacgaagagagcacatggagttgtcatctgaaggatatgcttcccaggcataaggaacaacctgtgtgtttgcaaaatgtttcagggggagcccaggccagagtaaaagcagcagagaggaggattcgctttaccctgactgaaatggggttgaggccaaagaagtgaagtgatctgacttaggtttcaacaggacctttctggctgctgtgttatgaatagacttggggtgggggtgggggtgagaagaaacagggacaccagttaagaatgcaagaagtggccgggcgcggtggctcacgcctgtaatcccagcactttgggaggccgaggtgggcggatcacaaggtcaggagatcgagaccatcctggccaacacggtgaaaccccgtctctactaaaaatacaaaaattatctgggtgtggtggcacatgcctgtaatctcagctactcgagaggctgaggcaggagaatcacttgaacctgggaatcggaggttgcagtgagccaagatcaccactgcactccagcctggtgacagagcaagactccgtctcaaaaaaaaaagaatccaagaatcagatggcaatgatggcttgcagcactgtggtggaagcagagagtatgagaagtggggattctgaagggtagagcccacgggcttggggatttgagagaaaggtgtctaagatggcaccaaaattattggctcacttggaagcatggggttaccatcaactgggatgaggagtgggttttggagtaggaagaggtctgggaattgaccatggggtttcacacatggggaccactgttaccctgaggagcagtttccgtggagtgatgtagaagcccgactggagtggatctaagagagaagggagaccagaattggaaatcgcaagaacagacagctccttagagaagagtcatcagtggacttttctaaatccttattttcattttcccctaaatatcattgcttttgattatatccttctttaaatgctgttctcccatggccgttatagtcttacatctctgggtgcattttttcagtctcctttactgactggcattaagtaccccagggaccttgaaggaagaacacatttgggtcacaggagaaatgggaagaaggccattccaaagagaaagactacaatgagcagaggtatgaagatgca

SEQ ID NO: 698070 - DNA, 1196 bp, Homo sapiens
aagtcaaacttgttactaaacaggcagactgtccagccagccaaccaaaaagcaaaatgacagagtggagcacagccagacctcacacagcaaggcaaatgctggggagtttacagaacacaggaccagggccactagggagggagtgcttgggtctctaatcataccatgtgaacctctctgcacaccccaacattgctacttagggtacaatgaacatcgttgacagccttcaaggggcacataaagtgcaaaaggccactctgaaagaattggaggagggagagaagcagtatctccctccccaccactccctgtcccgaacctactccaacagcttgtcttggtgatgagaaatgacagggcagagacttgggggatgtgctcctgggctgacaatgggagttgctatgaattgaatgtttgtttccccctaaatttctatgttgcaaccctagaccccagtgtgatggtatttggaggtgtggggcctttgggaggtaattagggttagaagaggtcatgagggtggggcccccatgatgggattagtttccttataaggagatgaagggatcagcacttctcagtctgccacatgaagatacagtgagaaggtatcatctgcaggccaagaagagggctctcaccagaacctaaccatgctggcaccctcatctcagacctccagcttctagaagtgtgacaaacaaatgtttgtttgttgttttgaccacccagtctatggcagcagtccccaacatttttggcaccagggactggtttcatagaagtcaatttttccagtcaggggtggtggaggtggtgggagggatggttttgggatgaaactgttccacctcattattaggcattagattytcataaggagtgcacaacctagatccctcaaatgcatagttcacaatagggtgcatgctcctgtgagaatctaatgccaccgctgatctgacggcaggcagggctcaggtggtaatgtggtaatgctctcttgcatggcactcacctcctgctgtgtggcccagttcctaacaagccacagaccgctacaggtccatgggctggtgattggggatccctggtctatgctattctgttatagcccgagatgactaagacaggtgtgtatatacatcagccatggccagcactagctgcaaccttctcttcgagcc

SEQ ID NO: 698071 - DNA, 1196 bp, Homo sapiens
aagtcaaacttgttactaaacaggcagactgtccagccagccaaccaaaaagcaaaatgacagagtggagcacagccagacctcacacagcaaggcaaatgctggggagtttacagaacacaggaccagggccactagggagggagtgcttgggtctctaatcataccatgtgaacctctctgcacaccccaacattgctacttagggtacaatgaacatcgttgacagccttcaaggggcacataaagtgcaaaaggccactctgaaagaattggaggagggagagaagcagtatctccctccccaccactccctgtcccgaacctactccaacagcttgtcttggtgatgagaaatgacagggcagagacttgggggatgtgctcctgggctgacaatgggagttgctatgaattgaatgtttgtttccccctaaatttctatgttgcaaccctagaccccagtgtgatggtatttggaggtgtggggcctttgggaggtaattagggttagaagaggtcatgagggtggggcccccatgatgggattagtttccttataaggagatgaagggatcagcacttctcagtctgccacatgaagatacagtgagaaggtatcatctgcaggccaagaagagggctctcaccagaacctaaccatgctggcaccctcatctcagacctccagcttctagaagtgtgacaaacaaatgtttgtttgttgttttgaccacccagtctatggcagcagtccccaacatttttggcaccagggactggtttcatagaagtcaatttttccagtcaggggtggtggaggtggtgggagggatggttttgggatgaaactgttccacctcattattaggcattagattttcataaggagtgcacaacctagatccctcaaatgcatagttcacaatagggtgcatgctcctgtgagaatctaatgccaccgctgatctgacggcaggcagggctcaggtggtaatgtggtaatgctctcttgcatggcactcacctcctgctgtgtggcccagttcctaacaagccacagaccgctacaggtccatgggctggtgrttggggatccctggtctatgctattctgttatagcccgagatgactaagacaggtgtgtatatacatcagccatggccagcactagctgcaaccttctcttcgagcc

SEQ ID NO: 698072 - DNA, 664 bp, Homo sapiens
agaatgggttggcgtggagagccagacgcgctcaggatccaggcgatgggcctgggcatagccgtgtctgcaagggctgtcgtcaggggatcgtcgagaggacctgcttctacctagtggattcacagtactacccataaaaataaaccctgctaatgagacggtgtgtgggaagggggtgggagcatggtcattttattagagctgagcattaataatttccttgaggaccttggscaaactctttgttttgaagccagtggaggcctgggtcagtgtccctgagttctgagttaactgcgtggacaaatgatgagaaacagccatcactttagggatgttttaagagaaagtcggtgtgtgctgaaacagtgagttagagagactgggaacagaaagcaaagaccagaaagacaagaagcaaacatatgggaagtcaaaaaaggaaattgcctggaaataaagccagatgggtctggcaggagtgctgtcttggttgacatctgtgggacatgaccctggacagatcactggagtcagaggaggtcattaattaagaatccgctggttatccttggtgttttaaggttaccacggtagaaatagaaacgtgtgcagcacatagtcaacaagttttggcaaatgaccaaataagatacaaaca

SEQ ID NO: 698073 - DNA, 587 bp, Homo sapiens
ggttttaccatgttggccaggctggtctcaaactcctggtctcgagtcatcagcctacctcggcctcccaaagtgctgggattacaggctgagccactgtgccccacacatttaggataaggggaacaacttgcagtgccaagattgagaaaccatggttcagagggataggtaagaagttgtcaatactcatagagaggaatgggtcatgctgcttctaagggaaatgggaaacaaatggtcttacagaggaggtgatatctgatgtgggttttgaggaggaataggaaatccttggtaaagaaatgcttactatgttcagacacaatggttcaagcctgtaattccagcactttgggaggtcaagccgggtggatcacttgagaccggaagatcaagaccagcctcgccaacatgtcgaaatcctgtctctactaaaaatacaaaaattagtcgggcatggtggcacgtgcctgtaatcccagctacttcagtggctgaggcaggagaattgcttgaacccgggaggcggaggttgcagtgagccragatcacagtactgttctccagcctgggcgacacagtga

SEQ ID NO: 698074 - DNA, 606 bp, Homo sapiens
cgcccacctaatttttttctcttgtttggtatttctagtagagacggggtttcaccatgttgaccagactagtctcaaactcttgaccttaagtgattcgcctgccttggccttcctaagtgctgggattacaggagtaagccacggagcccagccagattgtataacttttatctgcaagaagattagtccaccgttaccaaaagctggaacctcattatactcttctgcctactttcacgtttgcaattttccataatttaaaaagagaaaaaaaattttaaacgctctagtgggatgttttaattttacttattctcattaatctgaagcctaaaaatgagttgctatctcttaatgtgacagttgaaataaaagaaacggaataaaagggggagttttcgaagcctttgatgggggaggaaagaccccaagcttctctccttagagggaaggaatccttacttacaggttagttccaccacgtgcagttcctcacagtgaccagcagggggaaaaagtagttttgcgtttccgatggatccctgcgccccrctgccaattccccaagcaaagggaagcgaggggagagcgcggagcccccga

SEQ ID NO: 698075 - DNA, 625 bp, Homo sapiens
accaggactaaaactgtgctctataaactgtaaatactcagccttataaacattaatgatgacacagaaaagagaggtgtcgagtgaataattggatgctgaaggttaaccatttagtgagttgaaaacatcgacaattggccactccataagaaagtatttccttaaagcttattttattagcgagggagactrtatgcattatgttattttcttttctcaaggtctgtatttatcccaaaacattcagtgttaaaactatatcaatgctagagttcaaatctcagctctacaagatgttgactttggggaaatcacttaattggctcctcagctgtcaaaggagataaggacagtcacctccttgacgtattattgcaagaattttgtgagatgatatttctctagcagtgttcttaactaggtcaaacttgaaatttgaataaatctggcatgtacagttaagtatttattatgggcaaggatttactccagagagagaagagctgaagaataccatgggaaataaatttgaattgtttcatgatggtagtgcccagatttcaccataatgtatgagaacagacagaaacataggacaaatttgaagtttttctgcaggaca

SEQ ID NO: 698076 - DNA, 625 bp, Homo sapiens
accaggactaaaactgtgctctataaactgtaaatactcagccttataaacattaatgatgacacagaaaagagaggtgtcgagtgaataattggatgctgaaggttaaccatttagtgagttgaaaacatcgacaattggccactccataagaaagtatttccttaaagcttattttattagcgagggagactatatgcattatgttattttcttttctcaaggtctgtatttatcccaaaacattcagtgttaaaactatatcaatgctagagttcaaatctcagctctacaagatgttgactttggggaaatcacttaattggctcctcagctgtcaaaggagataaggacagtcacctccttgacgtattattgcaagaattttgtgagatgatatttctctagcagtgttcttaactaggtcaaacttgaaatttgaataaatctggcatgtacagttaagtatttattatgggcaaggatttactccagagagagaagagctgaagaataccatgggaaataaatttgaattgtttcatgatggtagtgyccagatttcaccataatgtatgagaacagacagaaacataggacaaatttgaagtttttctgcaggaca

SEQ ID NO: 698077 - DNA, 603 bp, Homo sapiens
gttcagattccatgtttattagattccattttaaagcataagggcaagtattcccaggaagtatgtgacattgactactcgtctttgggcaatgctgaggtgggggagggaacaccagcctgaggcaggagtaactggatttgaatcctagatctatgcctgagaccttccaacaaccttacaaacatatgcacagtggacttttcactttccaagatgttttctacttgtaagagccaatggatgacccttttggcagctttacctggttggattctacaagtagcgtggcaccaggaagagaaaaaaaacaagatgcrgggaatggagattgtatcaagagtctgaatggcctgtgttttctttccgtcttcattccccaggccaccaaacaaaaagcttttgattgccagttttcgccacctgctggttgtttcacagcgttactctcttcatccatccaagaaagttctttcatccatcatcaatataaatattctccaagtttatgaaattcaaaaggtacattattctaacatgaacatactaatgtttaatataggtatgtatcggccaggtgtggttgctcatgcctgtaatctc

SEQ ID NO: 698078 - DNA, 654 bp, Homo sapiens
ctgcttatggccaattttggcagcaagacgataggattaaaaatagcttgaagatgatctagtcttaaataatatatttcatgatgaactttccttgggaaagtgcatctttctgcctacaagaatcacatgacccctttcaataatttatgtagtagagaaaaacacactatttctcatagagttttcagtcatgtgctgtggtgtgattgtttctggacattcataaaattttatagttaactgarttctcttttctgttttgttgctatttaacgtccattgaaaacatggctttcttttgcgcattctgttactttcagctgtactttctaataagaatggattgccctttttagcaatctttgattgaactggtacatttcagattacttaaatgtcatcaggccacacagcataccaggtaacagaaagccataaattaaaaataaaaaaaaggcaagcaaaattcttgttgttttttcttatctctgttcccagtcctattgcgctatttggagggatgatacgcccactcatgagcgagtgtgtgggtgctgcatgttaacagtggttcttcccacccaacatacctccgcacccttttctaaggtcactcattgtgtcttagcagtagtttagcaaagcagtatc

SEQ ID NO: 698079 - DNA, 654 bp, Homo sapiens
ctgcttatggccaattttggcagcaagacgataggattaaaaatagcttgaagatgatctagtcttaaataatatatttcatgatgaactttccttgggaaagtgcatctttctgcctacaagaatcacatgacccctttcaataatttatgtagtagagaaaaacacactatttctcatagagttttcagtcatgtgctgtggtgtgattgtttctggacattcataaaattttatagttaactgaattctcttttctgttttgttgctatttaacgtccattgaaaacatggctttcttttgcgcattctgttactttcagctgtactttctaataagaatggattgccctttttagcaatctttgattgaactggtacatttcagattacttaaatgtcatcaggccacacagcataccaggtaacagaaagccataaattaaaaataaaaaaaaggmaagcaaaattcttgttgttttttcttatctctgttcccagtcctattgcgctatttggagggatgatacgcccactcatgagcgagtgtgtgggtgctgcatgttaacagtggttcttcccacccaacatacctccgcacccttttctaaggtcactcattgtgtcttagcagtagtttagcaaagcagtatc

SEQ ID NO: 698080 - DNA, 605 bp, Homo sapiens
ttttctttcttgctctggtaggaaagagagtctttgagttgcctgcttaaatgttctcaagggaaaggccttagttgtcctgccaacccctttgatctttcctcaaggcagaagcagagagataagactgtggggaaaaagattgaaagcatagcatatgcctatatatcagcagtgtgcatcccaataattgtgtttttccagttattggttttcccaacagtagactgggctaccattctagaaactttttctcccataagatggcttaaaattcccagagaaatagtatcttcagtaaactcttgggtttccagaggttataactgggtctctgactctgctttcttgattttaaatgtaagttttttgctgcaatcaaacagaatataataacattctcaaagagagacaaaaaagcagttgtccacwgtaactgtgctatgttaggaattttatctgatctaagagtcaaaggctattcctggtgtcaaccaaagtgtcttctgctacatcatcaaagctttttatgatgggtttcaagtttgtagggtactgatgctacaagttcatcaccttttccacatgtgaatacaccttcctgt

SEQ ID NO: 698081 - DNA, 3467 bp, Homo sapiens
aggagggaacacggcatggggcaggagtaataaacactttctagaagaaggccctcttcttcaaatgaaacctcaggcaaaagcccaatgtttaacacaaacagaagcagagatgccctggttggagtagagatagggagcctggggccccatgctgctagacagccactcatactaaccctcctcatgttacccaaggcctttgtggcacacaatttaaaaaccaccagtacagaggatagaacatgaacacttgggttagacaagcctacctgcttgcttgcttgcttcatcttatttactcattcatgtattcactgctcaataaatatttattgaagaccatgtgctgggtgcactggtttgaatcctggacccacagctaattagctgtatgactttagcatctttcttagtcacattgggttttatttgctttctttgaaaatataccatacatagtgataactgcctcacagaccttcaggatcacaagagagagcggtggcatatgtggtattcagggagctcctggcccttagtgaatgctctcagtgaatatttgttccttcttcacttcctatgctgatcttcaaagtatgatgtaattccgagaaaagtcattttaaaaatatatctagtacacacactcacacaaacacagaaacatttttaaaacagctctacatgttcccattccttgtggtatactttgtttcaaacctgtatgcaactttcaaagtcttctttgttcccctctcaccttcagcttaataccatttctcaattcctgttcttggacacagcaagaaaccgcccttcctaccaatcttctcattttctcagtgtgagcttccccaactcattctctcagaatcttctccagattagctgatcccagcttctctgttagcatctactgagccacccttacttaaaacaaaaaaagcaatttccagagattgaaaaaaaaattacttttctttccagaacatccagcatcttccagttatcagaggatttcaccctcatttcttctgggtaaaaatgtgtttcttcagtgctggtagaagactaaacttggcctggctttgcaaatggccattaatgaggggggttagtactaaacagactttcaacagtttcccaaggaataggaattttcaactagcaaccactatcggatttttaaacttatatcattcaagtcagcaaagaaaactatgcatttcaagttttctctaaggtcaaacatttcattcattagacagaccatataatggccatgaatggaggctccaaatcccagctctctctcatattagctgtgtgaaaaactagcattttaatagtgcctgtttcatcatactcttataaagtatagttacaatcattttaaatggttattacattgcttcacatacaaaaaacactgaatatatgttatctattattgtcattgtcattattttaaaatagtgttctgaagagtgttttcagagctctggtagtggatgagtaaacctcaggcaaattataagaaataaaacattttccagggtctatgtaggagagagaaaaatgaaaaagacaaagtctttacagattcctttagctctcatcatgaagcagaagattgtattcacatccttggatcttttcctgccctctctctagcgatatggtaggcatacaatcatgattgtagaataagtgaaagagaatggatggaggaatgaatgaataaatgaatggatgggtaagcaaatgaacaaacaagcagatcactggtaatggaataaactaagcagtcatgttcctttccataatctttgatgttcataatctttgaagtatgatgatgtttatcatacttcacctaaatacacaggtctgatgtactccattctctttcaaatgaagaatcctgttggtcactatatgttgtccctcaccttccacccacacaaaccaaaaatagggttcttggcttccagctgtgctttctgggcttctttgtgatttttcctggcatcctcttggtctgctccatccttggcctctgctttccaggaagacacagcaggagcccacgtgtctgatatagaaaaaagcagtcctagcactgtcctgggaagaaacaaagacagtgctgtgagaaacacatattcacccatccaaacccaaagaatggactccgagacatgaagagtagccgaagtgagacttttgatgggggtcttgcaagatcgggtgtctggtagacaggtacaccctgggcagttacagcaggtaatttacctcctagcatgcaaatccctcccccagttcctcattggtcaagtactatggggttacaatcttcctggacgtcgcctaagtttaatcatcccccttataaggttataccctggtccccttcctgcttaagctttgatttcccaataacgaaactttcttcccttttatgggctgacccctcctctacattctgtttacatatcgtgaccttctagatgcatgcatgctgtttgttacatctgcaggctggctgccagtacttagatttatcatgccttgaaaatggaccatttaaaatgttttctcacagggccttgtggctctgcttttcagaaagactggaggacactcatagtcacaggaagactaggatattcatgggtagcaggcctgaattttctggcaagaacccttggactaaggtttcaaaagggagagaatttccatgtgaggctgtagagtgttagcatatctgctggatatttctcttgtgtattgactcaggtaagccccatttttctaacatggcagtgacatgatgcacaattttctagtgggatgagacagtgtacaggatataatttcagaatctatcagagtgacctgatacaggggcttcctttaagttttcctaatgcactggaagtggaaaggggcaatgcttgcaatttggtcagatcgaggtagacagtaacaatgcagttgagcatagaacagagtgaattcaaattgtagcaattgtaacaacctatggctatacttaagtatcttatttctttcagctgccaaagacgaagtgataacttagcacaaggtgtgaaaaaagaggagttgtcaataactatatatcaaagtgctatgtcaactgttgagtgcttcactgttgtgttaatttaatggcatttatttttatttatacaaaatttttcaatgatgaaaatytagtatgtagagttacctacgtgactgacaagcccagtcaaagttactttgacacactgactcccacagcataagagggatcaatgtaaagtcctatccttagatccaaagatcaattgcacaaatgaggcaataaattacagctatttggagagctgtcttaggctgaatctgggtttgaatatcacttccaccacttatagtattgagcaaactattagacc

SEQ ID NO: 698082 - DNA, 574 bp, Homo sapiens
tcccaaattcaatccagaattaggaagaaattaaagagcaaaatgtaaaaggtgactgacaattcaaagaactgaaaccgcatccgtttgtattggaaacccaaatcacatgtaatctttggagaatggaatttgacctcaaaacctcaaagaaaggatccacgaaaaggatgaattagaatcaacatttgaactcttccctccactgccccagcatctccacccatttttatccatttgattccgatactacagactgccattttagcttatcagaaccagacattgaggagcaacataagacaaatagttcagaatgctctgatttgaatgtgtccccccaaaattgatggttagaaacttaatccacaatacaacagtgttgggaagttgggcctaataaaaggtatttgggtcttgaaggcagaaccctcatgaatggattaatgtcattattgtagaagcaggttagttatratgaatgtgggttgttataaagtgagcctggcccctggtgcctttctgttttgcatgcactcacttgaccttccacctttctgtcataaaaagaccc

SEQ ID NO: 698083 - DNA, 562 bp, Homo sapiens
ggccaaggtgggtggatcacgaggtcaggagatctagaccatcctggctaacatggtgaaaccccgtctctactaaaaatacaaaaaaattagccgggcgtggtggtgggtgcctgtagtcccagctactcaggaggctgaggctggagaatggtgtgaacctgggaggcggacttgcagtgagccaagatcgggccactgcactccagcctgggcgactgagtaagactccgtctcaaaaaaaaaaaaaacaaacaaamaaaaaaaaaagatcttcatctctttgctctccaagtggcttcttggtcctcatgcaaatctttaaaactcctctacagaactatacataccaaggatatcgggagtagatgctgtatttagccacaaagaaaaagcaagtctcattatacctttccctgggaaactgggggctacctgccttgccttattggcacacacatacacacacacacacacacacacaagggatttggcaaaattagttaattaaaagttttgtataattcaacagtatgatatatatatatatatttatatacta

SEQ ID NO: 698084 - DNA, 2248 bp, Homo sapiens
tgcaggatattatccaggagaacttccccaacctagcaagacaggccaacattcaaatgcaggaaatacagagaatgctacaaagatactcctcgagaagagcaactccaagacacataattgtcagattcaccaaagttgaaatgaaggaaaaaatgttaagtgcagccagagagaacggtcaggttacccacaaagggaagcccatcagactaacagctgatctctcggcagaaactctacaagccagaagagagtgggggccaatattcaacgttcttaaagaaaagaattttcaacccagaatttcatatccagccaaactaagcttcataagtgaaggagaaataaaatactttacagaaaagccaacgctgagagattttgtcaccaccaggcctgccctaaaagagctactgatggaaagataactccctattttgaatgctaagtggatctttctttaaaaacagggggctgggtgtggtggctcatgcctgtaatcccatcactttgggaggccactgtgtgaggactgacttagctcaggaattcaagaccagcctgggcagcatggcaaaaagtcgtctgtacaaaattagccaggcatagtggcatgtgactgtagtcccagctatttgggaagctgaggtgggagaatcactggatcccaggaagcagaggttgcacggagccatgattgtgcactgcactccagcttgggcaacagagaaagaccctgtcttaaaaaaaaaattatatcttaaaacctggcagtattaatatcataaatcactaactataaaaagcaagctacacagtaatttgtattatatgatccagtttttgtgaaagacaaaacaagttttatgcctgttcctctaccatgcctccccaagtccttcattccaaatagcacctctgtctctactcttaaagcactaactgacccctgtgataggacacttcccagccaggctgataggtagacttgactgcctgtgtgtcttttcttcagagacagtgagcttccttttgtgaataataattgtagctaacatttaggagggtgcttctacctgctaaactctgtgatcagtactctaaatggattatttcatttattcactaaacagtcctttaaaatggtgctgttattcctcttcatcttacagatgaagaaactaaggaaaaaaaaaaaacaatgaaataataagtgcaagcacacagaactagtaaggaatagggtctgccaggtcccaaaagtcatgccatcaccacagccccatactgcttctggcatgggtagaggtcatatcttataactgccactccactggacccagcttagtacctggcctagggagatgctcagtcaatgctgattaattttaggtagaatagaaatgtcaggcacagtgagcacctttgctgtgattgattgggtgtcgattctctgctatgaagagaaggggtgtgctggatcaaacacatccctctggtgactagctctctgctttatttgtcctgctttcttgctcctccttgttaactgcaccacttggattcaaagctggagcttagtccagtcaaaggaaaaacagaactgtgaatgacctgagtgagcctgaaagacacatagaaagtctagcaagtaaaaaaagagagattaaaatttatatattgggaaatatttaatctaatcaagatattatctgaaattggtaatttgcaaacaatgtccagatttcaagtgctgatttagtgcccattcattctgaaatgatgttgattgaataatacatgatgtatgtggtttaaagactccagataacatgtgtagaaataagtaatatttctgctttgctgatcaaggcaaataattcattgaaatctcctggaatgcagagaggaactaaatcacatatgtgcagcaggaaaagtacatgcaagagtttcatgtggaataatattctccataagtgtamcagataaagtaatacagagttaaagaatggcttaatatttttatttaagtaagaaataacacatattatgttgacttattttggtaaaaaagcttacctaaatgtcttacaatgtatggcttcttatcatcatctttcttctgtgtctataaaaataattttattgtgggtttatgcaataaattaatattgcatgtttatggaataaattaaatataactgtcctggtaaatctaagattattaaagtctctaatcatg

SEQ ID NO: 698085 - DNA, 1473 bp, Homo sapiens
gtttgaagcacaaagtaaaatctttctttccaatccctgtcactgcacctccctagacagtcactacatggggcagtttatggacttcagcaatgtttacctaactccagatccacactataggagtccagccttcagggagaactagttttttacattttttgcctgcataatgagaagctttaagtttttcatatttttacctgagaacaagaataattacattctaggctatcacccaacaataataaaataatatgtgtccatgcaatataaatgccccatactaacacacaaggtacatgcaaaagcccattattgcaccaccaggaatatgcactaccaaacaytgagagttaatgttccctgataattttcaagtgagaaccatcagctcctacatattcacaatgaagcctttatactgatattggcacaagcttctgaaaatgttttaaatcctatacacaccctcagtttcctattaaatgttgtaagttaacactagggttctctctagtggtgaaatttgacatttccctacgcaataatttcaaaagaatttgatttctcccacttatttctctctaacatcattcataagccagacgaccaatcactggaggactgacaagagtatgaacttcgttcttgttttgttttgtttttgcctttttgatgagctttgatagtctcttaactaatcactcactcaaccaacatttatttagtaatgtacatagtattgaagactctatacagcttgacatctagggacacagatatgaaagtaattaaaatgcaatatagtaactattatatcagaggaaaaatcaaccaataaacagaggggaaaaattagtcctacctaggagagattagagaaaaatacacagagaaggaaacctgaagtttagcctcaatgggtgcatcaggttttgccaagtggagaaagaatattgcgagcctatgtaatagcatgagaaaagttcaagttggtgaaagagtatgggctgtgatggtgaatgtgagaaaggtgagagagaggtgtggctggaccaaacaatgaagagggggaaggatttagttctatagaccagggatagttacagaggttttcaaggaaaggattggcatgcccaaatctgtgtttcagaaaaacatgacttttcagcctgggcaacatagcaagacctattctctacaaaaagttaaaaaaaaaaaaaaaaattagccagacatggcggtacatgcctctagtcccagctactcgggaggatgaggtaggagaatctaaagccaagaagttggaggctgcagtgtgccaggattatgctactgctctccatcctgggcaaaaaagcgagaccctgtctcacaaaaagaaaaacaaaatgcctttggcagcactgtggaggatagtatgaagaggacagagactggaagtaggaaaaataattgacaagctgtgcg

SEQ ID NO: 698086 - DNA, 721 bp, Homo sapiens
cccagggcaaggctgctgagagcattgatctcagggtgctgctccccattacccacactgctggaccttctagaaaatctcggcaatggaaacgtgttggtctctggagactttttcagtaggattctagagaattctgggtaggtgaaatatagctagagatgtgtttcccattgcctttgatatttgtaactgtttgaaagcaatatcatgtaataagccaaagatgatgtaagtactgcaagattggaaatagtatttcatatcaataacgccaactgaggccgggcgtggtagctcgttcctatattctcagcatttttggagggtgaggtaggagatttgcttgagcccaggaggttgaggctgtagtgagttataattatgccactgtacttcagcctaagtgacagagtgagaccctgtctcaaataaaaagaagacatttattgggagcttaccatatgacaggctgcactgtgctaagtatattacatgcattgtctcatgcaatctataaacaatgccatgagtatatagctttgaaatttggggggtgataaaaatctgttgacttttcaaagtattcagtcctactagtattgggctctagttttgtgccaggtactgtccagtttctgtgataaaatatagtaatgcatttsagcttcactttccttagggcatgtttttgttaataaaacaatagttggcctaaaat

SEQ ID NO: 698087 - DNA, 1366 bp, Homo sapiens
atctttactaaagaaaaaaatacaaaaattagctgattatggtggcacgtgcctgtagtcccagctacatgggaggctgaggcaggagaatcgcttgaaccaaagaggcagaggttgcagtaagccaagattgygccactgctctccagcctgggtgacagaatgaggcaagactctgtctcaaaaataaaataaaagaaaataaaatactggagatatcttttctatgagacagaaaatgaaatcattgcaccttttggttttgtgaaagtcaacatcaaactttacaagagttataaaatgcctgggccatagtcagtagtaactgataagccaaataaaggcaacttcccatactcagatgaccgttagcccagcctgttagacagtgctccaagcaggaccataagaatactgtcatctgtttgcattactttttgaatcagagtaattttccttagtaagagtgaaatatgaaaatatttccggaatttcgtttgtccaactctatgaaactacctgcagaagttgttggaccattcttggtagaggcttagcacgggatccactctctgtttagcaagggataaaagtcagtattaacaacatgtgaacatagaatttatgcagcactggtcaggatgacaaatgttcacttgccatttgaaatgccagatgtattttacactgacactgatatacatggactttattttaaagccactgaattatgaagaaaaccgtcaagtgaacctggaaattggagtaaacaatgaagcgccatttgctagagatattcccagagtgacagccttgaacagagccttggttacagttcatgtgagggatctggatgaggggcctgaatgcactcctgcagcccaatatgtgcggattaaagaaaacttagcagtggggtcaaagatcaacggctataaggcatatgaccccgaaaatagaaatggcaatggtttaaggtaaaaataaatctataaccacatactaataatgtatttgtaatcattgagatagtaacttatttgaaaacattttctgatgctaaagactattttttttttattaacaggtacaaaaaattgcatgatcctaaaggttggatcaccattgatgaaatttcagggtcaatcataacttccaaaatcctggatagggaggttgaaactcccaaaaatgagttgtataatattacagtcctggcaatagacaaaggtaaaaaaaaagttttaatctggtattctataaaggaattagagaataaaatgtaattattcttatgcagatttattttggtggtaagtgtatggaattctttgaaattactttaaagactctttctgtctctctt

SEQ ID NO: 698088 - DNA, 1366 bp, Homo sapiens
atctttactaaagaaaaaaatacaaaaattagctgattatggtggcacgtgcctgtagtcccagctacatgggaggctgaggcaggagaatcgcttgaaccaaagaggcagaggttgcagtaagccaagattgcgccactgctctccagcctgggtgacagaatgaggcaagactctgtctcaaaaataaaataaaagaaaataaaatactggagatatcttttctatgagacagaaaatgaaatcattgcaccttttggttttgtgaaagtcaacatcaaactttacaagagttataaaatgcctgggccatagtcagtagtaactgataagccaaataaaggcaacttcccatactcagatgaccgttagcccagcctgttagacagtgctccaagcaggaccataagaatactgtcatctgtttgcattactttttgaatcagagtaattttccttagtaagagtgaaatatraaaatatttccggaatttcgtttgtccaactctatgaaactacctgcagaagttgttggaccattcttggtagaggcttagcacgggatccactctctgtttagcaagggataaaagtcagtattaacaacatgtgaacatagaatttatgcagcactggtcaggatgacaaatgttcacttgccatttgaaatgccagatgtattttacactgacactgatatacatggactttattttaaagccactgaattatgaagaaaaccgtcaagtgaacctggaaattggagtaaacaatgaagcgccatttgctagagatattcccagagtgacagccttgaacagagccttggttacagttcatgtgagggatctggatgaggggcctgaatgcactcctgcagcccaatatgtgcggattaaagaaaacttagcagtggggtcaaagatcaacggctataaggcatatgaccccgaaaatagaaatggcaatggtttaaggtaaaaataaatctataaccacatactaataatgtatttgtaatcattgagatagtaacttatttgaaaacattttctgatgctaaagactattttttttttattaacaggtacaaaaaattgcatgatcctaaaggttggatcaccattgatgaaatttcagggtcaatcataacttccaaaatcctggatagggaggttgaaactcccaaaaatgagttgtataatattacagtcctggcaatagacaaaggtaaaaaaaaagttttaatctggtattctataaaggaattagagaataaaatgtaattattcttatgcagatttattttggtggtaagtgtatggaattctttgaaattactttaaagactctttctgtctctctt

SEQ ID NO: 698089 - DNA, 608 bp, Homo sapiens
tctgggttaggtcaaataaagataaattcttgaagtgggtttttggagggaactactaaacatcacaaataataatagttctctgggaatggaactatttggagggaactactaaacatcacaaataataatagttctctggaaataaagcaaggatcctcacctttactataaatatttggcattatattaaagtacctatctgatgtataatgcaaaaacaatattatgaacattttctttattatatatatgcagagagataaatagaaatggatttttattatttatgcaatagttatgttctataaagtcattataaacacttaatcagcaaatactgaacaattgcttttaggagaaatataaggctaggttcctgagagcctctgcccatgttagttttatgactgatcagtatataacatagtctwgtgtgtatttccatttaaagacaccctattaatagtaatatttaccactggtttattacatggaacccagatccaacagcactataactggtgccagaagaaagcttatctaacaatggattttcttcctaaggcacatcacagccttcctctactgaggagtgccagatagca

SEQ ID NO: 698090 - DNA, 608 bp, Homo sapiens
atctttgttaatttgaaaagactaatagacatagtcctgggaaaagaaaaaaaatacacctataattcaggaatggcttttggggaagacaatatatgtcttagtaactacctgtttaattatgtatgagtacttattttatctgtgatggaatgtatcttgaaaagatcaggaagaattatagtgaaaaagttggacccctcatcagaggtagagygaaatggtagaaaatggaagaaaaaggagtcaagtcaagaaacacagtaattacaataagttaatatacacaggtaataagaagattaagattaatgtgataattgacgcaattattctcctaaaaatcttcataaagatttttagtgaggaaatactggaagcacaacctcctgtttgtccctggggtgactcaagaggcttcttggggtagccaaacacagaccaaattctagtgaataaaaaaaagaaaaagaaagaaaactcagaagaaaaacagaacacactgatttctcaaagtctctaggtcagatagataaggacaaatttaaattacagagaacaatgggacaagtagaaatacaaacccaaacttcctgattactcactga

SEQ ID NO: 698091 - DNA, 2764 bp, Homo sapiens
tcagggatttagagctagaaataccatttgactcaaccatcccattactgggtatatacccaaaggattataaatcatgctgctatgaagacacatgcacacgcatgtttattgtggcactattcacaatagcaaagacggaaccaagycaaatgtccaacaatgatagactggattaagaaaacgtagcacgtatacaccatggaatactatgcagccataaaaaaggatgagttcatgtcctttgtagggacatggatgaagctggaaaccatcattctcagcaaactattgcaaggacgaaaaaccaaacaccacactgtctcactcataggtgggaattgaacaatgagaacacatggacacaggaaggggaacatcacacaccggggactgttatgggatggagggagtggggagggataccattagggatatacctaatgttaaatgacgagttaatgggtgcagcacaccaatggtgcatgtatacatatgtaccaaacatgcacattgtgcacatgtaccctaaaacttaaagtataaaaaaataaataaataaataaagaacaccagtgaaaagattaaccattacatattcgacataatttacaagaaacataaaagaacaagaaattgttggtttcaaacataaaagtggttcccctttccactgtctgcaagagctaagtactctaaacccaagaaaggtcatcaaaataaatgtcatttgaaagttatggatgttatgacacttagaaagactacagaaaaatttaacggtgtgtctcataagtaccttaaactagagaatcataattctaagattcttaaagtgttatatgactgcatatagagtttcagcccaagtctgggatggaccagtttcaaagatatttttgagtatggtccttgtatattccacaaaatctttaaaaacttacactaagggaagcatcacagccttcccttctgaacaggggcatccattttattacctattcctctctttctccattgtgtgctgagaatgtggaggaaataccctgtctcaaagatctgtaaatagtaaaagccataatttaaaatgtgcacagtaaaacccgcccccaaggagccccatccacactcagtctcgatgtagaagttgagatcttgaacttcaatcagatgtcatgatgggatgactttgtaattgagctaggagcatccaaatcctgtcttctttctttgggatccttgacttgcccttagaaacctgaaaacttcactgggaagaccttgactacatacctccttacctacatgaggacggacactcctcctataataaatatagttaactttttacccaagagtttttctatagcatttctcatctctgaatttctcaacgtatatattaaaggactcagcatgtgtgtgataatggtataaaacacagtcatgaacttatcagtaggaaagtttgaaacaggtctaacatatatgaaaatacagggtacaaaaaagaggacaacaacggtactgccggagctgcaggtagacaaggctttacccctcttttcctgactgtaagttttaagggagcttaggatgactccataggagattaacagaaggttgaaaatgaccatacagattgctccactattgacaacaacagtgaggcctataaagtaggtgtcagtgcatgccagttccagtaatgggtgcatgtcacaactgaaatgaacaatgacattgggaccacagaaagggagactgtacacaacaatttgaaacgcagaatgtacaaaacctccaatcatggccaccaccaacagaaggaagcaaacctgtcgattcatgatggtcaaatagtgcagtggcttacagatggccacatagcgatcacaggccatcaccaccagaaggaagacctcagccccaccaaagaaatggtctataaatagctggcccatgcaaccttggaaggaaatagtctttttatcacagaataagcctacaattaacttgggagaaatggtagtggaatatgcagcatctataaatgacaggcaggcaaggaagaaatacattggggaacccaaggaagggctggcaataatatccaccacaatgagcaggttccccaccactgtcaccaagtatgtgagtaaaaacatgacaaataatgctttttgcacaccaggatcctgagaaaagcccaggaggacaaattctgtaatattgttattctgtctcatttactcttctttaaggcttgtatcagaggtgagagctcagggaaacagggcctgtaatgaaatagtgatcaggaatatgattacatccattgtgtcacagggcacatcttcattgctgtatcctgaatagtgatttacacataataaatatttagtaagtctctattgagttcctcacccaaagagcccatcttgccctgatgattctatttctcctcaaatattttagtttcagtgcacaggtaaaggcttctacctctaagttttagtgaatattctatatagaagaacagttaaagtcccaacagccatttgtacatttcataatttctgatttaaaacattttattggcatggaagtcagctgtgatgaataggcaatgggtccttcatctcaagaaacttactctctggtggtggtaataaactctaaataaataaattgacatagatttagtcctttatgtttgtacttgtggtatctttgtaatataatctgtatagcaccaagaata

SEQ ID NO: 698092 - DNA, 2764 bp, Homo sapiens
tcagggatttagagctagaaataccatttgactcaaccatcccattactgggtatatacccaaaggattataaatcatgctgctatgaagacacatgcacacgcatgtttattgtggcactattcacaatagcaaagacggaaccaagccaaatgtccaacaatgatagackggattaagaaaacgtagcacgtatacaccatggaatactatgcagccataaaaaaggatgagttcatgtcctttgtagggacatggatgaagctggaaaccatcattctcagcaaactattgcaaggacgaaaaaccaaacaccacactgtctcactcataggtgggaattgaacaatgagaacacatggacacaggaaggggaacatcacacaccggggactgttatgggatggagggagtggggagggataccattagggatatacctaatgttaaatgacgagttaatgggtgcagcacaccaatggtgcatgtatacatatgtaccaaacatgcacattgtgcacatgtaccctaaaacttaaagtataaaaaaataaataaataaataaagaacaccagtgaaaagattaaccattacatattcgacataatttacaagaaacataaaagaacaagaaattgttggtttcaaacataaaagtggttcccctttccactgtctgcaagagctaagtactctaaacccaagaaaggtcatcaaaataaatgtcatttgaaagttatggatgttatgacacttagaaagactacagaaaaatttaacggtgtgtctcataagtaccttaaactagagaatcataattctaagattcttaaagtgttatatgactgcatatagagtttcagcccaagtctgggatggaccagtttcaaagatatttttgagtatggtccttgtatattccacaaaatctttaaaaacttacactaagggaagcatcacagccttcccttctgaacaggggcatccattttattacctattcctctctttctccattgtgtgctgagaatgtggaggaaataccctgtctcaaagatctgtaaatagtaaaagccataatttaaaatgtgcacagtaaaacccgcccccaaggagccccatccacactcagtctcgatgtagaagttgagatcttgaacttcaatcagatgtcatgatgggatgactttgtaattgagctaggagcatccaaatcctgtcttctttctttgggatccttgacttgcccttagaaacctgaaaacttcactgggaagaccttgactacatacctccttacctacatgaggacggacactcctcctataataaatatagttaactttttacccaagagtttttctatagcatttctcatctctgaatttctcaacgtatatattaaaggactcagcatgtgtgtgataatggtataaaacacagtcatgaacttatcagtaggaaagtttgaaacaggtctaacatatatgaaaatacagggtacaaaaaagaggacaacaacggtactgccggagctgcaggtagacaaggctttacccctcttttcctgactgtaagttttaagggagcttaggatgactccataggagattaacagaaggttgaaaatgaccatacagattgctccactattgacaacaacagtgaggcctataaagtaggtgtcagtgcatgccagttccagtaatgggtgcatgtcacaactgaaatgaacaatgacattgggaccacagaaagggagactgtacacaacaatttgaaacgcagaatgtacaaaacctccaatcatggccaccaccaacagaaggaagcaaacctgtcgattcatgatggtcaaatagtgcagtggcttacagatggccacatagcgatcacaggccatcaccaccagaaggaagacctcagccccaccaaagaaatggtctataaatagctggcccatgcaaccttggaaggaaatagtctttttatcacagaataagcctacaattaacttgggagaaatggtagtggaatatgcagcatctataaatgacaggcaggcaaggaagaaatacattggggaacccaaggaagggctggcaataatatccaccacaatgagcaggttccccaccactgtcaccaagtatgtgagtaaaaacatgacaaataatgctttttgcacaccaggatcctgagaaaagcccaggaggacaaattctgtaatattgttattctgtctcatttactcttctttaaggcttgtatcagaggtgagagctcagggaaacagggcctgtaatgaaatagtgatcaggaatatgattacatccattgtgtcacagggcacatcttcattgctgtatcctgaatagtgatttacacataataaatatttagtaagtctctattgagttcctcacccaaagagcccatcttgccctgatgattctatttctcctcaaatattttagtttcagtgcacaggtaaaggcttctacctctaagttttagtgaatattctatatagaagaacagttaaagtcccaacagccatttgtacatttcataatttctgatttaaaacattttattggcatggaagtcagctgtgatgaataggcaatgggtccttcatctcaagaaacttactctctggtggtggtaataaactctaaataaataaattgacatagatttagtcctttatgtttgtacttgtggtatctttgtaatataatctgtatagcaccaagaata

SEQ ID NO: 698093 - DNA, 642 bp, Homo sapiens
actcatctgtggcaacgctttagtcctccgtgggccaagtctcttccctggttgggacagtcagcagaagagatataaagtgctgagtaagttatattaaaattagatgtgagaaaacagagctggggatagaggctaaaaacactactcacctcaaaagtcccacaccccatcactgtgatgtggaacagcacacacttaagaacaccaggacatgcaggtgccaagyagcagcagcttggctgttggagctctggaccaaggagaacatgttgtggatatttacaagtaagatcccttatttatgtcattcttcatcagaataagatgcagaaacgttttccaatagtggtcaaaagcagaagccatgcaagtacttgcccatcacagaaaacatcccagttggaagagacctaagtgggggaaaaaaatctagcccaataattttttcaaatagttctcttggccacagaatcttttattaaaacatacaaaataggaagaccaatgtctaagacagatgagtatcatgaaagctggattaaaccacagttggggaagtaagacaggcctctgtttcctgacatgccttttcccactccccacttgacacctctgtggaatctcagaggatatgctaga

SEQ ID NO: 698094 - DNA, 1809 bp, Homo sapiens
tctttttcattcattcatttaacagataattattgcatggtctttctgtgttaatgataaactggagagatcagaaataatttcaaagtctgagatataatctttgccctaaataatcatcatcattacagtcataagagcagcaaccatttattcatcattcttactttatacaaggcaccaggttaaaatgagacatattttatttcatcattacaacaacctgaggagttaagtattattattattattattatatgcattttatggagaattgaagctcagaatagttatctatttgtctaaaattacacatggcacatcatcaaggatcctatattcaaaaactggttatcagactccaaagcacctgccattaaccacaaaggctgttttgtgagataaaatgtgcattttaaaacaaagttaaataacaacccagctgctttcaccatcaaaggtttaaataacaccttgtgcgggtcttggcaggcagtgggtccttaatacacgcttgtgaaaggcaggcaagcagacaggaagggtgtgtggtagatatggcaattcaggggaaggagaaatttcagtagattataatgggcaggatttatgctgctgacgaatggggagaagaaccctccaggaaaaaggaatagagaggttgagatggagaggtggtaggcaaattcagagtgtgcctgggaagaatgagaaggccagcacagccagagaaggcaattgtgtacagatgtatagcaggagataagtttcagaaggtctgttggattcagataattaaagagttaagtattttggactctattctatggacagttcaaagtaactaaaggtctttgagcctgggaatggcataatgaaaatgggcttttgacacaatgaatctgacattggttggcaggagagaatggaaggaaggaagatgagaggcaaggagtctggttgtgaaactgttggaataactcaactataaccatggtaggattgcgggtggacagtagatggaggtgagacactcattcagaggagctgggcatgcagtagagtgccctggggcatgtccaggctgggagagtgccactacagagccctgtcaccatcctagggttgtggggataacagcctggagtagcagatttcctctgtttaacttcatgtcactcactgccccttcagcacagagaaggattctgacagaatgggaaccataataaggaagctctaattaggagagatgatagagaaatgcccagagtttggacacccagargcagcatgagggcatagtctctaacagggagatctaccaagaggaggtcagatgcaggctgcagagagggtggcgccaaagcagggcaggactttgccaagatcacaggcactttaccccagccagttggggtggtagaaggagccctgaaccaggaaccctggcctgtcacattcactagaaagatgaccttgcaaagtcatctaatcttttaagataactgatgtggaaacatccagccagtgccaggcatgtggccgacacttaacaaatatatggagaaaataaaggtcttgagcttctgtttgctcaccggtgaagcagagataacaatctcagatccgcctacctgcccaggctatggggaaggtcacatgagatgcagtctttgagcactctccacagaggcagtagaccaatctaagggagaatatcatgattttcatggatctcttgcactctccagagacccttttccagaagcagaggaatgtttttaagaatctctacacttatttcca

SEQ ID NO: 698095 - DNA, 1809 bp, Homo sapiens
tctttttcattcattcatttaacagataattattgcatggtctttctgtgttaatgataaactggagagatcagaaataatttcaaagtctgagatataatctttgccctaaataatcatcatcattacagtcataagagcagcaaccatttattcatcattcttactttatacaaggcaccaggttaaaatgagacatattttatttcatcattacaacaacctgaggagttaagtattattattattattattatatgcattttatggagaattgaagctcagaatagttatctatttgtctaaaattacacatggcacatcatcaaggatcctatattcaaaaactggttatcagactccaaagcacctgccattaaccacaaaggctgttttgtgagataaaatgtgcattttaaaacaaagttaaataacaacccagctgctttcaccatcaaaggtttaaataacaccttgtgcgggtcttggcaggcagtgggtccttaatacacgcttgtgaaaggcaggcaagcagacaggaagggtgtgtggtagatatggcaattcaggggaaggagaaatttcagtagattataatgggcaggatttatgctgctgacgaatggggagaagaaccctccaggaaaaaggaatagagaggttgagatggagaggtggtaggcaaattcagagtgtgcctgggaagaatgagaaggccagcacagccagagaaggcaattgtgtacagatgtatagcaggagataagtttcagaaggtctgttggattcagataattaaagagttaagtattttggactctattctatggacagttcaaagtaactaaaggtctttgagcctgggaatggcataatgaaaatgggcttttgacacaatgaatctgacattggttggcaggagagaatggaaggaaggaagatgagaggcaaggagtctggttgtgaaactgttggaataactcaactataaccatggtaggattgcgggtggacagtagatggaggtgagacactcattcagaggagctgggcatgcagtagagtgccctggggcatgtccaggctgggagagtgccactacagagccctgtcaccatcctagggttgtggggataacagcctggagtagcagatttcctctgtttaacttcatgtcactcactgccccttcagcacagagaaggattctgacagaatgggaaccataataaggaagctctaattaggagagatgatagagaaatgcccagagtttggacacccagaggcagcatgagggcatagtctctaacagggagatctaccaagaggaggtcagatgcaggctgcagagagggtggcgccaaagcagggcaggactttgccaagatcacaggcactttaccccagccagttggggtggtagaaggagccctgaaccaggaaccctgscctgtcacattcactagaaagatgaccttgcaaagtcatctaatcttttaagataactgatgtggaaacatccagccagtgccaggcatgtggccgacacttaacaaatatatggagaaaataaaggtcttgagcttctgtttgctcaccggtgaagcagagataacaatctcagatccgcctacctgcccaggctatggggaaggtcacatgagatgcagtctttgagcactctccacagaggcagtagaccaatctaagggagaatatcatgattttcatggatctcttgcactctccagagacccttttccagaagcagaggaatgtttttaagaatctctacacttatttcca

SEQ ID NO: 698096 - DNA, 603 bp, Homo sapiens
tgcatacatttaatatttcactgtctgtctgctcaacatttctttttcatgaagcatagctcaaagaaatttcaataatactgttttaaattagctgcttcctgtcaagttaataaacctcagatacttaagtcccctacgtacagtcccaagtctcctgttcaaggctaattctctttgcttctcccatctccatggccacctctctgcctaaagcccatagaactataaygatgaactagagggttcatctgcatggcattgcaattatgataatagctgatacttacatggcagttactatgtgccaagatctgttgtaagtgctttacacacattaactcatttaaccttcacacaaccttataaggtaggaactattattatcctcattttacatgtctagaaggtctccagagtggcctccttagggaactatataaggaaaagaggaagagaagagacacttagttcaaagatattttctcaagattgaaaggaagaagagattctgaccccagcttctgtttctcatttagcttctcttatggtccagcttcttctaggtccaaccctgtaaccaagtgttaaaaagaagaggct

SEQ ID NO: 698097 - DNA, 603 bp, Homo sapiens
tgcatacatttaatatttcactgtctgtctgctcaacatttctttttcatgaagcatagctcaaagaaatttcaataatactgttttaaattagctgcttcctgtcaagttaataaacctcagatacttaagtcccctacgtacagtcccaagtctcctgttcaaggctaattctctttgcttctcccatctccatggccacctctctgcctaaagcccatagaactataacgatgaactagagggttcatctgcatggcattgcaattatgataatagctgatacttacatggcagttactatgtgccaagatctgttgtaagtgctttacacacattaactcatttaaccttcacacaaccttataaggtaggaactattattatcctcattttacatgtctagaaggtctccagagtggcctccttagggaactatataaggaaaagaggaagagaagagacacttagttcaaagatattttctcaagattgaaaggaagaagagattctgaccccagcttctgtttctcatttagcttctcttatggtccagcttcttytaggtccaaccctgtaaccaagtgttaaaaagaagaggct

SEQ ID NO: 698098 - DNA, 1501 bp, Homo sapiens
tactagttctacctctaccayctatcaaataccaggaactcagctcaccccaattgtgtgtatatctgggagtccacctagcagagaggcaagttttctatataatctgagctacaggtgtagctcctctgctccccttttgctcactggggctgtggccacctctttcagcccccagcactgctggaattcagctcagattccctcttgtggccctggccaccgtaacttctgaagccctttggatagctgcttcccagctggtgctgcttgaaactctgctgtttctataatacctctctctgcatttctgtggttccttactctttgtctcctgatgttgcagggtaaggtagaaaagtcaggaactccttgtaacatggtccctttagatttactaccctctcagaagagggcaggtccccagcagaatggcatgggcctctacagattccgttattatatctcttttcttatcggggcatgcaaatggtcctggggaaagaccagaccaaagtggattccaggacaacctcataccatactgtgaacttctgctttctccagggcctgcttctaatgctagcctattctgcaaacattttttgtttactatgtttttttctggaggggagagactctccatctctgcattcaagcttcagtaggcccaccaggtttagaagacatacatgtcagtcaattgtaacgaggctcaagttcctcttcatgaggctccaaggccccctgtaaatcagtgatgtacccagatgctccatagatatccctgactaccctgccacatttaagatgtttgtctgctccaggcacatggcagacctctggaggaagctgtgtaattcagaagatatccatccaaatccaggctcttagacggccgagatactctgccacatatctttaaaaacatttcatttaacaagatgtatgtgacagagatgaggagaggaatggagtgtcttcacaaatcagaagtattgaatttgagctttctaaaattcctcctaattacagggtacatgaaattacataattctaaagttggaagggatctaggttttataatatatcagtgatgctgccaagaatagaaactttgctccctgagaagttttccagaggcagcgtggctcagcaagccggcagtggtgagatacctaatgaaatggggggaaaccccttcctttcaggaagaaaaccattaaaaaaggatgattgtacttggcagccatatttttaccctcttatttttcagcttttatcaagcctcttgttaaaaaggacatgttctcctttataagaagaatgtgagagactggattgataaacagcccatattctgagcactagagctatcgtaaagagaaagttcatggcaattaatagattctaagaattttttatctaatcacaagaactgacaagctctagccaagccaagaagataaaaatcctagagaaaataagaaaggatttaaaa

SEQ ID NO: 698099 - DNA, 1501 bp, Homo sapiens
tactagttctacctctaccatctatcaaataccaggamctcagctcaccccaattgtgtgtatatctgggagtccacctagcagagaggcaagttttctatataatctgagctacaggtgtagctcctctgctccccttttgctcactggggctgtggccacctctttcagcccccagcactgctggaattcagctcagattccctcttgtggccctggccaccgtaacttctgaagccctttggatagctgcttcccagctggtgctgcttgaaactctgctgtttctataatacctctctctgcatttctgtggttccttactctttgtctcctgatgttgcagggtaaggtagaaaagtcaggaactccttgtaacatggtccctttagatttactaccctctcagaagagggcaggtccccagcagaatggcatgggcctctacagattccgttattatatctcttttcttatcggggcatgcaaatggtcctggggaaagaccagaccaaagtggattccaggacaacctcataccatactgtgaacttctgctttctccagggcctgcttctaatgctagcctattctgcaaacattttttgtttactatgtttttttctggaggggagagactctccatctctgcattcaagcttcagtaggcccaccaggtttagaagacatacatgtcagtcaattgtaacgaggctcaagttcctcttcatgaggctccaaggccccctgtaaatcagtgatgtacccagatgctccatagatatccctgactaccctgccacatttaagatgtttgtctgctccaggcacatggcagacctctggaggaagctgtgtaattcagaagatatccatccaaatccaggctcttagacggccgagatactctgccacatatctttaaaaacatttcatttaacaagatgtatgtgacagagatgaggagaggaatggagtgtcttcacaaatcagaagtattgaatttgagctttctaaaattcctcctaattacagggtacatgaaattacataattctaaagttggaagggatctaggttttataatatatcagtgatgctgccaagaatagaaactttgctccctgagaagttttccagaggcagcgtggctcagcaagccggcagtggtgagatacctaatgaaatggggggaaaccccttcctttcaggaagaaaaccattaaaaaaggatgattgtacttggcagccatatttttaccctcttatttttcagcttttatcaagcctcttgttaaaaaggacatgttctcctttataagaagaatgtgagagactggattgataaacagcccatattctgagcactagagctatcgtaaagagaaagttcatggcaattaatagattctaagaattttttatctaatcacaagaactgacaagctctagccaagccaagaagataaaaatcctagagaaaataagaaaggatttaaaa

SEQ ID NO: 698100 - DNA, 1501 bp, Homo sapiens
tactagttctacctctaccatctatcaaataccaggaactcagctcaccccaattktgtgtatatctgggagtccacctagcagagaggcaagttttctatataatctgagctacaggtgtagctcctctgctccccttttgctcactggggctgtggccacctctttcagcccccagcactgctggaattcagctcagattccctcttgtggccctggccaccgtaacttctgaagccctttggatagctgcttcccagctggtgctgcttgaaactctgctgtttctataatacctctctctgcatttctgtggttccttactctttgtctcctgatgttgcagggtaaggtagaaaagtcaggaactccttgtaacatggtccctttagatttactaccctctcagaagagggcaggtccccagcagaatggcatgggcctctacagattccgttattatatctcttttcttatcggggcatgcaaatggtcctggggaaagaccagaccaaagtggattccaggacaacctcataccatactgtgaacttctgctttctccagggcctgcttctaatgctagcctattctgcaaacattttttgtttactatgtttttttctggaggggagagactctccatctctgcattcaagcttcagtaggcccaccaggtttagaagacatacatgtcagtcaattgtaacgaggctcaagttcctcttcatgaggctccaaggccccctgtaaatcagtgatgtacccagatgctccatagatatccctgactaccctgccacatttaagatgtttgtctgctccaggcacatggcagacctctggaggaagctgtgtaattcagaagatatccatccaaatccaggctcttagacggccgagatactctgccacatatctttaaaaacatttcatttaacaagatgtatgtgacagagatgaggagaggaatggagtgtcttcacaaatcagaagtattgaatttgagctttctaaaattcctcctaattacagggtacatgaaattacataattctaaagttggaagggatctaggttttataatatatcagtgatgctgccaagaatagaaactttgctccctgagaagttttccagaggcagcgtggctcagcaagccggcagtggtgagatacctaatgaaatggggggaaaccccttcctttcaggaagaaaaccattaaaaaaggatgattgtacttggcagccatatttttaccctcttatttttcagcttttatcaagcctcttgttaaaaaggacatgttctcctttataagaagaatgtgagagactggattgataaacagcccatattctgagcactagagctatcgtaaagagaaagttcatggcaattaatagattctaagaattttttatctaatcacaagaactgacaagctctagccaagccaagaagataaaaatcctagagaaaataagaaaggatttaaaa

SEQ ID NO: 698101 - DNA, 1501 bp, Homo sapiens
tactagttctacctctaccatctatcaaataccaggaactcagctcaccccaattgtgtgyatatctgggagtccacctagcagagaggcaagttttctatataatctgagctacaggtgtagctcctctgctccccttttgctcactggggctgtggccacctctttcagcccccagcactgctggaattcagctcagattccctcttgtggccctggccaccgtaacttctgaagccctttggatagctgcttcccagctggtgctgcttgaaactctgctgtttctataatacctctctctgcatttctgtggttccttactctttgtctcctgatgttgcagggtaaggtagaaaagtcaggaactccttgtaacatggtccctttagatttactaccctctcagaagagggcaggtccccagcagaatggcatgggcctctacagattccgttattatatctcttttcttatcggggcatgcaaatggtcctggggaaagaccagaccaaagtggattccaggacaacctcataccatactgtgaacttctgctttctccagggcctgcttctaatgctagcctattctgcaaacattttttgtttactatgtttttttctggaggggagagactctccatctctgcattcaagcttcagtaggcccaccaggtttagaagacatacatgtcagtcaattgtaacgaggctcaagttcctcttcatgaggctccaaggccccctgtaaatcagtgatgtacccagatgctccatagatatccctgactaccctgccacatttaagatgtttgtctgctccaggcacatggcagacctctggaggaagctgtgtaattcagaagatatccatccaaatccaggctcttagacggccgagatactctgccacatatctttaaaaacatttcatttaacaagatgtatgtgacagagatgaggagaggaatggagtgtcttcacaaatcagaagtattgaatttgagctttctaaaattcctcctaattacagggtacatgaaattacataattctaaagttggaagggatctaggttttataatatatcagtgatgctgccaagaatagaaactttgctccctgagaagttttccagaggcagcgtggctcagcaagccggcagtggtgagatacctaatgaaatggggggaaaccccttcctttcaggaagaaaaccattaaaaaaggatgattgtacttggcagccatatttttaccctcttatttttcagcttttatcaagcctcttgttaaaaaggacatgttctcctttataagaagaatgtgagagactggattgataaacagcccatattctgagcactagagctatcgtaaagagaaagttcatggcaattaatagattctaagaattttttatctaatcacaagaactgacaagctctagccaagccaagaagataaaaatcctagagaaaataagaaaggatttaaaa

SEQ ID NO: 698102 - DNA, 1029 bp, Homo sapiens
cagaattttatttaaacagagacctaccaacaaatgaataatgaaattttcattttcatgatgacttttaatatcaatattttaatagcttaacaattgattcaaacaactgatatgtcacagtaggtaatacatatctggagagatgagaagagaaattactaactgaagtgattttgggaagtcttgtggggaggttgaggtctgagtcraagtggatgagacttcagtaaacagagggaattaagataggagattccagtcagaatgtttagcataagcagatttataaaggctaaacattgaagagtgtttagagaatggaaaggaggctactggagttgaataaagggtaatgagaaacaaggtgagaaaatattctgggatcagatgacgaaggacctggaatgcctagctgaagagtatgaagtttacattttctgcagagggagcctgggaaggtttgtgacgtggagtagaaagagaatcactgattgggctacttctctgacccaagagagatacaatgagaccctgtgcatggcagtggcaataggattgaagatgtgtggaccactgcaagagccaattacagatggagaatccctggacgaccatatagggatagtggagaaatgaggaagaaggtgaagaagtttgcaacataggctttggaattcttttgattccctggggaggatgattcggttccatgatggttttgcttctagctgttggctagaatatgtgtataccacaaaggatagtttcagtctcatggaaaggtctatataggtactctgaaatattaccgtgtacttcaaagaacagacccttaggtacaagcttcagagctgctatcaagttctagcaactttctgatcataccagaggtttgagtcagaatttctaagtcatctttcagttgggagggagacataatgataaaagcaaattgctgagccaagaatgaactgagaaagaaaatttaattgtggttatttgtagggaattagtattgctattcaa

SEQ ID NO: 698103 - DNA, 1029 bp, Homo sapiens
cagaattttatttaaacagagacctaccaacaaatgaataatgaaattttcattttcatgatgacttttaatatcaatattttaatagcttaacaattgattcaaacaactgatatgtcacagtaggtaatacatatctggagagatgagaagagaaattactaactgaagtgattttgggaagtcttgtggggaggttgaggtctgagtcgaagtggatgagacttcagtaaacagagggaattaagataggagattccagtcagaatgtttagcataagcagatttataaaggctaaacattgaagagtgtttagagaatggaaaggaggctactggagttgaataaagggtaatgagaaacaaggtgagaaaatattctgggatcagatgacgaaggacctggaatgcctagctgaagagtatgaagtttacattttctgcagagggagcctgggaaggtttgtgacgtggagtagaaagagaatcacwgattgggctacttctctgacccaagagagatacaatgagaccctgtgcatggcagtggcaataggattgaagatgtgtggaccactgcaagagccaattacagatggagaatccctggacgaccatatagggatagtggagaaatgaggaagaaggtgaagaagtttgcaacataggctttggaattcttttgattccctggggaggatgattcggttccatgatggttttgcttctagctgttggctagaatatgtgtataccacaaaggatagtttcagtctcatggaaaggtctatataggtactctgaaatattaccgtgtacttcaaagaacagacccttaggtacaagcttcagagctgctatcaagttctagcaactttctgatcataccagaggtttgagtcagaatttctaagtcatctttcagttgggagggagacataatgataaaagcaaattgctgagccaagaatgaactgagaaagaaaatttaattgtggttatttgtagggaattagtattgctattcaa

SEQ ID NO: 698104 - DNA, 665 bp, Homo sapiens
caaacggtgtaagaactgcaaagttataaaagaaacaccaataaaatcttaccggagagatgaaattaactatgagaaaaatgaaattttgtgacaaagacaggcagagaacacttcaagaaaggcaacaatttaaaaaatttttagtggggcgtggtggcaagtgcctgcggtcccagctactctggaggctgacgtaagaagattgctggagcctaggcagtcagggctgcagtgagctgagagcatgccactgcactcctgcrtgggcaacagagcaagacccccatctcaaaagaaaatgttttaaaaggacaaaacataaccaaactaataaaatgtgaatcgtcagcaaagtataacctatgctaaccacataataaaggaatacctctgagcagtacaatgtaaaatattgggcaaatgcattaaagacattaagtaaatacaacaatattttaaaataataattgacatacaggcaataattattgtggtgtcttgtgcctataatcccagcactttgggaggccaaggcgggaggattgtttcagcccaggagtttgagaccagtctggccaacacggcaataccctgtcttatcaaaattaaaaaaaaaaaaattccaacctgaccaaaatggcaaaacctcatctctactaaaa

SEQ ID NO: 698105 - DNA, 665 bp, Homo sapiens
caaacggtgtaagaactgcaaagttataaaagaaacaccaataaaatcttaccggagagatgaaattaactatgagaaaaatgaaattttgtgacaaagacaggcagagaacacttcaagaaaggcaacaatttaaaaaatttttagtggggcgtggtggcaagtgcctgcggtcccagctactctggaggctgacgtaagaagattgctggagcctaggcagtcagggctgcagtgagctgagagcatgccactgcactcctgcatgggcaacagagcaagacccccatctcaaaagaaaatgttttaaaaggacaaaacataaccaaactaataaaatgtgaatcgtcagcaaagtataacctatgctaaccacataataaaggaatacctctgagcagtacaatgtaaaatattgggcaaatgcattaaagacattaagtaaatacaacaatattttaaaataataattgacatacaggcaataattattgtggtgtcttgtgcctataatcccagcactttgggaggccaaggcgggaggattgtttcagcccaggagtttgagaccagtctggccaacacggcaataccctgtcttatcaaaattaaaaaaaaaaaaattccarcctgaccaaaatggcaaaacctcatctctactaaaa

SEQ ID NO: 698106 - DNA, 1382 bp, Homo sapiens
taagggatttcttttaaataagtagaggtttcatatattgcttctgttgacattctgttctcacctggctgtaccctgctgcaaggattactgggtggccgtgtccacagctagaactcagtggtgtgggggtgctctcttgcccctaagaggggaagaatgaaaactaggggtcagatggcaatctgtgccacagattaaacatgaattttgagaaaactaatagataacaaatagtacaaattgtacacagatggtgtagagcaaaattgcaaaggaggtaaggaaatgactgaggctcaggaaatactgcacatgaatgatggataaagtttaaaatcttcccttggttaacaaaacagaagactaagtgaagtgcagtggaaagcaggttgggcttggatcaagcgatgtaagttctagctttccgaacttccctgggctgtstgttatgggtctgccactaacctaattttaaattagggttagtcataatttattcttgtgtcataatctgcaagaaaaggtattggatgaatgctgaggctcctttcttacttaaagttcttgtgaatttctcattgtagagcttcatcttcaacaacttataagacaggacatttttggatggattagatgcgtaggcatccctgaaccccagaaatctctaatctaggtggatagtttctctctctctttctctctctctctcacacacacacacatgcacacatgcacgtgcacacacagtggtgaagtgggcttagcacttgtgaattgatgcccacaaaaccgcatactcagcccactcttctctgcccaattcccagttccaatgtgataccaaaggggtggcccccctgggacagttactgtaattgctgacaacatatgatctataatcttctcctaggcttggttacagaggaattctgggctctgtttttattctcctcttgggaggtgtgtgaccattttccttttgctggtcagcaattagaggctcctgacaatgtggtcggcccaaacacgctccccagagggaaggagaatcccctatatttggcagtaaagtttctcttgatctaggcttcccgtggcttctgattctcccttctttcctgtttttggggatttttttttttttcaaatagagattgaatagtgaaatgctgggatttttgtaaaaccttgaaagcaatacacaggaaacaagttgttaaattcaagaaacatgtgataaactcatactatgctgggcactattctaggtataggaagataaggagaaaagacatcgtcgctaccctaagttgctcatgaatctttccatggtagtttaggggtaacctgtcttgagacagcaaaattgaccagtgaca

SEQ ID NO: 698107 - DNA, 611 bp, Homo sapiens
taaaaggtattcatacccattcatctatcagccctctctaactctgttgtgcccaaacaccccaagatgtaccgtacccgtccttcccrtcaaacacccatccttgcctcctttgatgatgtcaacagtagccaatcggaattagtctagattgtgtggtctgatcccagcccacaggaagaggacacaggagcagggtctgtgttagggataaaaaaactcctgctctccttcgttttgcatgctttcccttgcctctgtcttgcatgaagacagcacccttctataaaagtaaattcccttactgagaaaacttttgcctgagtgcttgttttaccttgtggcactaaaaatttgcttctaacaatttgggggctcatccgggattcccactctcctccagggaaggggtctctgatcatctcccagggggagacctgtcacactgcctcattgcagtggcctcaggggctagagattgagaccccacctgctgtgatgaataaacccggactctcagcaacatgggtagaaaagacttgcctacaaacaccgcagcaagcaggtaactttgtacacagaccaaggtaagaaaagctgttggggggggg

SEQ ID NO: 698108 - DNA, 643 bp, Homo sapiens
attgttatatggacctgcctttttactcaaatttcgttggcaatatttttctgaaaatagacacttgacatggtatctcttcagaacagaaaggatgttaaaagagcattttaaatgtgtgttgaacacaatattcaatggtctacgctacttctgcctgctcaggagtctcactttgtgtggatttctctgtctcttgagcctgcctgsccatctagcctccatgcctttgctgatacgatgccctctgcttgaacggtcaccaccttctctattaagaaaaaattcccccatccttcaagacatacttcaaatattgcctcttctgtgaggatttccaccatcactcccagccaaaagtagccactgccctcagccctgggcccttatcattatttctgcccctctcccataaacactgccctcatggtatgcatacctgtgcttcctgtcccttgctgatttctctaccaggcttagtacccagtggaacagatctgtagagagacagtaaggctcccagctctggcccttaccagctgtgcatcaacagggaagtcacttaaccaacctgactcttagttttttcatctgtggaaatggaaataatagaaaaccatctcccaggctcttgtaagaatta

SEQ ID NO: 698109 - DNA, 892 bp, Homo sapiens
ctctgcagcatcagacacttaattgatttcccagggactgtctgattaataacccatcaggttcctgttgggtgaggggaagtcagagcagaaggctgccagaccttggctccagctcatctcatctcaagcctggtagggaagcctggggtccattttgtggtcacactgaatttggggaaaaaccctgcccaccctcagggatgggkgccatcctggtggtctccagaccagccctagtgtggttcccagaatggcacacacagtgccttctggcaggccaggtcagccccagagcgttgcagagaattgggatatacagtcttccttgtaatttggtgattcagtcaaagacatgcagaagacacagccaactgttattaagaagctcaccgtcttttgagggagacagacctgtaaatgaatgaggacaggtaccatgactgatgttgtgacagagggagtcctctgagcagagaagagagcatggttccctctgcttgggagcagcagtagagagagcccttactgggaacggccaggtgctgttctaagttcttggcacatgttaacttcattcttcacagctattccataaggtgggtgttgggagtccccaggcccccacccccaggtttgatgatttactagtgggactcacaagactcaacacgtagttgagtataggtgttaatactcacagccctggtttatcacagtgaaaggcagaaaagcagaatcagcaaagggaaaagaagcctggggtagactctggggcaaaccaggcacaaggttctggggtcctctctcagtggagtcacacaggacgcacttcattcccccagcaacaggttgtgacaacgtgtgaaatgttgccaatcagggaggctca

SEQ ID NO: 698110 - DNA, 612 bp, Homo sapiens
ccgcagggcccagccaactcccttcttgctgagcctcctttcaaggctgtggatatcctttctttttaatatgggcctgctgttaggactcagacgtagcatgtcttttaaaaatactggctttgaggtaaagaaagagagatagagagaaaccttgcaaggcacatggggaaatcgtggacagggcgcttctccacagcctgttttgtaattttcctcatgagaattcatagcaagctggcacctttttggctgctcaaaaagtgccctagtctacctaaaagggagagttaacaggccggggaagagttgctggcggccatcaacatgatgaagtgaaatttcaaattacrttagatgtttgcttaaggaacaacagatgaggccctgtggattctcaatcctcttggctacacagcaaaatgaaaagcataaccatttggaacccttcccctggaccgtatgaagtctgggcccaaaagatgaccttttaacgatagcttcctgcctctgaagggttagagtgtgtcgaatttttcttcgctcagggcctggttttaatcattgccacagtcagaagaaagggctcttatccacaccgcttacttttta

SEQ ID NO: 698111 - DNA, 1667 bp, Homo sapiens
tcctttccaatatttatgagttttatttatttttccttcatcattgcagacttagactgatattataatgtcaaatagaggtagtgaaaacaaatatcaaggccttgttcctcatttcatttgtgttttgtttctttgtttgttttgagacagagccttgctcttgtcgcccaggttggagtgcaatggcacaatcttggctcactgcaacctctgcctcccgggttcaagtgattctccttcttcagcctcctgggtagctgggattacaggcacccaccaccatgcctgactaatttttgtatttttaatagagatgggttttcgccatgttggtcaggctggtctcgaactcctgacctcatgatccaccygcctcagcctcccaaagttctgggattataggcgtgagccaccatacccagccttgctccttattttagggggaacatatttaatgtatcatcaggttgtatatcattagtttgattttttttgtggcattattaagattccatttaaaaatttgacatatttgttcatgcatctgttgttagaagtgggattgttttattaagtatcaaattatcttaagtttcaggcttaatgacagtgtaatttcaggggcataaggaagattttcccactcatccaacatagacttatactgagagagatgtaattacaattaacaaccatgtatttctaatttcacatgtgcgggatgctttgttctctttttctcatctgatcaaggcaccatggctccaacatcctcatctatgggatatcttgctgacttttgtaggtagaagtaagcattttctgcattgtgtccataatctactttttaattagaaattttacttaatttcacactatattcatttctgtggtcaaaaaaatcaaataaaattgtgaattggggtggtggctgaaggatagtaataatatgtttaggcaatttgggtaaatcatggagtattttttctttaatgaagaaatatgctgttctgcttcatccatttattgcaattccaaaaagcaaactaagtatagtcagattacttggattttatgagaatttcataatattataattattgcaaaatttattaattttaaaaaatcacgtgaaccaaaactaaacacttgtggatataatcaagattcttgttttcaatatatttactcaaaaaacatttatggataacttagcatgttccaggcagtgtactgagtgttgtgtatacagtgaatataaaatacagtttcttcttctcttggataacaggctggaggggaagatatatcttaaacaaacaaaataaactgcacttaaaattaagattgtgacaagtgtcataaataagtagaataaggcaacaggagagagaacaattatgatggtgcacagattttactgtaggtagaagatgtcttctcttagggttgatatttaagctggcatcctagagatgattagggaataactagaagaagtttgggagaaatagaattcaaagcagtaattagaactaagcaccacatcgaaatgatagaaagatctcaacaacttaacataacaactaaataatataaggaggctgctagctagactaatatgaagaaaagagagatggcccaaaaaacaaaattataaatga

SEQ ID NO: 698112 - DNA, 1667 bp, Homo sapiens
tcctttccaatatttatgagttttatttatttttccttcatcattgcagacttagactgatattataatgtcaaatagaggtagtgaaaacaaatatcaaggccttgttcctcatttcatttgtgttttgtttctttgtttgttttgagacagagccttgctcttgtcgcccaggttggagtgcaatggcacaatcttggctcactgcaacctctgcctcccgggttcaagtgattctccttcttcagcctcctgggtagctgggattacaggcacccaccaccatgcctgactaatttttgtatttttaatagagatgggttttcgccatgttggtcaggctggtctcgaactcctgacctcatgatccacctrcctcagcctcccaaagttctgggattataggcgtgagccaccatacccagccttgctccttattttagggggaacatatttaatgtatcatcaggttgtatatcattagtttgattttttttgtggcattattaagattccatttaaaaatttgacatatttgttcatgcatctgttgttagaagtgggattgttttattaagtatcaaattatcttaagtttcaggcttaatgacagtgtaatttcaggggcataaggaagattttcccactcatccaacatagacttatactgagagagatgtaattacaattaacaaccatgtatttctaatttcacatgtgcgggatgctttgttctctttttctcatctgatcaaggcaccatggctccaacatcctcatctatgggatatcttgctgacttttgtaggtagaagtaagcattttctgcattgtgtccataatctactttttaattagaaattttacttaatttcacactatattcatttctgtggtcaaaaaaatcaaataaaattgtgaattggggtggtggctgaaggatagtaataatatgtttaggcaatttgggtaaatcatggagtattttttctttaatgaagaaatatgctgttctgcttcatccatttattgcaattccaaaaagcaaactaagtatagtcagattacttggattttatgagaatttcataatattataattattgcaaaatttattaattttaaaaaatcacgtgaaccaaaactaaacacttgtggatataatcaagattcttgttttcaatatatttactcaaaaaacatttatggataacttagcatgttccaggcagtgtactgagtgttgtgtatacagtgaatataaaatacagtttcttcttctcttggataacaggctggaggggaagatatatcttaaacaaacaaaataaactgcacttaaaattaagattgtgacaagtgtcataaataagtagaataaggcaacaggagagagaacaattatgatggtgcacagattttactgtaggtagaagatgtcttctcttagggttgatatttaagctggcatcctagagatgattagggaataactagaagaagtttgggagaaatagaattcaaagcagtaattagaactaagcaccacatcgaaatgatagaaagatctcaacaacttaacataacaactaaataatataaggaggctgctagctagactaatatgaagaaaagagagatggcccaaaaaacaaaattataaatga

SEQ ID NO: 698113 - DNA, 1254 bp, Homo sapiens
ccagatgactgcatattgatacatatgtatttagccctaataaattgcctcatatgtttggcattttaatattttgcactctgatattaactaacaccatacagaatatgctacagaaaatgtctgtatgatatcaactactatatctactataaagtgttcaaatggttttccagaatattaagcagatgacttgcagtttttgtaaaatgggggcatattcttgagtctcatttgattaagtctgkttctagccaaatcctctttcagaaacagtatctgaaaaagaaggaaggcaaatttcggtgacaagaatttaacaattacattttagcactgtttgtttttgtatttgcttggttttggcaatgatggtgggacaacagaggaaggtcatctgcagagacaacaatgaagcagaaaagctgggaattgagtgacacagagtcctcacttcctttttgagggccagcatcatttcatcggtggggtatttctttattttatgagaaatttccatctattaggcaaagcattgtattccatttctggcaagcagaatggtctcatatccagatttgaaaccctatttgaaaattggattttagaatgagtgcaaaaaatactctatatttggcctaaataactgtacgattccatttattttctagttatgagaattgctctggcttgcagcaaccatttttaaactttgacatccttttagtcaaaatgactgacctgtttctaattgatttttaataaaatattttatttatttctatttgtgatttaattttttccttctgcatgtctttgggtaaaagtcacctcagaaattctttggagataggatagaacataaatcgacatgaataaaagtaattataagagttgcagtcacagtgtagtgctgattttaggaacactttattttaatcttcataaatgaaataatgagagaattattatctccatttacaacattggagcctgaggcacggagagattaaatttcttgcccaaagtcatttggccactcagtaggacaaaagcaggtttcttggtttcaaattctctctctttctaattcatactgtagttgttattaaagaaattctcaaaacactgcaaatgcttggtggaatgttggagattatgaattgatgagattattgctatagatgaaatagtggttattatgtgatagttatatgtatcctaagaatagctaatgagaatttcccttgaaaa

SEQ ID NO: 698114 - DNA, 623 bp, Homo sapiens
acagaccgagggaggggcacactagctggcctctggaggagaattcttccagcctctctctgctgtagtaaaaacctccttaaaacccacgaagctggggcagtaggaccaattgcagcagatggggcacaattagctcactagatccgttcaatggctattaaggccaatccgtgcgttagggcccatgcaagtgggaggaatacaaagatgaatgggattcaggctcttccaaaaagcttaccttctagtggacaagtggccattggagcataatgtggcaagtttagtgagagagagatgttcagagcactggggagtatagaggaggtccattaacctagccctgggggtatggtggagggaggtcaatgaagtcttcctggaattcatgcccaagctgactattaaagataaaagaatttagacaagcaaagggagggagggcttttcaggcaaagggtcagacagtgtgagcaagaaatcaaagtcaagacacaacatgagagggattagaagttccagtgtgtttgagaaagttccagtttggcactgtttactgttgcaaccattttaatagatacacrctccatgagctggctcttgtctccctcttcagccag

SEQ ID NO: 698115 - DNA, 615 bp, Homo sapiens
tgaactgctggttgtgatatattagagggtttgaaatcaatttagtgaccagcacttttatatggagtggaaaggaatgaaatggagagtagaacagaatagaatagaccatcacgtattactactatttttattgagacagagtcgtcttctcccactcaggctggagtgcagtggcatgatcatggctcactgcagcctcaacctcctgggctcaagtgatcctcttacctcagctacttgagtagctgggactatagctatgccccaccatgcccggacaatttttgtaatttctttcataataatggagtttcaccatgttgcccaagctggtcttgaactcctgggcccaagtgatccatccacctcagcctgccaaagtgctggkattacaggcgtgagccactgcaccaggcctaccattattaccggtgattacgtgtgtgtgtgtgtgtgtgtatgtgtttgtgtttataaggaatcaatgtaaaatttcctttttttcaaccactttattgaggtatgactgatctcacttacatgtagaatctaaaataggcaaactcataggagcagaaagaatgatggttgccaggaactgggggggtggag

SEQ ID NO: 698116 - DNA, 613 bp, Homo sapiens
agtgtcccaaggacacacagggaagcagaaactagaaggatggggctcccagaacccccaggagccagaagtcatagccaccttagacaagaataaaccactatcccacttccagctttgtgcaatgcagtctctaaacactcctctagggatgacaattcaagggctggccaacagaaggaatacctcttgtagctggtggtctgggaagggagactcacatgacctgtttcttcttaaagagcaaagcaaaggtgcccacagcaaatttatagcccccaggttatcccaaggttgagttctccaatccttttgaccgaatggaagaaagtggctagagggagtctccccataatccgcaagtggccattattgtggccactgagagttctgtggtttgcacttttgctgggtgagaagtgaaagctctggaccagcgccttctgggctggaatccagaaggttccaagagatcatctgccccagccttytatcctggcacgggcatggtcaaaatgaccgctctggtcctgaaccaccttccaagcaatgctgcctagatggggtgggattcgcctgacctattggcccctgaaatgcaatgatttacttg

SEQ ID NO: 698117 - DNA, 645 bp, Homo sapiens
caactctgcgacgggaggccgagtgcatggaagccaacagtgggaggctggcctcagagctcaaccacgtgcaggaggtgctggagggttacaagaagaagtaagtgcagtgggaggagggtttggagaaattaaatgggattaagtcaaagtatgatagatttgggttcgaccataagaggaacttcccaacaggaagaaaatagtacaataatcctgtggggtggggggaatttcttttctagactgggagtttaaacattggagattctgaactgctccagctacttcatcattatgtttatttcattaattcatcaaacattttattgagcatctactcaatgttgtaggtgctatgttgggctctgagtgggaaaggagtaaggaagtaagaaggaggagaaaggagaggtaccagaactgggcagggytcctgccccaaaggagttacagcccagaaacagagaggaggtcttcgaaaatgtgcagggcccccaccctgacccacatcaggaatgaaagtccctgaaatagaaagagctttgagtaacatgggttggtttgaatgcccagaagaaagggatggacaagttcccttcagtccaacacttttttgattcttgtgaccacctccaaaagatc

SEQ ID NO: 698118 - DNA, 615 bp, Homo sapiens
ccaaccaaaatattatttgccagtcttcatttgtagttacttgcttaatatcattttcccctgtatacttttagtattgtatgcacagaaacttcatctgattttgtctttctatagtgaaagaataaccccattaaaaaatgggcaaatgacatgaaaagacacttctcagaattgttctacccaatgttgagaacaatgttggacttacagtaagaagattataagtcatacacatttgttagatgyattattaaatgaatattttttctcttttttctgcagttagttgtatttatggttttctgactcacctttatgaagttgagaatcttgctttgaattaattattttattgtcctgttagtataatatagttactatcctgtatgactgctatgccaaagtggttcaaagactggctctcgtatgacacctaaaaccaggtgaaaccaggcctatatttggaaattggcctcattcttttatgaccaagaaggtcatctgggaagattggttaaaatatgcatgcatgagttctaccctctgaagattctaaattggttgtttagattgtaagcagctccacagattactgccacacctttcaaagtg

SEQ ID NO: 698119 - DNA, 559 bp, Homo sapiens
agccaaaccatatcaactactttatttctgttaacaaagttgttcactttttcaaacaatttttagtttctcccttacgtcttagaggaagtgctgtttccttcctgcagaaaatactccctctgtctgcactctacacctgaacctctagattctgaaagactgtaatctatcaatcactagagttgtttctatatatttccctttccatctgtacaaattattgaatgaatgaatgaatgactcttctatgattccattgttggtttttgagatgcatgtcatggttacactctaggtatagattcccacaccttgactttatatcctggttccaatgattaattaactctatgaaaatgaacaagttttctaacttcgcaaggtttcattttccttatctgaaacaggaaataatagtaggattatgtaagttttatgggkaatgtgacaattcctgtgaagttcttaacatagtgctgttgtacagcagctacctaaagaatattagcaattattgttttaaattgatattttatttgatttatgaatatgaaat

SEQ ID NO: 698120 - DNA, 654 bp, Homo sapiens
caccagcctaatatttttacatactagtatttattgaactttttccttattatccttcatgcagcttagataatatatgaatgtttatatctaagctaacttgaaggaggaaagatttttgttgtagtcaatttacctattccttgattattatctttttagtacattacagataaatatatttacctataatgctatatttatataaaaattttaggacctataagttaatgttaccataaaaaagatccagggaagaggaagagagtaaatagatattagaacttacaagaaatagtaaataattatataaaataatgtaggctaatttattaaacttgctgtctttcaattaataaatttgcaaagtgtaatatgyttaacaaatgagtgcatacattcaagtaaaaatatttctatgaaaagacagataagataggaaggataaaaatggagatataatgttcatagcacattcagacaaactaaggcaaatgaaatatcaatcatattgagaacatcataaaattcttttggaatgaaaaggtgtttttatgcccctcccttgttttatacataagataactgaggcactgagtggttgaaagacatactagagatcacacagtcaaaggtgcaagaggactggaaata

SEQ ID NO: 698121 - DNA, 642 bp, Homo sapiens
gagtttcatatggatattataaaagaatgtaatggcagtgwgtttgatatggtgccttccccaaagttacatgacattatgtttgataattgtttatcgtagacacatacaatgttttaagcttacttcttaatattttattttctgaaatcaatgtcaattaaaaattaatggttttgaaaaataagcaatctatcccggaaggtattttttccccctctcttcaaatatgtttagttaaattcctttaatttgatttatttcatttgagagatactgtgatctttcagaaaaattgctggggctcttgcttttagtatttcttcatggatttaaagagataactttttctaacagtgtaaaaaatagcaatattctattccatgtgaaaaataattcaaattcaggtggcaatgttaaaatatagtacaaacataatactgtaaagtttaggcttcaggtaaatttgaatgttccttaaggatttcatatctatgcatatattatttaattttaacatttgaaatatttatattattaggcttgatatggcagtaaataaaaaataacatttattccataatatttttaatagaaattagttaatacacttattaactaaagcatgatcttttcttgagc

SEQ ID NO: 698122 - DNA, 671 bp, Homo sapiens
tcttgttaaacttcaaataaaaatttagaaaatcatggtaatttattgatcatctttggagttgctcttttcacttagaggttactatggaaatacaggagtggcggtagtcaattatcaataaacatgccaatcaaacacatatattactactggggatcattctcatggtgtttataagctgtcccccatcccttgatcaaatcatactgtatgtgtgctaaatctacccaagagtgttgcttattagagtaatgagttgataacatttttgtgagagaaaaatttatctttgctgaaaatcttcctttattctgcttgtatttctttgtaagyattagttatatttcttgggtgtttttcatcatttgagaagaataccttttacccataataaaagtaaacctatccatgaaaattttatctaataaaaatttttagtttagatgcctgaaatcaaataaaaataatattaaacagggttgaaaagaatgttaaaacaggtaactaaaacttgctgccttatactatctagtaaagcagactttccgaatgtttatcctctgtgcttggatgagaggactgcaagtgaagatttgggaaaattcaagtaaagcatggtctaggtagaaagggaaacaaagaaaaacccccaaaccaaaactaaccca

SEQ ID NO: 698123 - DNA, 1575 bp, Homo sapiens
acttccttgaaaccagtgtcagtgttcccagattcttccttcctacctttctccatttccttccttccttccttccttccttccttccttccttccttccttccttccttccttccttccctcccttcctccctcactccttccttccattctttccttcctcttcagattatatagtctgagaaaatagaaaataaatttttcaaatgtatatgtataaatttggatatctccccaaccctacaaccacgtctcattcctctcatttcccatggaatcccttgaaacatctatataatacttcagggcttaaggaactctatgaaaaaactagtgatctcagtcaaacaaattacacagtctcactatctttagctatgtttctaggagttgtcatatgggaaaactaaatctagcttttatagaccagtttcatgttaatagctaatatacttttaagagtaggaaaaatatgttttaattatcaagaaattaaaattggaggttgaataactatagttgaagtcatagcatctaataatatttacttgctattattgtgtcaaagtattgaatatttgccacctgctggcactacattaacccatacaatcctttagaatacgcttatgggttaggtcttcctatttttctcatgctttgggcaggggaactaatggcatatggctgtgagggatggagatgggtgctctagcagcagagcmcgttcatgatctaaccactaaatcacattgtctctcatgagcaatcaatgttttagatagttaatttaaagcggtaatattttttaaagaacacattcttgtataaagactgatggccaacattctgttacttggaaatactttaaaaaacgtgtataaactattctcattagcatgaaagtaataagggaatttaaatgaaaataaaatgtctaaaaccaaagctagttctatttcagtcagacacaacaaatcaacttactcttcaatcaacctttctgtttagtgtgtcagtttaacttagagaaccaaacaaaacacttttttgtttgtcaaggataggctattaaaacaagggtgttctaaaattgcattagaaagatgaaaatgatttgtttaatcttctgaattttcatatgtcaggaacattattgtgaagaaaattgagctctctgaagtgacggatacattattcaaataactttgattggatgtaagattttttttaatgctttcacaaagcggacatattctaatttggtttataaaagagtggctttaaaatttgaaatactgggaaaaatatttttttagttcaataattagacaaagcatatttaattgtgggtgtaatgtttatggataattccattaattgataaatatatctggattataattagcataaattatttgcaccttaataagtcctcagtttgaactacattagagatgttaagatttctaaagtcatctacaactggccttaaaaattagatttgattttttaaatcttaaaatagtggttcagataagttatagatttgaaacaaaataataaatggaaaac

SEQ ID NO: 698124 - DNA, 654 bp, Homo sapiens
agtgcagtgttgcgatctcggctcactgcaacctccacctcctgggttcaagtgattcccctgcttcagcctcccgagtagctgggactacaggcgtgtgccaccacacctgggtatttttttttttgtattttagtagagatggagtttcaccatgttggccaggatggtctcgatctcctgacctcatgatcagctcacctcagcctcccaaagtgttgggattacaggtgtgagccagcgtgcctggcctcttctctctacttctatgaaattaattttttaatattctatataagaagagagtggatgtagtattttcaccataaaaatgataactatgtgaggtaatgcatatgttaattagctagactagtcatttcacaatgtatatgtacttcaaaacatcctgttgtgtacgataaatacataaaattttatctgtcaattaaaaaataaaaagttaccactttatagcatattcrcttatatggtttgtatgtgacaaaattttgcttttcatgtgcctaagagaaaggaggttacagaatgaagtaacacatacataaattgtgctgtgtagtcaaccctccaaacacagacaaactactactttatgttcattttttacctgaagtctatatttcttaaaat

SEQ ID NO: 698125 - DNA, 612 bp, Homo sapiens
ttaaatttaattaaactattttagcacactatattgttattggtgtgtatataacctgtcatggtttcatagtgccaaattaaaatgctttactgcattttagagcttattagagttttatacacttctaacaacattgatgttgaattttgttgtgaaatcttttattacatactaaataaacctcttgggatttaacatgtatttctacctataaatgcactaaaataatagtaggtgtattaaaaaatacrtataagccctcatcaagaaggtaaacaggagagaacaacacagggcagacatcaaaacaattatagaagcaaaaataaaaaggatgattgacatggttgtaagagaaagagagaaagttgaaaacatacctgcaaaacggggaagccaaccagttcacaacaccaaactgtatctggacattcttgtcacaattgggtcaccaagatgacattggaaagagtaagattggcttaatatctgaataaggaactcgacttctccatcagtgcttctcaaatcatctgcagtaaagaaccagtttctttttacatttcatagaaggccaatacttcagtaaaatatgataaaaatcaacta

SEQ ID NO: 698126 - DNA, 612 bp, Homo sapiens
ttaaatttaattaaactattttagcacactatattgttattggtgtgtatataacctgtcatggtttcatagtgccaaattaaaatgctttactgcattttagagcttattagagttttatacacttctaacaacattgatgttgaattttgttgtgaaatcttttattacatactaaataaacctcttgggatttaacatgtatttctacctataaatgcactaaaataatagtaggtgtattaaaaaatacatataagccctcatcaagaaggtaaacaggagagaacaacacagggcagacatcaaaacaattatagaagcaaaaataaaaaggatgattgacatggttgtaagagaaagagagaaagttgaaaacatacctgcaaaacggggaagccaaccagttcacaacaccaaactgtatctggacattcttgtcacaattgggtcaccmagatgacattggaaagagtaagattggcttaatatctgaataaggaactcgacttctccatcagtgcttctcaaatcatctgcagtaaagaaccagtttctttttacatttcatagaaggccaatacttcagtaaaatatgataaaaatcaacta

SEQ ID NO: 698127 - DNA, 604 bp, Homo sapiens
ttcacacttgtggctgatgtgaatgctgaccgaaacatggagatcccaaaaggattgattagaagtgccagcgtaactcctaaaatcaatcagctttgctcacaaactaaaggaagttttgtgaatggggtgtttgaggtacataaggtaagcccacaccattgttttataaaatttctcctgcaacctccaatttttaaagtcttaacttgtcaactggagtttggtcaacttactcaacacagaaaatcaaccccttcacccttcccccagcactagagataattgaatagagttcatttcaggatatggggtacgttatattgtaacattcctcttcttaaggtatcatcatgcaagttatttagacagtcactaggaaacttggcattttattagttttgatgatckattcagagccacccttgtccaggacagtgcagagtttatatcaacacacatatccttaggattttgtttctttgagttcttctccatctgtatcaatgacaacttaatttaattgtgaataaaagagttgctctcccaagcctgaatcctgattgtgacaaccagagtaagaaataaaatagactactctgct

SEQ ID NO: 698128 - DNA, 627 bp, Homo sapiens
tgaggatgattctaatatgcacctcatagagtgtgaatattaaatgagttaatccatttaaagcacttaaaacttcctggtgcatagaaaatactatataagcactgtttcttatcacaccttcctggtactatttcactagagctacagttttctacagtccacactcttcctatgtttttctgccactggggttaagtgtcactttttattaccattggccttgcatcgtgttttttctcttataaaasagatccattccattgttcttggagtaggaaaatgagaaagaggaaaagaaagagagagagagagatagctggctttctgtgttaagaaaaataagaaagacttgatttctttgtggaaaggacatggtttgcatatatatttttttacctgacttctgtaggtatttgatttatattcctaggttctataggcatttgtttttccccccttgctttagggaggacgctataattatagaaaaacatggaacattgagtaaagcactaatttcagaattagaagactttgattctattcccagtgcaatgattatctgtgttcctttgggcaagttggaaattttctctgggtctttactttctcatctgaaaaagg

SEQ ID NO: 698129 - DNA, 646 bp, Homo sapiens
atctgaacacacagtcctggcggctggccttctccactcggtctcttaccattagaacacagttttttggtcacatttctacatggccgtttgttcttcactgaacctaagcataaaaatagttttcccaggtcttgggtcttcatcctaaaggctcctgtgtcatgtacaacttcaattaaataaaattgttatgcttttctctggttaacctgtcttttgttataaaaatgtcagtcgtgacccttatgatgggtgaggaaaggcatcacatrgttctcctcctacaaagcaattcttagcacccagaggcataacccagtggacatttgaagggaagacaggacaaagaatggagtcaggagcttagtctgttcaacacaaatgttcagcacacaggaactaccccagagaaaagaatgctgttggggggtgagacaagcagctgagccctgttcctgctgggctttgggggcaaaagccagtcctcagggaaaatggaactgctgctagaataggtgtgtggaaagactgaggaacaggccccaaactgcagccccgccttagaagcagtcctcatctgcttcctcaccttagaaaagactcataatagtactaacccataaggctattgtaaggactgaaa

SEQ ID NO: 698130 - DNA, 757 bp, Homo sapiens
acagaaagaaaagggaaggcttatagaaccagygatagctatcttcaaatatttgtggtagatcagtattatttattgttattccagagaccagaaataggaaaatcataggtgaaagttccaaaaaagcaattttcagcttatgtggaatgactaactgacaattacagctgtccaagaacaggatagggtgttttgtttatttgttagcaacctacatggcaattgaatggcattcaattagagatgctgagatgcaatgcctttcaaattttaaggtgcattttgagtcacctggggtcttataaaatgctgttggccaccaaacatagtttgagtaccaagtatataaagaattctccttcgctatgtggacaattttggataagagaaattttaaattttccctcatcttgaaaagtctattatattctatgtttatttgagtaccaatgcaaggtatttgctggatgctgtggaaataaacaaaagtcagggtccctgagataaagtagcatatttcagaaacaagagaatgcatagcacatttgaagaatattgacctgattgagagaaatttttctggtaggagaagtgttgtagaaataggctttgaaaaggcagagtttccattgtgaatataaaattaagtacttcagacatcatcctggggggaaaggtatgccagttcagatttgccttcttctataagtaatatacccccaggatagtggcttaaacacacaaatgtttattt

SEQ ID NO: 698131 - DNA, 757 bp, Homo sapiens
acagaaagaaaagggaaggcttatagaaccagcgatagctatcttcaaatatttgtggtagatcagtattatttattgttattccagagaccagaaataggaaaatcataggtgaaagttccaaaaaagcaattttcagcttatgtggaatgactaactgacaattacagctgtccaagaacaggatagggtgttttgtttatttgttagcaacctacatggcaattgaatggcattcaattagagatgctgagatgcaatgcctttcaaattttaaggtgcattttgagtcacctggggtcttataaaatgctgttggccaccaaacatagtttgagtaccaagtatataaagaattytccttcgctatgtggacaattttggataagagaaattttaaattttccctcatcttgaaaagtctattatattctatgtttatttgagtaccaatgcaaggtatttgctggatgctgtggaaataaacaaaagtcagggtccctgagataaagtagcatatttcagaaacaagagaatgcatagcacatttgaagaatattgacctgattgagagaaatttttctggtaggagaagtgttgtagaaataggctttgaaaaggcagagtttccattgtgaatataaaattaagtacttcagacatcatcctggggggaaaggtatgccagttcagatttgccttcttctataagtaatatacccccaggatagtggcttaaacacacaaatgtttattt

SEQ ID NO: 698132 - DNA, 660 bp, Homo sapiens
gatcaaactagtttctcttgatttctaaaagtagacaggacttctggctgatagcatgaactagttttattaaccaaaaactgccttcaacttggcacctcttcagccagaaacaaacatattattcaccctggactgccctgaaaasggtaagagaaatgaatgtaatttaaggagaccatccttaattaaaggagccacttggcaaattccaatggctgccttgttttggctgcatctttttttcccctaaacttttctcttcttttttcattttaatacacttttcccaattgtcctgttggaacctttaccacatttgggttttacctggtaaattttgatttaatctttggcggacgctgcttcaggttgactgtaattcagggactggcatgtacgttgtatcttggtgccagagcatgtggggcagcggatggctctggagcactgaatgcaccctgttgtgtggctccaagttctcaagatgcctgtgcagtgccctggcatttcactgcagccagaggggcagctggggtggatttcttttttttttcctggcatttgcaatttaggacctaccttctctaagtatcctccctgagtgggtttttctgcactccacatgtatattttcacatttggctgatgggtaatatt

SEQ ID NO: 698133 - DNA, 660 bp, Homo sapiens
gatcaaactagtttctcttgatttctaaaagtagacaggacttctggctgatagcatgaactagttttattaaccaaaaactgccttcaacttggcacctcttcagccagaaacaaacatattattcaccctggactgccctgaaaacggtaagagaaatgaatgtaatttaaggagaccatccttaattaaaggagccacttggcaaattccaatggctgccttgttttggctgcatctttttttcccctaaacttttctcttcttttttcattttaatacacttttcccaattgtcctgttggaacctttaccacatttgggttttacctggtaaattttgatttaatctttggcggacgctgcttcaggttgactgtaattcagggactggcatgtacgttgtatcttggtgccagagcatgtggggcagcggatggctctggagcactgaatgcaccctgttgtgtggctccaagttctcaagatgcctgtgcagtgccctggcatttcactgcagccagaggggcagctggggtggatttcttttttttttcctggcatttgcaatttaggacctaccttctctaagtatcctccctgagtgggtttttctgcactccacatgtatattttcacatttkgctgatgggtaatatt

SEQ ID NO: 698134 - DNA, 1470 bp, Homo sapiens
ggaaatgaagaggaccagtcacctggcccactattgctgagtatcttctatgtgcccaggactatgccgttgagaccctcatctcacatactcacaactctgaaggagagatgagacatgggcatgaataacattgatacaaggaaaaagattagaggaaggcggaagcctttcatttagacaggctgacaagaccacatgcagaaggtggcatttaagccagttactgaaagctgtgccatttttctcaggcactggtagagatgaagtgggcccttcaggcaaagatgactatactaggcaaggcctagagagggaaggtgtgggtacagggagtgttcaggtaaccagagagcagctcagcaaggttgagaaagagccagaaaggatgactgtggccggagcaagaagagcttcagatggcagggggaggtgaactggggccagagggagacagacagacagacagacagcctgtgtcccagcaggctcagccttcctcaggaaggcatagctgaagatgccaaagcagatgtcaatcagagactaagaatccaaattcttggggaggcaggattttgatttgagccttagagccaaggctgattatggcttctttcaagtggagatagaaccctgatcgcagaggtcctgtttaggttctaggatgatatagtttgaatatttgtcccctccaaatctcatggtgaaatttgatccccactgttggaggtggcctaatggggggagtttgggtcatgatggcagatccttcatgaatggcttggtgacctcccgaggtaatgagtgaattcttgctctattagttcatgcaagagctggctgtttaaaagcgtgtggcacccctcccttctctcttgctacctctcttgccatggccacactggctccccttgccttccgctacgagtaaaagcttcctgacactgagcagatgcggctgccatgcttatagagcctgcagaactgtgagcttagttccttataaattacccatgagcctcttttccttataaattacccatgctcaggtattcctctaaggcagcataaaacagactgagacataggtaggtttaggcaaaattgtcacctgccacccactgagttcatcctactggtgtgagtgactgtgtccctgtcaccactgggttccatgttaccatcccattcaagaacctygtgtttgcctttgtttttgttttgttttcgggttgtctggggccccctctcccgagtgtgcaacttggtggtgctgaggtggagtggtggtagaaagggaaatttggagcccagttctacttgtttcagccttactaggcaaaatcataggaaagaacatggtagctgaagcaagacaaacccagtgtccaaattctggctccccaacttacaaactgtgtgaactccgacagtttacttaacctctttgagatttagtttccttat

SEQ ID NO: 698135 - DNA, 1331 bp, Homo sapiens
agggaggccagggctttagaatcaagtcttaaagaggagagacggttaactaggcaaggaagggagagagtgtgccagggagaaggaagagctcatgcaaagacccagagacacaaaatagctctctaatctctgcaccctagatcagggcagtgaacagcatatccaagagcagggatttataatcatttcttttgaatgtcttccaacgtagtggtgcctcatatgtgcagaactttctctaaaagtcagtgtggttaattcagcagtcaccgtgcacctcgtatgttcatttttctgtgccagagggtccctgtcctgagggaacaatggggtagtgatgggggtaggaagggtaagggacattttcaagctctatttaaaggggaaatcagcaggacttggtaactgattgtgtctgcgggatgctgcagagaggagtctcccgcttgaatgcctgggtaaatggtggtattttcaccaggctgaggagcagagagcaggagcagggtgggagcaaggtgataaagggacacaccacagtaggccacccacgagtaaatgtctatctgcagttagtaattctggagctcatttagagttagggcttagagttcttgatttgggagccatcaatgaacaagcagttgaaaccatgagcacacaaaaggttgcccgaggaggctgggcgcagtggctcatgcctgtaatcccaacaccctgggaggctcaggcgggcagatcacttgagcccgggagttcgagaccagcctggtcaacatggcaaaaccccatctctccaaaaaaacaaaacaaaaattagttgggtgtggtggcaggtacctatactcccagctactcaggaggctgaggtgggaggatcacttgagcccagaaggttgaggctgcagtgagccaagaccgtcccactgcactccagcctgggtgacagagcaagaccccatctcagggagaaaaaaaaaccttgctcaaggggaatatgtaatgagaaaagagcagggactgaagaagaagccatggggwgcctccctgtgaggcagctgctgtcatccccagagggtgacaagggaagccaaagagaagtcctcactgctggaacatgacggagcgggatgcagacatgcaggtctgtcagactcgggaaggagcccctgcactttccaccaccctagcccatccttgcaaggagtcgtgacgagatgagaaaggtgagatgaaggaagcccagcaagtgcgtggcagaattcaaacctccacctttctagaggtgaagctacttgatggtccgaaccctccaacttacccccgga

SEQ ID NO: 698136 - DNA, 1212 bp, Homo sapiens
tttaatctcattgactcctcaaaagagttttagagacctccacgtttcaaataaccacaatttgagaactgctgctttaaactacttgaatttttttattctattattttcttggaagagtgcaatatttttctttttttcagaatactttaccagttttttgtgcattacaagtaatttattaaatatatatagagagagggagttagagagtttttttattcatcactaattgatttgctcactattctactagcagtattacacttttgattatttacctattaatatgttttaaaatctagtgaggcaagaatttattaataatttttatttttaaaaatgccaaaagtggtttatcatgcttaatcacccaagaaaaattaaaagttttttaatgcccacaaaacaattcaaattgagttaaattgatttttgcataagaaaatatttcaaccttatagttttccataggtatagtttttattaattaagtataaataaacttaaaaattagcttgacattaatttgaaatgttgtaatacttgattctttcctaggatgattgctttctctttgtataagtctatcattataccttttaataagtagctgtagttttcaacatacaattcttacataatttatattgctgttattatttggatttttctgtgctatttttatgattatcattatttcttttatttctctactgctagtgtgtaataaagactttttggttttgttcctgatttttaaatgtagattctgtttcagtcatgatattgaaaatcttactatttgtcctcatattggttttattaagttttataagaaggcaattaaatctacaaggctaatgctgttattttagaaaagttatttgagaaaaaaagataattttgtctgctacttgtttcataccttacttgactttttaaagcatataaccgtctttttgtttgtttgtttgtttgtttgtgattgtcttttttttattatactttmagttttagggtacatgtgcacaacatgcaggttagttacatatgtatacatgtgccatgttggtgtgctgcacccagtaactcgacatttaacattaggtatatctccaaatgctatccctcccccctccccccaccccacaacaggccccggtgtgtgatgttccccttcctgtgtccatgtgttctcattgttcagtt

SEQ ID NO: 698137 - DNA, 675 bp, Homo sapiens
aaaagggaataatactgcggctttaatttgcatttgcctgattacttatgaagaggagtacacctttgcatgttatttatttgagtttccactttattgaagtgcctgctatttaactatttttctactaagttgttcatgttattcttattagtttaacatgacaatgacaaaattctttctatttttcacttatctgcttatgttttgtgtggtattatatttgacagaggctttttgtcataaataaatttttcagtaatttctttatgctttgttctttatcatgtatataaaatatttcccataaaatttctttgatactgacttctaaaatggaatacttttgcctttcagwtttaattttttatctgcttagaaatgattttgtatgtcatatgaagtatgggtccaatttcattttctatttcatatgcacaatcatttgacctagcatcattcattataaatgcatatttcttcccttacctccagggccatctatgccattcattcattcagctaatatttactgagtggctaatatgtagctggcaccatgaaacgggctagggatctggaggaaacaaactagattaaaatttctactctaatagatcattcattcactttagttgcgggagaaagataacaccaaaaaaatacaaacaaaat

SEQ ID NO: 698138 - DNA, 675 bp, Homo sapiens
aaaagggaataatactgcggctttaatttgcatttgcctgattacttatgaagaggagtacacctttgcatgttatttatttgagtttccactttattgaagtgcctgctatttaactatttttctactaagttgttcatgttattcttattagtttaacatgacaatgacaaaattctttctatttttcacttatctgcttatgttttgtgtggtattatatttgacagaggctttttgtcataaataaatttttcagtaatttctttatgctttgttctttatcatgtatataaaatatttcccataaaatttctttgatactgacttctaaaatggaatacttttgcctttcagttttaattttttatctgcttagaaatgattttgtatgtcatatgaagtatgggtccaatttcattttctakttcatatgcacaatcatttgacctagcatcattcattataaatgcatatttcttcccttacctccagggccatctatgccattcattcattcagctaatatttactgagtggctaatatgtagctggcaccatgaaacgggctagggatctggaggaaacaaactagattaaaatttctactctaatagatcattcattcactttagttgcgggagaaagataacaccaaaaaaatacaaacaaaat

SEQ ID NO: 698139 - DNA, 1311 bp, Homo sapiens
tttacttctggacaaaggattagagtctgaaatccagcttaaagctcttgtagaaagaacatgttgtgactcttaccccatccccaagagcctgacactttgcaacaaaaactcaagagtaggaatccatgagctgaacccttcttataagccatgcattggtgtatcctttgcatacatatttgcattcctaaatttaggctttgttttaatgtagagcccatccaacggaggactggttttatcatggccaccatttacagtagttttcactgtgtcctacactttcctttggaaaaagtgcaacttgatttctatagagaacaacagagaaaatgaagtttgcttatatgaaatctgaaacatatgccttgtgtgctcactgtgtggggagattgggcactaaaggctttcttctaaaagctctctaataaaaatataaagtcctttactcacctggggatacaaaccacagctaataaatggaattggattcgagtactctactcgagacagaggatagtgaccgtctccaaatgactctacaytgtatcctttattacctaaattacacaccagttaactcccaaatgaaacaatatttgttgtaaggtggggcatccagatcctatttgtgcaccaagttttaattttggttgagattttaattagatttcttaggcatctctattttaccatagacattttaatcaaagtacttttccttcctcatttatttgtagtaggtcttcagtgttttctcactacaataaataattattgtagaatggccacaaatagtgaacatgcaatatacctgacaaattgctactctggaaatccagcaggacatccccactctaagtcatgtgttaatttcctcaatgtaagagagatatttgtattttatgttgtcatgtgcaattaaagattatgtatcacaggagggtggcaggcttgttgaagaggcaaaacattacatttgttaagcagtcattatgcctcaggcattatgcttggcactttataaatacagactccttcaatattgtgaggtaaataacatgagcctaatgtcaatttagagaggttaaacttttacacagagcaacaaattgcttatcctgagttttgaactacttggactggctccaataaattcgtcttgtactgtaagagaataactctgccactctgacttgtgtatatagttttatttttttagttaaaatattgaacaattgtgacagagctaacttttttttagtgtttgaaggatttgagtttaactataatgtgctcaggagttag

SEQ ID NO: 698140 - DNA, 1311 bp, Homo sapiens
tttacttctggacaaaggattagagtctgaaatccagcttaaagctcttgtagaaagaacatgttgtgactcttaccccatccccaagagcctgacactttgcaacaaaaactcaagagtaggaatccatgagctgaacccttcttataagccatgcattggtgtatcctttgcatacatatttgcattcctaaatttaggctttgttttaatgtagagcccatccaacggaggactggttttatcatggccaccatttacagtagttttcactgtgtcctacactttcctttggaaaaagtgcaacttgatttctatagagaacaacagagaaaatgaagtttgcttatatgaaatctgaaacatatgccttgtgtgctcactgtgtggggagattgggcactaaaggctttcttctaaaagctctctaataaaaatataaagtcctttactcacctggggatacaaaccacagctaataaatggaattggattcgagtactctactcgagacagaggatagtgaccgtctccaaatgactctacattgtatcctttattacctaaattacacaccagttaactcccaaatgaaacaatatttgttgtaaggtgggrcatccagatcctatttgtgcaccaagttttaattttggttgagattttaattagatttcttaggcatctctattttaccatagacattttaatcaaagtacttttccttcctcatttatttgtagtaggtcttcagtgttttctcactacaataaataattattgtagaatggccacaaatagtgaacatgcaatatacctgacaaattgctactctggaaatccagcaggacatccccactctaagtcatgtgttaatttcctcaatgtaagagagatatttgtattttatgttgtcatgtgcaattaaagattatgtatcacaggagggtggcaggcttgttgaagaggcaaaacattacatttgttaagcagtcattatgcctcaggcattatgcttggcactttataaatacagactccttcaatattgtgaggtaaataacatgagcctaatgtcaatttagagaggttaaacttttacacagagcaacaaattgcttatcctgagttttgaactacttggactggctccaataaattcgtcttgtactgtaagagaataactctgccactctgacttgtgtatatagttttatttttttagttaaaatattgaacaattgtgacagagctaacttttttttagtgtttgaaggatttgagtttaactataatgtgctcaggagttag

SEQ ID NO: 698141 - DNA, 967 bp, Homo sapiens
aggggctccccctgaggctggcaggcggggggcagtgagcagccaggcctggggtcatctggagggctcccctcagcagcctggtgcccgcagtcctgcaggaggcagtcagcactggagaccccgagatggtgcagctggtgctccagtatcgggactaccagagggccacgcagaggctggcgggcattccggaactgctcaacaaacttcgccaggtacagcagggcacagttatggaggtggggtaccatggcagggcaccaccctggttactgtgccaggcctggccttggaaaggcacccagtttgtgcagtgtgcctcctgccaccagcaaggaggtctgtctatcttgaccccagcccagggtcacgtaggaaagagagacggccaggctcacgtgggagagactggaccctttggaagagaagccttgccagctttgggcctcctgaagaatgcagattacctggagcagggacttcaggttgactcggtggattatggcctgaaaccctggaatacttgctactacgcacccttctggaagcacacggaggggcctggctggcagagcatactatctcataccccctaccccaggagcaggctcggagggagccactgtgccccctttacagagtaggactctgagacccagtggaaacaaaggctcccccagggctctgcacaggctcatggccaggttgaggctggccctccacctccaggtgcttacagcctcattgtctgaagaccactgtagtgccccacttggcccaccctctccagggcagagtggttgggcgtagctgagccatagcagtgcgtcaagacttgatgaagggccaggcgttgtggcttactcctgtaatcccagcgctttytgaggccaaagtgggcggatcacttgagcccaggaggtggagaccagcctgggcaacatggtgaaagccgtctctacaa

SEQ ID NO: 698142 - DNA, 641 bp, Homo sapiens
tgttagagattttttaaaarggtatttacctaaatttagagttaagaatatttggccaataatactaacaatattttgggggctcaaattaatcgccttgttttcccatttcccattaaagagaatgatatcacatgaaaaaacagaacatactgatacaccaatataaaagtgtatcttgtaaatagtttatgccagctttgattctaaaacatctggaattttatttgccacctccaatcttttctggagtacaaacagttgtgttttatagtggcactaaatcaacatacatcttccctgagtttgtctgccactctttaatacttagattcttgaatgttcgttgtcagtaaaacaactaatgcaagcacaatggggggcaacaggaatctataggtaaggtaagtgttttaataacatcagccagtgtttgcaagaaaatattgccagttgctatgggcatacaattagtggtgactgcaaatgcatgcaggtataatcattgctctctgcaaaaagctgaacactattttgtcatttataggaaatttggaggatgatccatcagctcaattgaataaggaaagtctatttaaaatgctgaaatgctgacaattattgtaaagaaatctagattt

SEQ ID NO: 698143 - DNA, 1488 bp, Homo sapiens
ggtgatacgatttatcatcctttagaaacaactcttcaagtgctgcacatgttcaaagcctctcagtctaatagattctgtctgactgtgggataaagcaggaacacggacatagtattttctcaactttaataaagtaattcagtttgggaattagatttatagcaattattttgttaatctcargtaccagtcttatatacttctgtttaccatcatcactctgaattctgcttaaaatacagattttcaggtctgtgattatctaattatctttaaaaataaatttcagcaattttagtttttaattataagccataacgtgtcattttgcaaaaactccattacatttcctccttctcttctttagaatgggcgagtgtaaaagaagcctgaaactgctttggaacatctaactgaaggtgaaaaagagatagccaagagttcaggacaaatttattaacaagacatcgaaatcttcatattctgtgaatgtgtagtccaaattatgataataatgtttcagaaataggaactgcaaaccctaactcattctgtaacttacgattcatcatttgtaactccccacttctaagtagcactgtttatgatggacagaattgagtgccagttagaagatattaatcaaactaacttaaacaaaagacaatgcattttgatgcaattaaagtcaaacctaagtgtagaatacctttaggcaaagcgtttcaaattgttatcacactgtttctctctctctctctctctcacacacacacacaaacacacacacacacacaccacaacctatataacaaggaaggggggatcaagtaatcgatagttctagtaaaaccccatagattagaagaggggtagatattcacagtggtatgttatcagacaaaagcaatatgtgttaactagagctactctgcaagatactgccttagatacttagcacgagttagaggggttaaaggggtgattagccaatagaaaaataggtatgacacgttctttcttgaaggcatataaaagctgataatttagttagtaaaataagagatattcacaaataactataatacaaagtaaaatatagtaaggctattatagaatatttgtggcagcctttgaagagtagtgggtggctaatgttgttcctggttccttctgcttcaaggctatttctgtagtatcttctgtattgatttcctcttttatacattttatttccttttgtgtatctctcactgctagctagccctgtaattcttttattcttttattccttgaaagaccacaaacacagggaggcaacattttactgaaaaaatagagcaatcaatttgcatatttacagtacaggacaacactttgcacatttaaaatgaaatattgtctttttaaaatcctttgtccagctcctaccactggtctttgaaattccatcatttcttctattatgagattgtgaaaatagtt

SEQ ID NO: 698144 - DNA, 659 bp, Homo sapiens
atggtttttttttatattttctttccttgtctaatgactctcaaagtagtgatccaatcaatatgaacaatttcattaaatatctgagcaagtattatgtgaataattctttgctgaatattattgaaataaaaagatgaatggcataattttttaagtaatctatagtttagtagagtgtataattttaagatttgtttgtatgcaacaagtatagtaagagtcacaaaacaaaagctgctcaagttaaaaagtgcctgcaattgaggtaatcgaggaatgtgctactgaagtgtttgtgatgagatttgtagaaagggtagcatttctgcatgtggagacaataaagcagattttagagtaaagacaaaatgggaacgaatattgagaaaactgtttcgtytgactggtattacaaaataagaattggctagcctttgcccttgattcctaggggagggtctctaaatattaggaattttccaagtaattgaggtgtctgtgccattcatggtggtcccctcagaccacacctgagtttatgctaacaaggttgcccaggatgggagctagtcatgccagaaagaccggtaaactgattaaaagtttggggatttgagccacagaatatcagcccaacctctgggagctaaagaact

SEQ ID NO: 698145 - DNA, 541 bp, Homo sapiens
tgggttaatggtgtacaaagtgtgagagtatctaccatggaaaagggatttcacatccaaataaactaaatgtctcaatcagttgacaccttccagcctctgacatctgccacctcagtgctagtacactaggcttatgaacaaaatagcaatggtgtcaagaacagaagttacacatggccccacagggatgtgttttcattcaccaaggttgccgtaactactctgctgctgaacatccagacttccagccaaaaggaacaatgctgaacctttgaaatgccaccatttcttcaggaaaccaaccagctctgttgtggcaagttgattacattaaaccattttgctctgamgtgtcagtaattcatcttgaatatatataacacaggattgtttctgcttttcctgcttcccagatctcagtcagcaccactctcagataacttaaaacatgtttgatccataagtacatgacactacataacctcatgtattagtccattatcagattgctataaagaaatacctaagactgggtaat

SEQ ID NO: 698146 - DNA, 541 bp, Homo sapiens
tgggttaatggtgtacaaagtgtgagagtatctaccatggaaaagggatttcacatccaaataaactaaatgtctcaatcagttgacaccttccagcctctgacatctgccacctcagtgctagtacactaggcttatgaacaaaatagcaatggtgtcaagaacagaagttacacatggccccacagggatgtgttttcattcaccaaggttgccgtaactactctgctgctgaacatccagacttccagccaaaaggaacaatgctgaacctttgaaatgccaccatttcttcaggaaaccaaccagctctgttgtggcaagttgattacattaaaccattttgctctgaagtgtcagtaattcatcttgaatatatrtaacacaggattgtttctgcttttcctgcttcccagatctcagtcagcaccactctcagataacttaaaacatgtttgatccataagtacatgacactacataacctcatgtattagtccattatcagattgctataaagaaatacctaagactgggtaat

SEQ ID NO: 698147 - DNA, 581 bp, Homo sapiens
attctaggctcagtgaatggaatggaatacttccatctgggacagacgaagagtcccattaatctgtaatctgtggaacccatatagtcactcaagactccttgtagcaaagatacttacagggatagaaatgacaggagttaccatgctagcacagaaaattggctctaattacaataagaagccagcactggtattatgaatggatgttgtggtttgtcactgtatcagaaggggttcaacttgaagartagaacaagtaggagacacatctggagaaatgtgttgcaagaaattggcttatatgattgtggggctacctaggaaagcacaaatctgtaaggcaggttgtcaggaagagtagatgggaattcttaaaagcatggcttaaggtgctatcttcagataaagtttcttctttatggaagcctctgctgtgcttctaacgcctttcaactggctgagtcaggactactcacattattgaggacgatctcttttaacttaaacatattaacgttaatcatatctaaaaagtatctgcaaagggccacccagaatagtgtttggttgaatgagca

SEQ ID NO: 698148 - DNA, 581 bp, Homo sapiens
tagatgggaaaggcagagaagagtggcagagtgtgtccctgcattttagcctttctttttagctaaacaatctccagtattttagagagtaatattttggtttcctttgataatagttattttaacatcattttgattctagcaatgaaatatgcagataggtgggaaagagatttttttccaccatggtatagaccaaaatagtaaaaaaaaaaacacttttaatttatgaacattattttttaatccggttttcctctattgagtcttttagaacaattttaagccattactgtggtacataactttgcaaaatattagagctagggatatcagactcttagctcaaaggtggagatatttttcaacacacacatgaaaaatgaaaatagaatatatttctttgcttacaatacttgggtaataaaattttcttaggcttkggggcaaaagtatctcgatatgtatatataataagaaaaagtgattcacaaatttaattatatatcagaatctctcagagagcttaataaacagtatcatagtctaaaatcttgcagggtagggccctggaaactgat

SEQ ID NO: 698149 - DNA, 1874 bp, Homo sapiens
tcaaatgaggtaccgaaatttgattggacatcataaatgcagtaatgggtgctctttgagagatgaggaaattggttagacacctctacgtttgaagcggcttccctgtgtgtgtaaaatcccccggttatgtctctgaaaaatgtaaggtgatttgtatatgcttaaatgcataaaaataaatgaatcttaaaagaaaaagactgaaaaaatgtgttattatgtctgaatggtgtgcaatactgtgctgagtagtgaactaaggggctgatctgtaagtcttttacattcctcacatttaactaattgtttatgagtataatattaggcaatagatagtgctcacaatgactctgaggcatataatattacaaaaatgtagcaaatagtttcaataatttgcaaacatttcctattaatctataattgcaatttaggctcccactagatcagtacatttccagaatggctatcaattcaacttgatgactcggggtcacagtaaccaaaagccagaggtcacagccactttaaaatttcaccccagactcggtcaagctccatactgcttggagagtctggctttatctggaaattatacaacaaaagaaccatcctggaagtcttgactttactggaatgtaggaacaggggaactattagctgtatcttcccatgctaaattagcttctgggtaccccatttctatgtttcttctctggtactttaatgctccagacagtcactgggcaataattcctagtaggttatatttgtatgccttggaagcaggaaccccattttctgttcttgctaatattcttctcgttctacttcatgcatctgcttcatgcaaccaatagactgtatgtgccctcttttggacctggagagcctattatcccttcctgatttatggtgcctgggtatataaattatttcagaatgtgcttattcaaatttcctattctaacccacctgttcttcaactttttttttatgctacaaattccaagattcagattcaatagtgatcagtaggctctactgaagcttccagttgtacctgtgtgcttcaactcaacctgctttaccttggcctactaactcagatattgataaaatactgcttaatttatctacattctgctatttcatgtgtacttaatatgggttaatacatgtggagagacattgtgagttatgttttattcatctctgtgtctacgtccatacattaaatacaatcaaatccagttagcagaattaaggagagtagtaaggaaatggcttgatatttgaatatgcaggcagagcacacagaaatagttcttgtgtttgtattgaagctttctctaactcttaaagttctctttgtaggataacaccattcccaaagtctgggaagaattttccacatctcaccagtagtatattgagactattggggtagaattcagatctaggaaagtcaaatgttttcttctctagccaggatactcaaaggtctagcaaagtaaaatgaggcataaatgcatattaagcagtaataaatctataatgtacatttacttcaatctagacatagctcccagaaacacagggaactggctggcaattttggattgttgtttaaaaaccaattccttagtctttgtttgtttgtyttttggttttattttcctgttcatatattttttttaatgttgaagaactaagccatggatcaaaattccagagtgacaattcagaaatgtaggcatgtaattcttcacctcaggatacttaaccaatgtaactctttctgcctcactggccttgccttcttccaactcttcctttctctttgttttccctttcctttcctctccatt

SEQ ID NO: 698150 - DNA, 1453 bp, Homo sapiens
atatggtttggatatttgtcccttccaaatctcatgttgaaatgtaatcctcactattggaggtggggcctggtgtgaggtgtttggctcatggggtgaatccctcatgaatggcttagtgctatcccctggcgatgagtgagttcatgtgacagcaagttgtttacaggtgcatggcacctttcctctactcacttactcctgctctcgctatgtgatatgctagctcccttttgccatctgccgtgattgtgagcttcctgaggcccttaccaggagccgaacagatgttgatgccttgcctgtatggcatgcagaagtgtgaatcaaattaaatcattttttaagataaattacagagcctcaagtatttcttcgtagcaatgcaagaattgcctaacacattttttaccatgttcaaatgcgtctgctaatattttatttaagatttttaaatttttaagggacattcatctatgtcttaaggttactgttatcaggcttgggtatcaatgcaatatctgcatcataaaaagaaacgaagtttcctcttattttctgtgctctgagataatttatgcagcatttgtattgtctgggttgaaatgtttttaaggttttcctgtgaaaactacattgttttttcctctgtggaaacctagtgtttctttaaggaatagttccttcataattttatgtttgtcatctgaatattgatctgtttatgcctaaccactactgcagttaattttaataaatagcatttttctaagaaataatccattttctaggttttcaaatgtgtttttatgatgtgtgtgtatgttcacttatttttttccaattcttctttaccaaagttaagtctacttttgtgtttcctactttttcatgattagatttgcatcctgtgtgatctttttttaaagaaacacaattctaatttattaatttattttatttattctgtcctttgcctcatcaattttagtttttatcttcattttttcttcagtgtacttctatttggttcactttttgttactagttttatgagttaaaattttaacatatttatgcttattattttattagtgtaggcatgtaaaattagatctaattgctactttaaatgtagtccatgaattttgatatgtagctttttcaatattaattataagagttcttaatttctatatatttttttaaattttagattcaggagatacatgcatgtgcacatttattacaagggtatattgtgttatgcagasgcttgggcttctgttcatccagtcagtcaaacagtgaacatggtacccaatacacagtttttggcccttgcctctctccctccatccccctgtttggagtccccattgtctattgcactcatctttatgtccctgggtactcaatgcttagctcccacttataagtaagaatatatgat

SEQ ID NO: 698151 - DNA, 1453 bp, Homo sapiens
atatggtttggatatttgtcccttccaaatctcatgttgaaatgtaatcctcactattggaggtggggcctggtgtgaggtgtttggctcatggggtgaatccctcatgaatggcttagtgctatcccctggcgatgagtgagttcatgtgacagcaagttgtttacaggtgcatggcacctttcctctactcacttactcctgctctcgctatgtgatatgctagctcccttttgccatctgccgtgattgtgagcttcctgaggcccttaccaggagccgaacagatgttgatgccttgcctgtatggcatgcagaagtgtgaatcaaattaaatcattttttaagataaattacagagcctcaagtatttcttcgtagcaatgcaagaattgcctaacacattttttaccatgttcaaatgcgtctgctaatattttatttaagatttttaaatttttaagggacattcatctatgtcttaaggttactgttatcaggcttgggtatcaatgcaatatctgcatcataaaaagaaacgaagtttcctcttattttctgtgctctgagataatttatgcagcatttgtattgtctgggttgaaatgtttttaaggttttcctgtgaaaactacattgttttttcctctgtggaaacctagtgtttctttaaggaatagttccttcataattttatgtttgtcatctgaatattgatctgtttatgcctaaccactactgcagttaattttaataaatagcatttttctaagaaataatccattttctaggttttcaaatgtgtttttatgatgtgtgtgtatgttcacttatttttttccaattcttctttaccaaagttaagtctacttttgtgtttcctactttttcatgattagatttgcatcctgtgtgatctttttttaaagaaacacaattctaatttattaatttattttatttattctgtcctttgcctcatcaattttagtttttatcttcattttttcttcagtgtacttctatttggttcactttttgttactagttttatgagttaaaattttaacatatttatgcttattattttattagtgtaggcatgtaaaattagatctaattgctactttaaatgtagtccatgaattttgatatgtagctttttcaatattaattataagagttcttaatttctatatatttttttaaattttagattcaggagatacatgcatgtgcacatttattacaagggtatattgtgttatgcagaggcttgggcttctgttcatccagtcagtcaaacagtgaacatggtacccaatacacagtttttggcccttgcctctctccctccatccccctgtttggagtccccattgtctattgcactcatctttatgtccctgkgtactcaatgcttagctcccacttataagtaagaatatatgat

SEQ ID NO: 698152 - DNA, 656 bp, Homo sapiens
tcttgctgattctttttctgtcgtcatttgctcactacaaacctcaacggtgggaactttacaatgtgtgcttctcctcaccaaaattggtagcctttccttcaaaattcacatccacttggattctcagaatgtgaccttactaagaaatagggtctttgcaaaatgtaattaaaytaagaagaggtcatacatgattagagtgggctctaaatcaatggctggtgtccttacaagaagaaaaacagaaacagacagaaatacaggaaagaaggctgtatgacgatagaggcggagactgggatgatgcagctgcaagccaaggaatgcctgggattgccagtgaccaccagaagttaggaagaggcatagcaggattcttccctagagccctcagaggaagcatggcttgcctggtaccttgattttggacttctagcctccagaactgtgacagaataaatttaagccactccatttgtggtactttgatatggcagtcctataaaattaatacagggagtctgaaacatcttgttatgccagaaagcaaggaatctatcaaaaaccagtaggaccttttcaaaaaaactcaggaactaagttgaggagcctcccactggccaaagatgaaacagcttgaacaacaataagga

SEQ ID NO: 698153 - DNA, 1835 bp, Homo sapiens
agattatggaaaggaacatgactgcttagtttattccattaccagtgatctgcttgtttgttcatttgcttacccatccattcatttattcattcattcctccatccattctctttcacttattctacaatcatgattgtatgcctaccatatcgctagagagagggcaggaaaagatccaaggatgtgaatacaatcttctgcttcatgatgagagctaaaggaatctgtaaagactttgtctttttcatttttctctctcctacatagaccctggaaaatgttttatttcttataatttgcctgaggtttactcatccactaccagagctctgaaaacactcttcagaacactattttaaaataatgacaatgacaataatagataacatatattcagtgttttttgtatgtgaagcaatgtaataaccatttaaaatgwttgtaactatactttataagagtatgatgaaacaggcactattaaaatgctagtttttcacacagctaatatgagagagagctgggatttggagcctccattcatggccattatatggtctgtctaatgaatgaaatgtttgaccttagagaaaacttgaaatgcatagttttctttgctgacttgaatgatataagtttaaaaatccgatagtggttgctagttgaaaattcctattccttgggaaactgttgaaagtctgtttagtactaacccccctcattaatggccatttgcaaagccaggccaagtttagtcttctaccagcactgaagaaacacatttttacccagaagaaatgagggtgaaatcctctgataactggaagatgctggatgttctggaaagaaaagtaatttttttttcaatctctggaaattgctttttttgttttaagtaagggtggctcagtagatgctaacagagaagctgggatcagctaatctggagaagattctgagagaatgagttggggaagctcacactgagaaaatgagaagattggtaggaagggcggtttcttgctgtgtccaagaacaggaattgagaaatggtattaagctgaaggtgagaggggaacaaagaagactttgaaagttgcatacaggtttgaaacaaagtataccacaaggaatgggaacatgtagagctgttttaaaaatgtttctgtgtttgtgtgagtgtgtgtactagatatatttttaaaatgacttttctcggaattacatcatactttgaagatcagcataggaagtgaagaaggaacaaatattcactgagagcattcactaagggccaggagctccctgaataccacatatgccaccgctctctcttgtgatcctgaaggtctgtgaggcagttatcactatgtatggtatattttcaaagaaagcaaataaaacccaatgtgactaagaaagatgctaaagtcatacagctaattagctgtgggtccaggattcaaaccagtgcacccagcacatggtcttcaataaatatttattgagcagtgaatacatgaatgagtaaataagatgaagcaagcaagcaagcaggtaggcttgtctaacccaagtgttcatgttctatcctctgtactggtggtttttaaattgtgtgccacaaaggccttgggtaacatgaggagggttagtatgagtggctgtctagcagcatggggccccaggctccctatctctactccaaccagggcatctctgcttctgtttgtgttaaacattgggcttttgcctgaggtttcatttgaagaagagggccttcttctagaaagtgtttattactcctgccccatgccgtgttccctcctaag

SEQ ID NO: 698154 - DNA, 1105 bp, Homo sapiens
gagacggagtctcactctgtcgcccaggctggagtgcagtggcgcaatctcagctcactgcaagctccgcctcccggcttcacaccattctcctgcctcagcctcctgagtagctgggactacaggcgcccgccaccgcacccggctaattttttgtatttttagtagaaacgggctttcaccgtggtctcgatctcctgacctcgtgatccgtccgccttggcctcccaaagtgctgggattacaggcttgagccaccgcgcccggccccatgatactattcttaataaattgttgttaaatgaaatcttattctagctggaaattattatattttgagcacagatgatctccatctctttctcttcatttgaagtttcttgatgtcttagttctagagacaaaatgttttggccaacggcagtcttgctacttagagatccaagtgaccttcaagctgggccacttatgatacaacttaaagcaatttcttatttcatttttgccaatgatagcttgtactccaaatttcatgaaaggaggcgatgatactactagaaatttttttttaaagcagagaaagtttgtatgttaagaatccttgcatgcaaatggcagaaatccaactcgaaatagagtgggtagaaaaggcaatgtatttgaccgtattgagtatcccatgaaagagtggggaaaatcaacggtacttctagttttggaagactaaaaccagggaataaaattctgtcagaacctctccttcccgtctcatatcagtgccttttttttctgcacatcagctctactctttctcatttcatcctccctcattagaaattgaatttatctacatgacagaaaatatgagcatagttttagctatcgcagacagactgtctcagtcagtttgggctgctataaaagaatactatagacgagggggatccaacaacagaaatttattcctcayagttctagaggctgagaaggctaagatcagggtgccagcatgatcaggtcctgatgagagcctgatttgcagatggccatctcctcttgtgatcacatttcaaagaagaacagaaaagagagagcaagctctcat

SEQ ID NO: 698155 - DNA, 628 bp, Homo sapiens
taaagaaggaaaagatgcaagatctttgtttaagagccactacgtttcctccttatatcttcttcttcttttcttcttgctttgtcaacttcctttcaacacactgcctcctttctcctgaagtatttgtttggcatctcccaaagtataaaagagtcaaacttaaaaaggatactagcgggtatgaaagcaacaaaacagaatatacaaaaatcttgatcacccataaagatctaggatatcagagaaatgtgtatacatgtgatcaggagatagtgagttcaggagtaaaggagaacaaaaccaaatgataatgactcacatgtaaaagaaagggaaggttgtgaaattgtttgctacattagtacatgggacaaaaatgtgattgaaattgtgtcattcttctaataacrtgaatgtcacaagtaaaactaaaactagcaagagaatgtgaataaaaggcccagcttgaaatctcaagctttcagaaataatgtttttctatttgcatctcttagtactgctacagaaaatgactcatacatagaaggtccagaaaggaactaaattacagtgctttaaaacaaaacaattaccctgtcgtactctcagttgtctttaaatgagc

SEQ ID NO: 698156 - DNA, 1430 bp, Homo sapiens
taacaaggaagctccattctgaaatagattccaattagatcaaagattgaaatgctaaaaggaaattgcaaggcactagaggaaaacacggaaagaacccccattaaatattgtagactgaccatatgctttcatcttctctccctgtcgtaggctaaataatggctcccaaagatgtgtctacatcctaatctccagaatctgtgaatgttactttatgtggcaagtacgtggcagatgtaattaagtcaaggatctttggatggttatcctgaattatctgggtgggccctaaatacaatcacaagtgtccttataggagagaggctgaaggagatttggtaccaacagaagaggaggaggaaattgtgatcatgcagaaactggagtgatggagtcacaagccaaggaatgccagcagccaccagaagccgaaagaggccctgccaacaccttgatttaggcctaatgaaactgagtttagatttctggaccccagaactgtgaaagaataaatttctgttgtgttaagcccctaattttgtggtaatgtgtcacagcagcccttggaacctaatacactccccaagccatcacaatgacggttaagggaagtaaaacgataaaattcataaagataaagagaataacagaaaaggatttcaataagtgtttggaagatggaaaaggaaagaatgagaagcaacttacttatcagagtagagaaaattacctgagagcctggagaaagggaagtgaataagacagagtcagttctccccagagaagccagacacagggtcattgagcaccaagcaggggcaggagtggggtgcagggctggcactggggatagagtggaaacattaacatggaccttggatccctgggccctgactcctctgacactggtcttcctgaactagctgcatcccttcttgtcatgccctccactccagtccctgcccttgaccccaccaccaccacctcagctgacacacatcagttcagctcacactccttctgttagaaagaaccagtcacaagkttcttcctgaatgcaatggggctgggaaatgctgagcagtgccaggcacaggcttcctctaaaccactctgcaccaaggaagaaggacatttttttgatggtctaatacccgtctctgccacactctctaaggcaattaattttaaaattttagaatactggaaataaagaaaagatactaaaaacttccagaatgaaaaaccaggtcacatattgccttatggatcagcaatctgactggcatcagccttttcaatagcaatacaaaatgccagaagacaacagggcaatgccctcaaaattctgagagaaaatatcttgctaataaaacatctattacacctagcaagcagccatcccaaaggcagaaggctgtgaaaga

SEQ ID NO: 698157 - DNA, 637 bp, Homo sapiens
caatcctttagctagacacagagtgctgattggtgcgtttttacacagtgctgatgggtgcatttacaatcctctagctagacagaaaagttctccaagtccccacctgacccagaagtccacctggcttcacccctcactatgattttattattgtttatgtatatattttttcaaccctgtattcaatagtagatgcttaaggttctacatgatctatataatttaggagtaaactcagaatrtatcattatctgaaattttttttaagtatatgattagatctaagttgattttgtcccaagaaattgacattccaccccaaggctatttataaatatagctaatgatattggtgagtttcctaaacttgaattaaggatataactgagtctgggtatggtggctcaggtctgaaatcccagagctttgggaggctgagacaggaggatcacatgaggctaggagttcgagactagcctgggcaacatagtgaaaccctgtctctctgaaaaaaacaaaaaaattaaaatagcagaatgttgtggtgcacacctgtagtcccagctgcttgggaaactgagcagggaggatcacttaagcccaagagtttgaggctgtagtgtgctgggactac

SEQ ID NO: 698158 - DNA, 1603 bp, Homo sapiens
  misc_feature 1503, 1504, 1505, 1506, 1507, 1508, 1509, 1510, 1511, 1512,1513, 1514, 1515, 1516, 1517, 1518, 1519, 1520, 1521, 1522,1523, 1524, 1525, 1526, 1527, 1528, 1529, 1530, 1531, 1532,1533, 1534, 1535, 1536, 1537, 1538, 1539, 1540, 1541: n = A,T,C or G
  misc_feature 1542, 1543, 1544, 1545, 1546, 1547, 1548, 1549, 1550, 1551,1552, 1553, 1554, 1555, 1556, 1557, 1558, 1559, 1560, 1561,1562, 1563, 1564, 1565, 1566, 1567, 1568, 1569, 1570, 1571,1572, 1573, 1574, 1575, 1576, 1577, 1578, 1579, 1580: n = A,T,C or G
  misc_feature 1581, 1582, 1583, 1584, 1585, 1586, 1587, 1588, 1589, 1590,1591, 1592, 1593, 1594, 1595, 1596, 1597, 1598, 1599, 1600,1601, 1602: n = A,T,C or G
ttgacattataagccgagcgtggtggctcaggcctataatttkgggagcattttgggaggccgaggtggatggatcacctgaggtcaggagttccagaccagactaccaacatggcgaaaccctgtctctattaaaaatacgaaaattagctgggtgtggtggcaggcacctgtaatcccagctacttgggaggctgaggcaggagaattggttgaatccaggaggcggaggttgcagtgaaccaagatcacgctaccacactcaagcctgggcaacggggagactccatctcaaaaaaaaaaaaaaaaaaaaagagatttgacagtacattcatttaatctggcaattttaatttgaacaaatacctattaacaacaaattaaatcctattgcacatgaattatttgttgcaccaccaccagattttctaattctagcagaggccacgatgaaataggccagacatgctgccattaaagtttgctgggatgattgtaataaatctactgaaagtattcaagttctaactttcaaagtgatgtagagaaacataaaagatttcactgtatcatctaaaaatataactgttttgtctgatcattaaattctgatttgcatttactctttgtatatattctagaagaaatccttctaaaacatttaattaatcatacccagttccaaagaaaccgtgagtcaaaagggaaagacaagaagaattagacacagagtaaacatgtagagaacatgttttgctgaattcaaatgcttttgcacaagtatggtgagtgtcctttattcccagcacgggatgaaaaacaggacaggaagctaagagaggtcttgaatttgggttaacttaattatttggtttaagattaattttggaatgagatacaaaaaaaaaattttaagtttaaattacctaattttaatttgattacctattttacctgttttaaactgtctattttatattattcatgcctctgtatcttccttatttggataaaaattcaacttcctggccgggtgcagtggctaacacctataatcccagcatcttgggaggccgaggcagatggatcatctaagttcgggagtttgagacaagtctgaccaacatggagaaatcccatctctgctaaaaatacaaaattagccaggcatggtggtgcatgcctgttaatcccagctactcgggagggtgaggcaaaagaatagcttgaactcaggaggcggaggttgcggtgagccaagattgcgccattgcattccagcctgggcaacaagagtgaaacttcatctcaaaaaaaaaaaaaaattcaacttcctataaaaaactaagctctgaaataagccggagattctaaatctttcaacacaaatctgagagactaaaccaagtccagccaaacctaatctgttgctgtccctctctgcctcaaactaaatagtttcaccaaagccaaaggctataagccaaatttatgaacatgacnnnnnnnnnnnnnnnnnnnnnnnnnnnnnnnnnnnnnnnnnnnnnnnnnnnnnnnnnnnnnnnnnnnnnnnnnnnnnnnnnnnnnnnnnnnnnnnnnnnnt

SEQ ID NO: 698159 - DNA, 661 bp, Homo sapiens
tggatcacttgaggccagaagtccatgaccagcctggccaacatagcgaaaccctgtctctactaaaaatacaaaaattagcygggcatggtggcacatgcctgtagtcccagccacttgggaggctaaggcatgagaatcactttaacccagggaggcggaggttgcagtgagctgagatcacgccactgcactccagcctgggcgacaaagcaagactctacaattttaaatattacttatcaaccttagagggctggctacaaaccttatgtaaagaagtaaatacatgttagagactcttaaatcccatgaacagctgattgctttttaaaaaatgtacttttaaaacaaaaatgatgtttaaattatgatcaaataaatggtgaatttctttagttcatttaaaactattcaactaaaaacaaatttgtttataatgtagaaatatatgtgtattcgttttcattttttcaactggttataatggagttatgtggatacattctaagcaaattaaaccacactcttaccacattaatctcagagcttatccacatatcagaacactagttttatagtctgactatacttgaaatattcacaaatatttattttgctattaatccttgggtcaaagtttatttttcttgaatgcaat

SEQ ID NO: 698160 - DNA, 675 bp, Homo sapiens
gggaggaaggaaggaaggaaggaaggaaggaaggaaggaaggaaggaaggaaggaaggaaggaaggragaccacggtatgtgtgggggggtgtgtgaacgtgtgcatgcatatgtgtaagagaaagatagataacctgagaaagatgagttcctgacaatctatttccaatctcataagacccagttacacattgttacttgttcttcatgttaatgagattgcttgtcaatttcacgtaataattaaaatttccctccacccacatttcagcaaattttattgggtttattttccttgtaattcatattctaatttatctttatttctgtgaattgaaaactaaatttgaagtcttattttcttagctaaaatctgatatttagctggatcttcagtcaatgaccctcaatattttatgattctacatttgtttgcagctaatcctttactccatccatctctttactataccttacctctgtgtagttaataaagaagaaaataaacagaaatcgaagaaaaaaatgttatgctacttgatatccgtttgcgtttctgaggaaaatattctatttatcttacaattatttaaattttactcattgaaataattttattaaaattaattgggtagaataatttccaattcaggtcttttatcaaaccattctaa

SEQ ID NO: 698161 - DNA, 675 bp, Homo sapiens
gggaggaaggaaggaaggaaggaaggaaggaaggaaggaaggaaggaaggaaggaaggaaggaagggagaccacggtatgtgkgggggggtgtgtgaacgtgtgcatgcatatgtgtaagagaaagatagataacctgagaaagatgagttcctgacaatctatttccaatctcataagacccagttacacattgttacttgttcttcatgttaatgagattgcttgtcaatttcacgtaataattaaaatttccctccacccacatttcagcaaattttattgggtttattttccttgtaattcatattctaatttatctttatttctgtgaattgaaaactaaatttgaagtcttattttcttagctaaaatctgatatttagctggatcttcagtcaatgaccctcaatattttatgattctacatttgtttgcagctaatcctttactccatccatctctttactataccttacctctgtgtagttaataaagaagaaaataaacagaaatcgaagaaaaaaatgttatgctacttgatatccgtttgcgtttctgaggaaaatattctatttatcttacaattatttaaattttactcattgaaataattttattaaaattaattgggtagaataatttccaattcaggtcttttatcaaaccattctaa

SEQ ID NO: 698162 - DNA, 675 bp, Homo sapiens
gggaggaaggaaggaaggaaggaaggaaggaaggaaggaaggaaggaaggaaggaaggaaggaagggagaccacggtatgtgtgggggggtgtgtgmacgtgtgcatgcatatgtgtaagagaaagatagataacctgagaaagatgagttcctgacaatctatttccaatctcataagacccagttacacattgttacttgttcttcatgttaatgagattgcttgtcaatttcacgtaataattaaaatttccctccacccacatttcagcaaattttattgggtttattttccttgtaattcatattctaatttatctttatttctgtgaattgaaaactaaatttgaagtcttattttcttagctaaaatctgatatttagctggatcttcagtcaatgaccctcaatattttatgattctacatttgtttgcagctaatcctttactccatccatctctttactataccttacctctgtgtagttaataaagaagaaaataaacagaaatcgaagaaaaaaatgttatgctacttgatatccgtttgcgtttctgaggaaaatattctatttatcttacaattatttaaattttactcattgaaataattttattaaaattaattgggtagaataatttccaattcaggtcttttatcaaaccattctaa

SEQ ID NO: 698163 - DNA, 675 bp, Homo sapiens
gggaggaaggaaggaaggaaggaaggaaggaaggaaggaaggaaggaaggaaggaaggaaggaagggagaccacggtatgtgtgggggggtgtgtgaacgtgtgcatgcatatgtgtaagagaaagatagataacctgagaaagatgagttcctgacaatctatttccaatctcataagacccagttacacattgttacttgttcttcatgttaatgagattgcttrtcaatttcacgtaataattaaaatttccctccacccacatttcagcaaattttattgggtttattttccttgtaattcatattctaatttatctttatttctgtgaattgaaaactaaatttgaagtcttattttcttagctaaaatctgatatttagctggatcttcagtcaatgaccctcaatattttatgattctacatttgtttgcagctaatcctttactccatccatctctttactataccttacctctgtgtagttaataaagaagaaaataaacagaaatcgaagaaaaaaatgttatgctacttgatatccgtttgcgtttctgaggaaaatattctatttatcttacaattatttaaattttactcattgaaataattttattaaaattaattgggtagaataatttccaattcaggtcttttatcaaaccattctaa

SEQ ID NO: 698164 - DNA, 675 bp, Homo sapiens
gggaggaaggaaggaaggaaggaaggaaggaaggaaggaaggaaggaaggaaggaaggaaggaagggagaccacggtatgtgtgggggggtgtgtgaacgtgtgcatgcatatgtgtaagagaaagatagataacctgagaaagatgagttcctgacaatctatttccaatctcataagacccagttacacattgttacttgttcttcatgttaatgagattgcttgtcaatttcaygtaataattaaaatttccctccacccacatttcagcaaattttattgggtttattttccttgtaattcatattctaatttatctttatttctgtgaattgaaaactaaatttgaagtcttattttcttagctaaaatctgatatttagctggatcttcagtcaatgaccctcaatattttatgattctacatttgtttgcagctaatcctttactccatccatctctttactataccttacctctgtgtagttaataaagaagaaaataaacagaaatcgaagaaaaaaatgttatgctacttgatatccgtttgcgtttctgaggaaaatattctatttatcttacaattatttaaattttactcattgaaataattttattaaaattaattgggtagaataatttccaattcaggtcttttatcaaaccattctaa

SEQ ID NO: 698165 - DNA, 721 bp, Homo sapiens
caagtgctgggattacaggcatgagccaccacgcccagctgtgaccaaatatcttaagagacactgcccttcagtttagcagcagggggggtggtaagcaacacctgatatagtccstcccaacaggatcggagggaatcttctatttgatggtgattgtaataaacaaaatcttcaggttggaggccataatcttttatgtcttcatctccagggagcttactgctaaaataacctttaattaatctagaatttttagtgagaggctttataaggccttggcaataatgaagaaaatcagctgggcacaatggctcatgcctgtaatctcagcactttgggatgccaaggcaggaagaacacttgagcccaggacctcaagaccagcctgggcaacacagtgagaccccattttctacaaagaattttttaaaaagttagccgggcatggtggcacgcacctgtattcccagctacttgggaggctgaggtgagaggatgccttgagctcaggaggtagaggctgcagtgagcccagatagtgccactccactccagcctgggagacagagcaataccctgtgtcaaaaataaaataaaataaagaaaatcacccttaaggaaagctagtttgtaggcttcttcactcaggcgcatgggtgaagtagaaaattcctgtacattttgccaattgatttttattaccctctgtgcattccac

SEQ ID NO: 698166 - DNA, 672 bp, Homo sapiens
cctgccggccttctcacttcccccagctgcggccctgggcctgagtgacgcccagcgcccccgctcagcccccaggcctgatatttcgcccgctggccctccccggcccagtgagcacttgggttccggcgtggagactgccgcgcgtcaggctctgcagaggcgggtgacgcgcaggaacggctgcggggtttggctgaggcgctattcgggctccccgcctgcccccactttcagccgcaagattctagaagggaggggctacrtggagaatggagggagggtctggaacggagaggcctaagagggttcgctatgaggccaacgctgggacggaggggcgggcatcagcagggcttgaaggttgggcttcaggggcgggagagagcatgcggaggcaggaagccaggccctggggcagcaggtcgtgcgtatgggtgtgtgtcagcgcctacgaagcgcagaggatggaaccgcagtattaaaaaacaaaaacaaaaaaaaagaagaagaagaagaagaagaccagccgcacgtcctctagacgcgggcctccgcccccgccctccgcggacgcctgtttatagtgataatcaggcccagcgcgccgcagccaaggaggccgtaaatccgcatccatcaccgcgcagccattcggtctgaattagccag

SEQ ID NO: 698167 - DNA, 663 bp, Homo sapiens
ttgggtgcaaagagggtttttcctcaagtagaagagcaaatgcaaggtaaactggaggagaggaatttacatctcatgaatacaaagtgaaacttaaactgtcctaatgggtgaatatgaatgcaagtctctgggggttggaagtgcaatttttaaagctcacatcctgcttgggttctcttggctgcctgtgggttggaccccaaggaggctttttagacccattgagggaatgccatcctaaaaaccaaacctaacacaaatacaactttcctggatgggacatacaaagggcttgggggtacctcctgggtggtamaatttgactcagatgttcatttcctgacacggttccagtttgccaccatcgagaccatagtgacctccatctcagacgagtttcccaagtacctacgcacacacaagccagtgtttactctgggctgctgcatttgtttcttcatcatgggttttccaatgatcactcaggtaagctgcctcctaggcacaggcttggggtgggggcaggagggtggggggccaatagctatctgtctttcaacccttagctctcagaccttataatcaaaggcaaatcactaccatttccatgtagatggcaccagttcattagggattctgactgcagagggaaatatgtca

SEQ ID NO: 698168 - DNA, 597 bp, Homo sapiens
ctgcctcgtgggttcaagtgagtctcctgcctcagcctcctgagaagctgggattacaggtgtccgccaccacgcccagctaatttttgtgtttttagtagagatggggtttcaccttgttggccaggctggtctggaactccagacctcaggtgatccacccacctcagcttcccaaaggtctgggattttaygtgtaagccactgtgcccagcccaaagcaatgctttctttcagaaaacaatgaattgaaaaatgaattattagctgtttcccctgtttatctgcatgttgaataaaattattaaaacacaatctatttgatagtcattagtccaggtatacataataatatacatcatcataataataatgtaacatgtattttagacctttgttcaaaagcatcccataatgattgattgtgccttatgtgagagtatgctttatgtgccataaactcatcacctctgcattctcacttctctagcattcagagtgcagcatcaaacttgcaaacctgacttagaaaagaatatgagctatgtcactgttttgtatgtggggagtgagggaaggtagtttcagggttttcat

SEQ ID NO: 698169 - DNA, 578 bp, Homo sapiens
tcttacctatgctgtacatccccacaaaacgttgtttgctttaaaaatcaaatatcttggcaggcacggtggcttrcgcctgtaatcccagcactttgggaggccgaggtgggcggatcacctgaggtcgggagttcgagaccagcctgacaaacatggagaaaccccgtctctactaaaagtacaaaattagccgggcatggtggtgggcacctgtaatcccagctattcgggaggctgaggcaggagaatcacttgaacctgggaggcagaggttgtggtgatctgagatcataccattccacaccaggctgggcaacaagagcaaaactccgtctcaaaaataaaaaataaaaaatatttttccccgacttttattttaagttcagggacacatgtgcaggatgtgcagacttgttacataggtagatgtgtgccatggtggtttgctgcacaggtcatcccatcacctaggtattaagaccagcctctattagctgttcttcctgaggcattccctcctgtcacccacaccctctgacaagccccattttgtgtttttcccttccatgtgttca

SEQ ID NO: 698170 - DNA, 578 bp, Homo sapiens
tcttacctatgctgtacatccccacaaaacgttgtttgctttaaaaatcaaatatcttggcaggcacggtggcttacgcctgtaatcccagcactttgggaggccgaggtgggcggatcacctgaggtcgggagttcgagaccagcctgacaaacatggagaaaccccgtctctactaaaagtacaaaattagccgggcatggtggtgggcacctgtaatcccagctattcgggaggctgaggcaggagaatcacttgaacctgggaggcagaggttgtggtgatctgagatcataccattccacaccaggctgggcaacaagagcaaaactccgtctcaaaaataaaaaataaaaaatatttttccccgacttttatttkaagttcagggacacatgtgcaggatgtgcagacttgttacataggtagatgtgtgccatggtggtttgctgcacaggtcatcccatcacctaggtattaagaccagcctctattagctgttcttcctgaggcattccctcctgtcacccacaccctctgacaagccccattttgtgtttttcccttccatgtgttca

SEQ ID NO: 698171 - DNA, 662 bp, Homo sapiens
atagaagaacaaaataatagtaaaataaagagagaatggcctaaaattttccaaagttgttgaaaagtatcagtctaaagatgcaaaaagtttgatgaaactgaagaagaaaattaatataaagaaaatcacactaggaacattgtggtaaaactgctagaaactacagacatttttmaaagcagccaaaggaattagacagaatgccttcattggggcaattgtggaatgtacagctgatttgtcaactaaagccgtgggagtcaaaagacaatgaaagacaattttatgatgcttccagggaaaaaaaaaaatcccacattgtcacctacaattctatatcaaatgaaaatatcttccaaaaataaaggcgagtaaagacattttcagcaaagcaaaagctaagataattggttgacagaaaatctgcactacaagaaatactagagagagcttttaaggcttaagttcttagatttgtgaggaaaattatctcaactgtggtagaaaactgccacaagaaaaaaatgcatcaggaaaagtacatgagtaggtaaaaaagggaatactgattaaataaaatgatatttgcaatgcattatgttgtctaaaatatatatagaactaaaatgcaagaaagatgatacaataggtgagaggga

SEQ ID NO: 698172 - DNA, 619 bp, Homo sapiens
aaagagagagcctacaaggatttgggtgggttggacgctgtggaactccccacagcccccaactattaagtgaatacagtggctgtttgcacattggaaggcctaggcttaggtggccctgccattataaccaggggactgcttgagttactggagctggaaggaggacaagcagtctagacatgggagaccagtgagacatattagatctagtgaagagcacagctgggttcagtacagaggtgcataaattaattagttgcatcttagattcagttaaatattataatatgagcaccaacttcttagggatgtcttaaaggattaaatgagcttagcggtggggctggtacaaagcaagttctcattcagtttaaactcatgctattaacactgtggctcttattcttagaaacttaaagagaaaaaaaaaaggtttaagcwtggcaatggaataaaatgaagctttatgactaatgaaaagactctcacaggaaagtgtaggggcacctgcttgatttttgaacttgtagtatccttataacctgctctggaaatagagtccttcaggtgtatcagggttttttgctgcttctttttttttcccctaaaaccaatg

SEQ ID NO: 698173 - DNA, 714 bp, Homo sapiens
tacctgtttttctttttatctctattccccctgctgaaagtctcagaaagcttgagcagaattagcttagtgacaatgaatatttgttcaacatacactcaattaaaaccaacagacagagcacacacggttggagacaattgcttgtcattatcagcactgacagatttgaactaatgtcctagaatgcaaagagtggcctgccactttctgagtcaaatgcagagattctgattaaagaaggcagtgtcaattggagatataatccatataataataatcstaaacaaatcttaaaccttaattctaaaatatgtccttaaaaaactttgtctttggaatgtttatttaatcatacaacagattctccctcactccaaaaggaagtaggaagggaggaagagatgcgtctcctgtattccagcttgggtagctaggactcagactttaagatttcaaggggaacatcagggatacaaaagacttctcactcttgagctgtctggagcccagcagcaggctgagcttgcagattacctaaatgcaagggctttggtcatagtcatgtacctggttgcttttcatgggtgcactgctgcattttaactaatgcgtgtttgtttttgctacaactgaatatatataattctctctctctctatatatatatatatatagttttagggatatggatattggtttaggacatggtat

SEQ ID NO: 698174 - DNA, 714 bp, Homo sapiens
tacctgtttttctttttatctctattccccctgctgaaagtctcagaaagcttgagcagaattagcttagtgacaatgaatatttgttcaacatacactcaattaaaaccaacagacagagcacacacggttggagacaattgcttgtcattatcagcactgacagatttgaactaatgtcctagaatgcaaagagtggcctgccactttctgagtcaaatgcagagattctgattaaagaaggcagtgtcaattggagatataatccatataataataatcgtaaacaaatcttaaaccttaattctaaaatatgtccttaaaaaactttgtctttggaatgtttatttaatcatacaacagatwctccctcactccaaaaggaagtaggaagggaggaagagatgcgtctcctgtattccagcttgggtagctaggactcagactttaagatttcaaggggaacatcagggatacaaaagacttctcactcttgagctgtctggagcccagcagcaggctgagcttgcagattacctaaatgcaagggctttggtcatagtcatgtacctggttgcttttcatgggtgcactgctgcattttaactaatgcgtgtttgtttttgctacaactgaatatatataattctctctctctctatatatatatatatatagttttagggatatggatattggtttaggacatggtat

SEQ ID NO: 698175 - DNA, 603 bp, Homo sapiens
aagagaataatagctacagcggcagtatcacatctctatccaaatgcaacaagggccccatgttgtgcttygagaagcactttcacatccaaaatctcccttcagtctaatacaactctctgagacattgtaatcctcattctacagatgaagaaattgaggctcagccgggtgtggtggctcatgcctgtaatcccagcactttgggaggcctaggtgggtggatcacctgaggtcagaagttcaagaccagcctggccaacatggtgaaaccccatctctactaaagatataaacattagccgagcgcagtagctcacgcctgtaatcccagcgactcgggaagctgaggcatgagaatcgcttgaacccaggaggcagaggttgcagtaagccgagatcacaccactgcactccagcctgggcaatagagtgagactcggtctcaaaaaaaaagaaagaaagaaagaaagaaattgaggctcaaagaggttcatgacttgaaaagggtcattcagccaagggcaaagggaaaaccagtagctataattaacttagactttcaagaagactaaactaaagtttcatacccaatgctgctca

SEQ ID NO: 698176 - DNA, 603 bp, Homo sapiens
aagagaataatagctacagcggcagtatcacatctctatccaaatgcaacaagggccccatgttgtgcttcgagaagcactttcacatccaaaatctcccttcagtctaatacaactctctgagacattgtaatcctcattctacagatgaagaaattgaggctcagccgggtgtggtggctcatgcctgtaatcccagcactttgggaggcctaggtgggyggatcacctgaggtcagaagttcaagaccagcctggccaacatggtgaaaccccatctctactaaagatataaacattagccgagcgcagtagctcacgcctgtaatcccagcgactcgggaagctgaggcatgagaatcgcttgaacccaggaggcagaggttgcagtaagccgagatcacaccactgcactccagcctgggcaatagagtgagactcggtctcaaaaaaaaagaaagaaagaaagaaagaaattgaggctcaaagaggttcatgacttgaaaagggtcattcagccaagggcaaagggaaaaccagtagctataattaacttagactttcaagaagactaaactaaagtttcatacccaatgctgctca

SEQ ID NO: 698177 - DNA, 603 bp, Homo sapiens
aagagaataatagctacagcggcagtatcacatctctatccaaatgcaacaagggccccatgttgtgcttcgagaagcactttcacatccaaaatctcccttcagtctaatacaactctctgagacattgtaatcctcattctacagatgaagaaattgaggctcagccgggtgtggtggctcatgcctgtaatcccagcactttgggaggcctaggtgggtrgatcacctgaggtcagaagttcaagaccagcctggccaacatggtgaaaccccatctctactaaagatataaacattagccgagcgcagtagctcacgcctgtaatcccagcgactcgggaagctgaggcatgagaatcgcttgaacccaggaggcagaggttgcagtaagccgagatcacaccactgcactccagcctgggcaatagagtgagactcggtctcaaaaaaaaagaaagaaagaaagaaagaaattgaggctcaaagaggttcatgacttgaaaagggtcattcagccaagggcaaagggaaaaccagtagctataattaacttagactttcaagaagactaaactaaagtttcatacccaatgctgctca

SEQ ID NO: 698178 - DNA, 382 bp, Homo sapiens
aggctgtgcagttgtccgtttgctcagtggttagttgtccttactagggacaaacactgagagacagcagctctcccttattttgtctcatgatattgtaatttggggggtaactttcacatcttgtatggtagtctcattgtagcatgtctcttttctgaagatttcttttctgtaatataaaggggyatggattttttggagggagggggtgccacttgttctcattacccaacaggatatggaggagagttgctcagagaagattagtatagagtcactacaagtcatttaggtagccaaaatgataactccaaaatttctaaaaggcaaaaatctttacttgctgatagaggggagagtcaactttccaagcaggtcg

SEQ ID NO: 698179 - DNA, 586 bp, Homo sapiens
ttataaattgtagagtgactggaacctaatctatgaaaacggatagggctgtgacctgtattgagttattgctcaggaggacaagattaatcagaaatagccaagcaaccaggacctaggctgagacagcaatgtacatgaactgccaatagatgacctgattctgaaagctatagtcatatgggtcagggagaaataatcagagtctatctatcagaccaaaaagaatgaagaaaaagagattacaaaggcagaataaaaagaaaatattttttcataaattccttcttacactaaaaagaatgtcaaactacaaaaaaacattaaataattaagaaagccaattcgctcaacagaagattttgcccctttcaatcttcatataatcaagaaatctattgtaaaaaaaaaaaactataagaagcacatwtaacagtattataaggggaagaaaaacttgcttaaaaattaaggaattactacaaagaaaaaagggccacaataataaaaaatagtggaagattaaaataaccaattataaataatagaaattttaaaaggttattaaaatagagaaacaagagac

SEQ ID NO: 698180 - DNA, 586 bp, Homo sapiens
ttataaattgtagagtgactggaacctaatctatgaaaacggatagggctgtgacctgtattgagttattgctcaggaggacaagattaatcagaaatagccaagcaaccaggacctaggctgagacagcaatgtacatgaactgccaatagatgacctgattctgaaagctatagtcatatgggtcagggagaaataatcagagtctatctatcagaccaaaaagaatgaagaaaaagagattacaaaggcagaataaaaagaaaatattttttcataaattccttcttacactaaaaagaatgtcaaactacaaaaaaacattaaataattaagaaagccaattcgctcaacagaagattttgcccctttcaatcttcatataatcaagaaatctattgtaaaaaaaaaaaactataagaagcacatttaacagtattataargggaagaaaaacttgcttaaaaattaaggaattactacaaagaaaaaagggccacaataataaaaaatagtggaagattaaaataaccaattataaataatagaaattttaaaaggttattaaaatagagaaacaagagac

SEQ ID NO: 698181 - DNA, 1099 bp, Homo sapiens
tgctctggcctagtcctctccttcctgagattgcacaggttaaatccacatcagaatggttaatggtcacaccaggaacccctgtgacagctataaccccattctcaaggatttattaaagacaatcaacttagcaaaaagcatctaaaaattcgagagctagggaaaaattgatttaatagaccaagtagatttttattagaacagctcttccagccaaaaactaggttgtagggaagaggggtgtggagaaaaacaaattaaaaattgtttaggcaagccgagtgtgtggtggacaatgcctgtaatctcagcactttgggaggccaaggatcacttgaggtcaggagttcgagaccagcctagccaacatggtgaactcccgtctctactaaaaatgcaaaaattagctgggcatggtgacaggtacctgtaatcccagctactcaggaggctgaggcaagagaactgcttgaacctgggaggcacaggttgcattgaccaagatcacatgcaccattgcactccagcctgggtgacagagtgagactctgtctcaaaacaaaacaaaaacaaaaattattgaggcagagattcctcagctaatcaacatctaccttagagaaaaatgagtcatggctaattctattgtgtagtcacattgttgatgcacgtttgccattacagtttattttcattccatctgccccttcttcactcagtgagcagtgttaaacataagctggctaccactctctgcagcacttccctcaggtttattttaaacctttagaactgccttccagccacttctctttcctcacctgctttcatttaatttagtacttgcctcctcytggattatgcatcttatttctgtctcacatttaaatggctgtctgatgaaaaaccctcactacttctgcctccttcatttacatttacatctctgtccattacctttctttcagtataggatataagctccagtggccttcaacttaattgtttctccttcttttgcgtctttttagacatttctccaatttctatgttaaaactaatttctttttgtgccatctccctgaggaattccatt

SEQ ID NO: 698182 - DNA, 635 bp, Homo sapiens
gaaaatagttattagagaagaataattttttttactgtcagaattcaggtcttcaatgaacaagttaatcaacaatgaattaaaagtagagacactgtcttcctggtgtctggaatcttttcatgttggtctttcagtccctggaattcacaataaggagaaaatgacttacaagatatttgcttagctgttgacttgatctgggaatataccagaatacagagagggaacaatatccaaaatggcgtgaaacaaaaataattttggtgagggggtgaaagggccaagaaaaaaacaagaaggaaagggaaactgaaaaccagaaaacaagcctctggtgagtgtcgtaggaaccgactgcctctgtctcttccttaatccacttctgccaaatgaatagaattctctccctgtctcagcagctcatgtgcgccttgagtttatatccatatatctgtaatggtgggcacagtgtagggtgagaagrggaagagtaggagagattatttaaaaagaaagttttacaaccaggaagtattggaagaggcaaatcatggcaactctggatgtttttcctaaaaccccagagagaactgactctaaataagctaaatttttctctagataaaaagtct

SEQ ID NO: 698183 - DNA, 635 bp, Homo sapiens
gaaaatagttattagagaagaataattttttttactgtcagaattcaggtcttcaatgaacaagttaatcaacaatgaattaaaagtagagacactgtcttcctggtgtctggaatcttttcatgttggtctttcagtccctggaattcacaataaggagaaaatgacttacaagatatttgcttagctgttgacttgatctgggaatataccagaatacagagagggaacaatatccaaaatggcgtgaaacaaaaataattttggtgagggggtgaaagggccaagaaaaaaacaagaaggaaagggaaactgaaaaccagaaaacaagcctctggtgagtgtcgtaggaaccgactgcctctgtctcttccttaatccacttctgccaaatgaatagaattctctccctgtctcagcagctcatgtgcgccttgagtttatatccatatatctgtaatggtgggcacagtgtagggtgagaagaggaagagtagragagattatttaaaaagaaagttttacaaccaggaagtattggaagaggcaaatcatggcaactctggatgtttttcctaaaaccccagagagaactgactctaaataagctaaatttttctctagataaaaagtct

SEQ ID NO: 698184 - DNA, 592 bp, Homo sapiens
tttwaaaaaatgtttgatactcacatttcacttctttctagtgtgtagtcatctgactcttgtgtcattactttgtattcttatattatagattcaattgcttcattattcatttttttaaaaaattcatgagaaatatttgaagatgattttgatctatagccacgtatttctgttgaacattataaattcaccagttgctccatattttctttgttttataatggtattttatatacgttgcactggttcttcttaattattcatctctgaattaaataagcttttgccaaaacagctatttcagggagagttttatggtagtaagtcaggattacttacataccaggaagaatttgtgtcctgaccgtggcattgtgagtgagttttaatccgtacttctccccagccagtaaaatgtccaggcacagggctgattacaatgagaggcttctcatttacctctgtcctgaagatgataccaacttcaacattttcaaatgaaaagtctcctggtggtttcttgaggaattgattggaaataaataaaataaatatagttgtagtatgtcttgtgtgagtgtataagtca

SEQ ID NO: 698185 - DNA, 592 bp, Homo sapiens
tttaaaaaaatgtttgatactcacatttcacttctttctagtgtgtagtcatctgactcttgtgtcattactttgtattcttatattatagattcaattgcttcattattcatttttttaaaaaattcatgagaaatatttgaagatgattttgatctatagccacgtatttctgttgaacattataaattcaccagttgctccatattttctttgttttataatggtattttatataygttgcactggttcttcttaattattcatctctgaattaaataagcttttgccaaaacagctatttcagggagagttttatggtagtaagtcaggattacttacataccaggaagaatttgtgtcctgaccgtggcattgtgagtgagttttaatccgtacttctccccagccagtaaaatgtccaggcacagggctgattacaatgagaggcttctcatttacctctgtcctgaagatgataccaacttcaacattttcaaatgaaaagtctcctggtggtttcttgaggaattgattggaaataaataaaataaatatagttgtagtatgtcttgtgtgagtgtataagtca

SEQ ID NO: 698186 - DNA, 615 bp, Homo sapiens
tgaatctgattgctaggraacagtccgttgtgaaatatgtctcaatgttacacttatttgcaatatattcagctttactccatgctctggcattgttctaatgagatcaatgtattgccaaactgagtcactggttccttcccttcttccaaagaaaacaacggcaattccaaggaattcttttctttgttagtttttagcctcctatttcatttctattataaatagcatcaattatctgatgtgtagctgacagagaagtttgcctcccatgaatcatttcattcagctgattcggcaaaacatttgaccatgaacgtgcatgcgtgtgtgtgtgcacagactccagtgcctgagttttcgtataaactagataaagtccatttgtctccagattaatgataaacaagattaagaacacagtttctaagttttgtttcatttgggccttctcgagctgcatttagccgatactaagttataatgacctttggaaagttcacaagtttccaggggtccaggatagtaattagctcttaattgtaaaaacaagtgctgctgaagaacataaggtcataggaaaatcaggaatcaggactttgtacagaaaaaaaa

SEQ ID NO: 698187 - DNA, 1092 bp, Homo sapiens
tatttcccttcccaccctggtcctgactccttacctgtccaagcggtgtgggagagataaacctgagtgatgagccggtgccgccctgggccaggattccggaagtctgcaggcttggggtgaatcatctgagcctggccatctggatataagacctaaagggtgacagaaatgagaaaaaggcagaagcgagaggagcatttaacaaaatggatgatgacatctgttgtgaacctyaaaacacaagaagaaacatgacaccaactttactaagattgagccttgggggtaggtcaacactgtagacatctctattcccctaatccagcatgaagcagtgttcagtaaacatttcctgaattcatggtgaataagtaatatgaacagagtgtctctattaagcgcaaagacaggtaagaatattaattcttattatgaaaagtgttctcaggcaccttcaccagaagagcactccctccctggctctgaatcataccatggcccagcatccatcaccaaccaccagtatttggagttattttgtaattgcattctttccactacattgcaagcagctaggaagtcatttatctctctctctacggagagacggctcaatgaagagtccactcaaatcactggccagttctttaaggctcataaactgcaacagagttctttcctcagcatcctgggggacctcccagctccctgtgtagacagcctactatactgcagcgcacaaaggaactagaggaacaaatgaagcttatcctaggactaggacctgctctatgtaaatatacttatgaaggcagagtagggaaccacacaggtcttccaatgttgaaactgtggtcaatgttgaaactgcggaaggcatgtctcacccacttgccctataatccttcatctctcctcaggtcatggggcctccccctgattctacacttctttctttctttttttttctttaaaacagggtcttactctgccacccaggctggagtgcagtggcacgatcataactcactgaagcctcaaactcctgggcgcaagtgatcttcctgcctcagcctcctgaggagtggg

SEQ ID NO: 698188 - DNA, 1092 bp, Homo sapiens
tatttcccttcccaccctggtcctgactccttacctgtccaagcggtgtgggagagataaacctgagtgatgagccggtgccgccctgggccaggattccggaagtctgcaggcttggggtgaatcatctgagcctggccatctggatataagacctaaagggtgacagaaatgagaaaaaggcagaagcgagaggagcatttaacaaaatggatgatgacatctgttgtgaacctcaaaacacaagaagaaacatgacaccaactttactaagattgagccttgggggtaggtcaacactgtagacatctctattcccctaatccagcatgaagcagtgttcagtaaacatttcctgaattcatggtgaataagtaatatgaacagagtgtctctattaagcgcaaagacaggtaagaatattaattcttattatgaaaagtgttctcaggcaccttcaccagaagagcactccctccctggctctgaatcataccatggcccagcatccatcaccaaccaccagtatttggagttattttgtaattgcattctttccactacattgcaagcagctaggaagtcatttatctctctctctacggagagacggctcaatgaagagtccactcaaatcactggccagttctttaaggctcataaactgcaacagagttctttcctcagcatcctgggggacctcccagctccctgtgtagacagcctactatactgcagcgcacaaaggaactagaggaacaaatgaagcttatcctaggactaggacctgctctatgtraatatacttatgaaggcagagtagggaaccacacaggtcttccaatgttgaaactgtggtcaatgttgaaactgcggaaggcatgtctcacccacttgccctataatccttcatctctcctcaggtcatggggcctccccctgattctacacttctttctttctttttttttctttaaaacagggtcttactctgccacccaggctggagtgcagtggcacgatcataactcactgaagcctcaaactcctgggcgcaagtgatcttcctgcctcagcctcctgaggagtggg

SEQ ID NO: 698189 - DNA, 1092 bp, Homo sapiens
tatttcccttcccaccctggtcctgactccttacctgtccaagcggtgtgggagagataaacctgagtgatgagccggtgccgccctgggccaggattccggaagtctgcaggcttggggtgaatcatctgagcctggccatctggatataagacctaaagggtgacagaaatgagaaaaaggcagaagcgagaggagcatttaacaaaatggatgatgacatctgttgtgaacctcaaaacacaagaagaaacatgacaccaactttactaagattgagccttgggggtaggtcaacactgtagacatctctattcccctaatccagcatgaagcagtgttcagtaaacatttcctgaattcatggtgaataagtaatatgaacagagtgtctctattaagcgcaaagacaggtaagaatattaattcttattatgaaaagtgttctcaggcaccttcaccagaagagcactccctccctggctctgaatcataccatggcccagcatccatcaccaaccaccagtatttggagttattttgtaattgcattctttccactacattgcaagcagctaggaagtcatttatctctctctctacggagagacggctcaatgaagagtccactcaaatcactggccagttctttaaggctcataaactgcaacagagttctttcctcagcatcctgggggacctcccagctccctgtgtagacagcctactatactgcagcgcacaaaggaactagaggaacaaatgaagcttatcctaggactaggacctgctctatgtaaatatacttatgaaggcagagtagggaaccacacaggtcttccaatgttgaaactgtggtcaatgttgaaactgyggaaggcatgtctcacccacttgccctataatccttcatctctcctcaggtcatggggcctccccctgattctacacttctttctttctttttttttctttaaaacagggtcttactctgccacccaggctggagtgcagtggcacgatcataactcactgaagcctcaaactcctgggcgcaagtgatcttcctgcctcagcctcctgaggagtggg

SEQ ID NO: 698190 - DNA, 3124 bp, Homo sapiens
ggctccacctgttatgtttctgcacaaggacaatgcttttagcactgaagctcccaaagacaaagcattcctttcctgacccatatacctctatcctttcattcattcatccagcatttactgagaacttaactctgtgccaagtctcagtatttctaagcagtagcaatactgagatgaaccaaatgttccatggagtttcattcaggtaaggttagtgaaaatgtgcaaatatttgtagtaggatgagaagaaatggagttgaggatctcagaagacagagtgaataaacccaagtgggaaactgtcatggaagacatgctgttttaactgggtctcgaagtatgaaaatgaataggccttgaatgcagtggttgtagaaggggtaccttctaatggtagagatggtataggaaaagagctgttgaaattatcaaagagataacaaatgggcgagagaaagaagcgttttccagttcaggaagatgagacgttatggagataggaatgaaatttatatatttatgaaaggcatgggggccgggcacagtggctcatgcctgtaatcccagcactttgggaggccaaggagggaggattacctgaggtcaggagttcaagaccagcctggctaaggtggtgaaactttgtctctactaaaaatacaaaaattagccgggtgtggtgacatgcgcctgtaattccagctactcaggaggctgaggcaggagaatcacttgaacccaggaagtggaggttgcagtgagctgagattgtgccactacactccagcctgggcaacaagagcgaaactctgtctcaaaaaaaaggaaaaagaaaaaaaagaaacgtatggggagkatgaatatgagttttcattaaatcctgtaataataatgtcttacatatttacatgtgcagttttattttttttaatattttttttttcgagatggagtctcactctctcacccagagctcacattctagtaaaatgaaacaagaggccactgactgctggaaatccaagtgtaaggtcataggagactacaaacccataatcctctggagattagactggagacagccacagcccattggagtggctggatcaatggaactcaagtgatgaactgggctgctgctgctttactgcaggctcacagtgtcatgtacaaagcaatgaaagataactctgcaagggcctgtggatccatgggattggagcttgagactattattgaggcatcctcaacctgccactagcaattcctgtgctgcttccaatccctcagggcaaatcactaaggctcttcttcctattgagtgtctgattctgttcctctactttaagaggctttctgtcacacgatctaaggtggtaaaagcttattgttttttctgcgggggaagctattaattgtggaaaaatgtccagctaatatccattatgccagctaaacaacaagatggcatcctgtctgtcttgaacatttctccctatttcatgctaactttaaaaagaaaacattcctaaactactcttccaaagaagtatttccttctgccaaaattaagtgagcataaatgggtagtagcaatgctatcatctggctgtattgctgataaaagcagattctgtgagtgaagtttaaaggatctctggaatctatcccctgtggacactgcctgagtcacattctcattattgcttgtctgaattaacaggctgttaaataatcttgctgcctctgccagggcagaggcctgtttttgtgctacaggcccctctggcagtctattgaggccgatggtccccttctcagaataatgttttagaatacacaaaagaagatatgtaagattatagaggaaacatttcatacaagtggaattatcaaaatattaacaacaaacttttggtctagtattatatgtgcttctttattagtttaggaaaatggaaatcttttccaaaagtctgctagccaacttaccctcccatctcataatggcagatgactagttgttctttcaaaatccattctgcccattttctggggcatatagctgataagctagacactccgttttctgtacttcttgcagttaaatgtggtcatgtgactgtgctatcactaatataaaattcaatggaacatgagcagaagaaatgatttcatatataggtttggcatgagcttttcttctctttcctcttccttgcaagttagagccctgccatgcctacaaccggttcctacaattcaaatgttctaggagatgatagagcaacagaaagaaaaaacctaggcccctaaatgaaattgtgctatccacatctctcccaccctaccaccagtttggactggccacaataatttatgagagaaagacacttctatcttctttatgctactgaattttgagatttctattacaacaccttggccttcacactaagtaatcatgctaagtaatccattactaaactaaaccatgactagttaggcaaatcatgtgcagtagaatgaatgttggggactcaaccacattagacactgtgtctaatttgcaaaatatatacaagggagacatattataggggcctttaccttatgggaattcaactatatgggtccagagaaggagagagtaagaactatggaaatagagtaattcagtcattcttttttgtttttgagacagggtctcactctgtcactgaggctggagggcagtggtgcaatcagggctcactgcagcctcaatctcccaggcccaagtgatcctcccacctcagcctcccaagtagctgggaatacagatgtgccaccatgcctggctaattttttaactttctgtagcaacgaggtctctctatatttcccaggcttgtcttgaactcctaggctcaaacaatcctcccatcttggtctcccaacgtgttgagattacaggtgtgagccactgtgcctggcaattcagtcattctattcaaggaacatatgccctggattgtacatgagataggagacaagtatctactattccttctatgtcaatttcatagttgctgcttccagtatgaacctttgactcactgagtttatttctagtgttt

SEQ ID NO: 698191 - DNA, 1182 bp, Homo sapiens
ctcgcacggactacaaccacgaccaatgatatgaaaaaccatcgttgtatttcaactacaagaacaccaatgaccccaatacgcaaaaytaaccccctaataaaattaattaaccactcattcatcgacctccccaccccatccaacatctccgcatgatgaaacttcggctcactccttggcgcctgcctgatcctccaaatcaccacaggactattcctagccatgcactactcaccagacgcctcaaccgccttttcatcaatcgcccacatcactcgagacgtaaattatggctgaatcatccgctaccttcacgccaatggcgcctcaatattctttatctgcctcttcctacacatcgggcgaggcctatattacggatcatttctctactcagaaacctgaaacatcggcattatcctcctgcttgcaactatagcaacagccttcataggttatgtcctcccgtgaggccaaatatcattctgaggggccacagtaattacaaacttactatccgccatcccatacattgggacagacctagttcaatgaatctgaggaggctactcagtagacagtcccaccctcacacgattctttacctttcacttcatcttgcccttcattattgcaaccctagcagcactccacctcctattcttgcacgaaacgggatcaaacaaccccctaggaatcacctcccattccgataaaatcaccttccacccttactacacaatcaaagacaccctcggcttacttctcttccttctctccttaatgacattaacactattctcaccagacctcctaggcgacccagacaattataccctagccaaccccttaaacacccctccccacatcaagcccgaatgatatttcctattcgcctacacaattctccgatccgtccctaacaaactaggaggcgtccttgccctattactatccatcctcatcctagcaataatccccatcctccatatatccaaacaacaaagcataatatttcgcccactaagccaatcactttattgactcctagccgcagacctcctcattctaacctgaatcggaggacaaccagtaagctacccttttaccatcattggacaagtagcatccgtactatacttcacaacaatcctaatcctaataccaactatctcccta

SEQ ID NO: 698192 - DNA, 600 bp, Homo sapiens
catacaaaaatcagtagcatttctatatattgatagtaaactagctgaaacaagaaattaagaaagcaattccttttacaatagctacaaaaatgtacttagaaataaatttaaccaaggaagtaaaagatttcgacaacaaaaatgacaaatactaatgaaagaaattaaagaaaacacaaaaaaggaaagacatccacgtttatagattgaaataatattcttaaaatgacccactatcctatgtgatttacaaatttagtacaatcactagcttgtatttttaaaagcacctttgctgcatattcttaagatattcaatgacaatgcctggatttaagtttgaggtattattatatctattttatactgggcacaatataatgttatcagaggtaatggttttgattggtcctaggtcatacagtaatatatacattgtgatttatagacatgctatcttttaatactcaggcatttacaaagttcatttagacaaagttataaaaacttgccttcctttcygcctatatcacctaaaaatcctaatttaagaggtaataacattttttgatatacaatttatcaacacaataaaaa

SEQ ID NO: 698193 - DNA, 1509 bp, Homo sapiens
tttttgagacggagtctagctctgtcgcccaggctggartacagtggcgcaatctcagctcacggcaacctctgcctcccgggttcaagcaagtctcctgactcagcctccagggtagctgggattacaggcacatgccaccacacccagctaatttttgtattttttagtagagacggagtttcactgtgttggccaggctggtcttgaactcctgaccttgtgattcaccagcctcggcctcccaaagtgctgggattacaagcatgagccatggattacaagcctgagctgtgcccagcctcatttttcttaaactaaccacagacccacaaaatcagttaagcctcatcactaggtcactactagttgtttcaaaaactggtctaatgctagcaaaatgtacgcactagaaaccaaggttcataactcaccaatttctaaaaacatatcaagattcactgtatccccatgtggacccttcaaatcagcataatccaaagcataaaaattaaattgacatctaataaatgccatgcacatttgttttaattttaattaggatatcagtatctaattttggaacatatagacaatatttattcctataaatatgtgtatcaccttggaagtgaatttaaaaaggaatacaatattaagtaagcattgtcaactatatacaaactggtgtatcatgaatagtgatttacaacttaattagtagatatataatgccagaaaaaatataaggcagatatgaatacactgctctctggagtcaactaaaattggtttagtctgtctatatacaacttcaatcgcctaactccaggatgatgtcacctagcccagtgtttcctaagcattactgacatttgggactagataattctttgctgggggctgtcgagagcactgtaggatgtttagcagcatctgtgatctctacccactagaaaccagcagtagtcccccagggtggcaactaaaaatggctccaggaattaccaaatgtcctgtgggaaaactcctgcccaaatccaatcttctcaggatcacttccacatttccagtaactaccttctacataattctaaatgtattttctaacatcctctctaaagaaaatatctggccgggcacggtggctcatgcctgtaatctcagcactttgggaggccaaggcagttggatcacaaggttaggaattggagaccagcctggccaacatagtgaaaccctgtctctactaaaaatacaaaaaattagctgggcctggtggtggacacctgtaatcccagctacttgggaggctgaggcaggagaatcgcttgaatccaggaggcggaggttgcagtaagccaagaccacgtcactgcactccagcccgggtgacagtgcgagactgcatctcaaaaaaaaaaaagaaaatattctaattcacaatcattaatattctccaatatcctaaaaaatcagactataatctgacaacatggccattagatt

SEQ ID NO: 698194 - DNA, 1509 bp, Homo sapiens
tttttgagacggagtctagctctgtcgcccaggctggaatacagtggcgcaatctcagctcacggcaacctctgcctcccgggttcaagcaagtctcctgactcagcctccagggtagctgggattacaggcacatgccaccacacccagctaatttttgtattttttagtagagacggagtttcactgtgttggccaggctggtcttgaactcctgaccttgtgattcaccagcctcggcctcccaaagtgctgggattacaagcatgagccatggattacaagcctgagctgtgcccagcctcatttttcttaaactaaccacagacccacaaaatcagttaagcctcatcactaggtcactactagttgtttcaaaaactggtctaatgctagcaaaatgtacgcactagaaaccaaggttcataactcaccaatttctaaaaacatatcaagattcactgtatccccatgtggacccttcaaatcagcataatccaaagcataaaaattaaattgacatctaataaatgccatgcacatttgttttaattttaattaggatatcagtatctaattttggaacatatagacaatatttattcctataaatatgtgtatcaccttggaagtgaatttaaaaaggaatacaatattaagtaagcattgtcaactatatacaaactggtgtatcatgaatagtgatttacaacttaattagtagatatataatgccagaaaaaatataaggcagatatgaatacactgctctctggagtcaactaaaattggtttagtctgtctatatacaacttcaatcgcctaactccaggatgatgtcacctagcccagtgtttcctaagcattactgacatttgggactagataattctttgctgggggctgtcgagagcactgtaggatgtttagcagcatctgtgatctctacccactagaaaccagcagtagtcccccagggtggcaactaaaaatggctccaggaattaccaaatgtcctgtgggaaaactcctgcccaaatccaatcttctcaggatcacttccacatttccagtaactaccttctacataattctaaatgtattttctaacatcctctctaaagaaaatatctggccgggcacggtggctcatgcctgtaatcycagcactttgggaggccaaggcagttggatcacaaggttaggaattggagaccagcctggccaacatagtgaaaccctgtctctactaaaaatacaaaaaattagctgggcctggtggtggacacctgtaatcccagctacttgggaggctgaggcaggagaatcgcttgaatccaggaggcggaggttgcagtaagccaagaccacgtcactgcactccagcccgggtgacagtgcgagactgcatctcaaaaaaaaaaaagaaaatattctaattcacaatcattaatattctccaatatcctaaaaaatcagactataatctgacaacatggccattagatt

SEQ ID NO: 698195 - DNA, 1509 bp, Homo sapiens
tttttgagacggagtctagctctgtcgcccaggctggaatacagtggcgcaatctcagctcacggcaacctctgcctcccgggttcaagcaagtctcctgactcagcctccagggtagctgggattacaggcacatgccaccacacccagctaatttttgtattttttagtagagacggagtttcactgtgttggccaggctggtcttgaactcctgaccttgtgattcaccagcctcggcctcccaaagtgctgggattacaagcatgagccatggattacaagcctgagctgtgcccagcctcatttttcttaaactaaccacagacccacaaaatcagttaagcctcatcactaggtcactactagttgtttcaaaaactggtctaatgctagcaaaatgtacgcactagaaaccaaggttcataactcaccaatttctaaaaacatatcaagattcactgtatccccatgtggacccttcaaatcagcataatccaaagcataaaaattaaattgacatctaataaatgccatgcacatttgttttaattttaattaggatatcagtatctaattttggaacatatagacaatatttattcctataaatatgtgtatcaccttggaagtgaatttaaaaaggaatacaatattaagtaagcattgtcaactatatacaaactggtgtatcatgaatagtgatttacaacttaattagtagatatataatgccagaaaaaatataaggcagatatgaatacactgctctctggagtcaactaaaattggtttagtctgtctatatacaacttcaatcgcctaactccaggatgatgtcacctagcccagtgtttcctaagcattactgacatttgggactagataattctttgctgggggctgtcgagagcactgtaggatgtttagcagcatctgtgatctctacccactagaaaccagcagtagtcccccagggtggcaactaaaaatggctccaggaattaccaaatgtcctgtgggaaaactcctgcccaaatccaatcttctcaggatcacttccacatttccagtaactaccttctacataattctaaatgtattttctaacatcctctctaaagaaaatatctggccgggcacggtggctcatgcctgtaatctcagcactttgggaggccaaggcagttggatcacaaggttaggaattggagaccagcctggccaacatagtgaaaccctgtctctactaaaaatacaaaaaattagctgggcctggtggtggacacctgtaatcccagctacttgggaggctgaggcaggagaatcgcttgaatccaggaggcggaggttgcagtaagccaagaccacgtcaytgcactccagcccgggtgacagtgcgagactgcatctcaaaaaaaaaaaagaaaatattctaattcacaatcattaatattctccaatatcctaaaaaatcagactataatctgacaacatggccattagatt

SEQ ID NO: 698196 - DNA, 1509 bp, Homo sapiens
tttttgagacggagtctagctctgtcgcccaggctggaatacagtggcgcaatctcagctcacggcaacctctgcctcccgggttcaagcaagtctcctgactcagcctccagggtagctgggattacaggcacatgccaccacacccagctaatttttgtattttttagtagagacggagtttcactgtgttggccaggctggtcttgaactcctgaccttgtgattcaccagcctcggcctcccaaagtgctgggattacaagcatgagccatggattacaagcctgagctgtgcccagcctcatttttcttaaactaaccacagacccacaaaatcagttaagcctcatcactaggtcactactagttgtttcaaaaactggtctaatgctagcaaaatgtacgcactagaaaccaaggttcataactcaccaatttctaaaaacatatcaagattcactgtatccccatgtggacccttcaaatcagcataatccaaagcataaaaattaaattgacatctaataaatgccatgcacatttgttttaattttaattaggatatcagtatctaattttggaacatatagacaatatttattcctataaatatgtgtatcaccttggaagtgaatttaaaaaggaatacaatattaagtaagcattgtcaactatatacaaactggtgtatcatgaatagtgatttacaacttaattagtagatatataatgccagaaaaaatataaggcagatatgaatacactgctctctggagtcaactaaaattggtttagtctgtctatatacaacttcaatcgcctaactccaggatgatgtcacctagcccagtgtttcctaagcattactgacatttgggactagataattctttgctgggggctgtcgagagcactgtaggatgtttagcagcatctgtgatctctacccactagaaaccagcagtagtcccccagggtggcaactaaaaatggctccaggaattaccaaatgtcctgtgggaaaactcctgcccaaatccaatcttctcaggatcacttccacatttccagtaactaccttctacataattctaaatgtattttctaacatcctctctaaagaaaatatctggccgggcacggtggctcatgcctgtaatctcagcactttgggaggccaaggcagttggatcacaaggttaggaattggagaccagcctggccaacatagtgaaaccctgtctctactaaaaatacaaaaaattagctgggcctggtggtggacacctgtaatcccagctacttgggaggctgaggcaggagaatcgcttgaatccaggaggcggaggttgcagtaagccaagaccacgtcactgcactccagyccgggtgacagtgcgagactgcatctcaaaaaaaaaaaagaaaatattctaattcacaatcattaatattctccaatatcctaaaaaatcagactataatctgacaacatggccattagatt

SEQ ID NO: 698197 - DNA, 636 bp, Homo sapiens
caatctaaaaattaacatgatcccatttatatgaaatatctagaaatatatctgtacatgtggacattcccatcgcacacctcccatccaggctgtcctaaagtggcatctcctcttcttctgctcatgttctccccctctcctcacctctcctgctgacacgtggctcctccctgccttcctctccagtagccccagcagatcaggcccaaccagtcaacaagctcctggacttggggaayaaaagtacatcttcttggatttctgaggacttgccctgccagggtgtctttctcaatccaatctctccttcccggcagtccacttctcctagatcctgtaatttatctaatcttattcatctgtatctacttcgtggacttccttacatcttcacctgaacaccaggaatcttcaggtcatgcccatatgcccttggttctcctgtagtcccttcttccttcttcccctgtgatgccaccaagtcgaagtctcttctcagaccctggagtgcagcagggacttctctggtctctgccccagggattaagggggtggaagagtggactcctgtgcccttcctatgcctgtgttttcatcagggttagctgcaaaaggtagggattaggctgtcta

SEQ ID NO: 698198 - DNA, 636 bp, Homo sapiens
caatctaaaaattaacatgatcccatttatatgaaatatctagaaatatatctgtacatgtggacattcccatcgcacacctcccatccaggctgtcctaaagtggcatctcctcttcttctgctcatgttctccccctctcctcacctctcctgctgacacgtggctcctccctgccttcctctccagtagccccagcagatcaggcccaaccagtcaacaagctcctggacttggggaacaaaagtacatcttcttggatttctgaggacttgccctgccagggtgtctttctcaatccaatctctccttcccggcagtccacttctcctagatcctgtaatttatctaatcttattcayctgtatctacttcgtggacttccttacatcttcacctgaacaccaggaatcttcaggtcatgcccatatgcccttggttctcctgtagtcccttcttccttcttcccctgtgatgccaccaagtcgaagtctcttctcagaccctggagtgcagcagggacttctctggtctctgccccagggattaagggggtggaagagtggactcctgtgcccttcctatgcctgtgttttcatcagggttagctgcaaaaggtagggattaggctgtcta

SEQ ID NO: 698199 - DNA, 650 bp, Homo sapiens
gcttctctgcttctctggcaaggctgcacccctggctaggtgggcagggccaggggctccttgagacagtctgcagccactgacctctccagcctccagggcagaggtacagtcccatggagcgtggctgatctgaaggcagttctggcctaaaaggggtcttgtcccttccttgtcctcattgctcccaaggccaggttggcagcagtagcagcggggttggatgctattggatgggagaaggtgaatggactcggagtgcagaatcaagctgcggaagccaagggccttgaaggagggtcacacacaagggacaactgcagaggaaaataaaggaacactttgtgattakccctgcctgtggctgaaagcgcagtgcagaagcatagtaaggaaggactgggtggtctgggtttaagacctaggaaccgtctctgctcctccaagcctgaatgagccctataacctaagggtcctggaggtcttgaaaccttctgcggagaaggctccaggtccactgggccctgtgggtggaagagcagagtcacagccccgcactggggacctaacaggtgtggccttgctagggccccagaatgggaccagagtgggtgggagggggcagaagctctgagagcaccccctccttc

SEQ ID NO: 698200 - DNA, 650 bp, Homo sapiens
gcttctctgcttctctggcaaggctgcacccctggctaggtgggcagggccaggggctccttgagacagtctgcagccactgacctctccagcctccagggcagaggtacagtcccatggagcgtggctgatctgaaggcagttctggcctaaaaggggtcttgtcccttccttgtcctcattgctcccaaggccaggttggcagcagtagcagcggggttggatgctattggatgggagaaggtgaatggactcggagtgcagaatcaagctgcggaagccaagggccttgaaggagggtcacacacaagggacaactgcagaggaaaataaaggaacactttgtgattagccctgcctgtggctgaaagcgcagtgcagaagcatagtaaggaaggactgggtggtctgggtttaagacctaggaaccgtctctgctcctccaagcctgaatgagccctataacctaagggtcctggaggtcttgaaaccttctgcggagaaggctccaggtccactgggccctgtgggtrgaagagcagagtcacagccccgcactggggacctaacaggtgtggccttgctagggccccagaatgggaccagagtgggtgggagggggcagaagctctgagagcaccccctccttc

SEQ ID NO: 698201 - DNA, 637 bp, Homo sapiens
ccctgaccatcactggggctcaggttgaacatgaagctgactattaccgtcactcatgggacaacagtggtactcatctcacagtgacacagacagattggaaagtgagatctaaagaccttcactgtctgtatcaccctctttctccagccatagcaggactgagcagggctggcccgggtcacctggatcgaagcccttcaggctgcccttccctccagccctcccggcagactgcagagagtaggtcaggataggatttggggctggcagaaccaggctgtcctgctgttatttggaatggrtgtaccttggctcaagatgacctgagtggaaggacagtaagagggagacagctactgagtgctcatggtcactgaatttcctcctgtgtgttgactgaacccaagacagtgcctctactctgtggcccaaataccctggattatttctctgaactgcccatgtttaactgagaccctcaagccccagctttgtgcatcctgatgttctgaacatggaagcctttcataatgtgcactgtgacatccttcagattcccatttcaggacttatgcacccaccatccacccagggctgcagggagttcctggcttctcacagctcttccccacca

SEQ ID NO: 698202 - DNA, 637 bp, Homo sapiens
ccctgaccatcactggggctcaggttgaacatgaagctgactattaccgtcactcatgggacaacagtggtactcatctcacagtgacacagacagattggaaagtgagatctaaagaccttcactgtctgtatcaccctctttctccagccatagcaggactgagcagggctggcccgggtcacctggatcgaagcccttcaggctgcccttccctccagccctcccggcagactgcagagagtaggtcaggataggatttggggctggcagaaccaggctgtcctgctgttatttggaatggatgtaccttggctcaagatgacctgagtggaaggacagtaagagggagacagctactgagtgctcatggtcactgaatttcctcctgtgtgttgactgaacccaagacagtgcctctactcygtggcccaaataccctggattatttctctgaactgcccatgtttaactgagaccctcaagccccagctttgtgcatcctgatgttctgaacatggaagcctttcataatgtgcactgtgacatccttcagattcccatttcaggacttatgcacccaccatccacccagggctgcagggagttcctggcttctcacagctcttccccacca

SEQ ID NO: 698203 - DNA, 637 bp, Homo sapiens
ccctgaccatcactggggctcaggttgaacatgaagctgactattaccgtcactcatgggacaacagtggtactcatctcacagtgacacagacagattggaaagtgagatctaaagaccttcactgtctgtatcaccctctttctccagccatagcaggactgagcagggctggcccgggtcacctggatcgaagcccttcaggctgcccttccctccagccctcccggcagactgcagagagtaggtcaggataggatttggggctggcagaaccaggctgtcctgctgttatttggaatggatgtaccttggctcaagatgacctgagtggaaggacagtaagagggagacagctactgagtgctcatggtcactgaatttcctcctgtgtgttgactgaacccaagacagtgcctctactctgtggcccaaataccctggattatttctctgaactgcccatgtttaactgagaccctcaagycccagctttgtgcatcctgatgttctgaacatggaagcctttcataatgtgcactgtgacatccttcagattcccatttcaggacttatgcacccaccatccacccagggctgcagggagttcctggcttctcacagctcttccccacca

SEQ ID NO: 698204 - DNA, 1627 bp, Homo sapiens
gtgttgcccagttaacctggatgtgagacccccaggctgccctttccacaggccctccaggcaggctctgcagagggggcatcaagagtgaatttagggctgagatgaccaggatatattgaggtgtggaggaatcagttgtgatttggggaagtggggcctggttggaagatcagaccaaggtcgacatgcttagttgggctctggatttccatagggggtgaaggctagtccttgggctgaatatcctgagtcagtttccagaactgcccagctcacgttcccgtggcatcctgccattctcttcaggaaaaccagtggagtggacactgtgggatccacccatattccctcttctgagctcacccacscagcactgctggtagctctggcagctcagagctgtgccctcactgagaagggctgtcagcagagaaaactgtctcctccaggtttatgccccttcttagcaaggtgtggtttcataactgcctgaggtgaagctctcaagactccctttcaatatgggagaaacagaaaatcctcccagcttcacagctccttattgggatggtagaagactcaatgtgggtcagagtgtccttgtgcccggtgttgcctccctcacttagtttcacacctactgtgaaagcaaagctccatctcagagtctgcttccaggcatcccaaaataacataaccagtcatcccgaacgtgagccatcaggaacctcaggaggccacagtataccagaaagcaccagtttattcctaatgatcattgtgagtttgcaaatgcccaatgagatctgagtgtttcttgcatttgtatggaatgaaaagggccctggcatgccaggcactgtggggtctgagggagagttggagtcagatctccctgcagggaaacctggggcaggaggagcagcctcatcccatgcagggaccacagatgcacctgcagggtgagctgcaggatggacactgcccacctccaccctccacattctgtgcaaaaaatcattctttccacccctccttcagcctatcaaagttgacacttaaaaagccaccacagcccacccttgtcaacaggaaacccattcacatctccatcagccacacaatctccacataaagattcttcaaaaaataataacacttgccatgcaaagtatatatataagatgtctcaaataattgtacttagattgcatatgaaagtgatactattttgatatgctaggtaaataaagtaaattatttaactcatttacttcttccctttgtatttttaatgcgatgactagacattcagatttccatgaggctcacatcatattgtgaatgaacagtgctggtctgcaccccttcaggttacagtggctgaggagtgacctggtgcaggaagccccatctccatccataggacattggtgtgaacccagggagaggcgctggtgtaagagagatgagaacacaggtgtgaaccacctgcttgtgcaggggactgagccttcactttgagccaaacaagcttcttttcctatcttcaatcctgagcaagaggactttccggacttctttttgttttcaggtttgtgcccctccaggcctgaggctgtct

SEQ ID NO: 698205 - DNA, 593 bp, Homo sapiens
ggggaaatgagagaaagatctgccccactcatcctstctgccccatccctcctttatccttgcctgtgaccaacaccagttcatgccaagacttttactgtcacttgtgttactgaaagcagagcaagggtgcagggatgataactccttttcttactggtctccccaatggaaacagaatcaacttgtttctagaagcaaaaggagctgcccacacatggtgggtgtggatgaggtggggatgacaagaaagaatccagccagtgtgacccagaagtccaggagccttcagcctggtcccacaggtgtcctctccttttggtgcaggtgtgctgatcatttcctgagctctgaatctgtgggaaagatgacaagaaaggagaatccagcctgtgtgacccaagacccatatgtgagagcggaagtctgacacttaagaaaacgtgggctcagcattctgagaggtctggatctggctcggcctagagctgctctagaagagaagcaagagaaatgctcagccttaggtggcccaggcacagtggtcctgtcaaaggtctgagctctctgcaacatggatatcctgcagagac

SEQ ID NO: 698206 - DNA, 593 bp, Homo sapiens
ggggaaatgagagaaagatctgccccactcatcctctctgccccatccctcctttatccytgcctgtgaccaacaccagttcatgccaagacttttactgtcacttgtgttactgaaagcagagcaagggtgcagggatgataactccttttcttactggtctccccaatggaaacagaatcaacttgtttctagaagcaaaaggagctgcccacacatggtgggtgtggatgaggtggggatgacaagaaagaatccagccagtgtgacccagaagtccaggagccttcagcctggtcccacaggtgtcctctccttttggtgcaggtgtgctgatcatttcctgagctctgaatctgtgggaaagatgacaagaaaggagaatccagcctgtgtgacccaagacccatatgtgagagcggaagtctgacacttaagaaaacgtgggctcagcattctgagaggtctggatctggctcggcctagagctgctctagaagagaagcaagagaaatgctcagccttaggtggcccaggcacagtggtcctgtcaaaggtctgagctctctgcaacatggatatcctgcagagac

SEQ ID NO: 698207 - DNA, 593 bp, Homo sapiens
ggggaaatgagagaaagatctgccccactcatcctctctgccccatccctcctttatccttgcctgtgaccaacaccagttcatgccaagacttttactgtcacttgtgttactgaaagcagagcaagggtgcagggatgataactcsttttcttactggtctccccaatggaaacagaatcaacttgtttctagaagcaaaaggagctgcccacacatggtgggtgtggatgaggtggggatgacaagaaagaatccagccagtgtgacccagaagtccaggagccttcagcctggtcccacaggtgtcctctccttttggtgcaggtgtgctgatcatttcctgagctctgaatctgtgggaaagatgacaagaaaggagaatccagcctgtgtgacccaagacccatatgtgagagcggaagtctgacacttaagaaaacgtgggctcagcattctgagaggtctggatctggctcggcctagagctgctctagaagagaagcaagagaaatgctcagccttaggtggcccaggcacagtggtcctgtcaaaggtctgagctctctgcaacatggatatcctgcagagac

SEQ ID NO: 698208 - DNA, 593 bp, Homo sapiens
ggggaaatgagagaaagatctgccccactcatcctctctgccccatccctcctttatccttgcctgtgaccaacaccagttcatgccaagacttttactgtcacttgtgttactgaaagcagagcaagggtgcagggatgataactccttttcttactggtctccccaatggaaacagaatcaacttgtttctagaagcaaaaggagctgyccacacatggtgggtgtggatgaggtggggatgacaagaaagaatccagccagtgtgacccagaagtccaggagccttcagcctggtcccacaggtgtcctctccttttggtgcaggtgtgctgatcatttcctgagctctgaatctgtgggaaagatgacaagaaaggagaatccagcctgtgtgacccaagacccatatgtgagagcggaagtctgacacttaagaaaacgtgggctcagcattctgagaggtctggatctggctcggcctagagctgctctagaagagaagcaagagaaatgctcagccttaggtggcccaggcacagtggtcctgtcaaaggtctgagctctctgcaacatggatatcctgcagagac

SEQ ID NO: 698209 - DNA, 593 bp, Homo sapiens
ggggaaatgagagaaagatctgccccactcatcctctctgccccatccctcctttatccttgcctgtgaccaacaccagttcatgccaagacttttactgtcacttgtgttactgaaagcagagcaagggtgcagggatgataactccttttcttactggtctccccaatggaaacagaatcaacttgtttctagaagcaaaaggagctgcccacacatggtgggtgtggatgaggtggggatgacaagaaagaatccagccagtgtgacccagaagtccaggagccttcagcctggtcccacaggtgtcctctccttttggtgcaggtgtgctgatcatttcctgagctctgaawctgtgggaaagatgacaagaaaggagaatccagcctgtgtgacccaagacccatatgtgagagcggaagtctgacacttaagaaaacgtgggctcagcattctgagaggtctggatctggctcggcctagagctgctctagaagagaagcaagagaaatgctcagccttaggtggcccaggcacagtggtcctgtcaaaggtctgagctctctgcaacatggatatcctgcagagac

SEQ ID NO: 698210 - DNA, 646 bp, Homo sapiens
caggttccttagccgtggatctgctcctctctctgccctcagcctaagagctgatggggcatccaccaggaagcgcatccgtgggcagggaggaggccgtgggcagccttctcctgtatgtgagacactgctcagcctcggtgaccccctgttcattaaggtgggaggaaaggaaaacaaaattcactgtgaacatctatgcatcatcaaagaaaaagcaatgagaagaaacaggaagtgaagcccagctctaatagtttatttctacttggaaataaataaaacaatatgcctgatgtgttatataaacacaataaactttttataaaaactatgaaaattatgtaaaggagcatggcttacactaaaaggaacatttaaaataatgacacccttgaaatgcaatcccaaaacacagcatccattttatttcagttacatatacggactggttttatttaaatgcctgcaataaatctcactattttgttgtttaaatggagcatttaaaatctcattgtggccaggcgcggtggctcacgcctgtaatcccagcactttgggagtcygaggtgggctgatcacaaggtcaggagttggagaccagcctggccaacatggtgaaacccagtctctactaaaaaaa

SEQ ID NO: 698211 - DNA, 703 bp, Homo sapiens
tcttgtttttcttagctaattgtmagtaaaattcactttggtaatttattgtgtcacatagaattgaagtttttctcttgctaatattattcctattttcaaattttggggttcctgttagcctgattttcggatagctgccacataagttgtccttgatctggataaatccataaaaattgtgaagaaattaaagctaactggttttccatataaaatttttaagaacacttcatttattaaggtctgtatatctatatattctcatatttataaatctccatattgtttgagaaaaggaatgaaatacctctaaaatatgggcctcatatttttagaaaagtgtttgaaatcttttataaacttcatattttgtttgctcctttatattctgtattacttaaatatgctcagaaaagcagtggtaaacagctatttaggaattgaggctgttactcctgacttccatgtgagactgccacagaactcatattgaaaatatgtcattttatccactaggttttgtttcctactttttaaatttgtgttaagaaagggaaaaaaatcacaagtttgtctaactcagtagaaaaatcgacaaagcatttgcagacaacttggcaagggtacagagaaacggatgtactgtttttcagtatttggggagggtggtttgagcagcatttattgacaatttcattag

SEQ ID NO: 698212 - DNA, 703 bp, Homo sapiens
tcttgtttttcttagctaattgtaagtaaaattcactttggtaatttattgtgtcacatagaattgaagtttttctyttgctaatattattcctattttcaaattttggggttcctgttagcctgattttcggatagctgccacataagttgtccttgatctggataaatccataaaaattgtgaagaaattaaagctaactggttttccatataaaatttttaagaacacttcatttattaaggtctgtatatctatatattctcatatttataaatctccatattgtttgagaaaaggaatgaaatacctctaaaatatgggcctcatatttttagaaaagtgtttgaaatcttttataaacttcatattttgtttgctcctttatattctgtattacttaaatatgctcagaaaagcagtggtaaacagctatttaggaattgaggctgttactcctgacttccatgtgagactgccacagaactcatattgaaaatatgtcattttatccactaggttttgtttcctactttttaaatttgtgttaagaaagggaaaaaaatcacaagtttgtctaactcagtagaaaaatcgacaaagcatttgcagacaacttggcaagggtacagagaaacggatgtactgtttttcagtatttggggagggtggtttgagcagcatttattgacaatttcattag

SEQ ID NO: 698213 - DNA, 703 bp, Homo sapiens
tcttgtttttcttagctaattgtaagtaaaattcactttggtaatttattgtgtcacatagaattgaagtttttctcttgctaatattattcctattttcaaattttggggttcctgttagcctgattttcggatagctgccacakaagttgtccttgatctggataaatccataaaaattgtgaagaaattaaagctaactggttttccatataaaatttttaagaacacttcatttattaaggtctgtatatctatatattctcatatttataaatctccatattgtttgagaaaaggaatgaaatacctctaaaatatgggcctcatatttttagaaaagtgtttgaaatcttttataaacttcatattttgtttgctcctttatattctgtattacttaaatatgctcagaaaagcagtggtaaacagctatttaggaattgaggctgttactcctgacttccatgtgagactgccacagaactcatattgaaaatatgtcattttatccactaggttttgtttcctactttttaaatttgtgttaagaaagggaaaaaaatcacaagtttgtctaactcagtagaaaaatcgacaaagcatttgcagacaacttggcaagggtacagagaaacggatgtactgtttttcagtatttggggagggtggtttgagcagcatttattgacaatttcattag

SEQ ID NO: 698214 - DNA, 703 bp, Homo sapiens
tcttgtttttcttagctaattgtaagtaaaattcactttggtaatttattgtgtcacatagaattgaagtttttctcttgctaatattattcctattttcaaattttggggttcctgttagcctgattttcggatagctgccacatragttgtccttgatctggataaatccataaaaattgtgaagaaattaaagctaactggttttccatataaaatttttaagaacacttcatttattaaggtctgtatatctatatattctcatatttataaatctccatattgtttgagaaaaggaatgaaatacctctaaaatatgggcctcatatttttagaaaagtgtttgaaatcttttataaacttcatattttgtttgctcctttatattctgtattacttaaatatgctcagaaaagcagtggtaaacagctatttaggaattgaggctgttactcctgacttccatgtgagactgccacagaactcatattgaaaatatgtcattttatccactaggttttgtttcctactttttaaatttgtgttaagaaagggaaaaaaatcacaagtttgtctaactcagtagaaaaatcgacaaagcatttgcagacaacttggcaagggtacagagaaacggatgtactgtttttcagtatttggggagggtggtttgagcagcatttattgacaatttcattag

SEQ ID NO: 698215 - DNA, 617 bp, Homo sapiens
atcgaagggaattggggatatttggcacaaaaggagcaagaaatcctcttctgttaagaaacctgttgttactcggatatactatcagagacaaaatatccagcattctcaaatgttaacttcttacgaaaatagatcttatgtttatatgttcattttggttttgttggagggaccaaacctaagtgagtrattttgtttgttaggttgtttttttgtcagtggactcgtgcatttcagccatcattcccatgtttctctttttgtttttagttatgttctcttattttttccatagtgtcccaaagtttactcaagactacccaggaacctcttgcccgagatcctgttaaacgtacgttgtcattcacctgagggaagggaagaggggaggaggatgctgcttggttcacataactccagcatcatcaccttctttgcatggttttgtgtttcttgaacacctgtcttagtaaaatgtttcttcccattaccttgcttgtaattacatctgattttgccagacagcttgagatgttgggctaagagcatcattgactaagtttcttctatttctgaccaatttcctttttatttagtctggttttattgaatat

SEQ ID NO: 698216 - DNA, 617 bp, Homo sapiens
atcgaagggaattggggatatttggcacaaaaggagcaagaaatcctcttctgttaagaaacctgttgttactcggatatactatcagagacaaaatatccagcattctcaaatgttaacttcttacgaaaatagatcttatgtttatatgttcattttggttttgttggagggaccaaacctaagtgagtgattttgtttgttaggttgtttttttgtcagtggactcgtgcatttcagccatcattcccatgtttctctttttgtttttagttatgttctcttattttttccatagtgtcccaaagtttactcaagactacccaggaacctcttgcccgagatcctgttaaacgtacgttgtcattcacctgagggaagggaagaggggaggaggatgctgcttggttcacataactccagcatcatcaccttctttgcatggttttgtgtttcttgaacacctgtcttagtaaaatgtttcttcccattaccttgcttgtaattacatctgattttgccagacagcttgagatgttgggctaagarcatcattgactaagtttcttctatttctgaccaatttcctttttatttagtctggttttattgaatat

SEQ ID NO: 698217 - DNA, 594 bp, Homo sapiens
gttccagtaagtagtatttatagaaaagatgaatattattaatcataaacagtgaaacatactttgcgtttacacttagcctattggtgtggctataaatcttatttattttagttgtgctctatttcttattgatctttacaatgtgttctctaaagtaataaagtgaatgcaaatatacgtggtcacaggtttattctgagttttaatttattatacaaaagtaaaggttttaatttaatattaatagtagaaaaacactttcttacgtgtgccatatggaaagataaaggatctattctaaaattagctgtgttggttgataagctggtgtggattctgccacatccagcaargaagataccattaaattacacagtttagctctctctatctatgcattaggaatttgacttccatttgatgttaaagcatatacttggctttaaggacacactaaaactattcaaagtttaattacattcagacaaagatcatctaaccactgttgctacatagggaatatttatttaattatcccttgctatctctattaatcagtttcctcaatttatccttaaaattttcctcaaa

SEQ ID NO: 698218 - DNA, 608 bp, Homo sapiens
tgaaaatccatcatctacatcaagaaacagaacattaccagcatcccaagaagccatcctcatgcccccttaagtcactacttccgcaaggtgaccacagtcctgttacccaatttgtaatctttcctaatgtgatagataaaaataaaaatcttattttagtttctggttacttttctgaagttactgcttagattatttataatattaattggggtggggtgcagtggctcatgcttgtaatcccagaactttgagaggccaagatggaaggattgcttgagaccaggagttcaagaccagccttggcaacatagtgagasactatctctagacagaattttaaaattagctgggcatggtggcatgcacctgtagtcctagctgtttgggaggctgaggcgagaggatagcttgagcctggaagttcaaggttatagtgagctatgatcacaccactgcactgcagcctgtgcaacaggcaagaccctgtctctaaataaataatcaatcattgttaggcccaggttttggaggtttaatctcctcctcaagagaaataagtggcatctgtttaaggttgcagaatgtgaaatgacttggcatag

SEQ ID NO: 698219 - DNA, 608 bp, Homo sapiens
tgaaaatccatcatctacatcaagaaacagaacattaccagcatcccaagaagccatcctcatgcccccttaagtcactacttccgcaaggtgaccacagtcctgttacccaatttgtaatctttcctaatgtgatagataaaaataaaaatcttattttagtttctggttacttttctgaagttactgcttagattatttataatattaattggggtggggtgcagtggctcatgcttgtaatcccagaactttgagaggccaagatggaaggattgcttgagaccaggagttcaagaccagccttggcaacatagtgagagwctatctctagacagaattttaaaattagctgggcatggtggcatgcacctgtagtcctagctgtttgggaggctgaggcgagaggatagcttgagcctggaagttcaaggttatagtgagctatgatcacaccactgcactgcagcctgtgcaacaggcaagaccctgtctctaaataaataatcaatcattgttaggcccaggttttggaggtttaatctcctcctcaagagaaataagtggcatctgtttaaggttgcagaatgtgaaatgacttggcatag

SEQ ID NO: 698220 - DNA, 608 bp, Homo sapiens
tgaaaatccatcatctacatcaagaaacagaacattaccagcatcccaagaagccatcctcatgcccccttaagtcactacttccgcaaggtgaccacagtcctgttacccaatttgtaatctttcctaatgtgatagataaaaataaaaatcttattttagtttctggttacttttctgaagttactgcttagattatttataatattaattggggtggggtgcagtggctcatgcttgtaatcccagaactttgagaggccaagatggaaggattgcttgagaccaggagttcaagaccagccttggcaacatagtgagagactatctctagacagaattttaaaattagctgggcatggtggcatgcacctgtagtcctagctgtttgggaggctgaggcgagaggatagcttgagcctggaagttcaaggttatagtgagctatgatcacaccactgcactgcagcctgtgcaacaggcaagaccctgtctctaaataaataatcaatcattgttaggcccaggttttggaggtttaatctcctcctcaagagaaataartggcatctgtttaaggttgcagaatgtgaaatgacttggcatag

SEQ ID NO: 698221 - DNA, 587 bp, Homo sapiens
atggattcgacgtggtaatagaaggctggacaaattttaaaaaatcaataaattatgggctgggcgtggtggctcatgcctgtaatcccagcactttgggaggctgaggcgggtggatacgaggtcaggcgttcaagaccagcctggccaacataatgaaacccgtttctactaaaaatacaaaaaattagcccggcgtggtggtgggcgcctgtaatcccagctactcaggaggctgaggcaggagaattgcttgagcctggaaggcggagcttgcagtgagccgagatcacaccactgcactcgcactccagcccgggcgacagtgcgagactccatctcaaaaaaaaaaatcaataaattatggtttaaaaataaaaaacaggccaggtaggatgactcacactttgggaggagaggcagrcagatcacctgaggccgggagttcgagaccagcttgaccaacatgaagaaacccagcctctactaaaaatacaaaaattagccaggtgtggtggcttgcgcctgtaatcccagctactcaggaggctgagacagaagaatcgcttgaacctgggaggcagagg

SEQ ID NO: 698222 - DNA, 1135 bp, Homo sapiens
acgttcctggtgccccttttcgtgctctcccagcttgcgccactatggccctggccctttaaggctgagcgcgaggccccgcctcgcccggcgccccgcccctcccgctggatcccgcagccgcggctcttcccgacgcgttccgacttccccagctgtgcactctccatccagctgtgcgctctcgtcgggagtcccagccatgtccgacgagagagaggtagccgaggcagcgaccggggaagacgcctcttcgccgcctccgaaaaccgaggcagcgagcgacccccagcatcccgcggcctccgaaggggccgccgccgccgccgcctcgccgccactgctgcgctgcctagtgctcaccggctttggaggctacgacaaggtgaagctgcagagccggccggcagcggccccggcccctgggcccggccagctgacgctgcgtctgcgggcctgcgggctcaacttcgcagacctcatggctaggcaggggctgtacgaccgtctcccgcctctgcctgtcactccgggcatggagggcgcgggtgttgtgatcgcagtgggcgagggagtcagcgaccgcaaggtgagcgggttgcgtagggcagggcagggctgcgcaggccactgggcagtggggcacgagtgggcgagcgccgggggtgtggcagggcgggagaaactggcgcggacctgggtgcacgagcgtggaaagcgtagccaaggaacttgtgtttgggggctcctggagagcggcatttatgtggggaggggagacgaaattatcgccccttccccaaccattttwagttgtggccgccgcccagaagctgtgctggtgggggggaaaacaataaggtgcccatgcgcatgcgcacaaccacactaccgtccccacccaccccccccccccccattaaaaccacacctgtacccctacccaccaaacactctctgggtaattgtggtctgtgactatgagtgacggttagtgccccctttccccgagggagcttgaggggctatgtcgtcggggttgggcgggggcacagcggccgtgccagagtcctggtcacatgcagccccgtggtctgtgggggtgtgaggcggcccctcccaaagcaaggccaaa

SEQ ID NO: 698223 - DNA, 1419 bp, Homo sapiens
tcgctcttgtttcccaggctggggtgcaatggtgtgatcttggctcagcgcaacctctgcctcctgggttcaagtgattytcatgcctcagcctcccaagtagctgggattacaggcatgcgccaccacacctggctaattttgtatttttagtagaggcggggtttcaccatattgtccagactggtctcgaactcctgacctcaggtgatccacccgccttggcctcccaaagtgctgggattacaggcatgagccaccttgcccagcctaagaagattttttgagggaggtaggtggacttggagaaggtcactacttgaagagatttttggaaatgatgtatttttcttctctatattccttcccttaattaactctgtttgttagatgtgcaaatatttggaatgatatctcttttctcaaaacttataatattttctttctccctttcttcaagattaaacttatgggcaaatactagaatcctaatctctcatggcactttctggaaaatttaaggcggttattttatatatgtaagcagggcctatgactatgatcttgactcatttttcaaaaatcttctatattttatttagttatttggtttcaaaaggcctgcacttaattttgggggattatttggaaaaacagcattgagttttaatgaaaaaaacttaaatgccctaacagtagaaacataaaattaataaataactgagctgagcacctgctactgattagtctattttaattaagtgggaatgtttttgtagtcctatctacatctccaggtttaggagcaaacagagtatgttcatagaaggaatatgtgtatggtcttagaatacaatgaacatgttctgccaacttaataaaggtctgaggagaaagtgtagcaatgtcaattcgtgttgaacaatttccaccaacttacttataggcggaccttgccaagtatatctgtgaaaatcaagattcgatctccagtaaactgaaggaatgctgtgaaaaacctctgttggaaaaatcccactgcattgccgaagtggaaaatgatgagatgcctgctgacttgccttcattagctgctgattttgttgaaagtaaggatgtttgcaaaaactatgctgaggcaaaggatgtcttcctgggcatgtaagtagataagaaattattcttttatagctttggcatgacctcacaacttaggaggatagcctaggcttttctgtggagttgctacaatttccctgctgcccagaatgtttcttcatccttccctttcccaggctttaacaatttttgaaatagttaattagttgaatacattgtcataaaataatacatgttcacggcaaagctcaacattccttactccttaggggtatttctgaaaatacgtctagaaacatt

SEQ ID NO: 698224 - DNA, 1419 bp, Homo sapiens
tcgctcttgtttcccaggctggggtgcaatggtgtgatcttggctcagcgcaacctctgcctcctgggttcaagtgattttcatgcctcagcctcccaagtagctgggattacaggcatgcgccaccacacctggctaattttgtatttttagtagaggcggggtttcaccatattgtccagactggtctcgaactcctgacctcaggtgatccacccgccttggcctcccaaagtgctgggattacaggcatgagccaccttgcccagcctaagaagattttttgagggaggtaggtggacttggagaaggtcactacttgaagagatttttggaaatgatgtatttttcttctctatattccttcccttaattaactctgtttgttagatgtgcaaatatttggaatgatatctcttttctcaaaacttataatattttctttctccctttcttcaagattaaacttatgggcaaatactagaatcctaatctctcatggcactttctggaaaatttaaggcggttattttatatatgtaagcagggcctatgactatgatcttgactcatttttcaaaaatcttctatattttatttagttatttggtttcaaaaggcctgcacttaattttgggggattatttggaaaaacagcattgagttttaatgaaaaaaacttaaatgccctaacagtagaaacataaaattaataaataactgagctgagcacctgctactgattagtctattttaattaagtgggaatgtttttgtagtcctatctacatctccaggtttaggagcaaacagagtatgttcatagaaggaatatgtgtatggtcttagaatacaatgaayatgttctgccaacttaataaaggtctgaggagaaagtgtagcaatgtcaattcgtgttgaacaatttccaccaacttacttataggcggaccttgccaagtatatctgtgaaaatcaagattcgatctccagtaaactgaaggaatgctgtgaaaaacctctgttggaaaaatcccactgcattgccgaagtggaaaatgatgagatgcctgctgacttgccttcattagctgctgattttgttgaaagtaaggatgtttgcaaaaactatgctgaggcaaaggatgtcttcctgggcatgtaagtagataagaaattattcttttatagctttggcatgacctcacaacttaggaggatagcctaggcttttctgtggagttgctacaatttccctgctgcccagaatgtttcttcatccttccctttcccaggctttaacaatttttgaaatagttaattagttgaatacattgtcataaaataatacatgttcacggcaaagctcaacattccttactccttaggggtatttctgaaaatacgtctagaaacatt

SEQ ID NO: 698225 - DNA, 1419 bp, Homo sapiens
tcgctcttgtttcccaggctggggtgcaatggtgtgatcttggctcagcgcaacctctgcctcctgggttcaagtgattttcatgcctcagcctcccaagtagctgggattacaggcatgcgccaccacacctggctaattttgtatttttagtagaggcggggtttcaccatattgtccagactggtctcgaactcctgacctcaggtgatccacccgccttggcctcccaaagtgctgggattacaggcatgagccaccttgcccagcctaagaagattttttgagggaggtaggtggacttggagaaggtcactacttgaagagatttttggaaatgatgtatttttcttctctatattccttcccttaattaactctgtttgttagatgtgcaaatatttggaatgatatctcttttctcaaaacttataatattttctttctccctttcttcaagattaaacttatgggcaaatactagaatcctaatctctcatggcactttctggaaaatttaaggcggttattttatatatgtaagcagggcctatgactatgatcttgactcatttttcaaaaatcttctatattttatttagttatttggtttcaaaaggcctgcacttaattttgggggattatttggaaaaacagcattgagttttaatgaaaaaaacttaaatgccctaacagtagaaacataaaattaataaataactgagctgagcacctgctactgattagtctattttaattaagtgggaatgtttttgtagtcctatctacatctccaggtttaggagcaaacagagtatgttcatagaaggaatatgtgtatggtcttagaatacaatgaacatgttctgccaacttaataaaggtctgaggagaaagtgtagcaatgtcaattcgtgttgaacaatttccaccaacttacttataggcggaccttgccaagtatatctgtgaaaatcaagattcgatctccagtaaactgaaggaatgctgtgaaaaacctctgttggaaaaatcccactgcattgccgaagtggaaaatgatgagatgcctgctgacttgccttcattagctgctgattttgttgaaagtaaggatgtttgcaaaaactatgctgaggcaaaggatgtcttcctgggcatgtaagtagataagaaattattcttttatagctttggcatgacctcacaacttaggaggatagcctaggcttttctgtggagttgctacaatttccctgctgcccagaatgtttcttcatccttccctttcccaggctttaacaatttttgaaatagttaattagttgaatacattgtcataaaataatacatgttcayggcaaagctcaacattccttactccttaggggtatttctgaaaatacgtctagaaacatt

SEQ ID NO: 698226 - DNA, 604 bp, Homo sapiens
tttttttttttgaggtggagtttcgctcttggtgaggcttaagtggcacgatctcggcttactgcaacctccgcctcccgggctcaagcaattctgcctcagcctctcgagtagctgggattataggcgcccgcctaccacgcycggctaattttgtatttttagtagaagcagggtttcaccatattggccaggctggtctcgaactcctgacctcaagtgatccacccacctcagcctcccaaagtgctgggattacaggcgtgagccactgcgcccaggcctggaattccgtgatcttgacgctggactagggcagtggatgcgagggagaagggctccaatgtcgggccctggttcgaggagaaggtgcggctttcacccaacagaaaccggccgtgaggctaaaagccaactccatgagggaaggtcggtcaagctcaatggtttcgtcacattgctccctccacccgccgcgggtgtaagctgcttctccttcgaattgccccctactcgccgccgcctccgctggcgttcccagggcgagcgtaagttccgggtgcggcggccgactaggcgcaacaggaagaggcggggccgcgag

SEQ ID NO: 698227 - DNA, 604 bp, Homo sapiens
tttttttttttgaggtggagtttcgctcttggtgaggcttaagtggcacgatctcggcttactgcaacctccgcctcccgggctcaagcaattctgcctcagcctctcgagtagctgggattataggcgcccgcctaccacgctcggctaattttgtatttttagtagaagcagggtttcaccatattggccaggctggtctcgaactcctgacctcaagtgatccacccacctcagcctcccaaagtgctgggattacaggcgtgagccactgcgcccaggcctggaattccgtgatcttgacgctggactagggcagtggatgcgagggagaagggctccaatgtcgggccctggttcgaggagaaggtgcggctttcacccaacagaaaccggccgtgaggctaaaagccaactccatgagggaaggtcggtcaagctcaatggtttcgtcacattgctccctccacccgccgcgggtgtaagctgcktctccttcgaattgccccctactcgccgccgcctccgctggcgttcccagggcgagcgtaagttccgggtgcggcggccgactaggcgcaacaggaagaggcggggccgcgag

SEQ ID NO: 698228 - DNA, 575 bp, Homo sapiens
cgagtcccgaggagaagtgagttgacagggcttacctgcttggccattttctaggttaggcagtgtgcagggagggtggagatgcgagcgaaaggagggcttgatggggtgggacggccgaggagggtctggaggaaataagcaggggtgccagtggtcgtagtggcggggcttttcggggctgtggttagagaaaacttctcgaggggctttggggtggctcgtcccgcactgggggcttgttgctcctgagttccctgaaaggcgtggtgacttggccgagatggagcagtgaaggtggagggaaaygcgtggttcgggataggcttctgaaggcaggacctgtgagacttgctgatgggttggggatgggaggcgtgaaaggaaaaaaaaaatcggacccaacttcactgtgccaaaaggaaaaaattatgctgagcgcggaatcatgcaagaaactacctttgcgttacttttttttttttttttttttttaaagacagggtctcactctgtctcacaggctggagtgcggtgacgcgatcttggctcactgcagcctccccctcccgggt

SEQ ID NO: 698229 - DNA, 1916 bp, Homo sapiens
aggtagtattgagggttctgtggggattatccaaagagaactttctacaaagttttaggtgatggcgatgctaaaagaaatgctaagaatttctctcttatattaaagagaactatggtcctctcataaaatgtaccatttatcaccaaatttatctcataacctaagagctaccacttacaaatttgaagggaaaaattactacattgtaatactcaagccaacacaaagaatcctatcccagtttcttgagtggatgggcaagaatatggggaatttattatgcagtaaccttcatctctcttctataggtcaggatttaagtttacctcaaaaatggaagattttaacatggagagtgacagctttgaagatttctggaaaggtgaagatcttagtaattacagttacagctctaccctgcccccttttctactagatgccgccccatgtgaaccagaatccctggaaatcaacaagtattttgtggtcattatctatgccctggtattcctgctgagcctgctgggaaactccctcgtgatgctggtcatcttatacagcagggtcggccgctccgtcactgatgtctacctgctgaacctagccttggccgacctactctttgccctgaccttgcccatctgggccgcctccaaggtgaatggctggatttttggcacattcctgtgcaaggtggtctcactcctgaaggaagtcaacttctatagtggcatcctgctactggcctgcatcagtgtggaccgttacctggccattgtccatgccacacgcacactgacccagaagcgctacttggtcaaattcatatgtctcagcatctggggtctgtccttgctcctggccctgcctgtcttacttttccgaaggaccgtctactcatccaatgttagcccagcctgctatgaggacatgggcaacaatacagcaaactggcggatgctgttacggatcctgccccagtcctttggcttcatcgtgccactgctgatcatgctgttctgctacggattcaccctgcgtacgctgtttaaggcccacatggggcagaagcaccgggccatgcgggtcatctttgctgtcgtcctcatcttcctgctytgctggctgccctacaacctggtcctgctggcagacaccctcatgaggacccaggtgatccaggagacctgtgagcgccgcaatcacatcgaccgggctctggatgccaccgagattctgggcatccttcacagctgcctcaaccccctcatctacgccttcattggccagaagtttcgccatggactcctcaagattctagctatacatggcttgatcagcaaggactccctgcccaaagacagcaggccttcctttgttggctcttcttcagggcacacttccactactctctaagacctcctgcctaagtgcagcccgtggggttcctcccttctcttcacagtcacattccaagcctcatgtccactggttcttcttggtctcagtgtcaatgcagcccccattgtggtcacaggaagtagaggaggccacgttcttactagtttcccttgcatggtttagaaagcttgccctggtgcctcaccccttgccataattactatgtcatttgctggagctctgcccatcctgcccctgagcccatggcactctatgttctaagaagtgaaaatctacactccagtgagacagctctgcatactcattaggatggctagtatcaaaagaaagaaaatcaggctggccaacggggtgaaacctgtctctactaaaaatacaaaaaaaaaaaaaaattagccgggcgtggtggtgagtgcctgtaatcacagctacttgggaggctgagatgggagaatcacttgaacccgggagcagaggttgcagtgagccga

SEQ ID NO: 698230 - DNA, 1916 bp, Homo sapiens
aggtagtattgagggttctgtggggattatccaaagagaactttctacaaagttttaggtgatggcgatgctaaaagaaatgctaagaatttctctcttatattaaagagaactatggtcctctcataaaatgtaccatttatcaccaaatttatctcataacctaagagctaccacttacaaatttgaagggaaaaattactacattgtaatactcaagccaacacaaagaatcctatcccagtttcttgagtggatgggcaagaatatggggaatttattatgcagtaaccttcatctctcttctataggtcaggatttaagtttacctcaaaaatggaagattttaacatggagagtgacagctttgaagatttctggaaaggtgaagatcttagtaattacagttacagctctaccctgcccccttttctactagatgccgccccatgtgaaccagaatccctggaaatcaacaagtattttgtggtcattatctatgccctggtattcctgctgagcctgctgggaaactccctcgtgatgctggtcatcttatacagcagggtcggccgctccgtcactgatgtctacctgctgaacctagccttggccgacctactctttgccctgaccttgcccatctgggccgcctccaaggtgaatggctggatttttggcacattcctgtgcaaggtggtctcactcctgaaggaagtcaacttctatagtggcatcctgctactggcctgcatcagtgtggaccgttacctggccattgtccatgccacacgcacactgacccagaagcgctacttggtcaaattcatatgtctcagcatctggggtctgtccttgctcctggccctgcctgtcttacttttccgaaggaccgtctactcatccaatgttagcccagcctgctatgaggacatgggcaacaatacagcaaactggcggatgctgttacggatcctgccccagtcctttggcttcatcgtgccactgctgatcatgctgttctgctacggattcaccctgcgtacgctgtttaaggcccacatggggcagaagcaccgggccatgcgggtcatctttgctgtcgtcctcatcttcctgctctgctggctgccctacaacctggtcctgctggcagacaccctcatgaggacccaggtgatccaggagacctgtgagcgccgcaatcacatcgaccgggctctggatgccaccgagattctgggcatccttcacagctgcctcaaccccctcatctacgccttcattggccagaagtttcgccatggactcctcaagattctagctatacatggcttgatcagcaaggactccctgcccaaagacagcaggccttcctttgttggctcttcttcagggcacacttccactactctctaagacctcctgcctaagtgcagcccgtggggttcctcccttctcttcacagtcacattccaagcctcatgtccactggttcttcttggtctcagtgtcaatgcagcccccattgtggtcacaggaagyagaggaggccacgttcttactagtttcccttgcatggtttagaaagcttgccctggtgcctcaccccttgccataattactatgtcatttgctggagctctgcccatcctgcccctgagcccatggcactctatgttctaagaagtgaaaatctacactccagtgagacagctctgcatactcattaggatggctagtatcaaaagaaagaaaatcaggctggccaacggggtgaaacctgtctctactaaaaatacaaaaaaaaaaaaaaattagccgggcgtggtggtgagtgcctgtaatcacagctacttgggaggctgagatgggagaatcacttgaacccgggagcagaggttgcagtgagccga

SEQ ID NO: 698231 - DNA, 1949 bp, Homo sapiens
  misc_feature 613: n = A,T,C or G
tctctccgtctctctctctttctgtctgtttctcactgtctctctctgtccatctctctctctctctgtctgtctctttcgttctctctgtctgtctgtctctctctctctctctctctctctctctctctccctgtctgtctgtttctctctatctctcgctgtccatctctgtctttctatgtctgtctctttctctgtcagtctgtcagacacccccgtgccgggtagggccctgccccttccacgaaagtgagaagcgcgtgcttcggtgcttagagaggccgagaggaatctagacaggcgggccttgctgggcttccccactcggtgtatgatttcgggaggtcgaggccgggtccccgcttggatgcgaggggcattttcagacttttctctcggtcacgtgtggcgtccgtacttctcctatttccccgataagctcctcgacttcaacataaacggcgtcctaagggtcgatttagtgtcatgcctctttcaccgccaccaccgaagatgaaagcaaagatcggctaaataccgcgtgttctcatctagaagtgggaacttacagatgacagttcttgcatgggcagaacgagggggaccgggnacgcggaagcctgcttgaggggggaggggcggaaggagagacagcttcaggaagaaaacaaaacacgaatactgtcggacacagcactgactacccgggtgatgaaatcatctgcacactgaacacccccgtcacaagtttacctatgtcacagtcttgctcatgtatgcttgaacgacaaataaaagttcgggggggagaagagaggagagagagagagagacggggagagaggggggagagggggggggagagagagagagagagagagagagagagagagagagagaaagagaagtaaaaccaaccaccacctccttgacctgagtcagggggtttctggccttttgggagaacgttcagcgacaatgcagtatttgggcccgttctttttttcttcttcttcttttctttctttttttttggactgagtctctctcgctctgtcacccaggctgcggtgcggtggcgctctctcggctcactgaaacctctgcttcccgggttccagtgattcttcttcggtagctgggattacaggtgcgcaccatgacggccggctcatcgttctatttttagtagagacggggtttctccacgttggccacgctggtctcgaactcctgaccacaaatgatccaccttcctgggcctcccaaagtgctggaaacgacaggcctgagccgccgggatttcagcctttaaaagcgcgcggccctgccacctttcgctgcggcccttacgctcagaatgacgtgtcctctctgccataggttgactccttgagtcccctaggccattgcactgtagcctgggcagcaagagccaaactccgtccccccacctccccgcgcacataataactaactaactaactaactaactaaaatctctacacgtcacccataagtgtgtgttcccgtgaggagtgatttctaagaaatggyactgtacactgaacgcaggcttcacgtctgtcatcccgaggtcaggagttcgagaccagcccggcccacgtggtgaaacccccgtctctactgaaaatacgaaatggagtcaggcgccgtggggcaggcacctgtaaccccagctactcgggaggctggggtggaagaattgcttgaacctggcaggcggaggctgcagtgacccaagatcgcaccactgcactacagcctgggcgacagagtgagacccggtctccagataaatacgtacataaataaatacacacatacatacatacatacatacaacatacatacatacagatatacaagaaagaaaaaaagaaaagaaaagaaagagaaaatgaaagaaaaggcactgtattgct

SEQ ID NO: 698232 - DNA, 1949 bp, Homo sapiens
  misc_feature 613: n = A,T,C or G
tctctccgtctctctctctttctgtctgtttctcactgtctctctctgtccatctctctctctctctgtctgtctctttcgttctctctgtctgtctgtctctctctctctctctctctctctctctctctccctgtctgtctgtttctctctatctctcgctgtccatctctgtctttctatgtctgtctctttctctgtcagtctgtcagacacccccgtgccgggtagggccctgccccttccacgaaagtgagaagcgcgtgcttcggtgcttagagaggccgagaggaatctagacaggcgggccttgctgggcttccccactcggtgtatgatttcgggaggtcgaggccgggtccccgcttggatgcgaggggcattttcagacttttctctcggtcacgtgtggcgtccgtacttctcctatttccccgataagctcctcgacttcaacataaacggcgtcctaagggtcgatttagtgtcatgcctctttcaccgccaccaccgaagatgaaagcaaagatcggctaaataccgcgtgttctcatctagaagtgggaacttacagatgacagttcttgcatgggcagaacgagggggaccgggnacgcggaagcctgcttgaggggggaggggcggaaggagagacagcttcaggaagaaaacaaaacacgaatactgtcggacacagcactgactacccgggtgatgaaatcatctgcacactgaacacccccgtcacaagtttacctatgtcacagtcttgctcatgtatgcttgaacgacaaataaaagttcgggggggagaagagaggagagagagagagagacggggagagaggggggagagggggggggagagagagagagagagagagagagagagagagagagagaaagagaagtaaaaccaaccaccacctccttgacctgagtcagggggtttctggccttttgggagaacgttcagcgacaatgcagtatttgggcccgttctttttttcttcttcttcttttctttctttttttttggactgagtctctctcgctctgtcacccaggctgcggtgcggtggcgctctctcggctcactgaaacctctgcttcccgggttccagtgattcttcttcggtagctgggattacaggtgcgcaccatgacggccggctcatcgttctatttttagtagagacggggtttctccacgttggccacgctggtctcgaactcctgaccacaaatgatccaccttcctgggcctcccaaagtgctggaaacgacaggcctgagccgccgggatttcagcctttaaaagcgcgcggccctgccacctttcgctgcggcccttacgctcagaatgacgtgtcctctctgccataggttgactccttgagtcccctaggccattgcactgtagcctgggcagcaagagccaaactccgtccccccacctccccgcgcacataataactaactaactaactaactaactaaaatctctacacgtcacccataagtgtgtgttcccgtgaggagtgatttctaagaaatggtactgtacactgaacgcaggsttcacgtctgtcatcccgaggtcaggagttcgagaccagcccggcccacgtggtgaaacccccgtctctactgaaaatacgaaatggagtcaggcgccgtggggcaggcacctgtaaccccagctactcgggaggctggggtggaagaattgcttgaacctggcaggcggaggctgcagtgacccaagatcgcaccactgcactacagcctgggcgacagagtgagacccggtctccagataaatacgtacataaataaatacacacatacatacatacatacatacaacatacatacatacagatatacaagaaagaaaaaaagaaaagaaaagaaagagaaaatgaaagaaaaggcactgtattgct

SEQ ID NO: 698233 - DNA, 1949 bp, Homo sapiens
  misc_feature 613: n = A,T,C or G
tctctccgtctctctctctttctgtctgtttctcactgtctctctctgtccatctctctctctctctgtctgtctctttcgttctctctgtctgtctgtctctctctctctctctctctctctctctctctccctgtctgtctgtttctctctatctctcgctgtccatctctgtctttctatgtctgtctctttctctgtcagtctgtcagacacccccgtgccgggtagggccctgccccttccacgaaagtgagaagcgcgtgcttcggtgcttagagaggccgagaggaatctagacaggcgggccttgctgggcttccccactcggtgtatgatttcgggaggtcgaggccgggtccccgcttggatgcgaggggcattttcagacttttctctcggtcacgtgtggcgtccgtacttctcctatttccccgataagctcctcgacttcaacataaacggcgtcctaagggtcgatttagtgtcatgcctctttcaccgccaccaccgaagatgaaagcaaagatcggctaaataccgcgtgttctcatctagaagtgggaacttacagatgacagttcttgcatgggcagaacgagggggaccgggnacgcggaagcctgcttgaggggggaggggcggaaggagagacagcttcaggaagaaaacaaaacacgaatactgtcggacacagcactgactacccgggtgatgaaatcatctgcacactgaacacccccgtcacaagtttacctatgtcacagtcttgctcatgtatgcttgaacgacaaataaaagttcgggggggagaagagaggagagagagagagagacggggagagaggggggagagggggggggagagagagagagagagagagagagagagagagagagagaaagagaagtaaaaccaaccaccacctccttgacctgagtcagggggtttctggccttttgggagaacgttcagcgacaatgcagtatttgggcccgttctttttttcttcttcttcttttctttctttttttttggactgagtctctctcgctctgtcacccaggctgcggtgcggtggcgctctctcggctcactgaaacctctgcttcccgggttccagtgattcttcttcggtagctgggattacaggtgcgcaccatgacggccggctcatcgttctatttttagtagagacggggtttctccacgttggccacgctggtctcgaactcctgaccacaaatgatccaccttcctgggcctcccaaagtgctggaaacgacaggcctgagccgccgggatttcagcctttaaaagcgcgcggccctgccacctttcgctgcggcccttacgctcagaatgacgtgtcctctctgccataggttgactccttgagtcccctaggccattgcactgtagcctgggcagcaagagccaaactccgtccccccacctccccgcgcacataataactaactaactaactaactaactaaaatctctacacgtcacccataagtgtgtgttcccgtgaggagtgatttctaagaaatggtactgtacactgaacgcaggcytcacgtctgtcatcccgaggtcaggagttcgagaccagcccggcccacgtggtgaaacccccgtctctactgaaaatacgaaatggagtcaggcgccgtggggcaggcacctgtaaccccagctactcgggaggctggggtggaagaattgcttgaacctggcaggcggaggctgcagtgacccaagatcgcaccactgcactacagcctgggcgacagagtgagacccggtctccagataaatacgtacataaataaatacacacatacatacatacatacatacaacatacatacatacagatatacaagaaagaaaaaaagaaaagaaaagaaagagaaaatgaaagaaaaggcactgtattgct

SEQ ID NO: 698234 - DNA, 1949 bp, Homo sapiens
  misc_feature 613: n = A,T,C or G
tctctccgtctctctctctttctgtctgtttctcactgtctctctctgtccatctctctctctctctgtctgtctctttcgttctctctgtctgtctgtctctctctctctctctctctctctctctctctccctgtctgtctgtttctctctatctctcgctgtccatctctgtctttctatgtctgtctctttctctgtcagtctgtcagacacccccgtgccgggtagggccctgccccttccacgaaagtgagaagcgcgtgcttcggtgcttagagaggccgagaggaatctagacaggcgggccttgctgggcttccccactcggtgtatgatttcgggaggtcgaggccgggtccccgcttggatgcgaggggcattttcagacttttctctcggtcacgtgtggcgtccgtacttctcctatttccccgataagctcctcgacttcaacataaacggcgtcctaagggtcgatttagtgtcatgcctctttcaccgccaccaccgaagatgaaagcaaagatcggctaaataccgcgtgttctcatctagaagtgggaacttacagatgacagttcttgcatgggcagaacgagggggaccgggnacgcggaagcctgcttgaggggggaggggcggaaggagagacagcttcaggaagaaaacaaaacacgaatactgtcggacacagcactgactacccgggtgatgaaatcatctgcacactgaacacccccgtcacaagtttacctatgtcacagtcttgctcatgtatgcttgaacgacaaataaaagttcgggggggagaagagaggagagagagagagagacggggagagaggggggagagggggggggagagagagagagagagagagagagagagagagagagagaaagagaagtaaaaccaaccaccacctccttgacctgagtcagggggtttctggccttttgggagaacgttcagcgacaatgcagtatttgggcccgttctttttttcttcttcttcttttctttctttttttttggactgagtctctctcgctctgtcacccaggctgcggtgcggtggcgctctctcggctcactgaaacctctgcttcccgggttccagtgattcttcttcggtagctgggattacaggtgcgcaccatgacggccggctcatcgttctatttttagtagagacggggtttctccacgttggccacgctggtctcgaactcctgaccacaaatgatccaccttcctgggcctcccaaagtgctggaaacgacaggcctgagccgccgggatttcagcctttaaaagcgcgcggccctgccacctttcgctgcggcccttacgctcagaatgacgtgtcctctctgccataggttgactccttgagtcccctaggccattgcactgtagcctgggcagcaagagccaaactccgtccccccacctccccgcgcacataataactaactaactaactaactaactaaaatctctacacgtcacccataagtgtgtgttcccgtgaggagtgatttctaagaaatggtactgtacactgaacgcaggcttcacgtctgtcatcccgaggtcaggagttcgagaccagcccggccmacgtggtgaaacccccgtctctactgaaaatacgaaatggagtcaggcgccgtggggcaggcacctgtaaccccagctactcgggaggctggggtggaagaattgcttgaacctggcaggcggaggctgcagtgacccaagatcgcaccactgcactacagcctgggcgacagagtgagacccggtctccagataaatacgtacataaataaatacacacatacatacatacatacatacaacatacatacatacagatatacaagaaagaaaaaaagaaaagaaaagaaagagaaaatgaaagaaaaggcactgtattgct

SEQ ID NO: 698235 - DNA, 605 bp, Homo sapiens
ggagttgtaaaacctcggccacattaagatctgaaaactgtgatgcgtcctttctgcagagacgcctctttctgaatctgcccggagcttcgagccccggcgtctgtccctcagcctggcatggcttcttcgggggtctgctttgcatggggagaggggccacgcagcggcggactaggtttggggattctcggtaatggacccggagcaatgactaacagccgctccctctcactttcccacagcgatcaccctctaacaccctccctcccattcccggccccgcgcgtgacaaggtcggctgctttcagccgggagctagatcggtggcccggctcttcggagccttagcaggcgttcgccaaggggtgactggctgtcattgggagcaatatttggccttgaggagaccctggggaggaagtggcggggagctcgtgtttgcttgtgtgtgtgtgggggggggkgtgtgtgtacacgcgcgtgggcagggtccctctgcgctttcctttttaagtgcctctcggtggtgaggctttgggcgggtgagactttcccgacctcgctcccggccccacttaagccgggttcgagctgggagacgc

SEQ ID NO: 698236 - DNA, 862 bp, Homo sapiens
caacatggcacatgtatacatatgtaacaaacctgcatgttgtgcacatgtaccctagaacttaaagtataaaaaaaaaaaaggaacaggagaatgaactattttttttagaaatggagcctcactcactctgtcactcaggctggagtactgtgacatgatcttagctcactgcagcctccacctcttgggctcttgggctcaagtgattctcctgcctcagcctcccaagtagctaggaccatgcgccaccatgcctggctgattttttgtatttttagtagagacagggtttcaccatgatggccaggctggtstagaatccctgacctcaggtgatctgcccgcctcggcctcccaaaatgctgggattaccggcgtgagcacagcgtctggccctatatgcttttttcaattcaatggctacttgcctaattttgaatggccaaaataaccttccagttattttcccttaatggaatcaacctagaatagttgcctggggagagggagctggggggcagtgattggaaagagacatgagggaactttttggagggataaaattgttctatattttgatttaggtgttagttacaggatattttcatttgtaaaatttatgaactgtagaccttagatctgtgcattttaccatatataaattatatctcaatttaagcatagaaaaagtaaaccaatgattgtgatatacttggctaatgtccatatgctacagtgtgttgaaaagaaaaataataccctattgagaaggtagacatgtactgcaagcataagctatgaaaacagagaaaagccgcagacattgttaacggactgagctgggatgtttccagttgtg

SEQ ID NO: 698237 - DNA, 1049 bp, Homo sapiens
aaatgagaaatattattattaagttgatcaatactttgttgaaaactttctctgtacctggtacyaagatactctgttgtttaaatagcttcttatagtcactgtggattacagtaatttctttttacaagatgtaagatttgcccatctgcataaatacccatattttaattctatgatttgtctttacttctagctactcactaaacatacatttcctgaaagcagaagagattcaattgctgttattcacatgattactatcgtgccaggagggagtgtcagggaagttaacaaaacaggccaggtgtggtggctcacaactgtaatcccggcactttgggaggccgaggtgggctgattgcttgaggtcagcagtttgagacaagcctgagcaacatggtgagaccccagctccaaaaaaaaaaaatacaaaaattagccagccattgtggtatgtgcccgtagtctcttgactgtaggcaactagaagtctttccccaggtacggggggcagtggtataggacagcttttaagggggtagaatgtgactcaggctttcgtggactgggtagtatttggataagcctggtgacagtctgcacactatagactagagcactctgctgtgacaggtatgcctgaatagaactcacgaagatcctgctctggcaatttagtcactgcctatccacggatagaaccctgactattcagtagtcacaatagacaaatgatagcttagcagattttggttattattactattttaaaatttaagtataggagattttgcatcaatcatatagaatcacatatggaatttcttagaatgggatcttagtgccttatcttgtatatgtcctgtataaaacgcacagctgatcctatgaagcctggcaagttttaaagggaaggagtatgcaagcagaaacccagagggctttagcagggtaaatgtagatggagaggcctagagaaaaacttttccttctttataattttcctgcttctattctgtttcacctaaatcccagagctgaaatca

SEQ ID NO: 698238 - DNA, 1295 bp, Homo sapiens
  misc_feature 149: n = A,T,C or G
tgttgctatcttcaaaaggaatctcagataatgttcttatgatttcctaaagcattttttgagaaaactttacatctcacacaagaaagtataaggagtctctgatattgtaaaggactattgtgttttataagccctgccaaccatanatgtagtttttatttttgtaggtaattttataacatttttatgaataaatcaaaatttctaaatgagaaaaccaaatatatggggccacctcaatattcagatccctgatggggaccaacctgagacatcctcatctttaactggtcaagcccttggctcactcccctggaaacctccctctctacccactcacactccaggtttgggtgcctgctggatcctagctgtgtactggtttcagcacagttggggtggaatctggagaagggtcactagccagggactccatttgcatttccttctcttccattggcgagtccccatatcattctgaaaagtactgtttttatgctttgtgttgtctacctcacgacttccatgaatatgccattcttatggaaaattacacttctgactcattccgttaaatgagacataagtgtaaaattcacctcgagttactctggtgcgccggattcaatgcagctttaaatggaaccaaactactgtcatgtatgagtcttgcagggaattatttctggcttcaagagaatagctcatgttggatatgaaggtaaatacaggtgtactgcagagctgactacacggagtgttaactatttattccttacaattgttcagagagagcaaatgtggatgatcaagttaaacaccaaattgtaatatatgttgctttcttttttccttcaggcttagggaaatgtgtgtagagcttctgcctccctgtcctcccctctccaccttcctttttataaatttagccataagatttcactcaagttcaaattggcctcagaagtttatataattatatcaatggatatacaactgtatagcaacacttttaccttcttcaggtctcatgaacagatactaaaagaaagaggaagtggaagagacattatctctcaytgtataattaatgcatgaagtatggcaagttacaaaacagagtttacttttcaaaagcataatgaaaactgttgggcaaaaagagcccagaatatttaaagaaattatgtaaaatgatcaatgttgattcacttctcagttcatttgtgaaccttgctctgtgaaacgataaatcatgggaaaagaaactttcaagaagaaattgctgatca

SEQ ID NO: 698239 - DNA, 582 bp, Homo sapiens
ccgtccaccgacgagcgcctcagctacacgcagctgctcaggcggtgccgtcgtgacgacggcaccggccagctgctcctgccactgtcggacgcccgcaagctgaccttccgtggcctgcggaagcagatcaccatggaggagctggtgcgctcgcaggtcatggacgaggccacggcgctgcagctgcgggagggcctgacctccatcgaggaggtcaccaagaacttgcagaagttcctggaaggcaccagctgcatcgctggtgtcttcgtggacgccaccaaggaacggctctcggtgtaccaggccatgaagaarggcatcatccgccccggcacagcctttgagctcctggaggcgcaggcggccaccggttacgtcatcgaccccatcaagggactgaagctgacggtggaggaggctgtgcgtatgggcattgtgggccccgagttcaaggacaagctgctgtcggccgagcgcgccgtcactgggtacaaggacccctactctgggaagctcatctccctcttccaggccatgaagaagggcctgatcctgaaggaccatggcatccgcctg

SEQ ID NO: 698240 - DNA, 590 bp, Homo sapiens
tttttttttatgagacagagtctcttgctctgtccccaggctggagttcagtagtgcgatcttggctcactgcagcctcagcctcctgggctcaagtgattctcccacctcagcctcccaagcagctgggattacaggcacaggccaccatgcctggatgatttttcaattttttgtaaagatgggatctcactgttgcccaggctggtcttaaactcctgggctcaakctatcctcccgccttggcctcctaaaggctaggattacgtgtgccattctctcccagtgctgggattacaggatgagccaccttgcctggcgaaatgttaagatttcttaggagttattgcctcagtgcagtagctcttaataattaagggcttataccctgtggtggtcaagaatgtagtggttttcttttgtcttttgaaggtaagtttgtctcctatagaattttgttaatctgactttctgtgtgcacactgcagggaagattaatgatgcctacaaatgtttttgctcagagctgttctagttggatggttaagaggcactgctctgcagtcaagctctgagggatcacacttgca

SEQ ID NO: 698241 - DNA, 590 bp, Homo sapiens
tttttttttatgagacagagtctcttgctctgtccccaggctggagttcagtagtgcgatcttggctcactgcagcctcagcctcctgggctcaagtgattctcccacctcagcctcccaagcagctgggattacaggcacaggccaccatgcctggatgatttttcaattttttgtaaagatgggatctcactgttgcccaggctggtcttaaactcctgggctcaatcwatcctcccgccttggcctcctaaaggctaggattacgtgtgccattctctcccagtgctgggattacaggatgagccaccttgcctggcgaaatgttaagatttcttaggagttattgcctcagtgcagtagctcttaataattaagggcttataccctgtggtggtcaagaatgtagtggttttcttttgtcttttgaaggtaagtttgtctcctatagaattttgttaatctgactttctgtgtgcacactgcagggaagattaatgatgcctacaaatgtttttgctcagagctgttctagttggatggttaagaggcactgctctgcagtcaagctctgagggatcacacttgca

SEQ ID NO: 698242 - DNA, 1282 bp, Homo sapiens
atgaaaaacatggaagattcaaatattttgctgaaatgggtcagaatgggaggtatccacttagcctataggtgctttcaactctgactcagcaaattataggtattaactttctctgtggcctactcctcacaccctcctaacccattcttgctcaatattcttcttaaatctgcatctaggtttgctatcatattaccatccaaataataattgatttggatgtatttacataatgcaaagttctttaagtaactaataacatttacttagcattaattggtccctttctatgtatgaagcastgttctacttgctgatacctacaatatttttcatagactttaaaatacatcggcatacacagtgtgaaatcatttttgtgtgtgcttgttatttaggtcacaatataaaatacatactgctagaattctaataaaaacatactgcacaggaatggtgaggtagcatttaaatcgggaaagttcagcttgacagggtcctattaccagtgcatcctgttagactaacaacattcaacatcataagtaacacatcagtaacaagctcttaactgagacaaggttagaaatgtgtatttttattttataaataatctctgaaaaagacagccttcttaagcacaaatatcatttattatggtatgttcagtccttttcaattttttactttcaaacaatattctcaaatatatttagaaaaaggttttaaggtatagtatttcattaatgctcatcgtttggaaaaaaaacccaactggaatacaagcacatgaatttgtgtttatttttttaactgtggattatcatggtatttaatctacttattacaaacaatttttgaaaatagtaattgatataacttgagacttttcatcaaaatttgaagacatctaacaatatgcataatgaatttgagttggaaaaaatgtgtaatacaagtaaaaacaaaaatgcattttccattcctacctggagaaaaaaaagatgaaataacatacaggttgagcaccactaatcaaaatatctaaaaatccaaaatactccaaaatctcaaatgttttgagctgtgaaatgtcaccaaaagtgaaatatcccacacgtgacctcatatgagaagttacagtcaaaacatattctcagtgaacaaaagactctcccagccccttcagttgcaatatatctttctgtgtccacctagatgcccccgagcaagagcactcacaaagggtaataaaatggcatgtgtacacaaactttgc

SEQ ID NO: 698243 - DNA, 1282 bp, Homo sapiens
atgaaaaacatggaagattcaaatattttgctgaaatgggtcagaatgggaggtatccacttagcctataggtgctttcaactctgactcagcaaattataggtattaactttctctgtggcctactcctcacaccctcctaacccattcttgctcaatattcttcttaaatctgcatctaggtttgctatcatattaccatccaaataataattgatttggatgtatttacataatgcaaagttctttaagtaactaataacatttacttagcattaattggtccctttctatgtatgaagcagtgttctacttgctgatacctacaatatttttcatagactttaaaatacatcggcatacacagtgtgaaatcatttttgtgtgtgcttgttatttaggtcacaatataaaatacatactgctagaattctaataaaaacatactgcacaggaatggtgaggtagcatttaaatcgggaaagttcagcttgacagggtcctattaccagtgcatcctgttagwctaacaacattcaacatcataagtaacacatcagtaacaagctcttaactgagacaaggttagaaatgtgtatttttattttataaataatctctgaaaaagacagccttcttaagcacaaatatcatttattatggtatgttcagtccttttcaattttttactttcaaacaatattctcaaatatatttagaaaaaggttttaaggtatagtatttcattaatgctcatcgtttggaaaaaaaacccaactggaatacaagcacatgaatttgtgtttatttttttaactgtggattatcatggtatttaatctacttattacaaacaatttttgaaaatagtaattgatataacttgagacttttcatcaaaatttgaagacatctaacaatatgcataatgaatttgagttggaaaaaatgtgtaatacaagtaaaaacaaaaatgcattttccattcctacctggagaaaaaaaagatgaaataacatacaggttgagcaccactaatcaaaatatctaaaaatccaaaatactccaaaatctcaaatgttttgagctgtgaaatgtcaccaaaagtgaaatatcccacacgtgacctcatatgagaagttacagtcaaaacatattctcagtgaacaaaagactctcccagccccttcagttgcaatatatctttctgtgtccacctagatgcccccgagcaagagcactcacaaagggtaataaaatggcatgtgtacacaaactttgc

SEQ ID NO: 698244 - DNA, 651 bp, Homo sapiens
agccaagatcgcaccactgcactccagcctgggtaacaagagcgaaacttcgtctcaaaaaaaaaaaatctggcataacataatttatctaaaatctttaagtatttttacgaatgctatttgtgtgaaatacaacaaataaagtctgaaatagaggtagtcaatcctttatagaatagttttcagaaaataaagatttactacttttaagaacatctaggatcggctggcacggtggctcacgcctgtaatcccagcactttgggagaccgaggcaggtgggtcacctgaggtcagcagttcgagaccagcctggtcaacatggtgaaacaccatctctactaacaatataaaaattagccgggtgtggtgggaggtgcctgtaatccccagctactcaggaggctgaggcaggagaatcccttgaaccwgggaggtggaggttgcagtgagccaagatcacaccattgcactccagctgggcgacaagagcgaaactccatcaaaaaaaaaaagaacatccaggatttaggagtcacattaaacacttactggctagccgaaaacaattatgtatccatcttgcttttcacacttaaatcatttagaagtcattcagtatcaccatatctagatcaatgttgtttttga

SEQ ID NO: 698245 - DNA, 639 bp, Homo sapiens
ggggccaggaggccagggttcaatcctggctgtcactcagttgcctgtgacttggtatgaactgtttaaccttgatgagcctcagttgctcatctgtaaaactgggagaaatcaaactctatgaccttaataaactctgtccaactctaacattgtataatcagttttaagaggtttttgcctttagcagctgtttataggatttattctaaagagtagggaagaaatattcattgtataagagcttgtctgatgaagaagattgcatgaaaaagctacacttttttaataagtatatctgatgtaaacaggaaaaatggrtgcttgccagatatgtcatctatagcaacttgttttgagggggtctctgaatgctgacatgaaaatgactaggatcatgggttgaacgtgagtttgctcaagagaaggttctcttggggctttggtttacttcctcccagctgctccagggaacactcaggatatttccaaatggctgctcatttaagccattcccgttatggttctccttgtccaaattggcttccatggtacagtcccagtgttgactggttctgctaatttgattctttttttttttaatgtgctgatatgtagttttaggactgctgcattatt

SEQ ID NO: 698246 - DNA, 1726 bp, Homo sapiens
ttgttgagaggatagaaagggcatcattttttcttcttcttcctcttcttccataaagggtactgaattttttttgaagcttgagggtagaagagccgaagtacaattacagtagacaggtgggaaaaaaaaagttgcattctttaaaggaacataagcttttcattgtagcttgaaaacacttgaaagaccaaggacccccaagggtgcccaggcaaggtcactcttgactctacgcagagaagggctgttgctgggagcaaaggatacctttgcccagttctcaccaggggacttgtagtctcgcaagggagggatgttttctgatttgtctacccaaaggccgccctttttctaaactcatgggggagtggctgctgaagggggcagttacagcacctcacgaggtgctgccagcctgctcattggcagaggcttaccttatgaaacactgggcctcagacagtgatgctcaggccccgccttaggataacaatataagtatagttcagattgatggggcagaatttaaataattaaatgtcgttattttaaatttcttttaaacatgatcatttcacatttagttgacattgcgccatttgcccgcagactgtgcattttgcagtgtccatttggccttctaaaatccctgtgaattatatttaaaaatcggaacgtaggactcattcatcatatttaatagggttagggtttatgatgttgcaggttaataaatagccataatagccgctcggcgttttctggagtcagaacaccagaaatagtcccttggctctctttcctttccttgtgaatctttcaaaattcttacattactactcctgcttgtgtgtgtttaataatttaatttaatgccttcctttggaaacattacctcgctgctcacccactcggctgttttgccttctcagcagagtaactgagtttaagacagccacgtgacaggcacagctatattagaaccagcatagtgagaagggatgcagtgcctctcttttctaattgggtagagcaacaattttatatgctttcacattatgtttgttcccaaaaaaaaagaggcaaaattgggagctgaacgtgatcatcattattattttatatttttatacataacaagatgcgctcatacttattgtctcacttaattgtacagcagtccttgaagcaggtgctattgattctgtttgatgagctgaccgtgtctccgataggtcaactggattgtccaggttcacacagcatgtgaaaggccgaatgtgatttctacttcttgaaaccacctttcagcytttttaggagaaaacataatgacataaagagtttcatggacttgaaagtagaggcactgctgaccgctgaagtctgggcagccacaggtgcagggactgggaccggtgtggttctagtgatgccacctgatcatgaagttgtgctgaatcctcagcagactggcttctccctcgtagtaggatgagggagaggaatcaggataacagcctgtccctgtggatggtttattctggttttgttcaccagtcctgctgcctccccgtttgttctcttgcgagctcaggttagagttgaatttctccctacaaccagaatgccagggctggtcctgtaggccctgatgggccagctctgagagtgggctcaatccagtacccaattccccagcattttgctaggggtgcccttc

SEQ ID NO: 698247 - DNA, 606 bp, Homo sapiens
tgaaacttgaaaggctctgttcttcatcttctacttattaatgggcaaaatgtcttcgtaatttatggcatgtgtcccaaaggtgcaaaggtggcaaggtggccttttttttttttttttttttttttttaactaatactaggtcctgcttccaagcctcctatttcttcacttccctgtgtaccagggtttacctgctgcttaacccacccaccccactatacgtgtctgtagtagacccaccaacattcacatggccacttctgctgaaagtacctcccaggatagaatagggtcacagacccccaattgtataagcctttggcttcttgatgtctctgcgagttacggttatgggagttggtctttggtgagattagtggtgagatcagtgggtggcacctagggtgatttattgaatagtatggggtgaggctgaagagcaaacatccacgtaagtgttgtctgttttggagtttgaaaagttgtcaccctaataaacaaactrcttaattgaacagcccttgcttggcgtgatcaaagaaaagacctagactttgctatcagtaggctctgggttccaggcctggcttgtcacttacgatg

SEQ ID NO: 698248 - DNA, 721 bp, Homo sapiens
ggctcctgggggaacactgccgccggcttatgccttctgccccagagggcagacggttgctgggatgtttgtgaggagttggaggcatgagaatcctttccctcctgcagcttgctgcgtccatcagtatttacgaagttgctgcctactatggtcaagacatttctgcttcatttgggcagggaagtaaaggacacagccctactctaccatcttttcctctacttttaaggaggttcgaactgtaaaggtgccagggtcatggctgggaacatcagtgttcttaggaaactggaatgttgtggcaccatgggagcagacacaactggaaaagaaacagcagccaagtgataggaaattttcctccagaagtcatcctgtgaccgatatattcacttcagaaatattcgcctcaggatggaacatactcatgccacacaggcagaacacttctgctacctaattcattcatttattcatctyacaaatagttattgattgcctctgctgtgcccggcactcttctgtgtcctgggggtgcagaaatgaacaaagcagaaaaaactcccctgctcttgtggaatttaaattctagcacagagaaaaaaaaagtatcaaacactcatcacaaacaggctgagatttctttcataacgttttattcctatatattgcaacatcccccaaggaggccctcgctcctggttcacttctggatgcc

SEQ ID NO: 698249 - DNA, 721 bp, Homo sapiens
ggctcctgggggaacactgccgccggcttatgccttctgccccagagggcagacggttgctgggatgtttgtgaggagttggaggcatgagaatcctttccctcctgcagcttgctgcgtccatcagtatttacgaagttgctgcctactatggtcaagacatttctgcttcatttgggcagggaagtaaaggacacagccctactctaccatcttttcctctacttttaaggaggttcgaactgtaaaggtgccagggtcatggctgggaacatcagtgttcttaggaaactggaatgttgtggcaccatgggagcagacacaactggaaaagaaacagcagccaagtgataggaaattttcctccagaagtcatcctgtgaccgatatattcacttcagaaatattcgcctcaggatggaacatactcatgccacacaggcagaacacttctgctacctaattcattcatttattcatctcacaaatagttattgattgcctctgctgtgcccggcactcttctgtgtcctgggggtgcagaaatgaacaaagcagaaaaaactcccctgctcttgtggaayttaaattctagcacagagaaaaaaaaagtatcaaacactcatcacaaacaggctgagatttctttcataacgttttattcctatatattgcaacatcccccaaggaggccctcgctcctggttcacttctggatgcc

SEQ ID NO: 698250 - DNA, 994 bp, Homo sapiens
atcacaatggagttggctcttttctttagtggcagaacttgaactagaacaagaactaaatctaacatcatatgacagctaacacggttctgttagctgcctgtgctgccttagaactgtgggtattcccaagtcagcagttgctttctgtatgaggctgtgtttggggaaaaaaaaaaaaatcactggaagcagaagaaagctgtctcagggcactsttgatgtcaaataggcttccctaactctaggaagaatctgattccatgatatggctccttgtatatcagaatggaaaaaagccaaagacgttggccaggacttggtctgttcaggatgtttctcatcgggagaggtgagaacagtggatactttaagggatagagtgagaagtgaaactggcatacgttttctcctttaggtgtacaagggggctttcaaggatttaaggaaagcagtttagtcagatttgtgttttgtaaggttaacctggctgtgatggcaagtctggatttgaggaaatgggtgtgtgaccagaagtagctaggtctcttaagactgtgttgcaacattctgggacagaaatattgagaatttgactgaggtcagggcagaggggaaggagaaaaagggccgaaagtctgtcagatattcattccaacctggtagttgttggcagattgtatgtaagctgggaaaggaaggttccactgacggagtccattaggtttcaggttccataccccgacactctgattgtctctgatgcccttcgctgaaatgggctgcacagagaagacaggaagccatgtactagaagatgggggttttgaaaatttgggatatgttgactctgagtccaagtggaagtttccaggaggcggttgaatatatcaggctggagcgtaggacagatatttaggttatagattgacttgttaatattaggaatagtattgtacagaactatgtgatttacagagcagctctatcttca

SEQ ID NO: 698251 - DNA, 994 bp, Homo sapiens
atcacaatggagttggctcttttctttagtggcagaacttgaactagaacaagaactaaatctaacatcatatgacagctaacacggttctgttagctgcctgtgctgccttagaactgtgggtattcccaagtcagcagttgctttctgtatgaggctgtgtttggggaaaaaaaaaaaaatcactggaagcagaagaaagctgtctcagggcactgttgatgtcaaataggcttccctaactctaggaagaatcygattccatgatatggctccttgtatatcagaatggaaaaaagccaaagacgttggccaggacttggtctgttcaggatgtttctcatcgggagaggtgagaacagtggatactttaagggatagagtgagaagtgaaactggcatacgttttctcctttaggtgtacaagggggctttcaaggatttaaggaaagcagtttagtcagatttgtgttttgtaaggttaacctggctgtgatggcaagtctggatttgaggaaatgggtgtgtgaccagaagtagctaggtctcttaagactgtgttgcaacattctgggacagaaatattgagaatttgactgaggtcagggcagaggggaaggagaaaaagggccgaaagtctgtcagatattcattccaacctggtagttgttggcagattgtatgtaagctgggaaaggaaggttccactgacggagtccattaggtttcaggttccataccccgacactctgattgtctctgatgcccttcgctgaaatgggctgcacagagaagacaggaagccatgtactagaagatgggggttttgaaaatttgggatatgttgactctgagtccaagtggaagtttccaggaggcggttgaatatatcaggctggagcgtaggacagatatttaggttatagattgacttgttaatattaggaatagtattgtacagaactatgtgatttacagagcagctctatcttca

SEQ ID NO: 698252 - DNA, 616 bp, Homo sapiens
gctttcccaaacagatagtgctgctcctttcctcccatgttcaactggggtgggtcacatggcagggagagagtatttcctccaagcttttcccccaggtcactccatttcaatgcttctttctgttttctcctgccattcaccattatctagttttttaaaaattattattatyattgtattttaccagaaatctctccaagataatctggctgtatttaagtctatgtgtaaatgtgaatcaccctacttccctcctaaaaatttctcttatacatcttgaagaccactcacttggctgctaccagggaacttttcaatcttacttccttttcccagtgtccacagaagtctcctggggtttcagttttccccagtctgaaatcactgctttcaggctgtcaaacttcagtgaatacacttcctccactggatatcttatgaatcttgtttcaactgtggggtcatgctcatctcagcaggtgcagtacccatgtttggattttaacagtgtagggtgaatgaggcagattttcacatgtcagaaatcatgcaggatgtttgcattgtagaaaaatacaacctaagactgatgagttcatggaacagggtggtg

SEQ ID NO: 698253 - DNA, 616 bp, Homo sapiens
gctttcccaaacagatagtgctgctcctttcctcccatgttcaactggggtgggtcacatggcagggagagagtatttcctccaagcttttcccccaggtcactccatttcaatgcttctttctgttttctcctgccattcaccattatctagttttttaaaaattattattatcattgtattttaccagaaatctctccaagataatctggctgtatttaagtctatgtgtaaatgtgaatcaccctacttccctcctaaaaatttctcttatacatcttgaagaccactcacttggctgctaccagggaacttttcartcttacttccttttcccagtgtccacagaagtctcctggggtttcagttttccccagtctgaaatcactgctttcaggctgtcaaacttcagtgaatacacttcctccactggatatcttatgaatcttgtttcaactgtggggtcatgctcatctcagcaggtgcagtacccatgtttggattttaacagtgtagggtgaatgaggcagattttcacatgtcagaaatcatgcaggatgtttgcattgtagaaaaatacaacctaagactgatgagttcatggaacagggtggtg

SEQ ID NO: 698254 - DNA, 616 bp, Homo sapiens
gctttcccaaacagatagtgctgctcctttcctcccatgttcaactggggtgggtcacatggcagggagagagtatttcctccaagcttttcccccaggtcactccatttcaatgcttctttctgttttctcctgccattcaccattatctagttttttaaaaattattattatcattgtattttaccagaaatctctccaagataatctggctgtatttaagtctatgtgtaaatgtgaatcaccctacttccctcctaaaaatttctcttatacatcttgaagaccactcacttggctgctaccagggaacttttcaatcttacttccttttcccagtgtccacagaagtctcctggggtttcagttttccccagtctgaaatcactgctttcaggctgtcaaacttcagtgaatacmcttcctccactggatatcttatgaatcttgtttcaactgtggggtcatgctcatctcagcaggtgcagtacccatgtttggattttaacagtgtagggtgaatgaggcagattttcacatgtcagaaatcatgcaggatgtttgcattgtagaaaaatacaacctaagactgatgagttcatggaacagggtggtg

SEQ ID NO: 698255 - DNA, 659 bp, Homo sapiens
ccacttttttttaaatgaaattgctttttaattcagttaagagaataaaagagatgaaatatgcagttatattttcttttatacttacctacatarttacctttaccagcactttttttgtgtgtgtgcatagattcaaacggtattgtgtggtgtcacttgctttctgcctgaagaacttcctttattatttcttgtaaagcaatcttctactaacaaatttttccctgcttttgtttatcttgaatgtctttatttagcctttatttaaaactagcctattttttccagagatttaaaagctcactttatatttgctttctttaaccttttattttaggtttgggggtacatgtgcaggtttgttacataggtaaactcgtataacaggggtttgttgtacacattatttcatcacccaggttaaggccagtacccaatagttatcttttctgctcctctccctccctccactctccaccctcaagtagaccctagtgtctagtgtctgttgttcccttctttgtgttcatgagttctcatcatttagctcccacttataagtaagaacatacgatatttggttttccgttcctggttcctccagcatggatggagctggaggctattatccttagcaaactaacccaggaacagaa

SEQ ID NO: 698256 - DNA, 659 bp, Homo sapiens
ccacttttttttaaatgaaattgctttttaattcagttaagagaataaaagagatgaaatatgcagttatattttcttttatacttacctacataattacctttaccagcactttttttgtgtgtgtgcatagattcaaacggtattgtgtggtgtcacttgctttctgcctgaagaacttcctttattatttcttgtaaagcaatcttctactaacaaatttttccctgcttttgtttatcttgaatgtctttatttagcctttatttaaaactagcctatttyttccagagatttaaaagctcactttatatttgctttctttaaccttttattttaggtttgggggtacatgtgcaggtttgttacataggtaaactcgtataacaggggtttgttgtacacattatttcatcacccaggttaaggccagtacccaatagttatcttttctgctcctctccctccctccactctccaccctcaagtagaccctagtgtctagtgtctgttgttcccttctttgtgttcatgagttctcatcatttagctcccacttataagtaagaacatacgatatttggttttccgttcctggttcctccagcatggatggagctggaggctattatccttagcaaactaacccaggaacagaa

SEQ ID NO: 698257 - DNA, 659 bp, Homo sapiens
ccacttttttttaaatgaaattgctttttaattcagttaagagaataaaagagatgaaatatgcagttatattttcttttatacttacctacataattacctttaccagcactttttttgtgtgtgtgcatagattcaaacggtattgtgtggtgtcacttgctttctgcctgaagaacttcctttattatttcttgtaaagcaatcttctactaacaaatttttccctgcttttgtttatcttgaatgtctttatttagcctttatttaaaactagcctattttttccagagatttaaaagctcactttatatttgctttctttaaccttttattttaggtttgggggtacatgtgcaggtttgttacataggtaaactcgtataacaggggtttgttgtacacattatttcatcacccaggttaaggccagtacccaatagttatcttttctgctcctctccctccctccactctccaccctcaagtagaccctagtgtctagtgtctgttkttcccttctttgtgttcatgagttctcatcatttagctcccacttataagtaagaacatacgatatttggttttccgttcctggttcctccagcatggatggagctggaggctattatccttagcaaactaacccaggaacagaa

SEQ ID NO: 698258 - DNA, 607 bp, Homo sapiens
tgaaaggggattctgagaaatgcagttgtctgcttaagcaagttgaccagcataatccagcacaacttctaaatctcagaagatagcaaatgtgggcagaaagaaaagtacagatgctccacgggttcactggtgatctttatggctgcaactgacctaggatttgggagatgcttggagagggacagaggggcacacaggaactttcctctcaaatatgaggatatcaatctagatctacgaggagtccttttggagataaaaagaaatttataggagatgatgaacaaaaggcccaatttctatattagactgtctccctgaatgagggtgaataccaagaggagactgagccaaggcctcagccctctgaattctaaaatgtagagaayttcattctgatctattttatacaaatggtgctggtctctcagacagtaccttttccgatgaaagaaagagagaaacgaagtagaagattcgtaacccagctcagtaaagaggcttacctttgctctttgctcaccatcattcccccgctcaaagtctcagctacctgcctctgtgcaatagctacacagtgctcctcaagtatctgcctcctgaa

SEQ ID NO: 698259 - DNA, 643 bp, Homo sapiens
acggctgtgcgcctgctgctgcctggggagctggctaagcatgctgtgtccgagggcactaaggcagttaccaagtacactagctctaaataagtgcttatgtaagcacttccaaacccaaaggctcttttcagagccacctactttgtcacaaggagagctataaccacaatttcttaaggtggtgctgctgctattctgtttcagttctagaggatcaactggaatgttagcgaagacaagttttagagccaaggttaacttggacggggccgtgcgcggtgcctcttgcctttaatcccggcaatttgggaggccgaggcgggcggatcacgaggtcaggaratggagaccatcctgcttaacacgatgaaaccccgtctctactaaaaatacaaaataattagctgggcgtgatggtgggcgcctgtagtcccagctactcgggaggctgaggcaggagaatggcgtgaacgcgggaggcggagcttgcagtgagccgagatcgcgccatggcactccagcctgggtgacagagcgagactccgtctcaaaaaaaaaaaaaaaaaaaaattaaaaaaatatgaagttttgaagcagaaattattttgtcgtatgttctttcataaattttttgcctgcc

SEQ ID NO: 698260 - DNA, 599 bp, Homo sapiens
tacatacttttctaatttgtctggagcaggccgggcatctgtattatctggttatttaaatatctggttatttaaaagctctccattaaattcacatacacgaaaataaaaattaaaaaaaattttaaaaaaaagaaacaaaagctctctaatgaccaagtcctacacgatagtgaataaatttttttgtgtggtccctaaaattgagttcatgccttttctgaagtaatagacgcccagagaagggatcgacttacccatcatgccacagagattaattggccccagaattctttagcagaccgtgtatatgaacgtcctttgcaatcatataaattaactgggaaaacctcatttagtatgttacatgcctagygttttgtgcctgaacaccttacaagaaccagggactattgccccaatattatatttcaggaaaggaaggcccagacaaatggtgtcactggtccactttcacccagttggtaaatgaaaccagaaattatagctgtaccacagaaaggtgaaaacgtttcttttataatttcacatacaatctttaatggacccagtgtccaacacattaaagcaagtgctca

SEQ ID NO: 698261 - DNA, 659 bp, Homo sapiens
ttttttttttttttttttacgcagagtcctactctgtcacccaggctggagtgcagcggtgtgaacatggctcactgcagcctcaacctactgagctcaagcaatccttctgcctcaccattctgtatagctaggactacaggtgtgtgccacsatgcctgactaattttttaaatattttttttagagatggggctcactttgttgcccaggccagtctcgagctcctgggctcaagtgatcctcccaccttggtctcccaaagtgctggggttacaggcatgagcctctgtggctagccaagactttttattttttagcctaaatgtgtataaaagttggcttgtggttacaacttatcaggattgatgatctctctctctctctctctctctctctgtctctccccacctctctcacatcccttgctctgctgagaagcagagcaaacattctagcagtttccagagagtaggatgggattacttctagtttacttttatcatcctttgggatcgcagtattactgggagaacacaagtatctcttattagacataccacctttgtagaatctggactttcattttagactttatttgttttctactataagcaatttaagttacagatctctctacacactgtttaagttgcatc

SEQ ID NO: 698262 - DNA, 659 bp, Homo sapiens
ttttttttttttttttttacgcagagtcctactctgtcacccaggctggagtgcagcggtgtgaacatggctcactgcagcctcaacctactgagctcaagcaatccttctgcctcaccattctgtatagctaggactacaggtgtgtgccaccatgcctgactaattttttaaatattttttttagagatggggctcactttgttgcccaggccrgtctcgagctcctgggctcaagtgatcctcccaccttggtctcccaaagtgctggggttacaggcatgagcctctgtggctagccaagactttttattttttagcctaaatgtgtataaaagttggcttgtggttacaacttatcaggattgatgatctctctctctctctctctctctctctgtctctccccacctctctcacatcccttgctctgctgagaagcagagcaaacattctagcagtttccagagagtaggatgggattacttctagtttacttttatcatcctttgggatcgcagtattactgggagaacacaagtatctcttattagacataccacctttgtagaatctggactttcattttagactttatttgttttctactataagcaatttaagttacagatctctctacacactgtttaagttgcatc

SEQ ID NO: 698263 - DNA, 777 bp, Homo sapiens
tatggcaatattgcatgcacattcaagagaccacccaaaacatatttaacaacaatgcccattcccaccccctcatggataatcacgtaggactcccataacgggagtttcttcagtgtcaattggtgctgaagtagccgaccctgactctgctatcagcgtgtactttcaccttgcaataaactcctttgcctacttttactttggactggctttcaaattcttttgtgcagggaattcaagaatctgaaccagccyactgacaacagaggtttctcagaaacctaaaaatagatctaccagatgaggctgaaaatctgctactggctatttatccaaagggaaggaaatcagtatacaaagagacacctacatccccatgtttattgcgtcactcttcacaagagctgatatatagagtcaaccctaaatgttcattaacagacaaatggatagaaaatgtggcatatatacacaatgaaatactatttggccatgagaagaatgcaatcttgtcatttgtggcaacgtagatgaaactggagaacattatgttaagtaagataagctaggattggaaagataaatactacatgttatcactcatatgtgaaagtagagaaaaatttttagctcatggatttagagaacagaactgtgggtaccggaagctgggaagggtagcaaggaggggaggatagggagaggttggttaatggtgacaaaattacagctagattgtagaaatgagttccggtgttctgcaccattgtaggg

SEQ ID NO: 698264 - DNA, 2131 bp, Homo sapiens
agacatcctctgcagtcttttgacaattctataagcatcttctgactccgcaattagacagctaagagatctgtgttacttccctcacatatataaataattttaaataaaaatcatggcgtgaataatttctttcctctaccgatttgaagctatccatttggaagaccactctgaagagatgaaataagtcttctgccaaagattacttattaatttacaaggaaaaggggaagttttgttcctctccgtgaatttgattgaaaatcgagggctttctcgaatagttttggcatccagggtcatttttcattaaaaagagaaaagtcatgtcaaatatgaatttccgcagattattcagcactagaccctgggagattctgtaaagaggggttttgttatactcaacttttccgggtaaaacaaacacaaatactcctcctccaaggggcgggggcggtgcctaggtgatgcaccaatcacagcgcgccctaccctatataaggccccgaggccgcccgggtgtttcatgcttttcgctggttattacatcttgcgtttctctgttgttatgtctgaaaccgtgcctgcagcttctgccagtgctggtgtagccgctatggagaaacttccaaccaagaagcgagggaggaagccggctggcttgataagtgcaagtcgcaaagtgccgaacctctctgtgtccaagttgatcaccgaggccytttcagtgtcacaggaacgagtaggtatgtctttggttgcgctcaagaaggcattggccgctgctggctacgacgtagagaagaataacagccgcatcaaactgtccctcaagagcttagtgaacaagggaatcctggtgcaaaccaggggtactggtgcttccggttcctttaagcttagtaagaaggtgattcctaaatctaccagaagcaaggctaaaaagtcagtttctgccaagaccaagaagctggttttatccagggactccaagtcaccaaagactgctaaaaccaataagagagccaagaagccgagagcgacaactcctaaaactgttaggagcgggagaaaggctaaaggagccaagggtaagcaacagcagaagagcccagtgaaggcaagggcttcgaagtcaaaattgacccaacatcatgaagttaatgttagaaaggccacatctaagaagtaaagagctttccgggaggccaatttggaaagaacccaaaggctcttttaagagccacccacattattttaagatggcgtaacactggaaacaagtttctgtgacagttatctataggtttaagttgtgatgcagctgagttgaaaaggcttgagattggagaattaattcaggccaggcttcaagaccatcctgggcaacatagccagactaccatctataccaggggtcctcatttccccggccaccgaccggtaaccggtccctgtccatggcacgttatgaattgagccgcacagctgaggggtgagcgaacattaaccaactgagctccaccgcctgtcaggttagctgcagcattagatagattctcataagctcaaactgtattgtgaatggcacatgcaagggatctaggtttcaggctccttgtgacaatctaatgcctgatgatctgaggttggagcagttttagtccggaaatcattgctcccagcccctgcaccccctggtccgtggtataattgtcttacacaaaacggtctcttgtgtcaaaaaggttggagactactggttttacaaaaaagtaaattagtcaagcatggttggcacgctcccttagtccctgcacccaggcgtttaaggatacagtgagctatgatggtgctacctcactccagcctgggtgacagcgagtcagacgttgtctcaaaacttaaaaaaaaaaaaagttaaaacagaaaaagggcttcttgtcagagactgccgtatatctagaggtccaggaactaaaaagtctgatgtccaatcctgaaaagctcgatggtgcactagaggaggcttttacatgtaagagcatctaagttctggaaatgccagtgtcagggaagggaagtggagagcaatttggcatccaaacataacttgctgatacttttt

SEQ ID NO: 698265 - DNA, 2131 bp, Homo sapiens
agacatcctctgcagtcttttgacaattctataagcatcttctgactccgcaattagacagctaagagatctgtgttacttccctcacatatataaataattttaaataaaaatcatggcgtgaataatttctttcctctaccgatttgaagctatccatttggaagaccactctgaagagatgaaataagtcttctgccaaagattacttattaatttacaaggaaaaggggaagttttgttcctctccgtgaatttgattgaaaatcgagggctttctcgaatagttttggcatccagggtcatttttcattaaaaagagaaaagtcatgtcaaatatgaatttccgcagattattcagcactagaccctgggagattctgtaaagaggggttttgttatactcaacttttccgggtaaaacaaacacaaatactcctcctccaaggggcgggggcggtgcctaggtgatgcaccaatcacagcgcgccctaccctatataaggccccgaggccgcccgggtgtttcatgcttttcgctggttattacatcttgcgtttctctgttgttatgtctgaaaccgtgcctgcagcttctgccagtgctggtgtagccgctatggagaaacttccaaccaagaagcgagggaggaagccggctggcttgataagtgcaagtcgcaaagtgccgaacctctctgtgtccaagttgatcaccgaggccctttcagtgtcacaggaacgagtaggtatgtctttggttgcgctcaagaaggcattggccgctgctggctacgacgtagagaagaataacagccgcatcaaactgtccctcaagagcttagtgaacaagggaatcctggtgcaaaccaggggtactggtgcttccggttcctttaagcttagtaagaaggtgattcctaaatctaccagaagcaaggctaaaaagtcagtttctgccaagaccaagaagctggttttatccagggactccaagtcaccaaagactgctaaaaccaataagagagccaagaagccgagagcgacaactcctaaaactgttaggagcgggagaaaggctaaaggagccaagggtaagcaacagcagaagagcccagtgaaggcaagggcttcgaagtcaaaattgacccaacatcatgaagttaatgttagaaaggccacatctaagaagtaaagagctttccgggaggccaatttggaaagaacccaaaggctcttttaagagccacccacattattttaagatggcgtaacactggaaacaagtttctgtgacagttatctataggtttaagttgtgatgcagctgagttgaaaaggcttgagattggagaattaattcaggccaggcttcaagaccatcctgggcaacatagccagactaccatctataccaggggtcctcattyccccggccaccgaccggtaaccggtccctgtccatggcacgttatgaattgagccgcacagctgaggggtgagcgaacattaaccaactgagctccaccgcctgtcaggttagctgcagcattagatagattctcataagctcaaactgtattgtgaatggcacatgcaagggatctaggtttcaggctccttgtgacaatctaatgcctgatgatctgaggttggagcagttttagtccggaaatcattgctcccagcccctgcaccccctggtccgtggtataattgtcttacacaaaacggtctcttgtgtcaaaaaggttggagactactggttttacaaaaaagtaaattagtcaagcatggttggcacgctcccttagtccctgcacccaggcgtttaaggatacagtgagctatgatggtgctacctcactccagcctgggtgacagcgagtcagacgttgtctcaaaacttaaaaaaaaaaaaagttaaaacagaaaaagggcttcttgtcagagactgccgtatatctagaggtccaggaactaaaaagtctgatgtccaatcctgaaaagctcgatggtgcactagaggaggcttttacatgtaagagcatctaagttctggaaatgccagtgtcagggaagggaagtggagagcaatttggcatccaaacataacttgctgatacttttt

SEQ ID NO: 698266 - DNA, 2131 bp, Homo sapiens
agacatcctctgcagtcttttgacaattctataagcatcttctgactccgcaattagacagctaagagatctgtgttacttccctcacatatataaataattttaaataaaaatcatggcgtgaataatttctttcctctaccgatttgaagctatccatttggaagaccactctgaagagatgaaataagtcttctgccaaagattacttattaatttacaaggaaaaggggaagttttgttcctctccgtgaatttgattgaaaatcgagggctttctcgaatagttttggcatccagggtcatttttcattaaaaagagaaaagtcatgtcaaatatgaatttccgcagattattcagcactagaccctgggagattctgtaaagaggggttttgttatactcaacttttccgggtaaaacaaacacaaatactcctcctccaaggggcgggggcggtgcctaggtgatgcaccaatcacagcgcgccctaccctatataaggccccgaggccgcccgggtgtttcatgcttttcgctggttattacatcttgcgtttctctgttgttatgtctgaaaccgtgcctgcagcttctgccagtgctggtgtagccgctatggagaaacttccaaccaagaagcgagggaggaagccggctggcttgataagtgcaagtcgcaaagtgccgaacctctctgtgtccaagttgatcaccgaggccctttcagtgtcacaggaacgagtaggtatgtctttggttgcgctcaagaaggcattggccgctgctggctacgacgtagagaagaataacagccgcatcaaactgtccctcaagagcttagtgaacaagggaatcctggtgcaaaccaggggtactggtgcttccggttcctttaagcttagtaagaaggtgattcctaaatctaccagaagcaaggctaaaaagtcagtttctgccaagaccaagaagctggttttatccagggactccaagtcaccaaagactgctaaaaccaataagagagccaagaagccgagagcgacaactcctaaaactgttaggagcgggagaaaggctaaaggagccaagggtaagcaacagcagaagagcccagtgaaggcaagggcttcgaagtcaaaattgacccaacatcatgaagttaatgttagaaaggccacatctaagaagtaaagagctttccgggaggccaatttggaaagaacccaaaggctcttttaagagccacccacattattttaagatggcgtaacactggaaacaagtttctgtgacagttatctataggtttaagttgtgatgcagctgagttgaaaaggcttgagattggagaattaattcaggccaggcttcaagaccatcctgggcaacatagccagactaccatctataccaggggtcctcatttccccggccaccgaccggtaaccggtccctgtccatggcacgttatgaattgagccgcacagctgaggggtgagcgaacattaaccaactgagctccaccgcctgtcaggttagctgcagcattagatagatwctcataagctcaaactgtattgtgaatggcacatgcaagggatctaggtttcaggctccttgtgacaatctaatgcctgatgatctgaggttggagcagttttagtccggaaatcattgctcccagcccctgcaccccctggtccgtggtataattgtcttacacaaaacggtctcttgtgtcaaaaaggttggagactactggttttacaaaaaagtaaattagtcaagcatggttggcacgctcccttagtccctgcacccaggcgtttaaggatacagtgagctatgatggtgctacctcactccagcctgggtgacagcgagtcagacgttgtctcaaaacttaaaaaaaaaaaaagttaaaacagaaaaagggcttcttgtcagagactgccgtatatctagaggtccaggaactaaaaagtctgatgtccaatcctgaaaagctcgatggtgcactagaggaggcttttacatgtaagagcatctaagttctggaaatgccagtgtcagggaagggaagtggagagcaatttggcatccaaacataacttgctgatacttttt

SEQ ID NO: 698267 - DNA, 1078 bp, Homo sapiens
tagggttgaatgtttacagctcctgaagccacagtgggtgtgtgttacagggtgctcttttagttttgccatttataggcagctggtgttaaccaactcaattagaccgtctaccttgtcccaaggacagaagaaggctttctgtatcccaggttcttgccttggtgtaccggaataaatcagaccacacctgggcttagagaaagagtgcaaggttttattaagtggaggtagctctcagcagttgggcaaagccaaaagtggatggagtgggaaagttttcccttggagtcagccactcagtggcccaggctctcctccaaccaccccagtcaaattccgcctcattttgccaggcaaacgtttgttgtgtgctcttctgccagtgtgctcccctggacgtccagctattcgtgtcttgtggcaggccaggggaggtcttgggaaatgcaacatttgggcaggaaaacaaaaatgcctgtcctcaccgtggtccctgggcacaggcctgggggtggagccctagccggggaccacgcccttcccttccccacttccatatcatttaaagggaccatgcccttcccttcccagcactttccccctcctgtatcaggacctgtgaatgtggccttatttggaaatagggtctttgcacttcatcagttaagataagagtgggctctaacccaacataaagggtgtccttataaaaaggagaaatgtcatacacagagactgacacctatagagagaaaatgtggtgagtagacacagggagaatcaccattcaagtcaagcaatgagtctggggataccagaagctgggagagaaacctggaacagattatccctcattgccttcagaaggaatcaaacctgatgatactttgatttcagacttccagcttccaggactgtgtgacgataaatatctgttgttaagccaacragtttgaggtactttgttactgcagccccagaaaactaatacagtaggtactatggactgaattgactccccgtcgcaaaattcatatgttgaaaccctaacccccagtgtgatggtacttggagc

SEQ ID NO: 698268 - DNA, 611 bp, Homo sapiens
cctcaagtggtgcagaaaccagccaggtgtatatatagaggctgaaggaggtggtgtctgacttgcatagggctcaggggattggtgggatttggtttttgatttgattcttagcttggtcattgttggtgtatagtagtaccactggtttgtgtacattgattttgtaatctgagactttactgaattcatgatcaaatcaagaagtcttttggaggagtctagcgttttctagaccctagatgtatagtagtagttgatgtakagtagtgccactggtttgtgaacattgattttgtaacctgagactttactgaattcattatcaaatcaaggagtcttttggaggaatctaggattttctaggtatacaagcataccattggcaaatggtttcagttcctcttttccaatttggatgccctttgtttccttcttttgcctgattgcactggttaggactacctaaatgccactttttattaagacaaacaatgcttcagtaaacatttctattcacacagctttgcgcactaatgtgactttttgaaagacaaaatccttaaaatattatttggcaagatcacaatttgaaatgtacgtttcttttg

SEQ ID NO: 698269 - DNA, 643 bp, Homo sapiens
atctcaacctagcaactaaatgaaaatatttagaatcatcagaatctgaacagactaaaattatcagcgataagcagaatcaagcagggtataagttttatctcaattatttgaaattgactgagttttcttaagtgtaaagctgaaatttgctaaccatgtttttgatgaaycacagtgcagcattgtgtgggttttagattgaatgactctctgctataattatcatgactttgaaatttttcatgagaataaatgaggaatggaggcaatttgtgggtttatccaaagcccccttgatgttgagtgttgccattgatcaaagatagcctcttttagattgtgatttctctctaaataagatactttgtatatttaatgacaagtctcttccctataattttgctcctcagaaaagaaaagcctagacagactgtatttccagtcacagaacataaaacttaatctaatgggtgttttgttttgttttgagacagaggctcactctgtcacctaggctggagtgcagtggctcgatctcagctcactgcagcctccacctcccggattcaagcaatttcctgcctcagcctcttgagtagctgggattacaggagccctccacgaggcccagttaattttt

SEQ ID NO: 698270 - DNA, 1538 bp, Homo sapiens
ttttttttttttttttttgagacagagtttcactcggtcacctaggctagagtacagtggtaccatcttggttcactgcaaaccccgcctcccaggttcaagtgattctcatgcctcaccctccagagtagctgggattataggcatgtgccacgacggccagctaatttttgtatttttagtagagatggggtttcaccacgttggccaggctggtctcggactcctggcctcaatccaccatgctgggattataggtgtgagccaccgcgcccagcctaaattctgaaatctttatagatgaaatggattacttcaaaataatacaggagaggcagatgtaggtacgtgtatagattataccaggtcagcctgatttgatgggtgatggatatgtgagggatttatttttaatcaataaaagtttgttgtttttaaatagcaaaaagtattttttttttttttgagacagagtcttgctctgttgcccaggctggagtgcagtggtgtgatctcagctcactgcaagctctgcctcccgggttcacaccattctcctgcctcagcctcccgagtagctgggactacaggctcctgccaccacacctggctaatttttttgtatttttagtagagatagggtttcaccgtgttagccaggatggtcttgatctcctgacctcgtgatcctaccgcctcggcctcccaaagtgctgggattagaggcgtgagccaccacagccagcctagcaaaaagttattttaaatataatatccaatactcaatatgtatcgagtcttttttcttcttaaaaaaaattttgtttctcaattatacataaaagcgtctttttaaagttaacattcttttttttctttcttttttttttttttaaagacagagtcttactctgtcacccaggctggagtgcagtggtgcaatcataactcactgtaaccttaaactcctgggttcaagtgattcttctgcctcagcctccccagtagctgggattataggcttgcaaccatgaccggctaattttttttcagagatggggtctcgctacattgcccaggctggtctcaaacttctggtctcaagtgatcctcccacctcactctcccaaactgttgggattacaggcattagccaccatgcctggcctaaaattaatattttttaaccaagcaattccacgtttaggaattttgcatgaaagagatacaaagcagattactagaaagagctgggtttttaactgcaaaaaaaaattggaaataaccaaaatgcctattaataaaagactgcttaacatttatactataattttaaaattatagtatgcctattcaatagaatgctaggcactgtttaccaaaaaaagatgatatgaggctgggcgtggtggctcatgcctgtaatcccaggactttgggaggccaaggcgggcaaatcacttgaggtcaggagttggagactagcmtggccaacgtggtgaaatcccgtctctactaaaaatacaaaaattagccag

SEQ ID NO: 698271 - DNA, 1256 bp, Homo sapiens
catcatggcatctctcagcaggtaaatattgattacattctcctagtgcctcaagccattatttctgatacaactgcttgcttccagatatgaatttccccccctcgtctccatggggatatcagacagaatgagggggaaattttccctaaagaagtttggcagaaaaacaccttctaattatgagcatttaattcacatccccaatactgatatcctttggaaataacagcaagtatccaccttgaagataattcttcactcaataccacctgctgttcaggaaaacagagtaccagccctgacccagaaggtagagaaaagtccagaaacccgttgactgttgaaaaacatgcctgaggtctggtgctatcggtttttatatgaattattgatgcaactttgggatcttttgggtagtgaaggtatcaggtgtgagaagatggcaggcatgttatagtggaattgacaagagctggtgattaaacctgtaaccccatgcatggtgctaacactattttgctgatatcctagaaggtgctcactgtcaaatcctgtcttgagcagaaatgcatcccaggcaaggtttatgcacagtgcccaaggacatcctcccctgacaacagctccgtggtcatgagcgggagagagaaacaaatactgagtcttggtcttatgctcatcagaagaatctccatcttcagagcctaagtgcctaccaagttccaagtgctcacagtaaaattgcaagaagcacaaattcaatggaaaaaaaacatccctgccttagtttgtgttccatctagcaagatggagcacacgcctcagaattatttggcaatcctaggactgcgaaggttatggtatttatccaccaactccatctgccattgggtgacttccaggggcattaactccttggcctttccagcctgccctttgtgctgggtgtctgatcttgtggccagaaaagaaaagccctcaagaagaaagctggaagtaagtaaccttcagcttgcaaaggagagtacccaggggaggtgggtggagtaccgagaacatctactctagcccccaccagcgtatttgggggatctgttgttaaagatcccagttcatgtgttggcccataattagtcatttagtatgaccaraagaacactgatttgtactgcagaaaggaagaggccttgtaagctacttagactttctaaaagtggtctttttatctgccacatgagaaagtgatgtctttc

SEQ ID NO: 698272 - DNA, 580 bp, Homo sapiens
attgacaacataacataaaacatgatttaaaatatagtgaccaaaaaacatcaaagatcatctgactgtctgggatgggggtggggctcgggagaaggaacataatggaaaacatttgccgtcagaagaaggtgtaacttatctttttacatctctttctctaactctgaaaatgaactgtgaactggagctctcttraccacgctggtacctaaaattctcccatctcttccccagcaccttccagcgtcctctttacccagcaacagagaatgtcagctctatgatttctctgataggtgaatcccagccatgctgattcctctccacccatttccagtgctagaggcccacagtttcagtctcatctgcctccactcggcctcagttcctcatcactgttcctgtgctcacagtcatcaattatagaccccacaacatgcgccctgaagacagaatgttccatatcagagctgtgatcttgagagccctctccttggctttcctgctgagtctccgaggagctggggccatcaagggtgagtgctcaggaggacgcaggagcgtcggggtgagtgat

SEQ ID NO: 698273 - DNA, 626 bp, Homo sapiens
tcaaaagcttgggctctttccatgaataaatgtttccttctaggactccggaggtgtaggtcctttctaacacagaagtgagtgaacctcacagggcacttgggcgggtatagcagaaagagagtaaatccaggcatgggtttacttggtctcttgcccagggaccaagagaatacttacatcaggatgagaacaagcttaattcctgaacctttctcgttattcccttgaactctcaaatttatgtggataactctgtctcygagattcccaagagctccatggaaaatgggatttcatacgagaacgccctgatctaagagcagaggtcaatgtcgaatcggtccgactgccctcttcacttggttcacaggctcaggcagggactgggctttccctcttacctccctaaaggaaggcagattcccgaggccctcagagagggcgggcagggctggggcagagatgtctcgaggatcccaggtccggagcacgaggcacgggcccagccaagaactcaatttcgcgtggacgggtttcgcagctgctggccgggtcagggcagcggctgaagggtgcggtccggctgggggctggggctagggccgtgctggggcctgactgac

SEQ ID NO: 698274 - DNA, 580 bp, Homo sapiens
ataataaatacatgtagtatttgtctgctaaatttatggtaatttattgtgcagcagtaaaaactaatagcacttgtattatgggaaagaacctgtctgtatggtggcttccttcatcatagccagcaaggaagagtcaatagagtctgctaacaagacagaggtcataattttaggttacatgatcatgaaagtgacatccatctttgccaaattctgctggctagaagcaagtcacaggtcccacccacactcaaagtaaagtgaggagatagcacaagggcatgaataccagaaggcaagggtcataaagaccgtcagaacctccccactgtactgatcattgggccggtcattcaaaaggagaaagggacagcttagagaccaaggaaatcaaatagcttttaggcaaatagcttatttccaaagaaaggattaagtcaaaacacttggaggaggtgcatgagacaaaccttaccaagcagatgaagtatccctgctttgttagaggtctcaaaacaatttatactttttaataaggtggtttgttgaaaatcatcaacaccaagagayaatttta

SEQ ID NO: 698275 - DNA, 606 bp, Homo sapiens
tgctaagttttaggtaaaatacaagtcccagatacggagcaagtctcaaccactgtacatacctgaatgtgtaattacatcactgtaagaggtgccacagtaaatgccactgggtcttgtgttagtccattctcacacaaagaactacctagccaggtgcggtggctcacgcctgtaatcccaacactttggcaggctgaggcaggcggatcacttgaggtcaggagtttgataccagcctggcaaacatggtgaaaccccatctctattaaaaaatgcataaattagccaggtgtggtggcacacgcctgtaatccyggctactcgggaggctgaggcaggagagtcgcttgaacccgggagatggaggttgcagtgacccgagatcgcgccactgcactccagcctgggtgacagagtgagactccatctcagaaaaaaataaaaataaaaataaagaactacctgagaccaaacactttacgaaaaaaaagaggtttaattgactcacagctccacaggcttaacaggaagcctcaggagacttacaatcatggcagaaggcgaaggggaagcaaacacatcttaccatgatggagcaggagg

SEQ ID NO: 698276 - DNA, 606 bp, Homo sapiens
tgctaagttttaggtaaaatacaagtcccagatacggagcaagtctcaaccactgtacatacctgaatgtgtaattacatcactgtaagaggtgccacagtaaatgccactgggtcttgtgttagtccattctcacacaaagaactacctagccaggtgcggtggctcacgcctgtaatcccaacactttggcaggctgaggcaggcggatcacttgaggtcaggagtttgataccagcctggcaaacatggtgaaaccccatctctattaaaaaatgcataaattagccaggtgtggtggcacacgcctgtaatcctggctactcgggaggctgaggcaggagagtcgcttgaacccgggagatggaggttgcagtgacccgagatcgcgccactgcactccagcctgggtgacagagtgagactccatctcagaaaaaaataaaaataaaaataaagaactacctgagaccaaayactttacgaaaaaaaagaggtttaattgactcacagctccacaggcttaacaggaagcctcaggagacttacaatcatggcagaaggcgaaggggaagcaaacacatcttaccatgatggagcaggagg

SEQ ID NO: 698277 - DNA, 593 bp, Homo sapiens
tttcttttcttttttttgagatggagtctcactctgtcactcaggctagagtgcagtggtgcaatctccactcactgcaacctccacctcccgggttcaagtgattctcctgcctcagcctccagagtagctgggattacaggcacctgccaccacgcccagctggmtaattttttgtatttttagtgagacggggttttactatgttggccaggctggtcttgaactcctgatctcatgattcgcccacctcgccctcccaaagtgctgggattacaggtgtgagccaccacgcctggccgtttgatcaaagattttaagcaagcaaaggaacaagcctctgtcttcctaggcctgcacacttccccaaatcaccttttttcactgatatctctgtttccattctggtcaaactttatgtatttctttgggtaaagagagagaacagacagggtaagcactggctagagggtctttggcagaggatcgaggaaggcattgccaaccaagtgctaggttgaggagaggatgtggaaggaggagatggggcaggcagagtgggcttggggagttgagggaccatgtaaggtgga

SEQ ID NO: 698278 - DNA, 641 bp, Homo sapiens
aactcctgtaccagaaatcaaacttgccatgcctaggaagcaaaatatgaagcacatgaacaggtggtaaagggaattctttcaagaaagaggttggggttacaaattaatgcccaaacaataaccaagaccccttccaattatgtgtattaattatttacttactctgcacatgacatttggcaatataagattcacaaagatgaatcagacatgcactggtcycataagcgggagagagaaatcaagcacacacagaactcctttcttctggttggtatcaaggaaggctttgtggacctggtagcacttgagttagctctggaaggagaggcaggatttggacctgtggcgatatgggctggggaagacatgagcttggcatgtctgacagtcagtgaggacctcaggttcctggagcttaggatgtgtgatgcagaagaagtctggaaaggtaagaaacagaattgtaaatgatgctatgaagatatgccttagttctttaggcaatgaagagtcactaaggttttgaacactggcgtgtatggtgggttgtggggagacagaagagtaatgaggacaccagtcagactaagccagaaaccatgcaagaagcaatacagatctgtgatgcagaagtg

SEQ ID NO: 698279 - DNA, 591 bp, Homo sapiens
acacctttgtccagggtgaaggagcaggaagtgaagtcgggggagagggaggccgtgaatcaggagggaagatgagtgtaaaaccaggggctaaaatttggagtggacgggagagggaggacggcaggaaggagagaaatgacactgagaacaattgtgaaatccctggtgttggggtgagggcgagttcagaccaagagaggagagaagtggagggacaggaatttgcagtgacatcctcaggctttctccactggccaagctggctctcatctctgagcctgatcttcccaactgtgtggggtgcaatgattcagggcatgggaccaggagtccgggttctgacaatggccccagtgctcactagctatgtgacctcaacaaasgtgcctaactacactgtgtctcaatcggcctcctttgtcaaacaaggatcttaacggcaacccctgtagtgctatttcagattaaagaagatacatggaaaccagctacccatagtggctgctcaaaagatattcaaaattgtccttatttttatcatccaccctcacaaagttattatgagaattaaatgaaatcatgcttgcg

SEQ ID NO: 698280 - DNA, 635 bp, Homo sapiens
aagaaagcaaagaagagagccgggggcgccaactccaacgtgttctccatgttcgaacagacccaaatccaggaatttaaggaggtgggtgcagctattgaatcatccgcctggatggaaatcccacccacgagggagaaccttctttttgttccatattccagcagggacctttcattagatgcctctatcctccaaacaatcccaaattcggcctgaacggatgtgtgaatttttaaaagaaactatttttaatattttcgactgattatcgaaagtaaaacatattccatgttgaaaaatgttggaaaatttttcagaaaagcacagaaaaggaaataaaactacctacaattctataccagagataatcagtcacatttagtatawcgcttcaaaccatttttgttatctatgtatatatttattaaacaaaattataatcttctgtgcccactgatttacacctgcattttttcgttgagaaattcaccattaacatttcctatcatgtatttaaaccatttcctatggttaaatatgacatttgtttataatgttttactactataaataacacctctttgcttgtatctctggttatttcttggggtaaattcctaaaagcagaactg

SEQ ID NO: 698281 - DNA, 635 bp, Homo sapiens
aagaaagcaaagaagagagccgggggcgccaactccaacgtgttctccatgttcgaacagacccaaatccaggaatttaaggaggtgggtgcagctattgaatcatccgcctggatggaaatcccacccacgagggagaaccttctttttgttccatattccagcagggacctttcattagatgcctctatcctccaaacaatcccaaattcggcctgaacggatgtgtgaatttttaaaagaaactatttttaatattttcgactgattatcgaaagtaaaacatattccatgttgaaaaatgttggaaaatttttcagaaaagcacagaaaaggaaataaaactacctacaattctataccagagataatcagtcacatttagtatatcscttcaaaccatttttgttatctatgtatatatttattaaacaaaattataatcttctgtgcccactgatttacacctgcattttttcgttgagaaattcaccattaacatttcctatcatgtatttaaaccatttcctatggttaaatatgacatttgtttataatgttttactactataaataacacctctttgcttgtatctctggttatttcttggggtaaattcctaaaagcagaactg

SEQ ID NO: 698282 - DNA, 515 bp, Homo sapiens
ttaggaaatggctaagaaatagactaaatcattatttcacttaacatttgtattatgaaaaatgttaaaaacattaaaacaagagagtccctatgtacctatgacccaatatcagtaattatcaagtcatgataattacagccttgtttcctctctaacctactcattcccatgactccctttctccccrccccgtgattactttgaagcaaatccgcgatatactatcatcttggtcctgagggtttcaaaatctttatttttaaatctcaatttcattaccacactaagaaaagaacattaattccttaacttcatctaaaatccacaagccaccagtgccatcaaattttcccctttacaatttccttggtgaagaacagagctgtttttctacagagttttccgctgtctgaattttcatgacagcgtctctgtttgtcatttaacctgcatctctgccctctgtatacttcctgtgacttcatagctagatctagggtcttgaacagatc

SEQ ID NO: 698283 - DNA, 515 bp, Homo sapiens
ttaggaaatggctaagaaatagactaaatcattatttcacttaacatttgtattatgaaaaatgttaaaaacattaaaacaagagagtccctatgtacctatgacccaatatcagtaattatcaagtcatgataattacagccttgtttcctctctaacctactcattcccatgactccctttctccccgccccgtgattactttgaagcaaatccgcgatatactatcatcttggtcctragggtttcaaaatctttatttttaaatctcaatttcattaccacactaagaaaagaacattaattccttaacttcatctaaaatccacaagccaccagtgccatcaaattttcccctttacaatttccttggtgaagaacagagctgtttttctacagagttttccgctgtctgaattttcatgacagcgtctctgtttgtcatttaacctgcatctctgccctctgtatacttcctgtgacttcatagctagatctagggtcttgaacagatc

SEQ ID NO: 698284 - DNA, 599 bp, Homo sapiens
ttacagtccaccacatgctgttctaagccttacagttytcactcgatacagtaaaagtcaagaacagtatttgccgtattattttcatcttgttgttgttgttgttgtttgtttcagacagtctccctcctctgtcgcccaggctggagggcagcggtacaatctccgctcactgcagcctctgcctcccgggttcaggcgattctcctgcttatctgttaagcatctaatatctagaacatagaaagaaatcttatacctcaacaacaaaaagacaatccaatttttaaaacggataaaagattggaacagacatttctctaaaagtttacaaatgacccataagcacatgaaaatatgctcaacatcattattcattagagaaatgcaaatcaaaacacagtaagatacttcatacccactaggattagattcaatgaaaaataaagaggaaaatcaaaagcgttgggaaagatgtgaagcaactgaacacattgctactgggaatgtaacacagggcagtggtttggaagagtctggcgttcctcaaaaagttaaacacagaattaccatatgattctacttcttttttttttttt

SEQ ID NO: 698285 - DNA, 599 bp, Homo sapiens
ttacagtccaccacatgctgttctaagccttacagttctcactcgatacagtaaaagtcaagaacagtatttgcmgtattattttcatcttgttgttgttgttgttgtttgtttcagacagtctccctcctctgtcgcccaggctggagggcagcggtacaatctccgctcactgcagcctctgcctcccgggttcaggcgattctcctgcttatctgttaagcatctaatatctagaacatagaaagaaatcttatacctcaacaacaaaaagacaatccaatttttaaaacggataaaagattggaacagacatttctctaaaagtttacaaatgacccataagcacatgaaaatatgctcaacatcattattcattagagaaatgcaaatcaaaacacagtaagatacttcatacccactaggattagattcaatgaaaaataaagaggaaaatcaaaagcgttgggaaagatgtgaagcaactgaacacattgctactgggaatgtaacacagggcagtggtttggaagagtctggcgttcctcaaaaagttaaacacagaattaccatatgattctacttcttttttttttttt

SEQ ID NO: 698286 - DNA, 599 bp, Homo sapiens
ttacagtccaccacatgctgttctaagccttacagttctcactcgatacagtaaaagtcaagaacagtatttgccgtattattttcatcttgttgttgttgttgttgtttgtttcagacagkctccctcctctgtcgcccaggctggagggcagcggtacaatctccgctcactgcagcctctgcctcccgggttcaggcgattctcctgcttatctgttaagcatctaatatctagaacatagaaagaaatcttatacctcaacaacaaaaagacaatccaatttttaaaacggataaaagattggaacagacatttctctaaaagtttacaaatgacccataagcacatgaaaatatgctcaacatcattattcattagagaaatgcaaatcaaaacacagtaagatacttcatacccactaggattagattcaatgaaaaataaagaggaaaatcaaaagcgttgggaaagatgtgaagcaactgaacacattgctactgggaatgtaacacagggcagtggtttggaagagtctggcgttcctcaaaaagttaaacacagaattaccatatgattctacttcttttttttttttt

SEQ ID NO: 698287 - DNA, 693 bp, Homo sapiens
ctgtgcaaacagagtaagtccatgaaaggaagcgaactctgaactgcagctccccgcgcggagcggggcagaggcagcagcagcatctaaggctctgactcttacagtgctgttcgcattgtgtctgtgattgtacctttgggtatgtcgtcatgaacaaatggtggagaatgagatgatgagcacccaccaacacactgcaccgcaagaaataaaactgcaccaacacgagcgaggcgccacggcacccctcccgggagaggccccccagcctggtgcttgctcgtcctccygctcgcccctggcttgtcctcccaccgaggggcacgcgccaccctggacagcagactgcgctgctcacgggcttgaggcttctgtattttgccttttttatgagcgcgattttcagatgtacttcaggtgatgcaggtaccactatctcactcagatgtagctctcgggtactccagtacacccataaggtatttctccattctctgttaatggtcttatctcagtaagcaacagttgagaaggaactcactcctgcaaatccaaccttctgcgggcagcagtcctcaagtgctgtggtctcaggactcctgggagtacctacaaacgactgagcacctcagcgagtctttatttttgtgggtttcagctactgatgtttctcataccagaaattaaact

SEQ ID NO: 698288 - DNA, 1041 bp, Homo sapiens
ggagccccacagatggaggacagcagcgggaaatgcgggtgacagcggcgcagcaggtctcctggagaccagggcaaacgagagcagggagaaggctccaatcccaaaggggtggggatggggctagtgtcctggatgcaatgaaaaacaaaccattttgataggtgggtgactagaagatgctaatccacagggctgtgcgagaggacctgtgctcagggcactccttggcgcagtaatgagcaatgcttacagtcacacaagagcaaggactgtcgatttcaccaaaaatgcagtgattatgatggcacatagagggacagggaggctggtgggacagaggagagctaaacctccccacggcctttgggagaaataaaaaaataatgtcttaagctttaaaggagcagcttcaacagcagtaaatgcctgagaaaacagaccacttaggatcccgcctctgggggctgcggccaggcagggcaggagaatgcctacaactggacgcttcaatccacagactcagccctttttcaggcatgctggaaggacaactaagatcactgctaagggacacaaagatgtaggaaaagatatgtgagtagagtgtgtatgcgtatcgggtatcaccatgattacagagttggggacagcaagtgcatggaaaagcagaaagaaaagaaaaacagaaagaacaaactagatgtttcttttctctttcactgaagtccagaccttaaragacacagaagaagggaacttctaacacaagagttccttgcccggagcccgaggcaagaggctccttcatggaagaatctaggcaacttctgcaacggtggcccccaaaaccacaggtaaaactgcatgagcactgtgtggagtatccagtttggaactggtaacgaccccacctcctaaaaaggcacagcatgagtgacctcccacaacctctcatgactggggcttgcatcctgagcaaggcttgtcttccttcccaggacacctgtttccaggatggctcccgcctctccccaaggg

SEQ ID NO: 698289 - DNA, 1286 bp, Homo sapiens
tgaaaaacaagcaacaggcagagtcatctttctcccctgctctgagaagctcttccaagaatggcagctggaaggatgctctaagcacagggaaaaacaggamctgtggaattaataagtaaatatgcaaaataatgttattagcagggattacagacaggaatacagaatctttgctataaacctgcttctatgtgggaactggaacaccactaaagtgacacatgcatctcaatgaaggtgtgacaagtgaaagagacagttctggaaatttcctttgacaagaatataaacatacctctcagctaagactcttcaaccatgcggtcagcccctttctgcgtggcaccaactcctgcacactagcagcctagattcttagggaggatttccttctacgtgggtgggttcagacagatcttccacctactccacatactagatgcccgcacacagagggaatcacagtgaggggtttcagactctcctaagtctttctcctctgtggcatttaaaaatgttatttagggtttttttttttttttttgaggtacaaataaatacattttatcaagggctgacaaagactgtctgaattcccattcctctgaaatgacatctttcaatgatatgacctctagtggctacattcatgacatttacagtcaaagttgaaccagcgagggtggaagggcactcgggagtggccgctgccaacagcaacagactgcccagaagaggctgtctgcagtcagagtcatggaaaaggcaaattctgaaacccaaaacacgcactgaccaaagtcccgtgcggaactgcagaaatgcaccacgttgctcagactggccatttctcagtaacaacttcgaatgctggaaattgttatcacacctcatagcaaatgttttaattaaagaatcaagtaggtagaacagaaccttctgtacaatctcacaaacaggttaaagatccatttgaagctacttcagtaactaagacaatgcctgaagagaggagacggggaggggggaggggaggggagcaaggcgcatagacaggtagtgaggacagggcagtgagtacctttctaaaagagagagatttagcgggactaaaggtctgctctgtaagctcgagcccttcgatagtttccgtacagtcagagagaggtgcatcctgaaacagtaaactgagtcaccagagcacaccaggcccagcctgtgaaatatcagctgagagcacaggatggagctggctaagagcatgcagcagggacagctgtcaa

SEQ ID NO: 698290 - DNA, 1286 bp, Homo sapiens
tgaaaaacaagcaacaggcagagtcatctttctcccctgctctgagaagctcttccaagaatggcagctggaaggatgctctaagcacagggaaaaacaggacctgtggaattaataagtaaatatgcaaaataatgttattagcagggattacagacaggaatacagaatctttgctayaaacctgcttctatgtgggaactggaacaccactaaagtgacacatgcatctcaatgaaggtgtgacaagtgaaagagacagttctggaaatttcctttgacaagaatataaacatacctctcagctaagactcttcaaccatgcggtcagcccctttctgcgtggcaccaactcctgcacactagcagcctagattcttagggaggatttccttctacgtgggtgggttcagacagatcttccacctactccacatactagatgcccgcacacagagggaatcacagtgaggggtttcagactctcctaagtctttctcctctgtggcatttaaaaatgttatttagggtttttttttttttttttgaggtacaaataaatacattttatcaagggctgacaaagactgtctgaattcccattcctctgaaatgacatctttcaatgatatgacctctagtggctacattcatgacatttacagtcaaagttgaaccagcgagggtggaagggcactcgggagtggccgctgccaacagcaacagactgcccagaagaggctgtctgcagtcagagtcatggaaaaggcaaattctgaaacccaaaacacgcactgaccaaagtcccgtgcggaactgcagaaatgcaccacgttgctcagactggccatttctcagtaacaacttcgaatgctggaaattgttatcacacctcatagcaaatgttttaattaaagaatcaagtaggtagaacagaaccttctgtacaatctcacaaacaggttaaagatccatttgaagctacttcagtaactaagacaatgcctgaagagaggagacggggaggggggaggggaggggagcaaggcgcatagacaggtagtgaggacagggcagtgagtacctttctaaaagagagagatttagcgggactaaaggtctgctctgtaagctcgagcccttcgatagtttccgtacagtcagagagaggtgcatcctgaaacagtaaactgagtcaccagagcacaccaggcccagcctgtgaaatatcagctgagagcacaggatggagctggctaagagcatgcagcagggacagctgtcaa

SEQ ID NO: 698291 - DNA, 1565 bp, Homo sapiens
ttgggggctgcctgacactcaggccattagaaatggtgtgaaaggtgagttgacgcttccataggggcagtcggtcgatattaagccaggagtacagcctcagtgggtgagtcgccaccagctgtcaattccaggaggcccagcagaaatcaaaggcccgggactggctcagagccctgttgtaccacctggtatatgtggtgagcatgttacactgaggacattttaggtgaagttacaggaaagttgtgtatctgggcaacagatacacgcctgtggggtgagcgtctgcgaggacacagacttttgtcttgaccagtgaccttcgggctccacggccccttatcatgccccaccccacacaccggtatctccttctccatgcagcagctccacagctgggtcctgctcctcagacaagatggggccagaggcggccccagcagccacgcatgctgccccacaggccacaagagagaagatccggtccaggttycacggcagccacgacctcatccaccgcctgttcgtctgcatttcaggtgtcatgtcagggcctgagaccggtgcatggcttgaggacacacgggctgcgctttaggggaggtcaggcggggcgtgtacaacctccccctcactttcctgtaaacagcagcccactctgcccctaaggagccagcactcctgttcatggagaaggctggactgaccccacacaggcaggaggaggaggggagctgcgggtgagggtgggaggcgttttcctccagggagtggcggcgggggcagtggggtgggggcagaagagccaggcgctaggcatcacctctgggcagggtccaccctgggctcccagccacgtaggctgctggggggctgtgcctgcgaggggtggacatgctttgcaggtagacacatttggatgcctgagtggctgtgacagtcacaagcactggcctgggggtgggcacagtgcaggggctctgtaagtgtccctcagcgcgtagcctggccagcttagtggtgatggctgtgacctgtgcataaaaggtgtgaatgtcagcggcagaccgactgtggcggggctgtctgtctggtcgtctcccttcccctgatctctctcgactcccgagtttttattcttgcaagggaatcctcccccaaggggttgggcctcctccctccctgactgatctgagaacacgctggcctgggctgtgagctctggctgggtctgcccagcccgcagcaccgacctccgcagttccttccatccgtccttctgtcgtggttactgtggccttccttcctcaggtgtggctgaccagctgcagacgaactatgccagtgacctgagaagtattcttaaaacactgtttgaggtcatggccaccaagcctgaaacagacgacaaggaaaagttaaggaagggtgagtgcccactcaggacgggctctgaggcctgcgctggtggccgtgtccctgcccacagggaggggtgctcagaaatccacaccttctggccctggggagatagggtcccgaccaagcaatcgtcgacccca

SEQ ID NO: 698292 - DNA, 696 bp, Homo sapiens
tgatgctcttaaaactgtgacccatttaatcttgccagagaaatacatccataattaaaaacgcatatgctaatcctctactcaaaacttcctggattcaaggctatttttgatcctgtccttttttgcttctccaatytcattgcctgcgtcttatgtacccctgctccatgctcagtaaatgacgcctgtttctctaaagtcttcttcttctttcagacttcagtactaatgcatatttggcttcgaatgtgtttcctcctctcattctctcaacaactttcttcaaggctcagcacctcctctcctgtgactccgtccttgactccaattggtcatcctctgaagatttgtttccctctctgcaccatttgcatatcaacattagagcgctattcttattacattgaacttgacagtccatctcattattctctcatcttataatgcagggactacactttttagctttcatattcccagtgtctagtacagtacctggtggtactaggttcccactctcaacctgaatctctttttctccctttccttatctttctgtatgtatatgtgtgtgtatgcatgtgcatgcacgtacacactttcatttaataaggaaattgttccatgtcatgtggattttgttttctttaacagttaccacactccagggtaaataccacgtaatgtaaacaa

SEQ ID NO: 698293 - DNA, 696 bp, Homo sapiens
tgatgctcttaaaactgtgacccatttaatcttgccagagaaatacatccataattaaaaacgcatatgctaatcctctactcaaaacttcctggattcaaggctatttttgatcctgtccttttttgcttctccaatctcattgcctgcgtcttatgtacccctgctccatgctcagtaaatgacgcctgtttctctaaagtcttcttcttctttcagacttcagtactaatgcatatttggcttcgaatgtgtttcctcctctcattctctcaacaactttcttcaaggctcagcacctcctctcctgtgactccgtccttgactccaattggtcatcctctgaagatttgtttccctctctgcaccatttgcatatcaacattagagcgctattctyattacattgaacttgacagtccatctcattattctctcatcttataatgcagggactacactttttagctttcatattcccagtgtctagtacagtacctggtggtactaggttcccactctcaacctgaatctctttttctccctttccttatctttctgtatgtatatgtgtgtgtatgcatgtgcatgcacgtacacactttcatttaataaggaaattgttccatgtcatgtggattttgttttctttaacagttaccacactccagggtaaataccacgtaatgtaaacaa

SEQ ID NO: 698294 - DNA, 657 bp, Homo sapiens
tatttttagtagagacagcgtttcaccatgttgaccaggctggtctcaaattcctgacctcaagtgatccatccaccttggcctcccaaagtgctgggatacccagccgtgattttcttaacaaacaactgccacctgatgcagatgaaggaaggtaccacacatcctaagattttattttcagatttttccctaatattttattatgaaaaattccaaatacacagtaaagttgaaagaattctacaatgaacatatatatagctgcccctgtgatgtaccaagaccctcttaccatatttgcttctatcatatttatccttctatccatctatcaacacatctttggttttttaatgcatttcaaaacagtaagatagtcagcagcacattacttcctaggcattttaatatgtatatcattaaccaggattcaataatgtttatgggttttttccccgccttcatggtaaaagttacatatamtgaaatgcacaaatcactgggaaaattttgacaatgcatactcctatgtaacccaaacacttttcaagatgcagaacgttctggagtgatgaggaagttccctcaagctccttctctgacaatatctgcatcctcccaccataggcaatcccttattgattaagctttgtt

SEQ ID NO: 698295 - DNA, 603 bp, Homo sapiens
taactttttgaggaactgccagaccgttcatcaaagtggcatctccacgagcaatgtacaagggttcccatctctgcatattcttgccaatacttgtcttttttagtatagccatcctagaagttataaagtagtatctcattgtgtggactcaaatctttaaaaaaaatctttaatgcctctatttagctggtttcctaagcatgtgcttaatctacctattattaggccatcaaggacggggatcagtcaaattaattaggttcctggggytggaaagcacataagggagggcctgctcagtgtaaaacatttccaacaccaaagcaagattcaaaaatgactaactcacaatctctgtctaataggggaggcagacacctactcaaacaactattaaacaaagtggaatgagaaaagtgctataataaggcagtggaagtgcagaggggtgttaaggcatgcaattcttccaaagtacagtgctaagcagccccaaacatcaccaaagcagcctagatccttacccctatgcagctaccacattaagccagagtcttcttggaaacagctataagagcagggaatagggctcttggagat

SEQ ID NO: 698296 - DNA, 642 bp, Homo sapiens
gcgcctgtgatcccagctacttgggaggctgaggcaggagaatcacttgaacctgggaggtgggggtggaggttgcagtgagccgagatcatgccactgcaccccagcctgggtgacagaacaagactttgtctcaaaaaaaaaaaaaaaaaaggaaatgatgtcagagagaaaagcctactgatgagcctattgagaggattaatttaggactaccttgagggtcttgggggtctcctgctggggcaaggctcaaaagmaatgtagggagggtgggaagtgacagtgagactctgttttgactatactaatgactatcaagcagggatctttaacctcattcctggctttcatgtttatttagtgtctattctgtgcacagcagtgccaaacattgtaagggatacaaaagaagcaacaaataagcttccaaactgtgattaaattgaagtgggaaaaatattctgtagtttctgcccataacttaattccagattggagaatacaatgtaacagctgcactaattgcttttattttacatacagcacttagatttagggcctcttgaactcaattcacaaactgacataaaaccatgtgtgagtacttctgtttgttataggattgcagccagaactgta

SEQ ID NO: 698297 - DNA, 1430 bp, Homo sapiens
cccacatctaggtcaggggtccttcctaactgttatcccagccatacgtaccggcctactcatccttatgtagtggttgcctgtctacttgtctacaccccccatgtgagctcagcaagctcaaggatcacatcagatacattcaaatagacaggcccatgatctacagcacagtgcctagaagagagtaggagttgaatcaatgaactgaatggatagatgggagatgaggggaacagatgtagacatgtcatttaggagatcattagacttggtggatgtgaaatgagaatccgattaagacagtgttggccaggtgccgtggctcatacccgtaatcctagcactttgggaggccgaggtgggcggatcacctgaggtcacgagtttgagtccagcctgaccaacatggcgaaaccctgtctctactaaaaatacaaaattagccaggcgtggtggcagatgcctgtaattccagctacttgggaggttgaggcaggagcagcacttgaacctgggaggcagaggttgctgtgagccaagatcgtgccattgcactccagcctgggcaacaagagcaaaactgcatctcaaaaaaaaaaaaaaaaaaaaaaagtgtctatcccaggaagagcaacaaggaagctggatctagaggatttcaggagaacagatattagatatgagaaaaaaaagagggaggagcagaaggcaacactggggttcctgggtcagcggcaatggctccaggacagggaatacaatgagaaaggcaccttggaggaggacagtgagtctgggattgggcaaccaagctgaagtcaggggtggcaaagccagtgctgctgctgaatgggtgggtctagacctgaagaaagaaatttctcaaggccaacctgccatacatgtaacaggtgcctaagggtaataaactgaataaacgaatcaaaaagcagtcagcactgcagaatttccccatgggacccactgccttttaaagactgcaactttcccataaaattatctatgctcaccatgctcaggggaaaggggcatattttccctacagcttccctaaatgccctataagaagctgccactgggccttggtgatgcttggtggcatgaagggacaatgctgtgtttgcccactggccagtggcttacctgagggccaagtcagaggcagcaggacaaagtcaccagggagacagayggtccatttggccctcagtgtttccacgactgtctcccaaggccacagttgccataatggattcttattaacggagaatggataaaggtaagcctatatcatggtcaagttgcatgttcatctacagtagaggggcagcttaattttagccatggggtgacaataataaatggaccaagcttcttatatttgctctaatgcatcatactttcca

SEQ ID NO: 698298 - DNA, 604 bp, Homo sapiens
cctggctggtttttatatttttaattggtgtctatgaattgattgcttagtttataaaaatacagttgattcttgtatgtttatattatatcctgaaacattgctaaacaactctcttattctaggagttgytttttatttttttatagattccctaggattttcaacatagacattatgtcatctggaaatagaggcagttttatttctttatttccagtttgcatgtcttttattttattgttttgctttattgcactggctagaacttccagcaacgtattgactaagagcagtgattttcagctgttgataaggggtcatttggctctgtctgctttcaaaaatttgtctttgtgtttagtttctagaagtttaaatataatgtgtcttggtatggatttctttgtgtttaccctgttagaggtacacccaactttttaaatctataggtttatatttataccatatatgggacatttttaggcattatttatttgagtaccaacatcatttccttttctccccaggactccaatggcttgaatgtgaaaccttttgttatagtcacacaggtcctagactatctattcatttttttttc

SEQ ID NO: 698299 - DNA, 630 bp, Homo sapiens
tttcttaacttccctggtggaagtttccacatttgaaatatgagtttaacaacaggttaatgcatgtaaaatgcttagaataagtgcctgacaaataggaagtacttaagtgttaactcttagtattactgtcagaaataaactatctcccctagtataataaaactcccaagaggacaagaaactggtctgtctcattcactactgtattcacagagctgtcacgtaatagtctctcaattaatacatatggaagaacaaatacatttccagatctaacattttggactaacaacgctaatctaagttttgtttctagaggcatatgactaagaaaaacctttgctttgcttcattcaatcacaactgacgtccgactgaagagacccttggagtacagcaacaaactaaaacactccaaatttcactcacaagttcgccactcacaaggaaattccagactgcaaatggacaatctgcatatcaaattgggttttgtatctctgaattaagaaggtcttatgtttccaaaatyacgtcaattcccaaagttgataaagcaaacgtagctagtatgtctgcctctagatgactcgatttggagactaaagctcacacaaacaactccca

SEQ ID NO: 698300 - DNA, 2167 bp, Homo sapiens
gctgcagcttctgtgagccctaatgctctgctgtccctctacacttatgcacacctacacaccctgacgcacactcacggcaggtcacaccacacatctgtacttccatctttctctggcacccagggatgcagacacacatctacctgggcagggacacacccagaagctgagactttgatacacagagacacctcccaaacctaaccacagagggacatccacacacatggatgggcaagtgcaatcatacacacatgtaggagtatgaagctttcatgcatagacatccagacacccagacacacacagagacatgctcggaaactccaagacccccatacttatagaaagatccagactgaacacacacacacacatatgcaggcttgtgtacacacccatccctccttgaagaagctccacctgtacaaacacagaggagcattttttttgtttgtttttgtttttgtttttgttttgagacagagtctcactctgtcgcccaggctggagtgcagtggcaccatctcggctcactgcaagctccgcctcccgggttcaagtgattctccggcctcagcctcccgagtagctgggactacaggcacatgccaccacgcccagctaattttttgtatttttagtagagacggggtttcaccgtgttagctaggatggtctcgatctcctgacctcgtgatccgcccgccaaatcccaaagtgtggggattacaggtgtgagccaccgcacccggccagaggaatgtttttaccaggggtccagggagcctgcacaccctcagccctgctctcggctaccagaagagtgtgggcaggcaagatacagttccaaaaggctccacagagaggggccaatgagtccttttgcttttccccttgctcttgatgttagtgtttctagaagcttccatgtagtgccctcatttaatttacaagtttgaattcttctttcacaaggtatattgaagaccattactggaagtgaggggagatgaggaggaagaggccctggaaggacatctgggactggtgggaacagcagctggattacctgctcctgcctggggatttctctacattcccaagctggtgctgacaaagtgcagccccaaagaggctgggccagagagattggaagaagagctctcaggggactcccacaattcctctgacaataaaatgagacagagaggttaaaagtcatttaaatttggccgggcgtggtggctcatgcctataatcccagctactccggaggctgaggcaggagaactgcttgaacctaggaggcagaggttgcagtgagctgagatcatgccatcgcactccagcctggggcacaagagcgagacttcgtctaaaaaaaaaaaaaacctcactcaaatctttagttacaagctggaagatgccgggctgttccccctgtaagctgtgctggccgctggtcatgcttcctgtggtgtgctttcaatttccctcgttgtaactgaaaagtgggggccttttctctgaaggaagaggctgtggtctcccaggtgccctgttgggctctttagggagggacttagacccaggagggctcctagacctgggcaggtagaattgctccgcctgatagaaagagaacctggagctctccaggcaagctgggcaggtttatgagctcggagcctgagaggtgaaaggtgaagctcctccccttctgctctgaccctgtcgtgtgtgctccccaaatatttggtgaaatccatcccactcagaaatcgctttggatttgagcrtgggatctgggtcagtgatagcaacagagcagccctcgaggtaggaacagaggcttccccatcctctaggaatttgcataaatatactaggagattgtgaaatgaatgaaagtccaagaaaatcacatctagatctgtgaggcaaggagagaggcccagatgccatctgggtaacatatgggaaagtgtttgcaaactttaaccactacgtaatgcaaagaatcatttgctatccttgttatatacaaaaatcttcatcaaaatgtttgcattgagcagttgaacctaatgatgaaagaggcttgcaagagcaggctggccgggtcagccctgggacagccagcccaggctttctcaggcag

SEQ ID NO: 698301 - DNA, 2167 bp, Homo sapiens
gctgcagcttctgtgagccctaatgctctgctgtccctctacacttatgcacacctacacaccctgacgcacactcacggcaggtcacaccacacatctgtacttccatctttctctggcacccagggatgcagacacacatctacctgggcagggacacacccagaagctgagactttgatacacagagacacctcccaaacctaaccacagagggacatccacacacatggatgggcaagtgcaatcatacacacatgtaggagtatgaagctttcatgcatagacatccagacacccagacacacacagagacatgctcggaaactccaagacccccatacttatagaaagatccagactgaacacacacacacacatatgcaggcttgtgtacacacccatccctccttgaagaagctccacctgtacaaacacagaggagcattttttttgtttgtttttgtttttgtttttgttttgagacagagtctcactctgtcgcccaggctggagtgcagtggcaccatctcggctcactgcaagctccgcctcccgggttcaagtgattctccggcctcagcctcccgagtagctgggactacaggcacatgccaccacgcccagctaattttttgtatttttagtagagacggggtttcaccgtgttagctaggatggtctcgatctcctgacctcgtgatccgcccgccaaatcccaaagtgtggggattacaggtgtgagccaccgcacccggccagaggaatgtttttaccaggggtccagggagcctgcacaccctcagccctgctctcggctaccagaagagtgtgggcaggcaagatacagttccaaaaggctccacagagaggggccaatgagtccttttgcttttccccttgctcttgatgttagtgtttctagaagcttccatgtagtgccctcatttaatttacaagtttgaattcttctttcacaaggtatattgaagaccattactggaagtgaggggagatgaggaggaagaggccctggaaggacatctgggactggtgggaacagcagctggattacctgctcctgcctggggatttctctacattcccaagctggtgctgacaaagtgcagccccaaagaggctgggccagagagattggaagaagagctctcaggggactcccacaattcctctgacaataaaatgagacagagaggttaaaagtcatttaaatttggccgggcgtggtggctcatgcctataatcccagctactccggaggctgaggcaggagaactgcttgaacctaggaggcagaggttgcagtgagctgagatcatgccatcgcactccagcctggggcacaagagcgagacttcgtctaaaaaaaaaaaaaacctcactcaaatctttagttacaagctggaagatgccgggctgttccccctgtaagctgtgctggccgctggtcatgcttcctgtggtgtgctttcaatttccctcgttgtaactgaaaagtgggggccttttctctgaaggaagaggctgtggtctcccaggtgccctgttgggctctttagggagggacttagacccaggagggctcctagacctgggcaggtagaattgctccgcctgatagaaagagaacctggagctctccaggcaagctgggcaggtttatgagctcggagcctgagaggtgaaaggtgaagctcctccccttctgctctgaccctgtcgtgtgtgctccccaaatatttggtgaaatccatcccactcagaaatcgctttggatttgagcgtgggatctgggtcagtgatagcaamagagcagccctcgaggtaggaacagaggcttccccatcctctaggaatttgcataaatatactaggagattgtgaaatgaatgaaagtccaagaaaatcacatctagatctgtgaggcaaggagagaggcccagatgccatctgggtaacatatgggaaagtgtttgcaaactttaaccactacgtaatgcaaagaatcatttgctatccttgttatatacaaaaatcttcatcaaaatgtttgcattgagcagttgaacctaatgatgaaagaggcttgcaagagcaggctggccgggtcagccctgggacagccagcccaggctttctcaggcag

SEQ ID NO: 698302 - DNA, 638 bp, Homo sapiens
tcaaccacaaaactgtgaaaaatgtggcactgaatagacctcaaaaaggacactgtttacgtatgaaagctgaaacaagaaggcacagtgttgccttctttgacattagctgggaatgtgcacatctggctacttacattttttgctgctttgtgtatttactttgcaaatgacccaaaaattgcttcaagtattaattttggtgttacaaataaattttaacgagtatgcaaattcctaaatatagaatccacaaataaggaagactgactgtatgtrttcagttcctgaaaggaaaacaacagtatcgaaatttatacttttataaagacatgacatagaactaatttcaggttagaagcattccttattactcagtgagttaagttttcagattataagcagtgaaactttcagattcctattacagttttatggatttcttgttagagtaactttatatttgggctgtaccgctttagaagtctttagcatcattgagaaaagtaaaagggactttcacattagtaaataaaatactttcagtatgagtttttcattaataatttcgttattttacacttagtttttctcttcttttccaagtagtcttaagaatttacttcagtgatcattgc

SEQ ID NO: 698303 - DNA, 607 bp, Homo sapiens
tcacaaatgaatggaggaagggagaatactgaaatcctgtttgctagggcactaccgcctactgctttgcacaaaggtgtgctgcagaaaagatggcaaaccctctatacaggaaaagctgatttgggcttcattaatttagcatttgtgataattggaccagaggcaagggtgatatttatctctgcacaagccatgaatacaaggatttagtaagtaataacagtataaacaagattctaggggyaatatttatactttaagaaagctaacatctactgagtgtttaccaggcgccagactctgtgatccatgttttatatgcgacatattacttgattctcatatttattactcgataagggatgtattttatgatcctcactttacaagcctgagccaccaacaggtgaaataacatgtccaggttcccacggcgagttctgccactcaccatgggaggtcagagtgcctgcctttactgctgtactttccctaaggaagcatgctgctttgggggagttttataagctcggacggcagcactggtcaaggttcctagatgcaatagcagaagtgcctagagccaaagtcaagctggagcaga

SEQ ID NO: 698304 - DNA, 607 bp, Homo sapiens
tcacaaatgaatggaggaagggagaatactgaaatcctgtttgctagggcactaccgcctactgctttgcacaaaggtgtgctgcagaaaagatggcaaaccctctatacaggaaaagctgatttgggcttcattaatttagcatttgtgataattggaccagaggcaagggtgatatttatctctgcacaagccatgaatacaaggatttagtaagtaataacagtataaacaagattctaggggtaatatttatactttaagaaagctaacatctactgagtgtttaccaggcgccagactctgtgatccatgttttatatgcgacatattacttgattctcatatttattactcgataagggatgtattttatgatcctcactttacaagcctgagccaccaacaggtgaaataacatgtccaggttcccacggcgagttctgccactcaccatgggaggtcagagtgcctgcctttactgctgtactttccctaaggaagcatgctgctttgggggmgttttataagctcggacggcagcactggtcaaggttcctagatgcaatagcagaagtgcctagagccaaagtcaagctggagcaga

SEQ ID NO: 698305 - DNA, 531 bp, Homo sapiens
ggctcacaggggacagagagactgctggtgcaagggaggagctggcctttgggggtcagggcagtccgggagctctaggagacagggcccctgctcttgtgtttgcagttgtactgtgtccacctggcttgggggctggctcctggagcagcggctcagtgaataaacaaatgagtgcgtgtgtgccaaatctgggttcatgtctggtggtccccgtgagggratgcagaggcaggaggacctggtggggtctcaggagctgccgtgctgggggttcctgccccacctctgggctgaagctcccagaaggcgagggaccggctcctccagggagcaactgtacaggtcaaggagtctgttcccagccccttccatggctcctccaagtaggggctacttggggaacttcaggtgtggtggcggccagagggaaggcgtttccgggccttgagaggagagctgttctccagagtgggactaggtctgctaatgcagatgcagctcttcctgcaggagcttcctggcctctct

SEQ ID NO: 698306 - DNA, 531 bp, Homo sapiens
ggctcacaggggacagagagactgctggtgcaagggaggagctggcctttgggggtcagggcagtccgggagctctaggagacagggcccctgctcttgtgtttgcagttgtactgtgtccacctggcttgggggctggctcctggagcagcggctcagtgaataaacaaatgagtgcgtgtgtgccaaatctgggttcatgtctggtggtccccgtgaggggatgcagaggcaggaggacctggtggggtctcaggagctgccgtgctgggggttcctgccccacctctgggctgaagctcccagaaggcgagggaccggctcctccagggagcaactgtacaggtcaaggagtctgttcccagccccttccatggctcctccaagtaggggctacttggggaayttcaggtgtggtggcggccagagggaaggcgtttccgggccttgagaggagagctgttctccagagtgggactaggtctgctaatgcagatgcagctcttcctgcaggagcttcctggcctctct

SEQ ID NO: 698307 - DNA, 531 bp, Homo sapiens
ggctcacaggggacagagagactgctggtgcaagggaggagctggcctttgggggtcagggcagtccgggagctctaggagacagggcccctgctcttgtgtttgcagttgtactgtgtccacctggcttgggggctggctcctggagcagcggctcagtgaataaacaaatgagtgcgtgtgtgccaaatctgggttcatgtctggtggtccccgtgaggggatgcagaggcaggaggacctggtggggtctcaggagctgccgtgctgggggttcctgccccacctctgggctgaagctcccagaaggcgagggaccggctcctccagggagcaactgtacaggtcaaggagtctgttcccagccccttccatggctcctccaagtaggggctacttggggaacttcaggtgtggtggcrgccagagggaaggcgtttccgggccttgagaggagagctgttctccagagtgggactaggtctgctaatgcagatgcagctcttcctgcaggagcttcctggcctctct

SEQ ID NO: 698308 - DNA, 531 bp, Homo sapiens
ggctcacaggggacagagagactgctggtgcaagggaggagctggcctttgggggtcagggcagtccgggagctctaggagacagggcccctgctcttgtgtttgcagttgtactgtgtccacctggcttgggggctggctcctggagcagcggctcagtgaataaacaaatgagtgcgtgtgtgccaaatctgggttcatgtctggtggtccccgtgaggggatgcagaggcaggaggacctggtggggtctcaggagctgccgtgctgggggttcctgccccacctctgggctgaagctcccagaaggcgagggaccggctcctccagggagcaactgtacaggtcaaggagtctgttcccagccccttccatggctcctccaagtaggggctacttggggaacttcaggtgtggtggcggccagagggaaggcgtttccgggccttgagaggagagctgttctccagagtgggactaggtctgctaatrcagatgcagctcttcctgcaggagcttcctggcctctct

SEQ ID NO: 698309 - DNA, 2519 bp, Homo sapiens
cacccaccaacccatccatccacccaaccatccatccatctgacactgctgagttcttcccataaaccaggccctgtggttgatgccagtgatatgcagatggagagaatatagtacctgtgcttgagttgttcacagtttgtttggtagaggaagaataagtatgaacagaccataaggcatggaaatcacttggaaacagtggcatagagtacagagaggaggcaccttgtccaacctgtttgcttgattgttttagagggaagtgtcaaggaagacttgcccaggaaggtgacacctcagaggagaccaggataataagaacagaagattccggtgagaattcttcagccaataagtcataatattcttggaatatctgaggaaaattgttatcactcagataaatgcatttatgtatctgtagatgtatttcaccttttcagaggtgactttaaaattcagctccatcactcaacagctgtgagactttaggtctcagtaacctaattggtaaaatgaaagtaacaataatacttgttgtcctctcagagtagttgtcaccatcacatccaaaattgagtgtcagatgcctgcagagacttgacaattaataagttgtagtttttttttttcctaagtggaatttaactttcaaaagtagtgagatggcaacatagccaagagggtaaattgatcttttcttgtttcatatggagtccatttttttctgcctcttctatcacgcaggttattctatctagcctcattttcccaagtggcttcttatggccaacctcttagattatttggaaccccttagggtatcgagagatatgattcctgctcagggtgggaggcagttctttcccttgtggaaatctttttttctacctaaaatgacttcaaccccttttcttgtagggcccttagaagtttctcagccacattccaatccccaattcgaacagaaaaatggcatgggctggaggtgctgtgtcagacctttggtaaaatatctccaccgccccaactaatctcttagcttaccttctagggtctgtattagttttctagggtcactgtaccacaaactgattgacttaaaacaatagaaatttattctttcacagatctggaggccagaagtacccacacttggaaatccaagtgttggtggggtggttccttctgaaggctctgagggagaatccattggctgctgcctccctcctagcttctgatggttgcctgtgatgcttgatgttcatagatacatcactccaatctctgctgtcatcttcacaccctcttcttctttatgtctctctcagtatcaagtcaccctttcctccatctaaaaaggacacttgtcttgggatttagagcacatccagatagtccacaataatttcatgtcaaaatccttaacctaattacatccacaaagaccctttttccaaataatgtcacaatcataagatctaggaattaggacttggacataccttttagaagtccatcattcaagccactacaggtcttatttctttgaccaaatcaagccttttcaatcgttgggtttaggcttttttttttttattgtgatgtcactacctttgaataaaagaagaaaaaaaaataagatcagttacaagttggtgtcagacacagtgctaggaactgtatatgcattgtcttattgagtcctcacaacctttgtagaaggcaaatgtcatgataattcctattttgcaggtgaggctgagagtgattcagtaatttgtcccaggtcacaaagctagtgcatagtgaagttgacattcaaactcatctctgcctaattctgaaacttaattgattgggcattgaccctgggcaaagtacccttctatgtgttttacaaatcaaaacacatctggcattcacaagaaccctacacattgagtacattattaatagctccttaccacagaaataaggaatttgaggcacagtgagatttagtaatttgcccaagataatatatcaraaagagcaatcatgaacctggatgtccttcatcatcgaggttaaaaacaaaggtttactgaacacttactacctgtcaccttgttttttcacaatgagtcttccctggaaacctgtgaaacagacactataattattccatttgatagaagggaaaatgagacttggaggggtgaaatgacttgcccatgcatgatagaagtgaaacacaaacccaagtctttgcagttggccagctatgttatttccactggcctttattgccttccagagtcatcatgtggatctagtgagataatgtggtgactgggtctcactttgaaaagaagggtcctgtggaaaactaagtaattctccgtatcgttatagtactcctcttcatcatcatcatcatcatcatcatcatcatcaccatcatcgttgtcattattgtcatcaacatcaaagtattactgtagttgcccaaccagaaaagttcaaggccaggg

SEQ ID NO: 698310 - DNA, 1442 bp, Homo sapiens
tcaagtgtggggccctcctaagcatgggtcrtatccatgaagatggccctgatccctgttataagctttggtagagtggaggacaaagagaagccagcctgcaatttaaaattggccacaaatgatccacaaagtcagagagttggatatttgtgattacagggactttttggcttctctgtgaatgtgctcacatacacatgcacatgcacatgcacacacaaatcagtttgactaaaattaccatcttttcccttcacctaatgccaaaaaccaaaaccagttggctttattttttcactttcggacctattgttctggcattgtttaagcacgcattttcacttccagttttcataaccaaatgacaaaggaaggactgagctcttcaggggcatctaaagagtcaggcagaggcaggtactcgaaagctatggcagaccacagaccaacaggggctattttaagctgccagaaagagggaaagccgcttcaggatatgcagtataatgagccagtgttctcaggcttagaacattatgaggatagaaagcattgtaaatttaagaatcagaaatctggggttccaacaggtgagcaggtttccaagagggaaaatggctaggacttggtatacttaagctatacatagttcagtagagcaaagactctcaagctaccacattctgcatttcacatttcagtggcataccgaggttccacgtttaatgtacaacatctgtgctgcatagcagttgaggacaaatgttgggtgatgtcccattggttagttatatgcagaaaccaaaacataacgtgcacaaagtggaatttacacttgcaacactctaagcaaacttagtctcagcaaaccaaaagccagttagcacaggaaaacataaattgggcaaatccatttgtattagttgcatatgtagttggttgctgtataagtgacctagtactccaaaggcagcttgctgagtgcatttttcactatagtggtaaaaaaccagccctacctgcacttctcctacaaaggcagagagaaatactaccacagcttaatcctgcagaaagcatctctcttcagttttacagcacagcctccaacccaaaagcccaaaataaagcctaatgtccataaacatatggtaccaacctaataagagcatttatttactcactccttcatatatttatccgatatgccctgatcacttttgagtgaccaatgctatgctagatgcaatgttgtactgtgctaggtgaaagaaatttgcagtcaaatttcaactctaatcagaattcagtagccaaagtgatatccacagaattatcaactagtataaacatgaagcaaatattttacagttttctaatgtgctgttaactctttgtttgcagtatctgtgggatatgaatatgaaacgtgccctgac

SEQ ID NO: 698311 - DNA, 1442 bp, Homo sapiens
tcaagtgtggggccctcctaagcatgggtcgtatccatgaagatggccctgatccctgttataagctttggtagagtggaggacaaagagaagccagcctgcaatttaaaattggccacaaatgatccacaaagtcagagagttggatatttgtgattacagggactttttggcttctctgtgaatgtgctcacatacacatgcacatgcacatgcacacacaaatcagtttgactaaaattaccatcttttcccttcacctaatgccaaaaaccaaaaccagttggctttattttttcactttcggacctattgttctggcattgtttaagcacgcattttcacttccagttttcataaccaaatgacaaaggaaggactgagctcttcaggggcatctaaagagtcaggcagaggcaggtactcgaaagctatggcagaccacagaccaacaggggctattttaagctgccagaaagagggaaagccgcttcaggatatgcagtataatgagccagtgttctcaggcttagaacattatgaggatagaaagcattgtaaatttaagaatcagaaatctggggttccaacaggtgagcaggtttccaagagggaaaatggctaggacttggtatacttaagctatacatagttcagtagagcaaagactctcaagctaccacattctgcatttcacatttcagtggcataccgaggttccacgtttaatgtacaacatctgtgctgcatagcagttgaggacaaatgttgggtgatgtcccattggttagttatatgcagaaaccaaaacataacgtgcacaaagtggaatttacacttgcaacactctaagcaaacttagtctcagcaaaccaaaagccagttagcacaggaaaacataaattgggcaaatccatttgtattagttgcatatgtagttggttgctgtataagtgacctagtactccaaaggcagcttgctgagtgcatttttcactatagtggtaaaaaaccagccctacctgcacttctcctacaaaggcagagagaaatactaccacagcttaatcctgcagaaagcatctctcttcagttttacagcacagcctccaacccaaaagcccaaaataaagcctaatgtscataaacatatggtaccaacctaataagagcatttatttactcactccttcatatatttatccgatatgccctgatcacttttgagtgaccaatgctatgctagatgcaatgttgtactgtgctaggtgaaagaaatttgcagtcaaatttcaactctaatcagaattcagtagccaaagtgatatccacagaattatcaactagtataaacatgaagcaaatattttacagttttctaatgtgctgttaactctttgtttgcagtatctgtgggatatgaatatgaaacgtgccctgac

SEQ ID NO: 698312 - DNA, 1442 bp, Homo sapiens
tcaagtgtggggccctcctaagcatgggtcgtatccatgaagatggccctgatccctgttataagctttggtagagtggaggacaaagagaagccagcctgcaatttaaaattggccacaaatgatccacaaagtcagagagttggatatttgtgattacagggactttttggcttctctgtgaatgtgctcacatacacatgcacatgcacatgcacacacaaatcagtttgactaaaattaccatcttttcccttcacctaatgccaaaaaccaaaaccagttggctttattttttcactttcggacctattgttctggcattgtttaagcacgcattttcacttccagttttcataaccaaatgacaaaggaaggactgagctcttcaggggcatctaaagagtcaggcagaggcaggtactcgaaagctatggcagaccacagaccaacaggggctattttaagctgccagaaagagggaaagccgcttcaggatatgcagtataatgagccagtgttctcaggcttagaacattatgaggatagaaagcattgtaaatttaagaatcagaaatctggggttccaacaggtgagcaggtttccaagagggaaaatggctaggacttggtatacttaagctatacatagttcagtagagcaaagactctcaagctaccacattctgcatttcacatttcagtggcataccgaggttccacgtttaatgtacaacatctgtgctgcatagcagttgaggacaaatgttgggtgatgtcccattggttagttatatgcagaaaccaaaacataacgtgcacaaagtggaatttacacttgcaacactctaagcaaacttagtctcagcaaaccaaaagccagttagcacaggaaaacataaattgggcaaatccatttgtattagttgcatatgtagttggttgctgtataagtgacctagtactccaaaggcagcttgctgagtgcatttttcactatagtggtaaaaaaccagccctacctgcacttctcctacaaaggcagagagaaatactaccacagcttaatcctgcagaaagcatctctcttcagttttacagcacagcctccaacccaaaagcccaaaataaagcctaatgtccataaacatatggtaccaacctaataagagcatttatttactcactccttcatatatttatccgatatgcmctgatcacttttgagtgaccaatgctatgctagatgcaatgttgtactgtgctaggtgaaagaaatttgcagtcaaatttcaactctaatcagaattcagtagccaaagtgatatccacagaattatcaactagtataaacatgaagcaaatattttacagttttctaatgtgctgttaactctttgtttgcagtatctgtgggatatgaatatgaaacgtgccctgac

SEQ ID NO: 698313 - DNA, 627 bp, Homo sapiens
tccttagctttgcaattgagtctaggtaagcttaatatttgacaacctattacttaaatttgtattgctacaggagacatcttcatattgaacagtaatgacattcctcattcctctcagtgataaggcataagctcaaattcctggttttgttcctccagttttctgttctcccctgagaaattccaaactctgatctacacagattgccatatgtaaacaattttatctctctcaaatttgaacttttcatcatgtaattccttacctaggggttgtttcttggacatctgtttatggtagacagatagtttctgggaaccagtcatactaggtgatacagcmcccccttacccaccctggtctccttctggtataccattcctctccgggatctgacattattggtatcccacatgttcccttccgaagtcataattcctcactcttttttttcaacatttccaaaccactgtcaaatcttttttgaacatttcctcccaacattttgtatgtgaaatttgccaggcacaaatacaaggctcccctgcagtaaatactttgctcttttgattgtagcacctttcttagtgggctccagtgttcaacctcttctaggcagtgaga

SEQ ID NO: 698314 - DNA, 1852 bp, Homo sapiens
tgggcaacatggtgaaaccccgtctctacaaaaaatagaaaaatcagccgggtgtcgtggtgcatgcctgtagtcccagctactaggggggctaaggcgggagaatcacctgatcccaggaggttgaggctgcagtgcgccatgatcacaccactgcactccagcctaggaccctgtctcaaaaaaaaaaaaaaaaaaaaatgtaaacaccaggctaggcacagtggctcatgcctgtaatcccagcactttgggaggccgaggtaggcagattgcctgagcccaggagttcgagaccagcctgggcaaaatggtaaaaccccatctctaaaaaaatacaaaaattagccaggcatggtggtgcatgcctgtagtcccagctactcggggtgaggtgggggactaagacgggagggttgcttaagcccaggaggtcaaggctgcagtaagcaatgattgtgccaccgcactccagactgggcaacagagtgagatcctgtctgcaaaaaaaaaaaaaaaaaamaggaaacatcagacagcaaagatatagataagatggcagcaagagggggcagggtacgtgtgtcctcaggttcttcagggaggaatggagatgttgattaattttaggctgtgttaagtctgatacacacgttaaaaatttatgagtaactactaaacaaatcaaaaaagaatacaaaatttccaaaccagtagaggcgaaaaaaagaaacttcaatcaatcaatccaaaagaaggcggaggtgggggggatagaaagcacaaaatgaatgacagaaatgggcatgttttatacaccaggtaactaaataaatatttgttgttattatccaaatacaaaagcctttaccaaggtccttccacacagaaataaggagggcacaggaataggccttcaagttactcccagtggaatgagatggatgtcaaacatgctacagaggacccatcagaggagctggcacatctcccaataatcagggccattaatcaaattaccttcttcactttggcccccaggaagctcagaccctagttaaccacttacagcccacatagcactgggtactggaattctaggccctccgtctgagctactctaacttttttttcaaccctggcttttaatttatcatcaatattctacccattttactatttttgtcatttttataaactatctccaactctttgacacaaaatgagatataaacaagcaaacaaaaaatccaaatgaataacaaactacacaaaattaagccacacaagaactttcagacagtccaggactttcagagaaatgaatctctctaccctgcttagattttttttttaagtttttaattttaaggcagagatacttaggataatggtcttcaaaaaaaataaagaaataaagggccaggcatggtggcctatgcctataatcccaacactttggtaggccaaggcaggtgggccacctgagttcaggagttcaagaccagcatggccaacatggtgaaaccccgtttccacaaaaaatacaaaaattaggcatggtggctggctcctgtaatcccagctactcgggaggctgaggcaggagaatcatttgaacccgggagggggaggttgcagtgagctgagatcgcgccgttgcactctagcctgggtgacagggcaagactccatctcaaaaaaaaaaaaaaaaaaaagatagatagaaagaaaaaaacaccactgcataacatgtttgatacacacacacacacacacacacacacaccccagtgggtctcatttcatttccaaagccattttgttgtaaatagataattatcacttaagc

SEQ ID NO: 698315 - DNA, 664 bp, Homo sapiens
ggcacggtggctcacacctgtaatcccaccattttgggaggccgaggcgggtggatcatctgaggtcaggagttcaagaccagcctggccaacatggtgaaaccacgtctctactaaaaataagaaaattagccgggtgtggtggtgtgtgcctgtaatcacagctacacgggaggctgaggcaggaggatcacttgaacctgggaggtggaggttgcagtgagctgagatcacrccactgtactccagcctgggtgacagagtgagacccagtctcaaaaaagagagagagagagagaggactgttttaagccaggaagccaccccaagggatgctcatgacatataggcaagacagccaacagcccactcagatttaccctgggtgtggtaagtaacagggataataccccacatttcgcatttcacagagggaacatacagaccctaataagtaaagaaacttccctagacctcagagataggctcattttattttaaaaatttaatagatatgagataaaactagtatagtagaatggtcatggccaatccacagcagtgggtacatggtgctcattttaaaattctttcaacttttctgtaggtttgaaaactttcataataaaatattagaaagattttaagtttaagtttatgttta

SEQ ID NO: 698316 - DNA, 601 bp, Homo sapiens
ttctaatgacagtagccagtagagtttttgcaactgaagttcctggctgacacaggtgccttagccaagtacaggggcatgcatatatttagtacagatctcagatttgaaatagtctttaattacagcaatgactgaccacgttgggtgatggcgatcgagtgagagggcagcgaggggaagagtgcccgcccccacggttttctgtctgcggggccttggagtaggaccagtgttgtaccacaggccctggtgccagtgtgagcattggatgctcaaggacagtacrggaggtctttgataaaaacctcctctgcctaatgtactggtggggtaggtgacccaaacatgggggagagctgaccctgagctcacagcccaccgacttgctggaaggctacctaaatgcgcacttggaaggcctggtgaggcccacgcacacaccagttggctggctgaccttgaagctgtcttgctaactggtttatacttcgggtgactggtgaataaagaggctgccagagctttcagaaccagcaggggcccccatgtttggtgagtggctggtttcactttcaaagtgagttagagacagtcccac

SEQ ID NO: 698317 - DNA, 2183 bp, Homo sapiens
ggctcccaccaaaataggactgcaggactaatgtgcatttctggtaatggccttcacgttaggctggtagagcaattcttgttatagtacatgagagaaccccactacaggggcccagaaggcaatgcctaagagccactcttatatgcataagagctggttctagtcccctttagttagcttattctcatttaaatttacggcatggtctcatttaaatttacagcatggtaaaccttactggttagaggcaggtggtaattggtaattgcaagctgtctcttgctgcatttctctgtgtgtttatggtgccagcaaaacctgtgtggtcctttttattattattgttatttttttaacaaatcattgagcctgctatagaacagcaaaatggttctatgagaaccaggaggaactttaccccccaagggacatttggtaatatctggagacatttttatttgtcataattgggggttggggctgatagtattactggcatcaagtgggtagaagccagggatgcttctgaacatccagcaatgcacaggacagccccccacagcaaacagttatctgaccccagagggcaatactgctgagactgagaagccttgttttattttcttcattttatttatttatttttttgagacagggtctctctctgtcgcccaggctggagtgcagtggcaggatcccagctcacagcaacctccgcttcccgggtgaagcagtcttctcacttcactctcccaagtagctgggactacaggcgtgtgccaccacgcctggctaatttttgcattttttgtagaaatggggtttcaccgtgttgcctagggtggcctcgaactcctggactcaagtgatccactcgccttcgcctcccaaagtgccaagattacaggcgtgagccaccgcacccagctgagaagctttgttttagaaagcaatttttgctaacaaaatatctgatagaaagatcccttctggaagtacctaaaaacctcaagttaggaggttctaagagccttacacttttccagaattgctctaaaagacttagtcattctcttcatatacttgctctgggtataatctttgatgcatgctgctgggcttccgggtgaacaggttataatcctgcctccaggacccttaaaggtgatataacaacattacaggctgtaatcccagcactttgggaggctgaggcggaaggatcagttgaacccaggagtttgagatcagccgaggcaacatagctagactctgtctctacacacaaaaaaaagtcaggtatggtggcgcatgcctgtagtcccagttacttggaaggctgagacaggaggattgcttgagcccaagagtttgaggttacagtgagatgtgatggcaccattgcactccagcctgagcaaaagagggcaaccctgtctctggaaaaaaaaaaaaaaagatgcagcaccattacatgaggcacagcttggcagctaccagaagctcatagaggtccagagtagagagggagatggatctccttgaggcctcgggcggactgaatcggaacagtttgctaagggagcagcgtttaaaatggccctaaagactgatgggattagccaggtgtggtggctcccacctgtaatccctgctacttgagagtctgaggcaggagaatcgcttgaacccaggaggcagaggttgcagtgagccgagattgcgccactgcactccagcctcggtgacagagcaagagtctgtctttaaaaaaaaaaaaaaaaaaaaagactgataggtttttagccactagttgtggagaagagcaccccagggcgatatggggcacatagacaggatttatacacacacggtgtcatttggctggacacatacacatgggtgaatggtaggcagtgtggtgagatctcaggtcaagccaatgttgtgcaggacccgtgatgtcctgtgagtcrgttttcagtgtggtggttcatggggagacttgaaagttttcagagtaacagaatgatgggattggaactgttcttgacagacgatgcaaatggagctggctcacagggagggtttttgagggagaggctgcaatcaggggctatttagaagaatgttacagccctccctggccagaggaagtacaggcatgatttagagatgca

SEQ ID NO: 698318 - DNA, 632 bp, Homo sapiens
agttgcacaataatcttttgttggctggacgaagaaactagcagaagttttctcatgatggaaaccaaaaagatgggactcgatataggagggagaagatgggtagcaaaagtctcaggtactacattaagtgggataacctcagtagcatgaggccgtgaaaactggtttcttcaaattaaccatctccttgtattaattaaggttgtttctttactactagactgatagaaccaaaggaaaaaaagccccctttatggcatactgcaatccagctgaagaactggagatggcaattatctactgtcaaacagtgttttatgtcactccctttcagcctcttcttgtgaacagtactttagtctcactctgagagctagctgatgatggatgcagacacacaagtacttaggtcttttttcctgcatcaggtaacttttctattcctctttctcttctacycagagcttctttcatcttgaataggtacccaatactctgtgctgtataatttatcatgtttatctaagcctattacctagtcaagatgtgactataatccatttaaatattaatataaataaaaataacatctcacattgtattaagcagatgctataaatgaggcccta

SEQ ID NO: 698319 - DNA, 613 bp, Homo sapiens
caggagaatgacgtgaacccgggaggcggagcttgcagtggaccgagatcgcgccactgcactccagcctgggcgacagagtgagtctccgtctcaaaaaaaaaaaaaaaaaaaaattcagcagagtttccggatacaaaatttatgtacacaaatcaatagctcttctataaaccaacaacaagctagctgagaatcaaataaagaactcaatcccttttaaartagctgcaaaaaaataataaaatacttaggactatacctaataaaggaggtgaaagacctctagaaaaaaaaaacactgctgaaagaaattatagatggcacaaacaaatggaaacacatctcatgttcatggatgggtacaatcaatattgtgaaaattgaccatactgccaaaaacatctttttattttggtttagtaaaattccattcccttctttctttgtggcactggttatgagctgggctactagcctctggggccatgctaagagaaaatacaagctgaagagcaaacgatgctgtgtcactatgaatcagcagctgggaaatggaaagacatttcactaaaaaatgaaagagcactttacaggttttctttcagtattg

SEQ ID NO: 698320 - DNA, 1747 bp, Homo sapiens
attcgacgatcctggcattttctacagcgacagcttcgggggcgacgcccaggccgacgaggggcaggcccgcaaatcgcagctgcagaggcgcttcaaggagttcctgcggcagtaccgagtgggcaccgaccgcacgggcttcaccttcaaatacaggtgcggctcctgcggggccgggggctcgagttccagtgtggccgctcacacgcctctaccagcctgctagagtcctggacagtcagggcacagatgggcccagacgggggaaagagccggtcctgggtcacagggctcatcccggcagcctcacgccttggtataaggctttgtgtattttgttttactttattttattttattttattattaacgtatttgtttattattttgagacggagtctcgctctgtcgccaggctggagtgcagtggcacgatctcggctcactgcaacctccgcttcccgggttcaagcgattcttgtgcctcagcctcccgagtaggtgggactacccccgccatcaccacgcccggataattttttgtaattttagtagagatggggtttcgccatgttcgccaggctgctctcgaactcctgacctcaagtgatccacccgcctcagtctcccaaagtgctgggattacaggcgtgagccaccgtgcccggcctgctttgtgtattttatctgtacctggagttaacttctgggtgagtcacctgttgagtgggccaccagcaaccagctagcgccacttggaccgtttagttctttatccagatcttgttcctgttcatctgcttcctatcatccttccatgtcatgtctgagaccttacaaactcaagttccctgtaggtgtaaaaggtgaagatggcagttaggattcacytcacttcgctcattcatttatttataccagtcttgcaccttcattgattgagcacctgctgcctgccagatactgttctgggtgctgggctgcagcactgaagctggacctggctcctgcttctaggtgattgtacgacctgtgacatcatgagaattctcataggcccggcctctatccctgaaatgttaaaatgcagagaacatgaggttgcaggttcagcactggcccattattagctgagtgacttccaggtgtcagtgtctctgggcctcaccaggccagaaatgggtaaagccattcctgctttcacttactcatgcagcagctgatattgcccacctgtgtgccaggcactgcgctacaaagatgaaaagacgtgcttcttgtcctagagaagctcctaagtcagaggagtgagtcgtgaagaccaacagataacttccacggtggtcatttcctccacagaggaaggtgaaaggacttagggaagttttccggggggctgaagtttgaggggacctttgagctaaggtcagagttgcaggtgtagaaagctttctgtctaggtaggagcaattgcttgtgtagaggtgtggggtgtcctcacagcaagtggctttcagtagcagtctggccattttactggctcctggacataagggagacggggctcaggcctgtgatactgcgaggctggggaacagcctgtgcgttggtcagtggtccccaaatatgttcttgccacagcagtcacatgggatgctctgctaagcatctgggctggacgcagtggctcatgcttgtaattccgacgctttgggaggctgatgccaatggatcatttgacccc

SEQ ID NO: 698321 - DNA, 1493 bp, Homo sapiens
gcggcgcccggcttggagaatcagtaactgcgaggcaggggatggagcactcccttggcctggttgcgctgaggaaggagttgtggttcatctggatgctgccgactggataggatttaggatttgcctggattaaggtgggtgggggtgttgtcgtaggtcgggggtgttgttgggtgtcgggggcggggtgtgttcggggaggtggcaaggggcgggaggagacgatcgcaagctgtcttgaaccccttttgcatctcctcatctcttcctgggaaggaatatgagggtgggaggttatccaacttctagtctctttctccctggcaggtcatcaaagccgaatccgaacttgaattctgtgcggcggattgcagagctggtagggcgagggtctcccggaggaaatgtaagggggatgcgcgggagggcaggaggcactttggcttgcgttcagaagatgggagagggaattttccgcctggcgacagtggaggcggtggaggggaggtatcaggttttcagatgaagctgyttccaacccttcctttccctccttcgcggcacagtcttgaggccctgaggactgggatctgcgacacccagtggacaaaagtcggccgtaccccagaggctaattttctcacggcaggcacctgttgcagaggctgcacgtaaaataaaggcgaacgctagtttccgagctcatgtaagaatctgagaaataacgggggaaacgttgacaagggggtgtgattgagacctgaggccatgaggttaatggtttcttattatcataaatctgtgacacacaaccattgagttccgttttgagggcccagtatcagctcccaacactatgtcatctagaattagaagcaacagttgtcgcccctcctggagtacaggcaggaggggatggatgtggctctgaaaaactacctactagcccagggacacctgctagctctggaatgttgtaattgccagtctcctgcagggtattgttaaggcactgggcagatataaaatgcactgcaaggctattcaggaagatagagaatgctactgcagactgcttccccacagcccactatcttattaaccttttttactttccttagaatccctactgaaatataaggcaggcacagcccaggaacgttgctttggagaatcctgcagataaggcttttccaaaaagcgcgagcatcttgttgtattcagataccctatcgtcgtcagtcatggctagcatcactgcgtgtgtgggtaacagcaggcagcagaatgcacctttgccgccttgggcccattccatgttgaggtctctggggaggagtctctgtcctttagtggtcaaaatggcagagagaaacatgaagttgttctcaggaagagtggtgccagcccaggggaaagaaacctttgaaaactggctgatccaagtcaatgaggtcctgccagattggagtatgtctgaggaggaaaaa

SEQ ID NO: 698322 - DNA, 593 bp, Homo sapiens
aaagaccgtgaggtgagaataaacttactggagcaccataagtaaggcagaaagtgatagaagagtctggcaggaaccagatctatataaagaatttggattttcttttaggttatttattcttaaatattccttgatttattattgtaagtttatcaattgccactaattgctttgggcacaaaaggcagctttgtataatggaaagtattagcatcaaaataaaatcttggcctctaaaggcagaatcttgaaggagctgagccagaccagatgttccaaaagttagtgtatttgggaatcacctgsataatttgataaaatgagaattcctggatcccacccttggatattggtatttatttgttctgatgtaggggcatgtctgaagagtaccccaggtgtttctaatatggatattccttgggccacatattgagaaacaaatcaagtccacttatacggactacataatttaacaatggtatgttatttctagctctgacaccctaggatcatgtaagggctcttatttaatggtatttggtgatcctgggcaacaaagtattcttgtggacacatgaaatcctcct

SEQ ID NO: 698323 - DNA, 593 bp, Homo sapiens
aaagaccgtgaggtgagaataaacttactggagcaccataagtaaggcagaaagtgatagaagagtctggcaggaaccagatctatataaagaatttggattttcttttaggttatttattcttaaatattccttgatttattattgtaagtttatcaattgccactaattgctttgggcacaaaaggcagctttgtataatggaaagtattagcatcaaaataaaatcttggcctctaaaggcagaatcttgaaggagctgagccagaccagatgttccaaaagttagtgtatttgggaatcacctgcataatttgataaaatgagaattcctggatcccacccttggatattggtatttatttgttctgatgtaggggcatgtctgaagagtaccccaggtgtttytaatatggatattccttgggccacatattgagaaacaaatcaagtccacttatacggactacataatttaacaatggtatgttatttctagctctgacaccctaggatcatgtaagggctcttatttaatggtatttggtgatcctgggcaacaaagtattcttgtggacacatgaaatcctcct

SEQ ID NO: 698324 - DNA, 1428 bp, Homo sapiens
cagtaggttagctcttctttttattacatagaattaatcataacatttttwctacttttttatgatatttaattactaatttcggacacaaaaggtaacatttgaaatatctatttctctacttgccagcttagcaaggcaaagtataagaaccacaggtgtatgttaccagtacaaatgaagtgatattggaatctttctacagtaaaatataaaataatcttaaggtgcttaagaaagtaactgtgttaaaactatcaatgattaaacacaagtgcaaacgatggtgtatatatttatttccaagcctcctttctgtgtgtttcacatatatgtgcattcatgcacacacacactcacagagaaagataaaaaaagatagtgcctacatcataccacgacacttggacaaaagaccatggtagcagctgcatcagtaggtgtagaagtgatttcgattttattttattttttgagacagggtctcactctgtcatcctggctggagtgcagtgacatgatcatggcttcctgtaacctcgaactcctggactcaagtgatcctcctgtctcagcttccctagtatcagggactgcaagcgtgcctggctaattttttttattttttgtagagatggcagggggtggggtggtctcactttgttgcctaggctggtcttgaactcctgggcttcaagcaatcctcccaccttggcctcccaaagtgctgggagtacagatgtgagccaccggacccagcctatttgtatatttttgcaaacaatcctaataaatgattggtacattttgctgcaaaaataagattaatctagtaaaaattttgcatttaaattgttttaacccctctgcaatattctttattagaattttaacttagtaagatattaaaatacctgttgtaagctttgcaagattaggataattgtacagattgagcaccaacagtttaatatcccggtgttgtgataattcaaccccagaattaaaaaaaaaaaacctatcacatcaatctataccacattttatttaaagatacgatagaggccaaggtatacatgccacatatatattaaaatatcaccttgaatgctacactgtttaaacctatccaagtagacacttcatacataagacagaagtcaacaatggccagcaattaatggcaatacacattttaaaaaattgaatacagtatcagtgtaaaaatggaaggtgtttcataataccagtgtactttactcactgtccttttctttgaaaataaattcaagttgtatctttcatttccgaaaggtagaaaatttaaattcataatgaatagtaaaattttaagcactgcatcagctcttgctcattttcttgaatcaggaaagggttttgtttgtttgtttgttttttgttttttaa

SEQ ID NO: 698325 - DNA, 1120 bp, Homo sapiens
gaggaagctggaactgtggggggaaatatgaactagaacaattttttatgagaatctaataaaattcaaaaagcacatgcattgtgacccagcaatcagactttcaggaatttatcttacagaaagaataaagcaagagtgcagaaaggtgtatatgcaaggatggccattgaacattgcttataatagtaaatacttggaaataagctaaatgtgtggttctggtcaaataaattatagtagcctcagacaaagaaattccttgcaaatatgaaaaaaagttaagtagatctacgtgttctaacacaggaaagatatccatgacatactattgagaggaaaattgcaaaacattacatataacattatctcagtcttgtaaaaacacaaaaaagtgtttrtgcttatgtgtttatgtatttatgtgttttctgcatttttcaaacaataaataaaaacaatgaaagtatagtaacctttcagtcagcatgatgtttagggaatgaggaattttcattaatccgtattttttttgttgattcagaattaatcatatatttttaaattcccatctttaattgttgaaaatctttctaaaatgactccttttctaccccagtgtgacatcgaggaagcatttttgaaccttcattctatgactgatcatctttagtgacttatgttcattattttgagtatcggttctttttgcctgaagccctaataataatgacaattgctacatttatagagccaggattcaaacccagttctctgatgccaagttcttttcagtacagaaaagcccctggtagctaccctcattgattaaatccctgaaatgatgtgtttgcttttcattcacttttattttcttacagtagaaagctagagggaaaaaagtcatttggttgaaatttttggtttgagtttcaataattaaagttttatgtattcaccatgtagcttaagaaatagagcattactaattacctttttgcctctgctgtgtgatcttttcagatcccagccctcttccctcacttccctactagatgaccgtcatcctgaaatgtgtttatcattcccttgcttttccttatagttttgccatgtatgt

SEQ ID NO: 698326 - DNA, 618 bp, Homo sapiens
actcctcagcctcccaaagggctggcattacaagcatgagccaacatgctggctgattgtgctaagcttttctagcaacagccatccccctcccttctccaacatccttgagccctggcaaccacaaccctgttctccatctctataatttgccatttcaggaccattatataaatggaattgtacagtatgtaaccttttgagattgcctttttttcactcagcgtaattccctggagagtaatttgggttgttttatatgccaaaagttctttccttttttattgctgagtaatattccatggtatgtgtgtaccatggtttgtttcaccatttaaaaagtgaaagacattttggttgcttccaagtttggactgtcattaataaatctgctagttcattttcctacttaaaaaaagttgacttattgtctacatcagtgatctttatacttgagtccatgaactcttagggagtccattaacatcctaaaattctattcaaacttgttgtttttctttgaagagggtccattgctttaggtgagagagactcttactccagtactcatgtttccatagaggagaggtgacttcagtactctctaggagrcacatt

SEQ ID NO: 698327 - DNA, 690 bp, Homo sapiens
gctcaaacaatcctaccgcctcagtctcttgagtagctgggactactacaagcatgtgccaccacgagtggctgatttatttatttattttctttctttctttctttctttctttctttctttctttctttctttctttctttctttctttcttttttcttycttccttccttccttccttccttccttccttccttccttccttccttccttcctttctttctttctttctttctctttctttcttttttgaaatagagacaaagtctccctatgttgcccaagctggttctggactcctgagctcacacaactctcctgtatcggcctcccaaagtgctgggattacaagcgtgaaccaccatgcctggcctcttcccgtatatatagagtgagtggttcagacaaaagaatcaaggcatatgcactctaccgtgagaaagaagagcaaaagatgacttgtataattttccaaagagaagaactttgacctaattctactgtttcatatttggtgtctagcatgagagagaagggtgcatttcctttgcttaatgcattactttaggccattttgaccactctatttctctcccagggctctggttgggattttatcaattttaggctgcttgtgctgttctgtctgccttaggcaaacttttttttttttttttttttgagacggag

SEQ ID NO: 698328 - DNA, 690 bp, Homo sapiens
gctcaaacaatcctaccgcctcagtctcttgagtagctgggactactacaagcatgtgccaccacgagtggctgatttatttatttattttctttctttctttctttctttctttctttctttctttctttctttctttctttctttctttcttttttcttccttccttccttccttccttccttccttccttccttccttccttccttccttcctttctttctttctttctttytctttctttcttttttgaaatagagacaaagtctccctatgttgcccaagctggttctggactcctgagctcacacaactctcctgtatcggcctcccaaagtgctgggattacaagcgtgaaccaccatgcctggcctcttcccgtatatatagagtgagtggttcagacaaaagaatcaaggcatatgcactctaccgtgagaaagaagagcaaaagatgacttgtataattttccaaagagaagaactttgacctaattctactgtttcatatttggtgtctagcatgagagagaagggtgcatttcctttgcttaatgcattactttaggccattttgaccactctatttctctcccagggctctggttgggattttatcaattttaggctgcttgtgctgttctgtctgccttaggcaaacttttttttttttttttttttgagacggag

SEQ ID NO: 698329 - DNA, 843 bp, Homo sapiens
ccttggtgtcccggaattattggatcacacgtgggcttagagaatgagtgtagggttttattgagtggaagtagctctcagcagatggaggagccaaagggagatggttttcccctagagttgggctgctcgactcttctcctaccactctggacaagctccacatcattccactggtcgatggcctgccagcctgctagtgcctgtcgggcatgctccttcccctgatgtgctcttgatgaccagccacttgtgtcttccaccgatgtgctcctcacaacatttaaccacttgtgtgtctgccttgctagggtctcgagtttttacaggcccaggatgggggcatggcaagccaaggtggtcttggagaatgcaacatttggtcatgaaggcagaagtgcctaccctcacctaggtccatggaggtggagccctagtcagggactgcactctcctctaccaagcacttctcttccccgcttctgtattatttaaagggactatgctcttcctttcccagcacttccatatcaatagaaaattctaggcaccatctacktattaaaattcaatgtattagacctggtaattccgttatacattttgtttgtgataaatgcaaactagataaacattgaataaaaatgaaatattgctgaactctattcaccgttctcagctaagcttaccttagaatgctacattgattaccccagtaaacctccaataaattatataattataatattgctaatgatttcatcaaaaaaggaaaccactcttgtatctttaactctatgaagaaatagcttaatttcattaacattgttgtaaaattagatt

SEQ ID NO: 698330 - DNA, 639 bp, Homo sapiens
tgcacccccatctgcatcttggaggccgggcaggtcccagcccaggactggggacagagacccagagtagaaacccacagagaccctcaggtctgggagcataaggctggccggctcccagtgacaagtgtgctccgtcatggctgttcattaagcaccatggaagccgggggagggagagtgagctcaacctggggactgggggcagcttctgcagggagtgacgcttgacccagtcctgaaatgcacatgggtactggagttgtgttagtcagggttctcagagagacaaccaatggaatatgtgtaagtatacatagataagtacatatgtgtatgccacatatacatagacacatacgcatacacacacacacacacacgctccattccagcccggctctctctctttatatgtatttatgttaagcrattggctcatttgattgtggagactggcccgtttgaactctgcagagcaggcgggcaggctggagatgcgggaaaagctgatgctgtggccctgagtctgaaggcagggtgctggccaaactcgcccttcctcagatgtcagccttggtcctgtgcaggcctgcacctgcttggttgaggccacatcaagagtgtcatcagctttac

SEQ ID NO: 698331 - DNA, 1104 bp, Homo sapiens
tcctcacaacaaattaaccagccccaaatgtcaacagcacggaggttgagaaagccagttccagtgatagcaatgctccagttgagtgtgtataagacgacattttgaactgccaaggtagaaactacctggtaggaggagacagctcttccatagccttctggtaaaaaaaagtctaagcaagtggccaggcgtggtggctcacacctgtaatcccagcgctttgcgaggctgagacaggcagattacctgaggtcaggagttcaagaccagcctggccaacatggtgaaaccctgtctctactaaaaatacaaaattagctgggcgtggtgacgcacgcctgtaatcccagctactttgggggctgaggcaggagcatcacttgaacccaggaggcagaggctgcagtgagccgagatcgtgccattgcactccagcctaggcaacaagagtgaaactctttcacaaagaagaaaaaaaaagtcttaagcagctatcaccactctagtaaagctaagtatgtcttcattccaattttagccggatacttactaagaatcaggcactgccattctgtcatcaaaatggaacagatttattaggatgctcacaagaatggagaacacatgaactagcactctcctcatgtgacagagagtacatctgacccacatggtggcaggacacaggggaagggctctcagagctggtgccaagtgtccaccaaagaaagtcccattcaccagagacaggctgtttccttggactccaccatctctgttacagctaccagccaggtctccatgatcttcctggaatccttcatgccagcatcagttcatgctctctgagcttgtcactcccgactctttcaagacccaggtcaactgccccatggctcacccacccaggcygcctccggagtcctgcagcacatctctttggtatgctgctgccctgctaccctcaagggcatggttgtgggtagggggagaacatcaacatcacattaccaaaagcaaacagcaggggtacattagtaaacgacacttggacatagccgaacaacctcacagaacacatgcttcctccccaaatgatac

SEQ ID NO: 698332 - DNA, 600 bp, Homo sapiens
aacaggcgatgacaggcctggagaccccacaggctctccccagggcctgcttggagcgcacaaacacgtagggcacattcttgtcttcacacagcagcggcaggtgcagaatgatctccagtggctcggcgtctgcagccatcacgatgaactcagagatgcccctgttgagggttttggtggctgcggagagaaggacgtgaagctaataggtgatgtgggcttgggcagggcagccacaacaaactgggaagaatgcctaggcacacacaattatgtgtcctagaccggccctgggatatgataaaggattcaaacaccagtcagtcatacacaatggcattttctcaagccctacattaaatccaccacttatcctcaaaacacgtcctgaatctgaccacttcttcttcttcttttttttttttgagatggagtcttgctctgtcacacagctggagtgcagtggtgcgatcttggctcacttcaacctccgcttcccgggtttaagtgattctcctgcctcagtctcccaagcagctgggattacaggcacgtgccactgtgyttagctaatttttgtatttttagtagagagag

SEQ ID NO: 698333 - DNA, 657 bp, Homo sapiens
ccgtcttctctttgatcgtttaaatctggaagggcttcgtggtaccgtggtgcctccataccaagcagctactattcaggataccacagagcactgcggctcacaccttgaatttcctgatgagcaagacaaatgctcacatttcagggcacagggagagagagagacagcatcaagcacagccaccagtgcgttctctctatagtgtcaggtggagaggcgctgctaagggagggggagcaggttaagggggagcgtgggggctactttagctgtggggccaggaaagacctcgctaaggaagaaacgaccaagcagagacccgaaggcagtgaggaatgagcctaggaccccctctgcttctcacccactctctggcttccagtggccaaagcakctcataaagatcacgtggcccggcacggtggctcacgcctgtaatcccagcactttgggaggccgaggcaggcgagatcgagaccatcctggctaacacggtgaaaccccgtctctactaaaaatacaaaaaattagctgggcatgttggtgggcgcctgtagtcccagctactcgggaggctgaggcaggagaatggtgtgaacccaggaggcagagcttgcagtgagccaagattgcgccactgcactccaacctggg

SEQ ID NO: 698334 - DNA, 615 bp, Homo sapiens
aagaaaaaaggcagtggcagtgaaggagaggaggtggcaggggtgggaagaaaccaggggcctccttctgagcccctctggcacactcacctgtcagtttggcccagagctgaccaggtgagagagtgactgacactcagtggaggcaatgagcagtggacagccaggaataggcggaacagctctgggagcctcgtgaccagggctggtaggtagtctacagtaaaataaaaatgaacaagataggccggggacagtggcttacacctgtcatcccagcactttgagagrccgaggcaggaggctagcttgagccctggagttcaagaccagcctggacaacacagcgagaccctgtctcaaaatttaagaacttttaaaaattcaaaataaatgggcaagataatttcagagaacaaaaagtcctgcgaagaaaatacatctggaaaatgtgacggagcagctggggtggggcatggggtgggactctaactagggtgctcggggagggcctccaagggggcaaagggcacaaggagaggcctagacgatgaggagccagccgcagaaacggtgttcccggcagagggaacagcagatgcaaaggttgtgagg

SEQ ID NO: 698335 - DNA, 615 bp, Homo sapiens
aagaaaaaaggcagtggcagtgaaggagaggaggtggcaggggtgggaagaaaccaggggcctccttctgagcccctctggcacactcacctgtcagtttggcccagagctgaccaggtgagagagtgactgacactcagtggaggcaatgagcagtggacagccaggaataggcggaacagctctgggagcctcgtgaccagggctggtaggtagtctacagtaaaataaaaatgaacaagataggccggggacagtggcttacacctgtcatcccagcactttgagagaccgaggcaggaggctagcttgagccctggagttcaagaccagcctggacaacacagcgagaccctgtctcaaaatttaagaacttttaaaaattcaaaataaatgggcaagataatttcagagaacaaaaagtcctgcraagaaaatacatctggaaaatgtgacggagcagctggggtggggcatggggtgggactctaactagggtgctcggggagggcctccaagggggcaaagggcacaaggagaggcctagacgatgaggagccagccgcagaaacggtgttcccggcagagggaacagcagatgcaaaggttgtgagg

SEQ ID NO: 698336 - DNA, 1105 bp, Homo sapiens
agttttaaattgccatttggcagtgaaggtgctgtctccggaagatggaaaagcagatattgtaagagctgctcaggacttttgccagttagtggcccagaagcaaaagagacccacagatttggatgtagatacgttaggcagtttacttagttcaaatggttgtcctgatcctgatttagtattgaagttcggtcctgtggacagcacattaggctttcttccctggcacatcagattgactgagattgtctctttgccttcccacctaaacatcagttatgaggactttttctctgcccttcgtcaatatgcagcctgtgaacagcgtctgggaaagtagtggtcattggttgcgtaatttgatttgaggcttgtggaggaaaggacccaagtgactctgatgtttacaaagcacctatgaaaccctgtacacacctggttcataatcctcataatttatcaacaaacacaaaaaagtgtcttacttgagagtgagtgtgtgtgtgtgsgtgtgcacgtgcacacatgtgcacgtttgtatgcatggaaataaacttataaatggggacgtattggagaaggaaatacatagacctacaactttgagcaaatagcagtgatgttttaggaactgaaatgtcacacttaaagtcttcagcccagctacttccctatttttgtggggagaagagggcctgattagaactgttctggttgtgtttggcgggaggggaataatttttgttcagtccttcttagtgaccaaactttaatttttaagaataatatattgacttactgaactgaagcattctgagttgaaaggagctccagaggagtggagttctgtgttgctcacatgttaaaatcttgctcaccttcagagcagagggaatacctatcttcagatatccgtccattttcatctcttaattgtagtcaaaagtatgacttgagagtgttgctctggtattctgggttctgaagtctggtattctggtattctgggttcaaaagtatgacttgagagtgttgctctggtattctgagagttgctctgtattctgggttctgaagattatttgaaaaataactcctacta

SEQ ID NO: 698337 - DNA, 682 bp, Homo sapiens
cacaggtctctgaacagcaggtcgcgaaaggtgggggctgtagcgggctattgtgcctgctctcccagggatctgtgcctccctctgaaaacaattgcaggctttcaccttccacacacatatcccaygtgcattttaccaagaggttactctgacagctgggggaggacccaggttggcagagagaattgagccagcttggcagtggctgggaagatccagatgagagccggggtggctggcttctcaggagcagctgtcaaggcagggatgtggggggcttggcagctatccaggaagtagaactgacaggctatggggactccggagtggtgggcatggcagagatgtcccaagtgactccccaggcttctggctagagaacctgggcatggctgggtgtggtggttcccgcctataattctagcactttggcaggccaagaggagagggtagcttgaggccaggaattcaagaccagcctgggcaacagagcaagacccccatctctacaaaaaatcaaaaagttaggcagcatggtggcacacacctgtagtcacagctacttgggaggctgaggtgggtggatcgcttgagcccatgagttcgaggctgcagtgagctctgactgtataactgtactctggcgtgggcgatagaggagaccctgtcgagaaggaag

SEQ ID NO: 698338 - DNA, 2059 bp, Homo sapiens
aatatatttatgtattggtggggagggggtcttgctctatcacacaggctgaaattcaatgccacaaccatggttccctgcagccttgaactcctgggctcaattgatcctcccacttcagcctcctgagtagctgggtctacaggtgtgagccagtgcacccggctaccattcccttcttgttagacattttattttctgcttcttatcattagaaatgctgcagtcaacatcttagggcttaaagccttatctttgttttaggttgcatactgtgggaggtcaaggaaggaagataaggggttagagaagatttgtctcagagaagtaatcatattagaaaagaaaaggcacttcccaactaggtagttctgaccaaacccctctgaaggcaactgaaacacaggtcagaatagtttcagctactgtttaaaggtacctgggagctagcaagacacagcaaggaattacagggccagggtctgggagtgaaaagaggcccaggaagataagtgtatttgggttgctgtttcctctgaaagtatttttcacttcagaggaggaggcagagtggctaagaggccaaagagtgcttatgagagtcctgggagccaaggtggtgggatgctgtcccggtgaacctccattgctacaggcaggggacccagtgggctgaatcagaagagtcgcagtgaaccggaagtagttcctcccagagaccacactcagtttccaaccatttgcaccccagaaactgaactaaagttccccttgtgtgctatgacgtgtgatgtcagtgatgcactacatcctggagtgctgctcactcaggcgtctagcaacagaaatctcaggaaaacggctctacccttggtcttgcattatttgtatagtttttcatacgttgtctcaatcaaaaataggaggtgacgagacaacacgatatgaaagtcaaaagaagcgataacaaatagaaacaaacttagaggggctcctgatagtggagtcttcaggcaggaatttcaaataactttattcgatgtgtttaaagagacaaaggacaatattggaaacgtcagcaaaagaagggacacactgtgacagggggaccaaatgaaaattcttgaactggaaaaatataactaaaattaagaaatcaatggatgagtttagccacaaaaaagataaatagcaaatggaaggaaaatagctcagtcgaaaacatccagaagggatcgctgagagaccaaatgatgaaaaatatagatgatagagtaaaagacatataggatacagtgaaaggttaagttctgatatccctatttagggtctaagaagagaggaaaaaatgggtgctttagtttttagtaataatacccaaaagtcaccaccaaaccttggggtttgaatattaccaagaaagcagagtattgagagaaaattcacacgagcatcacttagcctagagaggtgattcttttcgttccttcaataagccaagcagtaattgtgagcaagcagaagacagggccaccatttcccgaggttggtcagtcttttctctctctctttttgccttagtctcacttgcacgtttcttgccccagccagcgtgtctagtgaccaccacttagaaacttctcatcccagtctgcataaggggctggagtcaatatgtggttggcacgtagtgctctcagccagctcgttgcactctaaagagactcaggtggtcagcactcactcaatcctccacgtgctctgacaggctgggctttgactgggtatctgggcacttagtgtgcttcttttcctataagctcacaattgcattgttctgactggttacgcccacactaacctcctccgttacatcatgggttaagggagttatttacagcttacgagtatagcagggatttatgtctttgggtaaagtaactatgttttatctcaacacacacaacttctcacaaacaacatatgcttatcccaacagggcacacatttacgattttggcaggtttttkagtagtaacatgattttcacctcttctaa

SEQ ID NO: 698339 - DNA, 598 bp, Homo sapiens
caggctgatggctccaggggagggaggggaagcggcatttctgacaccatggaaggcgcccacccccctgctgcagtcctgccaggtgagggcaggggtgaggggcagggctgcaccagctctgcctggagggcatggctcatctgcccatccgccaagtaataagcatccttggccctgcccgggaactgaggcccctgcacctgagcgtccctgggcctgggctggccatgcgtgtcagtgacccctgatgacccccaagtctctgttgcaggggatcctcttggtgtatgacatcaccaaccgctggtcctttgacggcatcgaccgctggatcaaggagatcgatgaggtaggcctgggtccggggagccctcccggggaaggcaggctggatggaggtacctgggccccgggtaggctctggattcccgcctgccgcccctcctgtggccccggctctgcaccctgcactgtcccacggcctacgcctgggcatgctggtcactgtgcacacgacagycgggcgtggagcccagcaagaccaggagctacggggccacccggaagggctgcactgtagggcctgagccctggg

SEQ ID NO: 698340 - DNA, 592 bp, Homo sapiens
cagcaagatttaatctctactagaaataaaaaagaaattagccaggtgcctgtagtcccagttacttgggaggttgaagtgggacgattgcttgagcctgggaggtagaggctgcagtgagccatgatcccatcacttcactccagtcagggtgacagagtgagacccagtcttaaaacaaaacaaaacaaaaaagagtgatggagcaggaactttatctgccatcagagaccatatatgtctttccttatggcccaggtcatttatcatgtccttgctaaacctcctcctctgagccttgttaaagtcctcaaggttagaagagtggtctataattataaaaaattccattgtatgacttcagctacctgcaaaactgaccgagattaatgcattctttgtttgctttcactctttcaytccctgttcagcgcttattctacagaaaggtgcctggtagatttaggacatgactgttcataggcctcaaatgcggtcaaattaggaaagtcccctggtttttggtctcaagaggttaattgctgagtactagcctggactgctcaatggattttatgtttaactgttgtgt

SEQ ID NO: 698341 - DNA, 1143 bp, Homo sapiens
tggttaataaggttgtggaagtttcgagtagcttccagttcacttccccttttaactatttgactttccaacttttgttttacaaacccactgcccatgtctgtaaaggagcagggagtcagagatggatcctgaaagggaagagggagaaagggatgcatgaagagaggtggaaagagatggacgacaaaggcagaggggactaagggaccaaataatctgtgcctgcccatttttctctttataagacttcattagataaggtgaagaacaagtaatttgggttgacaatttgagaataaaataatttaatttaccaagcattttatcataaagttctcagttttaaaatatattccttactttgctaaagaaaaaatacgaagttatacctgtaataggaataagttaaaaaaagttgacattcatgtttttactattcataaagcatatctacatgcccattttatttgatcataagcgaggtgacatatatgaggtagcagagagtaagtaccacatttaccacgtggtaaaatgattgttgaaggcattcagcctgctgggctctttcacctactccccacctgtgccaattcccatgtggaaatgtaagtctgagagaaagaaaagaacctctttctttatatctatagagtgtacatacttcatggaactatctaccccaacatatgctataggaggcatatgaaaagcttcaaaagttgttcagagaaatttgggagtaacagttcagaaatttttaataacaaaaaaatactccattcatggaaacatccctagtctttgaggcaatcatgatggaatgccacacagacctccaggctatagtctctggatataatataaacagaacaacgtccttggtaaactccaatagcacaggtagcaaagagagtcggttggagctctggtttcctaaaggaggaactgccataattttaaaatttcttaatattgaaaagacccttgggaaatttctactatttcttagcaaattrcactctttcttttcctttaatttgctgtttttcagctccagagaacattcctcactcatgcactcacccacaatgtcttcacctccacaggggctcatcacggcagtcagggcgagggccc

SEQ ID NO: 698342 - DNA, 1143 bp, Homo sapiens
tggttaataaggttgtggaagtttcgagtagcttccagttcacttccccttttaactatttgactttccaacttttgttttacaaacccactgcccatgtctgtaaaggagcagggagtcagagatggatcctgaaagggaagagggagaaagggatgcatgaagagaggtggaaagagatggacgacaaaggcagaggggactaagggaccaaataatctgtgcctgcccatttttctctttataagacttcattagataaggtgaagaacaagtaatttgggttgacaatttgagaataaaataatttaatttaccaagcattttatcataaagttctcagttttaaaatatattccttactttgctaaagaaaaaatacgaagttatacctgtaataggaataagttaaaaaaagttgacattcatgtttttactattcataaagcatatctacatgcccattttatttgatcataagcgaggtgacatatatgaggtagcagagagtaagtaccacatttaccacgtggtaaaatgattgttgaaggcattcagcctgctgggctctttcacctactccccacctgtgccaattcccatgtggaaatgtaagtctgagagaaagaaaagaacctctttctttatatctatagagtgtacatacttcatggaactatctaccccaacatatgctataggaggcatatgaaaagcttcaaaagttgttcagagaaatttgggagtaacagttcagaaatttttaataacaaaaaaatactccattcatggaaacatccctagtctttgaggcaatcatgatggaatgccacacagacctccaggctatagtctctggatataatataaacagaacaacgtccttggtaaactccaatagcacaggtagcaaagagagtcggttggagctctggtttcctaaaggaggaactgccataattttaaaatttcttaatattgaaaagacccttgggaaatttctactatttcttagcaaattgcactctytcttttcctttaatttgctgtttttcagctccagagaacattcctcactcatgcactcacccacaatgtcttcacctccacaggggctcatcacggcagtcagggcgagggccc

SEQ ID NO: 698343 - DNA, 1143 bp, Homo sapiens
tggttaataaggttgtggaagtttcgagtagcttccagttcacttccccttttaactatttgactttccaacttttgttttacaaacccactgcccatgtctgtaaaggagcagggagtcagagatggatcctgaaagggaagagggagaaagggatgcatgaagagaggtggaaagagatggacgacaaaggcagaggggactaagggaccaaataatctgtgcctgcccatttttctctttataagacttcattagataaggtgaagaacaagtaatttgggttgacaatttgagaataaaataatttaatttaccaagcattttatcataaagttctcagttttaaaatatattccttactttgctaaagaaaaaatacgaagttatacctgtaataggaataagttaaaaaaagttgacattcatgtttttactattcataaagcatatctacatgcccattttatttgatcataagcgaggtgacatatatgaggtagcagagagtaagtaccacatttaccacgtggtaaaatgattgttgaaggcattcagcctgctgggctctttcacctactccccacctgtgccaattcccatgtggaaatgtaagtctgagagaaagaaaagaacctctttctttatatctatagagtgtacatacttcatggaactatctaccccaacatatgctataggaggcatatgaaaagcttcaaaagttgttcagagaaatttgggagtaacagttcagaaatttttaataacaaaaaaatactccattcatggaaacatccctagtctttgaggcaatcatgatggaatgccacacagacctccaggctatagtctctggatataatataaacagaacaacgtccttggtaaactccaatagcacaggtagcaaagagagtcggttggagctctggtttcctaaaggaggaactgccataattttaaaatttcttaatattgaaaagacccttgggaaatttctactatttcttagcaaattgcactctttcttttcctttaatttrctgtttttcagctccagagaacattcctcactcatgcactcacccacaatgtcttcacctccacaggggctcatcacggcagtcagggcgagggccc

SEQ ID NO: 698344 - DNA, 1143 bp, Homo sapiens
tggttaataaggttgtggaagtttcgagtagcttccagttcacttccccttttaactatttgactttccaacttttgttttacaaacccactgcccatgtctgtaaaggagcagggagtcagagatggatcctgaaagggaagagggagaaagggatgcatgaagagaggtggaaagagatggacgacaaaggcagaggggactaagggaccaaataatctgtgcctgcccatttttctctttataagacttcattagataaggtgaagaacaagtaatttgggttgacaatttgagaataaaataatttaatttaccaagcattttatcataaagttctcagttttaaaatatattccttactttgctaaagaaaaaatacgaagttatacctgtaataggaataagttaaaaaaagttgacattcatgtttttactattcataaagcatatctacatgcccattttatttgatcataagcgaggtgacatatatgaggtagcagagagtaagtaccacatttaccacgtggtaaaatgattgttgaaggcattcagcctgctgggctctttcacctactccccacctgtgccaattcccatgtggaaatgtaagtctgagagaaagaaaagaacctctttctttatatctatagagtgtacatacttcatggaactatctaccccaacatatgctataggaggcatatgaaaagcttcaaaagttgttcagagaaatttgggagtaacagttcagaaatttttaataacaaaaaaatactccattcatggaaacatccctagtctttgaggcaatcatgatggaatgccacacagacctccaggctatagtctctggatataatataaacagaacaacgtccttggtaaactccaatagcacaggtagcaaagagagtcggttggagctctggtttcctaaaggaggaactgccataattttaaaatttcttaatattgaaaagacccttgggaaatttctactatttcttagcaaattgcactctttcttttcctttaatttgctgtttttcagctccagagaacattcctcactcatgyactcacccacaatgtcttcacctccacaggggctcatcacggcagtcagggcgagggccc

SEQ ID NO: 698345 - DNA, 630 bp, Homo sapiens
caccccctgagagggtgtacctccctgttgcttaaacagagtaaatcattccttcctccagatggaggacagaagggacatgcagggagtgtctgttgcagagctggtctccaatactgatagtaaccctcacagagccctactgcgtgccacgcactaagtgttatccataaggtcattcatttaagcttcataacaaccttccgaagcagaactattatccccactttacagataagtaaattaagataaggctcagagagattgagagacttgcccaaggtcacacagctagcaggcgataggaacgggattcaaacccaggctggctggctccaaatcaataaggagttgatatagtcactawtcagtaagaggcttatgctgtgaatggaggctgggactaggtctgacagttttcagccctgtagtttctctactccctagcgcagtctctgaacttctgggattactgtgcctgctcccttgttaacactccctgtgggtctgggtggacccacagatcaggtcataatgtgagtgtccctgacctaacaccctgcccaacctctatccctccccttgcagcccctacgcagagagagagagaggagagagagagaggaaggg

SEQ ID NO: 698346 - DNA, 616 bp, Homo sapiens
aatgatatagcaaaatcagtcctcataacagatagtgtccatgtaacagcagcattataaagggattctactgccatcccattatgtttattccttgacaagtatacttttttcagagcatccaaatgcattactagtaatttaactaacacctccttggagcctattttaaagtaactttaatttcaaaatataatgacattggaataaaatacattaccaggcctacacaaacttattttaaaatatctaaaatttaaataaattaacatcaaaatgaacaaaccaactctaagtctccaaagttacattaaatttacatactattgaaattatgcttttatagcaactgaagtgttaaactaactgcagcatacacaatatcatatttatcacaggattcaaattaataagaatattcaatctaatctgatagaaaaagtatcctcaaacctctatgtgttatacaagcagtcccaatttataagtggtttgtattctaaagtctatttgtaaatcagttggcaaaaaataaaaaataaaaccctctgggacatatttcacaagaaaagtaagtttaaataaaatgcttaagcastaaagctatcctgaaaaa

SEQ ID NO: 698347 - DNA, 616 bp, Homo sapiens
aatgatatagcaaaatcagtcctcataacagatagtgtccatgtaacagcagcattataaagggattctactgccatcccattatgtttattccttgacaagtatacttttttcagagcatccaaatgcattactagtaatttaactaacacctccttggagcctattttaaagtaactttaatttcaaaatataatgacattggaataaaatacattaccaggcctacacaaacttattttaaaatatctaaaatttaaataaattaacatcaaaatgaacaaaccaactctaagtctccaaagttacattaaatttacatactattgaaattatgcttttatagcaactgaagtgttaaactaactgcagcatacacaatatcatatttatcacaggattcaaattaataagaatattcaatctaatctgatagaaaaagtatcctcaaacctctatgtgttatacaagcagtcccaatttataagtggtttgtattctaaagtctatttgtaaatcagttggcaaaaaataaaaaataaaaccctctgggacatatttcacaagaaaagtaagtttaaataaaatgcttaagcagtaaasctatcctgaaaaa

SEQ ID NO: 698348 - DNA, 1462 bp, Homo sapiens
caagcaatccttctgcctcagcctcctgagtagctggcactgcaggtgcacacctccttatccagcagatattacataatttattgatcctttcttctgttgatggacagttaaggtatttccagtttggagcacctataaataatgcttccatgactcatgactgttattttgttttgtttttttttttttgagatggagtctcactctcacccagactggagtgcagtggtgcgacctcagctcaccacaacctccacctcccgggctcaagcgattctcctgcctcagcctcccgagtagctgagattacaggcatgcgccactatcgccaggctaatttttgtatttttagtagagacggggcatgttggccaggctggtcttgaactcctgacatcaaatgatccacctgcctcagcctcctaagctgctgggattacaggggtgagccaccgcacccggccctaccatgactgtttctgcacgtgtatcctagcgcacacatgtcaggattttactaggaacactctagattttagattacctaagtatggagattaaataaacatccaaataaaatgcattgtacaaattgaaagtctgtgcttcagagacacatgaatggaaacaaaaatggaaagttctagatttcatcttacctaattcaatgtgcaaactattattatagtttaaaccagaaaagtgtcacttttatgtatacatgagaatatacagttccatccccttttgcttcttttacttaagtttagatagcctatgttttagtttgtggatttctgaagttcccagtcttaggaaaagtggaatacaaagtagtcatcttcaattttcttggtcgtcctttcatcttgccagttttgtgacatcctcttgcttgttatgtcaactcagctgaattcgcctataattatggtgtctgcgtgcaggaagcaaggctggaagacaaggcagaaacagctcctgctgacccagatcaattttttccaagtgaaatctctgcaattaggccagtaatggtattttcctggagaaagaattgagtgaatttaggaaaagagttttaaagctcaacatgcctgtgtctgggggcaattcagatgcaagataattgaagagtttgtttcagcatttactcacccctttctgtaagaaacttattttcagtaacaccaaccctgtcttttgggaggaggagctcccctcaagagggaggaatagaaaagttttagaaagaaacacagaggagatatatatatatatatatggaaaagccttttaaaacaagttccaaaactcagaatccacaaarcaaaaaaattggtagttttgattatataaaatttaaagtgtctatatgaccaaaagtaccctaactaaagacaaaagataaatacagaccaaaaagaaaacaaaacaacctttgaaatacacatggtag

SEQ ID NO: 698349 - DNA, 1462 bp, Homo sapiens
caagcaatccttctgcctcagcctcctgagtagctggcactgcaggtgcacacctccttatccagcagatattacataatttattgatcctttcttctgttgatggacagttaaggtatttccagtttggagcacctataaataatgcttccatgactcatgactgttattttgttttgtttttttttttttgagatggagtctcactctcacccagactggagtgcagtggtgcgacctcagctcaccacaacctccacctcccgggctcaagcgattctcctgcctcagcctcccgagtagctgagattacaggcatgcgccactatcgccaggctaatttttgtatttttagtagagacggggcatgttggccaggctggtcttgaactcctgacatcaaatgatccacctgcctcagcctcctaagctgctgggattacaggggtgagccaccgcacccggccctaccatgactgtttctgcacgtgtatcctagcgcacacatgtcaggattttactaggaacactctagattttagattacctaagtatggagattaaataaacatccaaataaaatgcattgtacaaattgaaagtctgtgcttcagagacacatgaatggaaacaaaaatggaaagttctagatttcatcttacctaattcaatgtgcaaactattattatagtttaaaccagaaaagtgtcacttttatgtatacatgagaatatacagttccatccccttttgcttcttttacttaagtttagatagcctatgttttagtttgtggatttctgaagttcccagtcttaggaaaagtggaatacaaagtagtcatcttcaattttcttggtcgtcctttcatcttgccagttttgtgacatcctcttgcttgttatgtcaactcagctgaattcgcctataattatggtgtctgcgtgcaggaagcaaggctggaagacaaggcagaaacagctcctgctgacccagatcaattttttccaagtgaaatctctgcaattaggccagtaatggtattttcctggagaaagaattgagtgaatttaggaaaagagttttaaagctcaacatgcctgtgtctgggggcaattcagatgcaagataattgaagagtttgtttcagcatttactcacccctttctgtaagaaacttattttcagtaacaccaaccctgtcttttgggaggaggagctcccctcaagagggaggaatagaaaagttttagaaagaaacacagaggagatatatatatatatatatggaaaagccttttaaaacaagttccaaaactcagaatccacaaagmaaaaaaattggtagttttgattatataaaatttaaagtgtctatatgaccaaaagtaccctaactaaagacaaaagataaatacagaccaaaaagaaaacaaaacaacctttgaaatacacatggtag

SEQ ID NO: 698350 - DNA, 641 bp, Homo sapiens
ttaagagaagctgatagaagatcacagctgatcagacaaagcttattaatgagtctgaaaagcaatgtgacctcatatttttactcatctttcatctatgacttcagattgtagttaagaattattctcatgctttatattggttgtccccaaagtttagctgttttctatgcaagaaatctgcaatttgtgaccaatgattttcatagatttacaatgccttcagtggattttagatttactgaatcaacaatttgtatataaaatatatattttgtatataaaatattgataatattcactttttaaggaattgaaaagttttataggttatattctaatagtaacttaaagtaaagagaggcaattgacattgaaaatgataaataagacaatgattctgagaaaaaaacttaccagtttacatatcctgcctatctatacaaatattctattacttamacataagtgacagtagagatgctcatgtattacagtattctctcttaaggtctgtcagcattttcattataaacctgcttttcaagggcatataatatctctaaaatttcatttgggatttaaacttgccaaacacaattgcagactaaaaattccttttgaatatttaatcagaatca

SEQ ID NO: 698351 - DNA, 629 bp, Homo sapiens
tgagtagctgggattacaggcgcccgccaccacacctggctaatttttgtattttttagtagagacggggttttgccatgttggccaggatggtcttgatctcctgacctcgtgatccacctgcgttggcctcccaaaatgctgtgttacaggcgtgaaccactgcacctgtccgtattttattgattcttatgttctctcaggttgaaattctacagttgtattcattttataacatctgaccaatggcctaaagttgaaacaggccttgggaaatctctctctctctctcttttttttttccctagtgaaattgaactgaacctggaacctgggatatttcttgctgtcagatttrttcagttcctgtccttgtcaaaatgtttacccttactgaagatcactactcttcaggtagtgatctttagagactcaaggtgtagcttaccttatcttaaaaacaaaacaaaataaaaaaaaaagggaggtggggcacacgaaaggaaaaaaataaaaaataaaaaagagaaaagaaaaagaaaaaaactctccaaacaaaaaaccccagaaaataaacaaataatggaaaggccctataatcttagaattatagacccattagtttgtta

SEQ ID NO: 698352 - DNA, 664 bp, Homo sapiens
ggtattacaaagcaaggtgacaaattaatgcccagaaaggtcttaatgatggtgaaatgtgttgccctcctggagcatttatgtttaaagcagtaatccaaagggctggattttttgtttgtttgttttttgagacgaagtcttgctctgttgcccaggctggagtgcagtggcgcgatctcggcttactgtaacctcygcctcccgggttcaagtgattctcctgcctcagcctcctgagtagctgggattacaggcgcctgccaccatgcctggttaatttttgtatttttagtagagacggggtttcactatgttggccaggctggtctcgaactcctggcctcaagtgatctgaagggctggattttaagagaccattttagggagactttctagtgcttatgtatttaaatgcaacttatccttctcttctaggggaagagtccttgtcttcttttccaccatttcctctaagtttatcttatatttcctcatccagaagaattcctaatcttctgaccttggagatacagattttataaacaggtctggatcaagcagccgattgtgttccatcaggtctgtttccttccacgctacttgaaataagtttttatattaatagttatcccacagcgccatctgctggctgaaagccgta

SEQ ID NO: 698353 - DNA, 618 bp, Homo sapiens
ttaacctaaaagaagacagtacccagccagaaccccccacccagtgcctcaaggacaatgtaggttcctcccaaatgcttccctccaaccccagggcccctgagagttcacattctattctgaactgggataacttcccttccctgcccccatcatccaacctgattcctccagaatctggagcttaaacaaccaagacacattcccccacagttccggagttcagggtccaaggtcaaggcctcggcagggctggttccttctgagggctgtgagggagtatctgttcccacctctctggctgctgggagcctcaggagcccgttggcttgtgtgtgaggttctctgggtgggttacagagtgcgtgagaaggggagggctcgtggaggacgcagagtggggagggcagcgagcattgttggagaggctgcagctccacttcctcttttgaataggaaggtctgggtgggcctcatgagaaggtgacttttgagcaaagcagtgaaggtacgggagctgctccyacggactccaggaggagaaaggagctggcaggacaggcctggaggtgtgagctggtggtgcaggatggggagagagcagcagagatgagctct

SEQ ID NO: 698354 - DNA, 907 bp, Homo sapiens
ccattgagcaccggccagctcagctctgctctgagagagtttcctgggcatatttctgcatgaagcaaaatcaatgtgggtgaaactgaagaccatctatgggaacctttggagaggtagatgaaagaggagatgaaaggcaaaggtgaagacttgggaaacagtccaaagaagctctttcaatgattcaaatcattatttgaaattgatgtagccatcagtgaggcaccaaggtaagcctgtagccctgtgcaaaggagcctagagaygacatggggtggatacagttgagaacaaacctttggcatctcccggtgtcctttgggtctttgttgtcttcagctccagctcactaggcaacccttcttctgtgtggtttttcttccatttcccacttttctccttcattagctaccacccagctccctatgggttgaataataatttagcacaagttcaatattttcaaaatgttttgcaataaaatcttattgcctctgttcccagtggctagtgggctagaggcctggtatgactgtcccaaatttaaaagcaggaaaaatagggatgatggatcaagtgatttgccagagaagaaacaaatgagattagtgcctgttactttttatcccagcagatgaaataaacacaagagcttgattgtagtaattatttgaggaagaatggaaaaacatcattctttgtgattctcatgtaatgaatgtggtaacagagaagatggctatgccagtttttaatttgatggagattttggacatatttctagtttctttagtacatcccaagttttctcatgcataatatgcagctaatacaatagttaatatctactatagggtcattgtaaggattaaatgatctaaaacatgttgagcacttagagtag

SEQ ID NO: 698355 - DNA, 685 bp, Homo sapiens
caaaacaaggagatatgaactaggacctctaagaagcaagtgctaaatggtgtgttctcgaccataagtgtatagcaaagtgagaaaaaaatcttatttaaaaccacagctgacaacatccccttctcctgatagagaggtggcataatttcctcctggtcttttgtttagtgaaatatcttaatagttcattttagttataaaagttgaagccctagagcataatttagaaggattcacagggaagaaagagagagatggagacagaaagcaatctaaactgctctccataagaaatgaacagttttttttatacataaagggaaacttctgtgggtgtgtacctatattttgtgtatgttcaagcatagaaaaatataaaagattacataacaattattaacactgactacatcacagagtagaataagaaggagataggaaataattattatatttttctttatacccctctgaattcttaaattgatacaataagcctgttttagtttagaatttcaaaagccaggcagaataatttaggcaagagaagttctcatcaccccaagtctactgcaaaacctgcatgcacacaaatgcctctgtgccttatgtggaaagtctttggagagatcatgaaaaaggggctgtatctgattaaaatstgggaagagagaagagaaca

SEQ ID NO: 698356 - DNA, 1093 bp, Homo sapiens
gcttaagtaaaatcaggaggacggcagtctagagctggcatgtcagctctactccatggttttggtcacgcagacccctcctcttgttactttgctatgtgggatctctgtccccaaggtctcctcactgccccataagggctgctggagccccaaccattatgtctcgtattccagccacaagaaaaagataaagaaaaaggaaataaggaacacctgtcagctgcctttttaggacggttcctggaatctgctacttctcattgaccagaacttgagtacggggcctcacgctagacgggaggttggggaatgtcttaataatagaccacatgcctggctgaaaatgaagggttttgctcctgtggaagaagggaaggtggatactggagaacagcttgtgatctctgccacaacagaggagtatctttgcataggtttcttcgccatttttatggcttcatctaagaattctcttttcctactctccttttcctctcacactgatcatccttttcttactgatttttagccacacttcttatggggaactcactacacttcccaaaaccatctgtagcagtgcttggctctaagaatttgtgtcaaaatcaaatgggagccacagggatgggcccagctcaacacgtggctcacgttaaatgcctcacaaatgttggcttccttcccttgagtcaggcattgcaaaaatgttgcggtgccctagaaccccctagagtgctaacaacttggagcccaggcttattgaaagacagggcctgggcccttctgtttttaccaacttccctgggtgagaatgatacccactgaagtctgaatttgccctcaattgttgacaaactctgtactgtcatcgacttcctcttggtcagcagcacgagcgtggccaccccctccacacatcaccctgcacgcatctgaagccgaagtgaagtcccacagccaamcttctctttgccaggagaaaaagccccattttctcactcatcccttgcgtggcagggattcccaacccttctaattgctatcattctcagcaggtggacctggcgggtcaacctccctcctggca

SEQ ID NO: 698357 - DNA, 1338 bp, Homo sapiens
tagggcccgggcaatttcctcccctttggattgagctggtttttctaacttttatacaatagacatagattacttgtgtgaaagaatgaaacgctatttttaaataatatgagttttaggggaacaaaagaaatggctgaatcattgaatctcagaatcacaaattcctagagtcactgaagcatataatcaaagaatgtcagactgagggggaccctggggagtacctggcatgaacctggttcatggcaggaaagctgactttctttgcatgcctccagtgatggggaactcatcacctcccaaaggcagctcctatgaaagaggggtcaaaacttcccagaacagactgtgccaacaccagaatgccaggctccaggattctggccatggaagctccttcctcccttccccctcccaggcctgcttccatgcagcagctgctcacggcttctgtgtaccccctccagggtatccagtatttcattgagcacaagctgctgacccctgacgtccaggacattgcacggttcctgtataaaggcgagggcctcaacaagacagccattggtacctacctgggggagaggtaagaacgagtggagccttagcgaggcaggaaatgaaggtgtgcaggtgtgtacaggtgtgtggatgtgcaggtgagaggatgaattatgttagcaaagtcatcactcctagtgcttgaggggctcacggatcatcccctccagattctgagtcaaagcctgactgccttcattcatttagtcatttattcaacaaataaatgttgctcagggtctactgtgttccaggcaccatcctaagccctgggtgtacaccagtgaataagacagacaaaactcttgtcctcaggaagtccatgctagtgggagagacaggtctcaatagttgtaaaatatgttagagaatgataagctctgtggaatacaaatcgagcagggaagggaagtcagaaatgctggggaccggccaggctcggggctcatgcctgtaatcccagcactttgggaggccgaggcaggcagatcgcgaggtcaggagttccagatcagcctagccaacgtggtgaaaccccgtctctactaaaaatacaaaaattagccggatgtggtggcrggtgcctgtagtcccagttactcaggaggctgaagcaggggaatcgcttgagcctgggagtcggaggttgtagtgagccaagatcacgccattgcactccagcctgggcaacagattgagaacgagactccgtctcaaaaaaaaaaagaaaagaaaagaaaacaaagaaagaaagacatgctggggaccataggt

SEQ ID NO: 698358 - DNA, 658 bp, Homo sapiens
agtcttgctctgtcacccaggctggagtgcagtggcatgatctgggctgattgcgcctcggcaaaatctcggctgacttgcctcccgggttcaagcgattctcctgcttcagcctcccgagtagttgagattacaggcgcgcaccaccacgcccggctaatttctgtatttttagtacagacggggtttcatcatgttggccackctggtcctgacctcaagcgatccgcccgcccaggcctcccaaagtgctgggattacaggaataagccaccgcgcccggccagacgctgtgttttcctggcactccacttcatgagcaaaactgtcacagagtagtatttccctggctccacccctccggcgctgctggattcctgaacctattcacttcttctgaagtgctctcaacttggcctccctggctccttcctggtgcagacatttactcttcctgctccggctttgtgcctctgtaaaactgctgacgtcaccagcagcggctccgaccgcctgtcctccaaggtcccgggctgcggctgcgcagcgccgacagcacgatgcgtgtgccgacagcgccacctcctggctctgccgaggctgttggcaacacgcagggctcgcagtgcgcccgcttttctactgcagccctcaaaat

SEQ ID NO: 698359 - DNA, 927 bp, Homo sapiens
ccccgtctgtactaaaaatacaaaaaaaaatagccggatgcggtggccggagcctgtagtcccagctacttgggaggctggggcaggagaatggcgtgaaaccgggaggcggaggttgcrgtgggccgagatcatgccactgcactccagcctgggggacaagcaagactctgtctcaaaaaaaaaaaaaaaagaaaaaaaaagaaaaaaaaagaaaaacacttttggtcctggtctctccccagcaatctttttaaaaggtaacattaacggagcacctaccatgtgtcagtcattatgctaaatactttacatgcattagcttatttttctcacaataaagctcaatggatgaagaaaggaaggcagaaagtagtcaagtagcttgcaaagctcccatcaccagtagatggcagaactgaccctgcccttgtgggcttcctctcccctcagcctgaggtcactcactgccagcgaaggacttggaggaaatattcctcctggactgctgagagggacattctcaagttcagcagagggggctgcctggaggaggtgtgcctgccagagaaaactagcccaggggagatcaggatggcatagccggggcgccccatggaggtaaccccacggaggttacctgggcaattcagccgcagtcacgaatctcttccaggcttcattgttagtcagcaggatttgcagatgcactgggctgactctctcccggaagtatttggtggcctcttcagtaaagcgtttcttttctacttggaaacaaaaagcataagattggaagaaagtgtgctacagcctaaatggcattgagaataaggtggttcgaggttaatcctcctcaaccagctgtcacatggggtatttttgatggaggcatcagtgctatagactgagttgtgtgccctccaa

SEQ ID NO: 698360 - DNA, 927 bp, Homo sapiens
ccccgtctgtactaaaaatacaaaaaaaaatagccggatgcggtggccggagcctgtagtcccagctacttgggaggctggggcaggagaatggcgtgaaaccgggaggcggaggttgcggtgrgccgagatcatgccactgcactccagcctgggggacaagcaagactctgtctcaaaaaaaaaaaaaaaagaaaaaaaaagaaaaaaaaagaaaaacacttttggtcctggtctctccccagcaatctttttaaaaggtaacattaacggagcacctaccatgtgtcagtcattatgctaaatactttacatgcattagcttatttttctcacaataaagctcaatggatgaagaaaggaaggcagaaagtagtcaagtagcttgcaaagctcccatcaccagtagatggcagaactgaccctgcccttgtgggcttcctctcccctcagcctgaggtcactcactgccagcgaaggacttggaggaaatattcctcctggactgctgagagggacattctcaagttcagcagagggggctgcctggaggaggtgtgcctgccagagaaaactagcccaggggagatcaggatggcatagccggggcgccccatggaggtaaccccacggaggttacctgggcaattcagccgcagtcacgaatctcttccaggcttcattgttagtcagcaggatttgcagatgcactgggctgactctctcccggaagtatttggtggcctcttcagtaaagcgtttcttttctacttggaaacaaaaagcataagattggaagaaagtgtgctacagcctaaatggcattgagaataaggtggttcgaggttaatcctcctcaaccagctgtcacatggggtatttttgatggaggcatcagtgctatagactgagttgtgtgccctccaa

SEQ ID NO: 698361 - DNA, 927 bp, Homo sapiens
ccccgtctgtactaaaaatacaaaaaaaaatagccggatgcggtggccggagcctgtagtcccagctacttgggaggctggggcaggagaatggcgtgaaaccgggaggcggaggttgcggtgggccgagatcatgccactgcactccagcctgggggacaagcaagactctgtctcaaaaaaaaaaaaaaaaraaaaaaaaagaaaaaaaaagaaaaacacttttggtcctggtctctccccagcaatctttttaaaaggtaacattaacggagcacctaccatgtgtcagtcattatgctaaatactttacatgcattagcttatttttctcacaataaagctcaatggatgaagaaaggaaggcagaaagtagtcaagtagcttgcaaagctcccatcaccagtagatggcagaactgaccctgcccttgtgggcttcctctcccctcagcctgaggtcactcactgccagcgaaggacttggaggaaatattcctcctggactgctgagagggacattctcaagttcagcagagggggctgcctggaggaggtgtgcctgccagagaaaactagcccaggggagatcaggatggcatagccggggcgccccatggaggtaaccccacggaggttacctgggcaattcagccgcagtcacgaatctcttccaggcttcattgttagtcagcaggatttgcagatgcactgggctgactctctcccggaagtatttggtggcctcttcagtaaagcgtttcttttctacttggaaacaaaaagcataagattggaagaaagtgtgctacagcctaaatggcattgagaataaggtggttcgaggttaatcctcctcaaccagctgtcacatggggtatttttgatggaggcatcagtgctatagactgagttgtgtgccctccaa

SEQ ID NO: 698362 - DNA, 927 bp, Homo sapiens
ccccgtctgtactaaaaatacaaaaaaaaatagccggatgcggtggccggagcctgtagtcccagctacttgggaggctggggcaggagaatggcgtgaaaccgggaggcggaggttgcggtgggccgagatcatgccactgcactccagcctgggggacaagcaagactctgtctcaaaaaaaaaaaaaaaagaaaaaaaaagaaaaaaaaagaaaaacacttttggtcctggtctctccccagcaatctttttaaaaggtaacattaacggagcacctaccatgtgtcagtcattatgctaaatactttacatgcattagcttatttttctcacaataaagctcaatggatgaagaaaggaaggcagaaagtagtcaagtagcttgcaaagctcccatcaccagtagatggcagaactgaccctgcccttgtgggcttcctctcccctcagcctgaggtcactcactgccagcgaaggacttggaggaaatattcctcctggactgctgagagggacattctcaagttcagcagagggggctgcctggaggaggtgtgcctgccagagaaaactagcccaggggagatcaggatggcatagccggggcgccccatggaggtaaccccacggaggttacctgggcaattcagccgcagtcacgaatctcttccaggcttcattgttagtcagcaggatttgcagatgcactgggctgactctctcccggaagtatttggtggcctcttcagtaaagcgtttcttttctacttggaaacaaaaagcataagattggaagaaagtgtgctacagcctaaatggcattgagaataaggtggttcgakgttaatcctcctcaaccagctgtcacatggggtatttttgatggaggcatcagtgctatagactgagttgtgtgccctccaa

SEQ ID NO: 698363 - DNA, 1496 bp, Homo sapiens
tggaaaatggggatggagccagaggcgatggggaggacgctcagagtgtgatgaaggtctgaccctggagaagacaggagagagggaaggaaatttggacaaggtcartgaacgtccttgagccaaaattgcccatcagaagtcccacctctcccaggagaaggcgtgccttcctattcctgctacactgagaggttggctgagggcagcccctgggaagcgcagcctcagatgtgttgatggattcagagcacagcagctggggccctcgatcagctgcactccctgcagcagatctcatggctgtggcccctccaaaatctgtgctgatcacctcttcactgaagtttgcaaatattgctcttatgtgatgacttccttgattttatagttacagtgacttggattcttctgattctaggaagtaacttttttctttaatcatttattcatccattcatttaaccagtctttattaaatacttaccacatgttatgtactgagctaagtgctggggacacaaaagtgaataaaacagacctgggtcccagattcatggacttgaggatctgctgagcaggcagaaatgaatcaaacgatcagccagcatataacttccaactctagtgaatgctgcagagaaaaagtgtagaaagtcatgatgcatctgacaccagttggagtttggggaaggctccacaaaagatgtgaaatattagaaataaatgcttattgagaaaacagtgtgcagaagagtgtaaagtacaaaaccaggccaggtggtggctcacgcctgtaatcccagcactttgggaggctgaggcaggagaattgcttgagctcaggagttcaagaccagcctgggcaacataacaagatcctgtttccacaaaagatcaaaaaatgagccaggtgtggtggcacgtgcctcccatagtcccagctactcaggaggctttggtgggaggatctcttgaaccagaaggtcaagggtgcagtgagctgagattgtgcctcagcactccagccagggtgacagagtgagaccatgtatcaaaaaaacaaaaactaaaaaaagaacaaaactaaaatcactcataattctagaaccagaaataacatcacctggcagctttctttgtcttttacaaaaaatgcagttgtctaatacagcattgttcaatagaacggaatgtgagccacatatgtaattaaaaatttttaagactcttgagacattttataaaatttttggagaagtgctgttctcatttgcattgctggcagtccccagagtgcatgtctcactgtgactctggcagtggtgaccaatgtaatttcctctaaatttgttaatttgatttgtcaaatttggcatttccttattttcacaaacaattccgaagtctttgcattctagagaggctgaacattctttgtccctctgctcattagctaattcatttctagttttacattactaattttcttcttt

SEQ ID NO: 698364 - DNA, 654 bp, Homo sapiens
attaaatattactcatttatatrggatccagaacagtgtgttatacatctatatgtttttttcttttaagcactataatcctttatatgacagtaacacagaatcagatgtttatatatcatcattattgccagcctacagaatgatctctttcccaaggattttccccttatgccccacactttcattctgttgggcatttttctataaaacactgtgggaatgatatttggaacttgagggtaacatatacacatatacatatattcaagcacatatattaaaatggacatttctcattaatatctttttcttttgtttttccccaagaaaataaggtcattgaatttttcagtgtttgagaagcctataaatatttaaggaaaaaacacacttttacattttatcatatcaacccaatacatgctttcaccctatcgacacatttatgtaattgtatatgattcttccaaagtcctgcagctaatgtacattcctttttgatttaaatccatgtcctatcctttcctgagaagaattgaatctatctttatcatctctttgatagtaaaaaattttcgtaaaacaaaattaaatggtttcccagacaaacattttgaactcagataaataaccaatgtattttaaaaaaac

SEQ ID NO: 698365 - DNA, 654 bp, Homo sapiens
attaaatattactcatttatataggatccagaacagtgtgttatacatctatatgtttttttcttttaagcactataatcctttrtatgacagtaacacagaatcagatgtttatatatcatcattattgccagcctacagaatgatctctttcccaaggattttccccttatgccccacactttcattctgttgggcatttttctataaaacactgtgggaatgatatttggaacttgagggtaacatatacacatatacatatattcaagcacatatattaaaatggacatttctcattaatatctttttcttttgtttttccccaagaaaataaggtcattgaatttttcagtgtttgagaagcctataaatatttaaggaaaaaacacacttttacattttatcatatcaacccaatacatgctttcaccctatcgacacatttatgtaattgtatatgattcttccaaagtcctgcagctaatgtacattcctttttgatttaaatccatgtcctatcctttcctgagaagaattgaatctatctttatcatctctttgatagtaaaaaattttcgtaaaacaaaattaaatggtttcccagacaaacattttgaactcagataaataaccaatgtattttaaaaaaac

SEQ ID NO: 698366 - DNA, 654 bp, Homo sapiens
attaaatattactcatttatataggatccagaacagtgtgttatacatctatatgtttttttcttttaagcactataatcctttatatgacagtaacacagaatcagatgtttatatatcatcattattgccascctacagaatgatctctttcccaaggattttccccttatgccccacactttcattctgttgggcatttttctataaaacactgtgggaatgatatttggaacttgagggtaacatatacacatatacatatattcaagcacatatattaaaatggacatttctcattaatatctttttcttttgtttttccccaagaaaataaggtcattgaatttttcagtgtttgagaagcctataaatatttaaggaaaaaacacacttttacattttatcatatcaacccaatacatgctttcaccctatcgacacatttatgtaattgtatatgattcttccaaagtcctgcagctaatgtacattcctttttgatttaaatccatgtcctatcctttcctgagaagaattgaatctatctttatcatctctttgatagtaaaaaattttcgtaaaacaaaattaaatggtttcccagacaaacattttgaactcagataaataaccaatgtattttaaaaaaac

SEQ ID NO: 698367 - DNA, 654 bp, Homo sapiens
attaaatattactcatttatataggatccagaacagtgtgttatacatctatatgtttttttcttttaagcactataatcctttatatgacagtaacacagaatcagatgtttatatatcatcattattgccagcctacagaatgatctctttcccaaggattttccccttatgccccacactttcattctgttgggcatttttctataaaacactgtgggaatgatatttggaacttgagggtaacatatacacatatacatatattcaagcacatatattaaaatggacatttctcattaatatctttttcttttgtttttccccaagaaaataaggtcattgaatttttcagtgtttgagaagcctataaatatttaaggaaaaaacacacttttacattttatcatatcaacccaatacatgctttcaccctatcgacacatttatgtaattgtatatgattcttccaaagtcctgcagctaatgtacattcctttttgatttaaatccatgtcctatcctttcctgagaagaattgaatctatctttatcatstctttgatagtaaaaaattttcgtaaaacaaaattaaatggtttcccagacaaacattttgaactcagataaataaccaatgtattttaaaaaaac

SEQ ID NO: 698368 - DNA, 608 bp, Homo sapiens
attgatgccattaagactttataatacatttttattcaaacagtataagcatatttgtactattacataaagatataaacttaataaattgtattcttttgtaaaatatcttaacatggtgtgcagtttgtgttaaacttacatcatttgacagaattacaaatatttcgaaatgaaaattcagttgaacaggaggaagtagaataaaatatatctatttttctcctctgggtattaagttcaatatggcagatgcaaagttatttatcttgmaacctttataaataatatattggagacctccaaactcatttaaaattcagaaataagaaaattaacttatcagttgttattttgacagttacaattgcaataattattaaatagtaaaatttcatctatattagtaaatctctttaatacctataaatgattatgcctgtagaaaaacatactgagattatatcccaaaaatccttagattactgtccctcttcactcagtaagtatttactcaatgtttagcaaatgttaggatttagaacaatgctagatactgtttaaacctaaatattcaaacaaaaagtcagtcagaagtgggacagtta

SEQ ID NO: 698369 - DNA, 645 bp, Homo sapiens
ttacctctgtttacccatatcttctattattatgatttctcactgaccagccaagtgattccatgtcagtccctgcttctgagacagtagggcattccctttcctgtgatgacatgccaacttctcaaattatgtctctctcattatttaaaaaacaaagactcaaaactatgttctctagaaaacattttcagattggctttgtccacttttaaaaactaaaattatcccaacttccagcagtttcatataaatttatttgactacatggttatttttatattctctgtttagtttaatttatttatgtttcatgctccctctaaacttcctggaggcagggccaagcattcctttctcataacctgcacccagcaggmcttggcaaatgctactgactgatttgtttctctgtggctaatcccaaaacccacagagtttgcacataataaatgaataaacattgcgggtaacttggctaccaaagagtttaatcaaattcataaaaggaatagattttaggatcaaagatacaaattccaagagttgatgtgcacagatcagtatcttctaaaagtaagtctgaattgtggagtagaagaaaacataaagctcattatgttagcctgagtcctgtagaagaca

SEQ ID NO: 698370 - DNA, 1351 bp, Homo sapiens
tgtggcttttcattgaaatggggatgaagattcagagagtttggagggatccaaggtcatatgtggagctgacatcacttttgattcagaacctgtgctttcctggttgtgtcactagtaaatcaagctcccaaggagaaaagacagcaataagggtgatttttattgtaatgataataataacaactccaacagctaacacatagagtgctgaccatgagacaggcgctgttccaagcatgtaattcgtttactcttcacagcagcctagggaagcaagcagtgctaatatccccattccacagtgaggacagggaggcacagaaaggtgaaggaacttgcccaaagttccacagctggtttccagtggcactgggattcagacgcaggcagcctgggctgggatctgtgctctgrtcccctgtcctccactgcagcaaatacgggggagaggcagcatccctgggatgaatgagactgttgctccagccccatctcacagagcccgctctgccattcccaaactcaaaacaggatatcttattagctaaaggaggaggcagtgtggtaaggaggaaagggctatgaggctggaatgaaataagatatgcaaaatgggccaggtgcggtggctcatgcctgtaatcccagcactttgggaggccaaggcaggcagaccactgaaggtcgggagttcaagaccagcctggccaacatgatgaaaccccgtctttaccaaaaatacaacaattagctggtcgtggtggtacacacctgtaatctcagctgctcaggaggctgaggcaggagaactgcttgaacctggaatacagagattccagtgagccaagattgtgccaccacactccagcctgggcgatagagtgagactttgtctcagaaaaaagatatgcaaaacgtgtagcgtagagactggaaaggcagatgcattatttctgaagctctctagatcccaaccaaaaaacacccagacaactagataggaaaaaaaatgtttccatggaaaacatttacaaacgaaacaaggtatggttgtctgcagttcaggcccacctgcatgactttggcatctgtgcaggaaaaaacagtggcagaaccccaaaataatcaacaggtatccccagaaagtgtactaggtgctttgggggaacagcagctgaaactgggaggcgttttcctcactccaggggccagagtgtgcacagagccagtgggagggaggaaggggctggcgcaggcttgctcttgggagcttttgaaacttagccaccacagctctccctaaggtcagagtctcacacgagggagagactgctggaaatggaacaga

SEQ ID NO: 698371 - DNA, 1351 bp, Homo sapiens
tgtggcttttcattgaaatggggatgaagattcagagagtttggagggatccaaggtcatatgtggagctgacatcacttttgattcagaacctgtgctttcctggttgtgtcactagtaaatcaagctcccaaggagaaaagacagcaataagggtgatttttattgtaatgataataataacaactccaacagctaacacatagagtgctgaccatgagacaggcgctgttccaagcatgtaattcgtttactcttcacagcagcctagggaagcaagcagtgctaatatccccattccacagtgaggacagggaggcacagaaaggtgaaggaacttgcccaaagttccacagctggtttccagtggcactgggattcagacgcaggcagcctgggctgggatctgtgctctgatcccctgtcctccactgcagcaaatacgggggagaggcagcatccctgggatgaatgagactgttgctccagccccatctcacagagcccgctctgccattcccaaactcaaaacaggatatcttattagctaaaggaggaggcagtgtggtaaggaggaaagggctatgaggctggaatgaaataagatatgcaaaatgggccaggtgcggtggctcatgcctgtaatcccagcactttgggaggccaaggcaggcagaccactgaaggtcgggagttcaagaccagcctggccaacatgatgaaaccccgtctttaccaaaaatacaacaattagctggtcgtggtggtacacacctgtaatctcagctgctcaggaggctgaggcaggagaactgcttgaacctggaatacagagattccagtgagccaagattgtgccaccacactccagcctgggcgatagagtgagactttgtctcagaaaaaagatatgcaaaacgtgtagcrtagagactggaaaggcagatgcattatttctgaagctctctagatcccaaccaaaaaacacccagacaactagataggaaaaaaaatgtttccatggaaaacatttacaaacgaaacaaggtatggttgtctgcagttcaggcccacctgcatgactttggcatctgtgcaggaaaaaacagtggcagaaccccaaaataatcaacaggtatccccagaaagtgtactaggtgctttgggggaacagcagctgaaactgggaggcgttttcctcactccaggggccagagtgtgcacagagccagtgggagggaggaaggggctggcgcaggcttgctcttgggagcttttgaaacttagccaccacagctctccctaaggtcagagtctcacacgagggagagactgctggaaatggaacaga

SEQ ID NO: 698372 - DNA, 1351 bp, Homo sapiens
tgtggcttttcattgaaatggggatgaagattcagagagtttggagggatccaaggtcatatgtggagctgacatcacttttgattcagaacctgtgctttcctggttgtgtcactagtaaatcaagctcccaaggagaaaagacagcaataagggtgatttttattgtaatgataataataacaactccaacagctaacacatagagtgctgaccatgagacaggcgctgttccaagcatgtaattcgtttactcttcacagcagcctagggaagcaagcagtgctaatatccccattccacagtgaggacagggaggcacagaaaggtgaaggaacttgcccaaagttccacagctggtttccagtggcactgggattcagacgcaggcagcctgggctgggatctgtgctctgatcccctgtcctccactgcagcaaatacgggggagaggcagcatccctgggatgaatgagactgttgctccagccccatctcacagagcccgctctgccattcccaaactcaaaacaggatatcttattagctaaaggaggaggcagtgtggtaaggaggaaagggctatgaggctggaatgaaataagatatgcaaaatgggccaggtgcggtggctcatgcctgtaatcccagcactttgggaggccaaggcaggcagaccactgaaggtcgggagttcaagaccagcctggccaacatgatgaaaccccgtctttaccaaaaatacaacaattagctggtcgtggtggtacacacctgtaatctcagctgctcaggaggctgaggcaggagaactgcttgaacctggaatacagagattccagtgagccaagattgtgccaccacactccagcctgggcgatagagtgagactttgtctcagaaaaaagatatgcaaaacgtgtagcgtagagactggaaaggcagatgcattatttctgaagctctctagatcccaaccaaaaaacacccagacaactagataggaaaaaaaatgtttccatggaaaacatttacaaacgaaacaaggtatggttgtctgcagttcaggcccacctgcatgactttggcatctgtgcaggaaaaaacagtggcagaaccccaaaataatcaacaggtatccccagaaagtgtactaggtgctttgggggaacagcagctgaaactgggaggcgttttsctcactccaggggccagagtgtgcacagagccagtgggagggaggaaggggctggcgcaggcttgctcttgggagcttttgaaacttagccaccacagctctccctaaggtcagagtctcacacgagggagagactgctggaaatggaacaga

SEQ ID NO: 698373 - DNA, 2245 bp, Homo sapiens
tgatttttcatgttaacactgtgacatccatctgtatacttatgcaataatatgtttatgagcaattgcaaatacctatatatatkatttcataattaaatactctgtcacataggaagcattatcataatacaatgttaaaatatgtgttctttttgttggaatgctatggttgaaataaggaaagggaagcaaagatgcagagttagttgataactaggacaaaagtaaaatgataattgagcacaggtctctgatgaccagcatactggtatatgaatactcacagtgtgggatcacaatacagagctattcctaaatgctctatgtatttataattcaatttcatatgaatacatttgaatttttaactttccaaaccaacatgtcaacataactttaacaatgttggctttaatatcccttccaggactaactgtgatttattctgctatattgtatgtttgcaatttagtccattctctatttattccccataatatttgtagaaatctggatggcttaaagagccttactttactctgagcgtcatagctcatcttgtgctagtatgataattctccacactcactactgttttcttttttaaaaaaccactggagtcatattgaggggatggcagcctgctgccaacttgttgggatcttttcttcctgctcctcaatattgctcaagaagagaggcactggagaagcaaggcatcagaaagctccttctcaaatgatgctggaccaagacaggaagatttagaatggttaaggagaaggtaataaaccatcgtatttcaattaataagatcttcaatttagcccctcctgcctaagatatccttggcacacctataaaaccatttcctgtatgtatattaagaaaacgttagctttccaatgaaaccatagaataattaacaaggcatttctttagaaaataaaaaatgtcaggaataaaatcaaaggataaatgcgctttttaaactgtcacttgatgacgctttaaatgtgacattttacctaacattttttctaacatctattttattgtaaatattcccatactagaaaattaattcatgtattctcaaataattttgttccaaagttacagttggtaatttaaatttccctacagcagagttaaattcatttattaatctccaaattcagcagttttttaaaaattgttcttggtgacgagaacaaatttgaaagcctgctgaatttaaaattatggactctatattactttgagagtcttatttgttgtaccaaatgcaacctgcaatccctacagttatatagcttttccacgagcaagcacaaaatatttaggaaaatttcacacatacgtgctttatttcctgagaagtttatatgacagacaatctaacattattattaatgtcatttcacaaagtcttctgcatgtttatatttcaacaagactgagttcctataaaggcatcattttgctgtaatgttattaggctgcttcttcttctgataaactgttttgaatttatgaaagcaagacactgtgaggttgttttattgggaaaacttatattaagaagcaaatctgccagtccttcttctctatttttaggtagagacatagtatgccagatatccaggtttccaaataaattagcatgttgaactactatatgatctaaaatgcataaaaacacttatttttctatagtactactgaatattaattacattgccaatattatcaactgtgtctaaaacacgttgggactataaaaatgtctgatagtgaaaaagcaaaaaacaaagagataaggatacactaggttaagttatagttgacagtattagagaacagaatgtaattttcttgcactcaaacaataccggtgggcataaaagtaaagacaaaatcaaatgttttatgaactatacccaaactacactatatcgtcactgtttattcaattttcattttatgtaaaagctgaaatgctccatttcccgctttaagatcacattgctgtaagtagcatcttattacctgctttatgtagaatattttcatgcttgcaaaaactagctatgaaagtaatacaacttgaaatgagtctccgaacgccaaatattccatattgtcacataaagataacacagttttaagagtcaatatcgcaactatgtactaaggaaacagataaggatgtgctgatcagtcacagcttttattttgt

SEQ ID NO: 698374 - DNA, 3647 bp, Homo sapiens
ttatgagaggatgaacagagtatgttttgaattaattccaaatcatcacactgttcaggaataactgtgcccaaagtactttgagatctgaatcataatcactactttgtacagatggacatgtttacaaaagacagtcatgtatcaagaatgcatttatcattgacattttgaaattcagtttgtactttatccagttctcatatcatgcatacaggtgataaaggggaaattatactggtgtatgactagaaagaacactgaagttgtaagattttgcttttagtttgactttatggttaatgaactgtgtgaccttggacaagtcactttacttttttgcatctcaatttcttcatatatattatacggagtctagacagatttctatgttttcaaaagcactcagatgtgatggatttaaaaacaactgaagagagaataaaatgaatctaagttttgataggcattttatctgtggttttctttaaattcaattatacctctccctttcccctcttgtttttgtaggtgtgatagttaatttatgcatcaacctgactgagctatgggatgcccagatatttggctagtctcgatgtttctgtgagggtattttttttttggatgagtttaacatttaaattgatagactgagtaaagcatattctcctctctaattgggtggggctcatccaatcagttgaaggcctaaatacaacagaaggctgacctttccctcaataagagagaattactcttgcctcactgccttctatctggaacatgggatttcttcctgcctttagactttaactgaaacactgcttcttcctggatttcaagtctgccagcatttgcgctggaaatacaccattggctctcctcagtctccagcttgccaactgcagatcttgggacttgtcaggctccataatcatgtcatctaattccttataataaatctgtgtgtgtgtgtggtgtgtgtgtgtgtgtgtacatatagaggaaacaaactgtaaatatcaggcagaataaataaaatgttgtaacagaaatgtaaataacatgtggtaggagcaagaagtactaaattatccatttaagtaactctaaataatactttttcatatatcaggagtctataaccttatttttctaacatgttctttgagcttgttatgatttagatataattggggatttgcctgtgtaccttttaccataagatgaagattaactaatatctgtcagaatctaacctttgatagcacaattttctgtaagaatttgccaagaatgtgccaagaatgtgctttttaagtgtatgctgaatatggtcattttcctggatcttaaacaaggaatcatagaatgactaagaaagttttaggtctcctagaaaaaaataaaaagaatagtatttttatgaaacatgaagattccttttacatttctgattacaaaagaaagatttaagcatattcaaacaaaaatgaggaaaatgtctgtaaggatagaaactatgtcttattaataatttccttccctttgccttattatctactttgcacctggtaatatttaatctatgtagatttaatgcataacaaattctaagtggaattcttgtattagggttccctagaggaacagaataggatatatatatatatataatatatatataatcaattgtatataataatatacaaatgatataatatatataataatatacattatttgtatattattatatatataagttatatatataattaacttccatatacaggaagttaattaagtattgaactaataggatatacacattatataatcaattgtatattttaatatacaatataatatataatatatataatactatgtataattaatatatattaattgtatattattgtatatattagttatatatataattaacttccatatatatgtggaagttaattatatacatatatgtggacattaattttatatatatatatatatatatatatatatggaagttaattaagtattaacttacatgatcacaaggtcccacaataggctgtctgcaagcttgaggagcaaagacagccagtccaagtctcaaaactgaagaacttggagtccgatgtttgagggcaggaagcatccagcatgggaaaaagatgtaggctgtaagactaggccagtctcaccttttcacatttttctgcctgctttatattcgctggcagctgattagattgtgcccaccagactaagggtgggtctgccttccccagcccactgactcaaatgttaatctcttttggcaacatcctcacagacacacccaggatcaatactttgcatccttcgatccaatcaagttgacactcagtattaaccatcacaatgattatcatataaattattatcatataaatttactttatcaatgaatgccagaattgtaaaataaaagaaaaatgcaaaatagctatgggactaaagtgccatctaaataattactgattatacaggttggggaataagcctacaaaccagttgaatatttagggcaatgtaaaagccatgagctctctcgatattgtattttagcaaaaccttgtgtagcaaattaagttagtcagctactaggacactatggtagttaacattattgaaaattacttgggaatactttgttttatttctttcccataattatctgattatacaactgaaagaaaaattacatagccatagacatctgtgtattaaaagctacacatcaacaacctttcatgtgcttaactggaactatttcacttggcatgagacacattatccagcactaaaatggtcaaaataaaagtaatatctaattttgaaaggttgtatgctaagcacacaactttaaaacaagtctgtcctaaatcactgcatcaaaaatcattacaaaattttgaaataggtaaaaaacattaatgttgactcatggctcaaatcaccccagcaaaaagagatcaaagaatggaataacattgctataataaaactccttccatttacatccacttatttaggtaaacaaacattttcaacactcatgtctgtaaaaacaaacaaaaataaattaactgatgctgactcctgtcttattcttcctcaataaaaattatatttagagtcaaaaaatttaaaaactaaaatttatgtatttgttgtaaaaatatgataaggtaatcaacaaaatactttcaagtaaaaatgtgttacgaaataattatcttaggaaacttaaatgaaaatgtggattcgaggagaaaaggaactatttgaaatttctgctcctaaagaaaaaaatttcatgtattattgaattataaaggtattaaatcactacaatatatagattccattgaatatgtttgaaaaagtaatttaaaaatttattttgaaatactaacgtttaaagtatgatagaaagtgcattttttgacactttaaaattatgatgtaatatttcaaatgtgagcttcatattgtatcagactctacataatttttcaaatttttttgtagargatgtgtggagcaaaatgtttgaagacaattcctgaaggctaacgcaagtttgaaag

SEQ ID NO: 698375 - DNA, 624 bp, Homo sapiens
tcacacctgtaatcccagcactttgggaggccgaggcaggcagatcacaaggtcaggagttccagcccaacctggccaacacggtgaaaccctgtctctattaaaaatacaaaaattagctgggcatggtggcgggtgcctgtaatcccagctactcaggaggctgaggcaggagaaccccttgaacctgggaggcagaggtgagcrgagatggcacgactgcactccagcctgggtgacagagcgagactccactctgtcagggggtgcaggggcaggggggagaaaagaaacacaaatgatacaataacaacaaaaatgataagaatcatttcaaataaggcaaatcccatgaaaatgtggcacctgtttacaacattgccctcaatattctgaaaaattgcatataggaaatggatcatttgactaaatgtgtagtatcagtttgcaagcttcagagaacaaaagaaatgcaatcacagacaatttgaaagttatttcagtcatagacatcttaaatgaagggtatgccagacacttcaaaaaaaaataaaagattcatgcccaaggttactctttcattccaaatttgaaacatttctctttctgcaaatatctattatc

SEQ ID NO: 698376 - DNA, 613 bp, Homo sapiens
acaggctgctttttccaaaattattacaacttaaggaaaactgcatgtttccaccttcccatccagcatgtcttgccttcttcttcctcccagagactgtagtaacacacaattttcacctctacatttaacactgcaaatgaaaattgattctgagtggcataaargctatgtaaagatggaatgcttggatgtgtaggacagtaaaattcatttatttacagcaagattcttggattccagtgacctttccaaacatgctaattcactaagtcaagtaatgttgtatattacaaaagataatttcattaaattaatagaaatggtaaacacgaatacaaaataaacctaaacagtcaatagagaaacagatttatttttattttgacaaaacagatttattttatcccagaaaatgttgttttaactttctgcatttcatacaagtaaggtcagataattaacattatctaggcactttaacttctggtgtctctgtaacaatattacagcatcccaatgcctttgtggtgaaaacctgttcagcaacatgtaaaatataaaatgtagtatatacatcactgtaccttagtgtttgtgtaggtatatactc

SEQ ID NO: 698377 - DNA, 647 bp, Homo sapiens
tataaatttttgtttattcattaatcagttgatggatatttgagttattgctaacttttgactattgtgaataatgctgttgcacaaatayctacttgtccctgctttcacttctgtgggcgtatacccagaattataattgctagatcatgccataattctatgttaatttttctgagaaactgccacattattttccataaaatgcattgttttacatactttatatactcaccagaaatgtacaagagttccagtttccccacattctaattaatacttgtcactttcttttttttatttgtttatgttttgttttgttatcgtatccatcataatgagcatcataatgagcatgaggtaatatctcattgaagtttctgtcacctaaaatgctatgatatatgatgttagctgccgatttttcataaatatcctttgccaggcataggaagatcccctctaatccttagttcattgttttaatcatgaaagggtgctaaattttgcaaaatgcctttttttaacttctattttaagttcaggggtataagtgcaggtttgttacataggtaaacgtgtcatgggagtttattgtacagactatttcatcacccaggtattaagcgtagtacttattagttatt

SEQ ID NO: 698378 - DNA, 600 bp, Homo sapiens
cagtggacattgctagtccgaaggcagttgagaaaagagattcagagaagcatgcacgatctcttgcagattctacccagaagtgacacaagtcacccctgctctgatttcactggctagaacagatcacatgaccaagctgcgaggaatggggcaggatatttgctggggatgggcgggtacgggggatattcagggagggaatctggggtacttggacgctgcttggaggaagcattctaaaacatcttgggtggcagctaaatgcttcttttcggagcgccctgcattttgcaatgctctgccatgctaatgatttgaaacggtggctaatctgacaagccaattggagtccccgtgattgcatttgactctctgactaatgacaagagatgaactcycttttcttagtgcaacttacggttggatagacttgggccatcgcccggtcccaatgttcaaaatgttgccttgtaaattgtctaataaagtaataaagaaagggacttgctaaatgatttgtcttttaaccgttgtaatgggattttttttgggtaacattgttttatgttagaatgcaaaaattatcacacgtaatta

SEQ ID NO: 698379 - DNA, 1018 bp, Homo sapiens
tgaaggcaattcttttgagtagggagacgccatgagctgttagcagacaatacttagagcagctaaagaatggctacacagtcccagtaaaggagatcttgtctgtgtattcttagcatccgtaacaatcccaataatgcccattacattaaggtcaattttttgtataatactgcttcatcagctttgtattagtatttccccaaaatatctttaagtcatttgcttttaaccttcctgcattcattttttraagtggcatagagctccattttgattttttactaatctgaaatctgtcctaacaggcaaattaatctgtttacattcattatgagtagcaacatactttgacttatttccacagtactttgagtttactgtgcttttcgaactttttattcatttagtgcttactattaaaattaaaacatgaaagcctgacataaaatctaaaattaatacctctatcctcctaaagaaggatcattgactctcgttttctggccttgtattttagttccagtattgcttgctttcattgaaattttaattgaaattatattgataatattgtatatttacatgcagttctaaagaataaaaaggttaagtttactttctactcagtttccctcatggcaatatcctggaaaactattgtacagtatcacaactgtactatatatactgtgtcaatatcacaagaatagtgacactggtacagtcaagatataaaacatttctatcatcacaggatctctctgtcatccctttataagccaccctaaactcttcacctcattcctagcccttgacaacctctaacctgttctgtatttatatagttttgttatttcaagaatgttacatgagggaaccttttagcattatataatatcctctgtcattgttaactttctttactctgaagtctatttgatattaaggtagttactgctttcctttgataaatgcttgtataatatgatttttccaaccttttaatttcaagttg

SEQ ID NO: 698380 - DNA, 664 bp, Homo sapiens
agaaagccctgtgtctcagctctttgagctagagattgaagctttgcccctggataccccttcctctgtggagacggacatttcctcttccaggaagcaatcagaggagcccttcaccactgtcttagagaatggagcaggcatggtctcttctacttccttcaatggaggcgtctctcctcacaactggggagattctggtcccccctgcaaaaaatctcggaaggagaagaagcaracaggatcagggccattaggaaacaggtaataacaagaggaggaggaagagggaagccaaggagggattgcaggggactttcggagagcaatactggggaactgagtctgctgggagagactggactgcccccctccagcctcagtcttcccgtacccctccacatatttatgtttctgtttctagctatgtggaaaggcaaaggtcagtgcatgagaagaatgggaaaaagatatgtaccctgcccagcccaccttcccccttggcttccttggccccagttgctgattcctccacgagggtggactctcccagccatggcctggtgaccagctccctctgcatcccttctccagcccggctgtcccaaaccccccattcacagcctcctcggcctggtacttgcaaggtaagaaggggagggcg

SEQ ID NO: 698381 - DNA, 1387 bp, Homo sapiens
cagagacaccatcttcatggacacggacatgacrcgcgctctgggcagcctggctagagctctgcccacggcacgtcagcccctccacttccgtctgaaaggtgccggccgcgtgtgtcacgcgagaccagtcctgcacgtggatctggacggggcaactgcgcgaagggtcatgaatcccgccggccagggaggatcgtctcctgtgcagaatgaggtgcggtcagaacacggcagaagctgggagctcccacccggctgcccgagacacctcccctcaagattcaccaaacaccacgacgtgcaaagaagaaagtccacgcctccgcggaaaacactgcggctcggcaggtcaatccaaacctggaaacacctcggcgcggcctgtcagtctgaacccggaaacacctcgacgcggccggtcaatctgaatccccagaaaacaccgcggcgcggcaggtcagtccgaacccggaaacaccgcggcgcggcctgtcaatctgaacccggaaacaccgcagcgtggcctgtcagtctgaacccggaaacacctcgacgcggccggtcaatctgaatccccggaaaacactgcggcgcggcaggtcaatccaaacccgggacatcattgctaccagggcggaggagaatacacgcaaaatataccagggcggaggggaatacacggaaaatataccagggcggaggggaatacacggaaaatataccagggcggaggggaatacacgcaaaatataccagggcggaggggaatacacggaaaatataccagggcagagggggaatacaggcaaaatatttcagggctgaagagaatacaggcaaaataaagtgcatctcctagaattcccgcaatccaacagcgtagcccgattccatttccaaatagacaccactttctaaaaacgtcacggaggaagatgcttcctaacgactcaggggtctgtccataaacttggcatcatgtggtccaaagtctctggagcgtggagggcgatcttctctaatcccggggtcgtgctttctgggacagaaatgagagaccccagaaagtccctggatgctacccaggggactgaggggtggtccacagcaccatgtgttctgagagggggtctccctaaaggtggggagcagggaggccgggcacggcccccactggcttcagagctcctcgcagcctgcgccagcgcagagcaggacgggaaacagccccgggagcagaaggtcccagcagcggaattcccctccacttggaccaggcctgcgggagatccgggcactgacaggcggggacattttagaatcttttcaagaaaagataaagaaagaaacaagagtaacaggaggccagaagcaagggcatcta

SEQ ID NO: 698382 - DNA, 1387 bp, Homo sapiens
cagagacaccatcttcatggacacggacatgacacgcrctctgggcagcctggctagagctctgcccacggcacgtcagcccctccacttccgtctgaaaggtgccggccgcgtgtgtcacgcgagaccagtcctgcacgtggatctggacggggcaactgcgcgaagggtcatgaatcccgccggccagggaggatcgtctcctgtgcagaatgaggtgcggtcagaacacggcagaagctgggagctcccacccggctgcccgagacacctcccctcaagattcaccaaacaccacgacgtgcaaagaagaaagtccacgcctccgcggaaaacactgcggctcggcaggtcaatccaaacctggaaacacctcggcgcggcctgtcagtctgaacccggaaacacctcgacgcggccggtcaatctgaatccccagaaaacaccgcggcgcggcaggtcagtccgaacccggaaacaccgcggcgcggcctgtcaatctgaacccggaaacaccgcagcgtggcctgtcagtctgaacccggaaacacctcgacgcggccggtcaatctgaatccccggaaaacactgcggcgcggcaggtcaatccaaacccgggacatcattgctaccagggcggaggagaatacacgcaaaatataccagggcggaggggaatacacggaaaatataccagggcggaggggaatacacggaaaatataccagggcggaggggaatacacgcaaaatataccagggcggaggggaatacacggaaaatataccagggcagagggggaatacaggcaaaatatttcagggctgaagagaatacaggcaaaataaagtgcatctcctagaattcccgcaatccaacagcgtagcccgattccatttccaaatagacaccactttctaaaaacgtcacggaggaagatgcttcctaacgactcaggggtctgtccataaacttggcatcatgtggtccaaagtctctggagcgtggagggcgatcttctctaatcccggggtcgtgctttctgggacagaaatgagagaccccagaaagtccctggatgctacccaggggactgaggggtggtccacagcaccatgtgttctgagagggggtctccctaaaggtggggagcagggaggccgggcacggcccccactggcttcagagctcctcgcagcctgcgccagcgcagagcaggacgggaaacagccccgggagcagaaggtcccagcagcggaattcccctccacttggaccaggcctgcgggagatccgggcactgacaggcggggacattttagaatcttttcaagaaaagataaagaaagaaacaagagtaacaggaggccagaagcaagggcatcta

SEQ ID NO: 698383 - DNA, 1387 bp, Homo sapiens
cagagacaccatcttcatggacacggacatgacacgcgctctgggcagcctggctagagctctgcccacggcacgtcagcccctccacttccgtctgaaaggtgccggccgcgtgtgtcacgcgagaccagtcctgcacgtggatctggacggggcaactgcrcgaagggtcatgaatcccgccggccagggaggatcgtctcctgtgcagaatgaggtgcggtcagaacacggcagaagctgggagctcccacccggctgcccgagacacctcccctcaagattcaccaaacaccacgacgtgcaaagaagaaagtccacgcctccgcggaaaacactgcggctcggcaggtcaatccaaacctggaaacacctcggcgcggcctgtcagtctgaacccggaaacacctcgacgcggccggtcaatctgaatccccagaaaacaccgcggcgcggcaggtcagtccgaacccggaaacaccgcggcgcggcctgtcaatctgaacccggaaacaccgcagcgtggcctgtcagtctgaacccggaaacacctcgacgcggccggtcaatctgaatccccggaaaacactgcggcgcggcaggtcaatccaaacccgggacatcattgctaccagggcggaggagaatacacgcaaaatataccagggcggaggggaatacacggaaaatataccagggcggaggggaatacacggaaaatataccagggcggaggggaatacacgcaaaatataccagggcggaggggaatacacggaaaatataccagggcagagggggaatacaggcaaaatatttcagggctgaagagaatacaggcaaaataaagtgcatctcctagaattcccgcaatccaacagcgtagcccgattccatttccaaatagacaccactttctaaaaacgtcacggaggaagatgcttcctaacgactcaggggtctgtccataaacttggcatcatgtggtccaaagtctctggagcgtggagggcgatcttctctaatcccggggtcgtgctttctgggacagaaatgagagaccccagaaagtccctggatgctacccaggggactgaggggtggtccacagcaccatgtgttctgagagggggtctccctaaaggtggggagcagggaggccgggcacggcccccactggcttcagagctcctcgcagcctgcgccagcgcagagcaggacgggaaacagccccgggagcagaaggtcccagcagcggaattcccctccacttggaccaggcctgcgggagatccgggcactgacaggcggggacattttagaatcttttcaagaaaagataaagaaagaaacaagagtaacaggaggccagaagcaagggcatcta

SEQ ID NO: 698384 - DNA, 1387 bp, Homo sapiens
cagagacaccatcttcatggacacggacatgacacgcgctctgggcagcctggctagagctctgcccacggcacgtcagcccctccacttccgtctgaaaggtgccggccgcgtgtgtcacgcgagaccagtcctgcacgtggatctggacggggcaactgcgcgaagggtcatgaatcccgccggccagggaggatcgtctcctgtgcagaatgaggtgcggtcagaacacggcagaagctgggagctcccacccggctgcccgagacacctcccctcaagattcaccaaacaccacgacgtgcaaagaagaaagtccacgcctccgcggaaaacactgcggctcggcaggtcaatccaaaccyggaaacacctcggcgcggcctgtcagtctgaacccggaaacacctcgacgcggccggtcaatctgaatccccagaaaacaccgcggcgcggcaggtcagtccgaacccggaaacaccgcggcgcggcctgtcaatctgaacccggaaacaccgcagcgtggcctgtcagtctgaacccggaaacacctcgacgcggccggtcaatctgaatccccggaaaacactgcggcgcggcaggtcaatccaaacccgggacatcattgctaccagggcggaggagaatacacgcaaaatataccagggcggaggggaatacacggaaaatataccagggcggaggggaatacacggaaaatataccagggcggaggggaatacacgcaaaatataccagggcggaggggaatacacggaaaatataccagggcagagggggaatacaggcaaaatatttcagggctgaagagaatacaggcaaaataaagtgcatctcctagaattcccgcaatccaacagcgtagcccgattccatttccaaatagacaccactttctaaaaacgtcacggaggaagatgcttcctaacgactcaggggtctgtccataaacttggcatcatgtggtccaaagtctctggagcgtggagggcgatcttctctaatcccggggtcgtgctttctgggacagaaatgagagaccccagaaagtccctggatgctacccaggggactgaggggtggtccacagcaccatgtgttctgagagggggtctccctaaaggtggggagcagggaggccgggcacggcccccactggcttcagagctcctcgcagcctgcgccagcgcagagcaggacgggaaacagccccgggagcagaaggtcccagcagcggaattcccctccacttggaccaggcctgcgggagatccgggcactgacaggcggggacattttagaatcttttcaagaaaagataaagaaagaaacaagagtaacaggaggccagaagcaagggcatcta

SEQ ID NO: 698385 - DNA, 845 bp, Homo sapiens
tctccttgaagtgtgctgacccggctcttgctcatcctcagagagtggggtccagctccctggggccagcgcttcccagacatcagacaccacagaccgaggccacaggctgtgtctgacataaatatttcacgtgtttatatacaacctggcgcttatgggtgctcagaagcctggagactacctgggaaattgaattcctgtatattttcattccaaagaaattatttataagcgatttatggagaacatactccttcataaatacatatttacattccagacgtttcccagggcagagccagttgtgcgtgctgtcagcctggacatgtgtgtgcgcacacacacacacacatatacacgtccttacctcttcattattaaacttaattcttccatatgggaatttaggtttttaaccttgaaaatgatgaaaatcagaacagcgctgctttccaggagcctttttacctatcggctcaggggtgggagctggagccccaggccggctcaggcacccccggcagcacaggccaggagccactggtctacctcccccaccctgagatgcatggagccgtaggggcctctcagggaaactgaggcttatttccttcgtgggcccacacacctgtgtaggtggctgggcacagaggaagctcgggctytgcggaggaacaaacacagacgatgacggggacagaggttgccggtttctagaaagtggctgttgggcacagaggaagcttgggctctgcggaagaacaaacacagacgatgacggggacaggggctgccggtttctggaaagtggctgttgatgttgctgctccagtctgaatcca

SEQ ID NO: 698386 - DNA, 1125 bp, Homo sapiens
ctaacagaatagagactatagtttaaatccctacacaatgaagttgktcaggtggctattatcttttggttgtattagaaatgactaattttgcttattgccagagtaagtgagccatcttttgggcattgtgaaccttggttctgagggtttacttttgcttctgccagtcactttgagaccacttcatattaaattctgagattggggatatttgggccacactagcagtgtgaagttagaccaccagtaagagtaccagcttgtagtttaaattcccagatgagatgttcttcccactctctccactaaagccaagactgagacatgtaagattttttttcctgtctcactctgtgaggtgagttcatttcttatttacctttatattaagggtatagctctttggtgtctcagctttatgtaggggtcccctattaagtttctcttatcatacatttatttaaagtacctacaacagtggttcatcttttacctgacggcttcctagattggacaatatatgctaattagtggaaagcgtagcatgtgggggatgtagaatgccagaaaagaataagaatgttacttgattgatggcatgcccatttggagtctgaatgcctgggggagagaggtgacagtagtagactttatgtcttagggaaccacatcaaagggagtggctctgagagtttatgaagtgtaactatcattcagtgtgagtgcgttcctgttcttttcctggaagatagggcacctgggggccttgcccaccatttgtttattgtttttctcctctactaaatgtaaattccattaagaacagggactttgatttccttcttcaccaatgtcttcaagtgcctataatagtacctggctcacaataggggtttaacaaatatatgtgcaataaatgaatgtgtggcaggtcctggggccagagccatggccatgacaccacaggcctcagtttgcagtgctgagaaggttctgttccctggctccaataaacagtttgaagctccagagatagtagaagtgggagccaagtcatgaagccaagtgggtcaggaaggaggggagccgatgtgtgaggaagactggagcaggcagaaggta

SEQ ID NO: 698387 - DNA, 627 bp, Homo sapiens
tgcctcacacggagagagacacagaaacatgggtatgctagccaggcaaggatatgcacacgataagcactaaacaaatgcctccactcaaggcagtttagggaatggatcaaaagaaaaggaagtaataaaactaactggaaaactgcaactgggaaccacaagagtgggaaagccagaatgagcagaagcctgtcctccatgagaacacagctgtaaagccccccttggtgctctagcgtcactcccaccctaccctcagatctcctggtcactagactgttcttctggatcacttctttctccagtgaggccagtacctaaagaattgttctgaatgggctgagacagcgaacccacggattcagggacctaaattttctacctgtgaacttccactatttggaaggcctgcagatgaagcctgcctgttaggtgacagtagaggtagagaattctaaacaactsccatggctttgagcaaatcagaggtagcagtgactcctctctcatcccatgtttcaagctcttacctccccaaagccaaatccttccccaggtgaaaggaaggcagcccaggaaagggtattccttaaggttacagcattagcaacctgataggctctg

SEQ ID NO: 698388 - DNA, 1546 bp, Homo sapiens
taagtctaatttaaaaatcctatttgccacctttcaatcacaatgatttttaggttaaatcattgtgggtgaattagataagtagttgctactaatattatttctagtttttcaaaaaactcagtctggggccaggcatggtggcccatgcctagtaatctcaacactttgggagtctgaggaaggaggattgcttgagcccaggagtttgagaccagcctgggcaacatgacaaaacactgtctctaccaaaaatacaaaaattagccaggcatgacagtgtgcatttgttgtctcagctactcaggaggctcaggtgggaggattgcttgagcccatgaggtcaaggctgtagtgagccaagatcatgccactgcattccagcctgagtgacagagtgatactctatctcaaaaacttattaataaaaaaaataagtctaggatgttggccggagagtgtaatatattgtcacgtccttcagctttctcaatgcccaggcttgaggaaagagaaggatggcagaacaataagagaacaggtttaaaagagggaaaagactatatctatctatctatctaagttgtaataaaataaaattaaaaatcaaagtaaaagatgtgccattttgtgagctggccagtttaaatatcccattagagagaattctacaggctgtctgactcagattttgctccccaacaactgagagtcaagagttaaacacaggtgttccaaatgtgcttactgtccttgaactttattgaaaataaacttggtttgaataattatttaatgaatataaagacagaccatctgattctgtccttgaaccaagtcaccacattatgcttagaaagaaccattatccaattattgaaaccttgataatctcataaaaccttactgatgtgtagaaggcagcagcagagagcatctattcaggacatcgtacaactgatgcaggatttttcttggtcattttgtgccagctggggacctccactgctggcaacgtcctcacccgggcctcactcagccctgggcctcccacatgccacctgagccatgcctggcttgtgtgccaggcaggaccccatgctatgggatccatgctcagcctgcagctgggccaggtgtgccccagcctacctgtgttacagctagtactcctgtttggtggttcccgagtttttgtcccatgtccaagaagaatgagggtacactgataattgaagggtgaggaggatggagaataattttattgaacaatggaatagctctcggtggagaggggatgcaaggatggtcccctacctgaagtcaggtggtctctccaccagtgtggctgggtctggggattttgtgggctcagaatcrgggagtgcatgctgactggtttgtgagtattccaaaaaggctaaaacaaaggcaccactcaaaagtgagcatgacagtgtaaaaaaccaattagggaagggtagatttacataaagtaggtgaaggttgaggatcaatcagaggaaagtgtgccaaacaggaagag

SEQ ID NO: 698389 - DNA, 1639 bp, Homo sapiens
tgcccttcctgcttcgcaaagttaatcatgaagatcaaatgtgtaacgtttgagaatgttaaaaaattatgcagatgaacattattactaaatccttttctgtacagtatcttaaaatttccccagacatttcacttcatttcacttaaccagagttgtcatagtaaacttttgagtttaatttgaattttacttttttattatatactcagatgtaagttcattgagggtgagaactttgcctgtcttttttttttttttaagggaggggtgttcctttatacctaagccttggcaaagtgcttagttcactttaggtagttactaaaagattgaatgaatgaatgagtgtaagtgggaggaggcgtagtgattgcatacacagattttggagctagattgcctgggttgaagtcctgcttctttcatgtagcagcttgtgactctgggctatttaatgtttcagggcctcaatttttttgtttccttctgcacactgggaataataatacctaactcaagacttattttaaggattgactgagtcaacatatgtaacatacttacatgagtgcttgacataaagtacgtgttttcgatgatgataaagggcagtcagactgttacctgttggtgaattaatttggaaatagtataggaaagcattgttgtgattaatttgtaagtcatttgggaaatgaatgtttgcttctaatgcatatgcagtataatgcctttattttaaaactaatagtgggataagttatataaatagctcacattatttyaatactacatttaatatccaaaaagtaccctaaaaaagtgtttaaaggtattgaactcttgttaggcccaggtgactgttttgaatacctttaatgcttcagtttgggtagctataaagttgcagagtgtttgttactcttaataagatggaaaatcatctagtgtagagcaaggaaaagttatttgcacctgttcctcaaagagcaaattgactttaggttatctcaatacttgcaggtaaaagtaccaatgtatcattatagctaagtatttgagaaaagaataattgttatacatttgtgcccttaaaatttatttatataaaacagctgttcttgattaggctgttctcataaccaagaagtgatgtttcatggggcagagttcagctgaatgtatatctgtggcagagatctgggggatgtgttcccttcacccagttcttcttaagctctgtgccccatctccttcccatttagtacaaaaatttgaaaactgtactgttagtctttctcctcatctatagaatacataataaacttgcttacatgctccaggctgtaggctaggaagctatgtcctcctagtcagttctccagttcctccctacacttgcatttcaagttcttatcaacacagtagttcctgcttacaaaaggctcataaaagcaggctgctttgcttccacctctaagagactggggacttttttggtgggtgtggacgtaactagcgaaaggatgaagtagaggggaggatagagctgtatgcaattagaaatgcagaagccatttttcctaggggagaaatagcaaaaatgatatttaaattccatggagatattcattct

SEQ ID NO: 698390 - DNA, 655 bp, Homo sapiens
tgggcagaacatttatgttgattttgtaatgaataaaacattataaacggactgtttggccaaagtgcttatatgtctgcttattaacataagattaacataagactcataatttaaatakatgtaattacttaaaaatgaatcagccttctttagaaattagatgacaagtttacttacatggccaaacctctttgtagttttggaattcagaatggaaatttgaaggctggatgccaggagtgtgggaggtacacaaagaatcgtttttccaggaatgctgttttccaggtttctgtgaaaagcaaatgcgtgccttttctgagtgatgaaatagaggaacagaaaggtgtcaatatatatgtattctgcttacacactcacaaggattcctgcaattatgctgaaagggcattttaatgcgaacctataatgtttaagtggattcttattcctgtattcttgaggaaagtactctggtgaagttttcaaattcacagcaatgtatgcctgtttctccttcttggggtagttaaaaaacaatacatgcccatttcagcactttgggaggctgaggtgggcagatcatttgaggctaggagttggagaccagcttggccaacatggtgaaaccctgtctctaccaaaaatacaa

SEQ ID NO: 698391 - DNA, 1718 bp, Homo sapiens
cccagctgataagacgtgttttttaaaaactgtgctgtggtaactccttggagtttgttaacaggtgctttatgtactatcccatgttttctactaaggatgataagcactgtcatatctgtgttacaggactggaagttataattattataatgttacatcatttttaaaccttgctataggtgtttacagaagaatgacgtcttacatccaactaagaagatcagagaaagtttcaggtttcatcttgctggagcagttggataggattgggttttaggggaaaaaggtaaatacattctgaagagagagaagtttggaagggagctgatatgtaaggatgctgacgtggctcttggggaggagaagaaaagactggaacgagaggttgaggccactttgtggaaagtcttaaaggtcaatcttgactgaagaattgggatttcttttcatccatgtctgcttgtgaactgcccactcttcagaatacccaattgctccatcatggatcactgggtctactgaactggaactgttctgatggattgacactgtagtgggaagagggagctctcgatgacgagatggcatggttttgtatctcagatctacccttattggttaactgaccgtgggtgagttacaaaacatctctgtgcctcagtggtgttgtgaagatttaagtgagctaaagcacacaggcccactggaaataacttaaaaaaaaatgyttggttactattgaacttcttatgctatctgagacagttacctcctctgtcgtgtcatgaacatagttttcaataagtatgtggaagaatctagagatattgtgatgagagagggagatggtcaacacaggttaaggtgtgggttagaggaaagaatggcaccttgtatgaattgttgccacttcctgtctgaagcctgctttcctagagcaaagatcctctcctatttccttcacttgttctgggaagagaatgaaggtgcgtcctcagtacagccctgctttgatagggtttgagcctgagcccaggtgtcctgatgagtcctgcttggtgcctgaggaagaagaaaagggttgttgtggtttgtcagccccagacaggcaggaaacgctttcttaacactatgtgggtgaggtttcagctatatgctgtgtcagtagatcctcagactcttggcatttccaaacatttgtagtttctggcatttgcagtaatttggaatgttggaaactggtaacttacaacttctctgagacccgtgaactagagttgcaagtcctaaaggtggggtgcatagaaactggtccctgcatacctgttcaacatctgtagccaactgtcatctcaaagggatgaaactgtgcttgcaaagaatggttttatggccaggcgcagtgactcacgcctgtaatcccagagctttcggaggctgagttgtgtgaataacctgaggttaggagtttgagactagcctggccaacatggtgaaacctcgtctctacaaaaatacaaaaaaaaaaaaaaaaaagaaaaaaaaaagaaaaaaaaattagccaggtgtggtggccggtgcctgtaatcccaactactccggaggctgaggcaggaggatcgcttgaacctaggaggtggaggttgcagtgatccgagatcgcgccattgcacaccggcctgggccacgagagcgagactccatctcaaaaaaaa

SEQ ID NO: 698392 - DNA, 653 bp, Homo sapiens
ccttatatttttccagtgtaaaattctgccttatctcccacttggagtcctcctttgaaaagtctgagcagaatgccaactctttatgtttggcagaacattcaccaaacagacctcctggcatcatttctactaaatgactctggccctaatcatagcaaaaataaagtaaattgagtagttgaaaaagatgatagactcaagggatagttttatgagctctataaaatgaatttctgtgctttttttggattaaaatttgttttcagaaacgcaggcttgtgacattatacaatgcacaaaaaaaatcaccaaaaagcagacagatgtattctctagaggtctttgttttttaggtcatgaagctcccagactttgggctctaatgtaatttttttgtattttcaactattattcataacttttttcactttttatcacctgtgcctcctttgaggaagagagccaagtgaggcagagtaagargcaacaaacaaaaggtagaaaacaaaagaaggatatacaaggtagagacaaagaatgaagtattcagattagatgctctaatatgacccaggtcaatacaatttcaccgcattttctgtatgtctctagagaaaaaaaaaataatggtggtcagaaggattagttga

SEQ ID NO: 698393 - DNA, 910 bp, Homo sapiens
attgagtccatgttagtcaccccacctattggtccttcactccacagcagaggggtttcaaaacgtacagatctgatgtgatgaagttagtgcatacctttctcttccactgattctagggctaagccctagaatggccacatccacaatggccacaatgccctatgagagcttcctcctgcttatctctccaaacccatctctctacccttctttttgctcagtctctgagcttcaggcatacaagttatctcttggcaacttggggcctttgtgtatgatatattccctttgcctattcagatgcttttcaccttctgctctcccaaacctcagatcaagcatcacttctttatgcaagtctcttccatccccatttatatccccagtcgtctgggtcaggtccatgtattgtatatgctcatacaacagtgtttctttctattgtattattaaatgttaatctattctcttccagtaaacttcccacaaaagcaccagctcagcttgctatggtcttctcattcactggcttactgcatggcacatagtaggtgctcaataagtgtctgatcggtgaatgaatgaatgtctgactcagattcctgtgcttcatcttctgctcccaccaccttaacatttgtttggcattgccttgagggggtttgccactcctcttactcattggtggggtccatgatagcccatcagggggcatggtgtctggagtctcacagtaaatggctgttggcttcaagctgtgctggactaccagcacccatgaggagagctgcaggctgcagtggggaagcaacactgtcattttgcasagtgctaacagctacaggtaccagtcacaggccattgccccccagccttcaccacgtaaatcctccactaacgatttgta

SEQ ID NO: 698394 - DNA, 1149 bp, Homo sapiens
ggggctaggccagaatgggaaggcttctggaggaggtggcctcagaaccataaaggatgggtaggtactggataagctgagaggaactagggggacactggtcctgagggaacctcgatgcgtgagtgtggaggctggaaagccaaggctatttccttgcctgtaaaatgaggccaataatcacacctgctttacagaattgctggggggatctaatgcatggtatgcgccaggtaggaagtgcccagtagatgtcagagaggatgaagatgatggtgggtggggagccttgatcattccagtgcggctggaatgggttgggtagggaggrggcttgtgggagagaaccagagagggtgcttggactttgaggcaatgcaaaggcatggaaggggttggggcggggcagggcaggggatgtggaatacgggctctttggggagtctgtctgcaaggcgaggttagaagcaggagcacagggagaaaatgtggcagccaaggttctggcaggaaacaggtggaatctttcgacgggaatttgaagagtagtattaaagggattatttacaaatgtggggacaggatgtagggatatcagagagcaggggcagcactggggttagtcatagcaggaagctgttactacctctaagcgcaaatgggcaagggaggtgagaggttcccagaaccacaggatagggagggtgagtgatgggaacctgcggacaggagctgtggacctcagtggtggggaccagcctgctcgagggacttccctcataggaagccttcaaccttacttctgtcatctcctgctggtccttgctgttggcttaacacaacaagaaacccttgatgcatgcacaggtggacctccagggcagagagtggggtggagaagggtgcagagtagggcagatgggctgatggaaaaattgccagcactgactagataggaaggccagagtgtgtgaagtgtgtgtgtgagattatgtgtgtatgtgtacttgtgcacatgagtgtaagagagagtctatatgtgttcatttatatgtgagtgtatatgtgtgaaagggtgtacatacgcgtgtacatgtgagtgtgtgtaagtgtgtgtatgagagactgtgcacagagtacatgagtgtg

SEQ ID NO: 698395 - DNA, 615 bp, Homo sapiens
cccaggttccagtgattctcctgcctcagcctcctgagtagctgggattacaggcatgtgccaccatgcccggctaatttttgtacttttagtacasacagggtttcagcatgttggccaggctggtctcgaactcctgacctcatgatccgcctgcctcggcctcccaaagtgttgggattacaggcgtgagccaccgaacccggccggacctcctcttctttgcaggaagggtaggacaagaagcctctgggaacttctaagaattgaaaggggaagatatctattcaggtgctaggatagtcacacgattccttttgttaagatttctactctccagggcagcctgggacattttgctttgcccaatgccctgcagtgcaaattgcaaacaagagcagggggccaaaagggagaatgcacaaaaagccaaagtggtcccacagtgtgtgtttgcatttgggttttgtccctgcaggagtcgttttccaagccggcagctgcctgtctcctttgaagagtcttggaagcagccaccatccatcattcgcttggcatgactgttaagtatcagcgctcagggctgagggctgtgggaaggggctcccagtgggg

SEQ ID NO: 698396 - DNA, 615 bp, Homo sapiens
cccaggttccagtgattctcctgcctcagcctcctgagtagctgggattacaggcatgtgccaccatgcccggctaatttttgtacttttagtacagacagggtttcagcatgttggccaggctggtctygaactcctgacctcatgatccgcctgcctcggcctcccaaagtgttgggattacaggcgtgagccaccgaacccggccggacctcctcttctttgcaggaagggtaggacaagaagcctctgggaacttctaagaattgaaaggggaagatatctattcaggtgctaggatagtcacacgattccttttgttaagatttctactctccagggcagcctgggacattttgctttgcccaatgccctgcagtgcaaattgcaaacaagagcagggggccaaaagggagaatgcacaaaaagccaaagtggtcccacagtgtgtgtttgcatttgggttttgtccctgcaggagtcgttttccaagccggcagctgcctgtctcctttgaagagtcttggaagcagccaccatccatcattcgcttggcatgactgttaagtatcagcgctcagggctgagggctgtgggaaggggctcccagtgggg

SEQ ID NO: 698397 - DNA, 642 bp, Homo sapiens
agacatttttccaggtctgcacatgtagcctcctctatgtgagagccgcatggccttccaaaggacgccgtccatgcaagaggctaaactatgtctgtgggttcaaaaccctcagtctgtgccatggtgctttaaaacttggaaatggctcatacctgtaatcccaacactttgggaggccaaggtgggaggatcgcttgagcccaagagtttgagacaaacctgggcaacatgtgaaacactgtctctacaraaaataccaaaattagtatttttggtgtggtggcatgtgcctgtagtcccagctatttgggaggctgaggtaagaggatcgattgagccctggagttcaaagctgcaatagccataattgcactccagcctgggctacagagaagacctgtcttaagaaacacaaacaggctgggcgcggtggctcacgcctgtaatcccagcactttgggaggcccaggcgaggggatcacgaggtcagtagatcgagaccatcttgcactccagcctgggagacagcgagactccatctcagaaaaaaaaaaaaaaagaaaaagaaacacaaacaaaaacaaacttggaaattagttaaggtttagttcagttagatcagttaaagtttaactgtta

SEQ ID NO: 698398 - DNA, 657 bp, Homo sapiens
ttatagcagcattattcataacagccaaaaagtagaaacaatccactttccaaggatgaaccttgaagtgattgcctaaattatcctttttacttaggcattcacttccaaatccagctgcgcattgacatcacctgggaagcttatgcagctccctggcaatctttgaggatgggatacctggattaatgtttgaatccagactagacgatctctaaggtccctgatagccccaaaacttgtataaaatctctaatagtgggtcaccaatgcccacatctttgaagaagagacattattggtacttggaacaggtctcccgataggtccgtctagaagcctaagttggttcttctcttaggcatcatcccaacctccgcaaggttgaataaacatattcttaacaaggatgaactatggctgaagggataggtcacatctgattatgtctgtgtagtctgctatactaagaaatcaccccattttgaagaaagttactcattagcacagaacttgtcrctgcagttgagaataaccagttcctccttctatgacatttttttttttttaaatgaaatttttcaaaataactttaataaccacttttacactgagcagaatatgtctctcattctctcaaaaatggtcaggagataa

SEQ ID NO: 698399 - DNA, 660 bp, Homo sapiens
tgcccaggctggacttgaacttatggcctcaagtgatcctcccaccttggcttcccaaagtgctgggattacaggcatgcaccactgcacccagcctattaatgtttttaaaaatcaagaataagaaaacagagcaccaatataaaacacaaagtaggggctcaataaaaaatgtttttgtgatttgttttgatggcacagcctccacaaaaggcaraactggtgatgtttttattaagtctattgcaaagccacaaaagctctccctgcctggaacataacactgacccggtgagagactaaatgaactggggatattacaacacctaaacgtaatgctcttgaattcttgctaattaagaggtcgcacagcacctactgtgtggatggagctgttgattgctggtgagacatttggttgtgcggtttagggcaggtgaggaagaccttgggggctgtctctgatcagcctccttgcacattggagcattccaacccgtcaactgaaattcacacacacaaaatgatcatatggcacctacaaacatcattgttactgtttttcagcctttcttttttgtggggagtgtcttgtcaactagactataaacactttgcaggcaagatgtctgggagctactatctttttttttttttttt

SEQ ID NO: 698400 - DNA, 660 bp, Homo sapiens
tgcccaggctggacttgaacttatggcctcaagtgatcctcccaccttggcttcccaaagtgctgggattacaggcatgcaccactgcacccagcctattaatgtttttaaaaatcaagaataagaaaacagagcaccaatataaaacacaaagtaggggctcaataaaaaatgtttttgtgatttgttttgatggcacagcctccacaaaaggcagaactggtgatgtttttattaagtctattgcaaagccacaaaagctctccctgcctggaacataacactgacccggtgagagactaaatgaactggggatattacaacacctaaacgtaatgctcttgaattcttgctaattaaraggtcgcacagcacctactgtgtggatggagctgttgattgctggtgagacatttggttgtgcggtttagggcaggtgaggaagaccttgggggctgtctctgatcagcctccttgcacattggagcattccaacccgtcaactgaaattcacacacacaaaatgatcatatggcacctacaaacatcattgttactgtttttcagcctttcttttttgtggggagtgtcttgtcaactagactataaacactttgcaggcaagatgtctgggagctactatctttttttttttttttt

SEQ ID NO: 698401 - DNA, 1667 bp, Homo sapiens
tgcatttctcagaatgtatcccctttattactggatgttattaactagcgatgttaagctcctttatacagactttttttttggcttcttaggattctttacaagtattgcctttatgcctctttaagtaatccttccctatctccaagtgatatcctttcctcatttcttttaaaatgttgaagctttattttccacatttaagaactttaactcatatgcaatttatgtgtacagttgtgaggtacaaatttgattttcttatacaaacttaaggtcacctctgtcaaaccaagttctatctagagatgtgcatatctgttcatcccttgcctctggtttctgtttcattgctttaatttcttatagctctgccaatggcatagtttttatttctataattttataatgaacttgtacctgtgatagggccagccacccattcttgttcagctctttcaaaattttcttggccatttaaaaatacccttccatatcatttcaataatcagtttttaactttcataaaatatcctgttggccttttggaatcccattaaatttatagattaattcttctacatattttatatttatgccctagatatcttataatttgatgttctgatgaaagagtttcaaaattatattttctaatattttttttttaagacagagtcttgttctgtcactcaggctggagtgcagtggcacaatcatggctcactgtagccttgacttcctgggttcaagcaatcctcccacctcagcctcccaagtggctgggactacaaatgtacgccaacacacccacctaatttttgtactttttgtagagacaggtcttcaccatgttgcccaggctggcctctaactcctaggctcaagcaatcctcccatctcggcttcccaaagtgctaggtttacatatgtgagccatcatgctctgtttctaatttttttttcttttagaaattcttacatgatattcaagatatacaataagatataaagaacaaaataatatatgctcatgtgcccatcaccctggttaagaaataacatgttatcaatgtcattaaatctccctggccccccttcccagtcacacatctctatctctctgtaagaggtaaccactattctgtttggcttttttatgtacatgcatctcttttcctttgcctcatatatacacatccatatgtattgctattgctatatgtgcttttgaccttcttttttttttyccccacagtatctcactctgtcacccaggctggagtgcagtggtgcgattttggctcactgcaacctctgcttcccaggttcaagagattctcgtgcctcagcctcctgagtagctgggattacaggcgccggcgaccacgctcagctaatttttgtatttttagtagagatgaggtttcaccatgttcaccaggctggtctcgagaactcctgacctcaaatgatccgaccccgtcagcctcccaaagtgctgggattacaggcgcgagtcaccccatccggccgttttgacctttgtatgagcaacattattttggatacactgttcaacaacttgcattttttatttcttttaatttaaaatatttttctcaacatatttgtgaagtctacctctcttgaaaattgtagtgcta

SEQ ID NO: 698402 - DNA, 1667 bp, Homo sapiens
tgcatttctcagaatgtatcccctttattactggatgttattaactagcgatgttaagctcctttatacagactttttttttggcttcttaggattctttacaagtattgcctttatgcctctttaagtaatccttccctatctccaagtgatatcctttcctcatttcttttaaaatgttgaagctttattttccacatttaagaactttaactcatatgcaatttatgtgtacagttgtgaggtacaaatttgattttcttatacaaacttaaggtcacctctgtcaaaccaagttctatctagagatgtgcatatctgttcatcccttgcctctggtttctgtttcattgctttaatttcttatagctctgccaatggcatagtttttatttctataattttataatgaacttgtacctgtgatagggccagccacccattcttgttcagctctttcaaaattttcttggccatttaaaaatacccttccatatcatttcaataatcagtttttaactttcataaaatatcctgttggccttttggaatcccattaaatttatagattaattcttctacatattttatatttatgccctagatatcttataatttgatgttctgatgaaagagtttcaaaattatattttctaatattttttttttaagacagagtcttgttctgtcactcaggctggagtgcagtggcacaatcatggctcactgtagccttgacttcctgggttcaagcaatcctcccacctcagcctcccaagtggctgggactacaaatgtacgccaacacacccacctaatttttgtactttttgtagagacaggtcttcaccatgttgcccaggctggcctctaactcctaggctcaagcaatcctcccatctcggcttcccaaagtgctaggtttacatatgtgagccatcatgctctgtttctaatttttttttcttttagaaattcttacatgatattcaagatatacaataagatataaagaacaaaataatatatgctcatgtgcccatcaccctggttaagaaataacatgttatcaatgtcattaaatctccctggccccccttcccagtcacacatctctatctctctgtaagaggtaaccactattctgtttggcttttttatgtacatgcatctcttttcctttgcctcatatatacacatccatatgtattgctattgctatatgtgcttttgaccttcttttttttttcccccacagtatctcactctgtcacccaggctggagtgcagtggtgcgattttggctcactgcaacctctgcttcccaggttcaagagattctcgtgcctcagcctcctgagtagctgggattacaggcgccggcgaccacgctcagctaatttttgtatttttagtagagatgaggtttcaccatgttcaccaggctggtctcgagaactcctgacctcaaatgatccgaccccgtcagcctcccaaagtgctgggattacaggcgcgagtcaccccatccggccgttttgacctttgtatgagcaacattattttgratacactgttcaacaacttgcattttttatttcttttaatttaaaatatttttctcaacatatttgtgaagtctacctctcttgaaaattgtagtgcta

SEQ ID NO: 698403 - DNA, 1667 bp, Homo sapiens
tgcatttctcagaatgtatcccctttattactggatgttattaactagcgatgttaagctcctttatacagactttttttttggcttcttaggattctttacaagtattgcctttatgcctctttaagtaatccttccctatctccaagtgatatcctttcctcatttcttttaaaatgttgaagctttattttccacatttaagaactttaactcatatgcaatttatgtgtacagttgtgaggtacaaatttgattttcttatacaaacttaaggtcacctctgtcaaaccaagttctatctagagatgtgcatatctgttcatcccttgcctctggtttctgtttcattgctttaatttcttatagctctgccaatggcatagtttttatttctataattttataatgaacttgtacctgtgatagggccagccacccattcttgttcagctctttcaaaattttcttggccatttaaaaatacccttccatatcatttcaataatcagtttttaactttcataaaatatcctgttggccttttggaatcccattaaatttatagattaattcttctacatattttatatttatgccctagatatcttataatttgatgttctgatgaaagagtttcaaaattatattttctaatattttttttttaagacagagtcttgttctgtcactcaggctggagtgcagtggcacaatcatggctcactgtagccttgacttcctgggttcaagcaatcctcccacctcagcctcccaagtggctgggactacaaatgtacgccaacacacccacctaatttttgtactttttgtagagacaggtcttcaccatgttgcccaggctggcctctaactcctaggctcaagcaatcctcccatctcggcttcccaaagtgctaggtttacatatgtgagccatcatgctctgtttctaatttttttttcttttagaaattcttacatgatattcaagatatacaataagatataaagaacaaaataatatatgctcatgtgcccatcaccctggttaagaaataacatgttatcaatgtcattaaatctccctggccccccttcccagtcacacatctctatctctctgtaagaggtaaccactattctgtttggcttttttatgtacatgcatctcttttcctttgcctcatatatacacatccatatgtattgctattgctatatgtgcttttgaccttcttttttttttcccccacagtatctcactctgtcacccaggctggagtgcagtggtgcgattttggctcactgcaacctctgcttcccaggttcaagagattctcgtgcctcagcctcctgagtagctgggattacaggcgccggcgaccacgctcagctaatttttgtatttttagtagagatgaggtttcaccatgttcaccaggctggtctcgagaactcctgacctcaaatgatccgaccccgtcagcctcccaaagtgctgggattacaggcgcgagtcaccccatccggccgttttgacctttgtatgagcaacattattttggatacactgttcaacaacttgcattttttatttmttttaatttaaaatatttttctcaacatatttgtgaagtctacctctcttgaaaattgtagtgcta

SEQ ID NO: 698404 - DNA, 2021 bp, Homo sapiens
actgagtgacatggtacaagttaatttctctgtgtctcgttttcctcatatatggaacatgggtagtaacagcacttatcccctagagctgttgagagtaggaaatgaatatgtgattaggagatttcttggtacatgttgagaaaagtattaatagttgttggtgttgatgttgttagcatactttctattactataaaatgtatcttattttatttcttaggatagatgattttggtaaatgaacacgatttatttttacaaagaaatccaattatttttcatttagtttctcacttaatacataatatataaaaattattctcttgcatgtaatttaaaaatcactatgttcctaagcagtttaggctttaaacaccctattataattaaggagctgtctttgtctgtttgtgttgttataacaggatgcccaaaactaagtaatttataaagaacagaaatttattttcttacagttctagaggctgagaagtccaagatcaacgcactggtaggttcacttgtctggtgaggattgcattctccagaggagaggcacactgtcctcaaatgacagaagaatggagagagagagctagcaagctggagaaacagggaagctggcagcatggctcagtccgaggccaaaggcctcagaaccaaggatgccattggcaaactcaaagtttgagcctgaagacgtgagatttgggagactgatggctcagttcccaaagttcccaaatttcaaaagctagagaacctggaggtctgagggcaggagaagagaattcctactccagaagaygtaccaagaattcacctttgtctgtctttttgtttcttttggcctcagctgattgaatggcgcccacccacattgagagtggatcatctccactcagtccactgactcacatgctgagttcctctggaaccagcttcactggtacatcttgggcagcccagtcattctaatcaaaagcaaaaccacttgggtttctccttcagcagaagaaagatgggctgaatgcttactgaagcattgagaataaataatgctttaccaaatatatgagtatctcttaatctagccaacactcaaaatcaataattgtgggagtcttacagagtttactgtggactgtgactcaatagatagaagtgagtattctaagttgatctggactatgtatcattcatcagagtactgggagaataatttggtttgggtctgtgtcccggcccaaatctcatgttaaattataatctccagtgatggagatggggactcgggggaagagattggatcatgagagtggatttcccctttagtgctgtcctcctgatagtggtttattgtgagatctggttgtttaaaagtgtgtggcatctcccccctcaccctctcttcctcctgcttcggtcatggttatgtaagatgcgtctgattctcctttgccttctaccatctggggcctcccagccatgcttcctacacagcctgcaggattagtgagacaattagacctttttttatatatataaattacccagtctcaggtatttgtctatagcagtgtgagaacgggctaatacagaggagaatcacagtagtttaactgaattgtaggaaatttggtttttatctcatagatatttgtgaattccaaatttctcagggcttaacataagaaatagttgttaacctatatagaggagagagaaatccacaaatttcccttttgtttttagctttctgaccctacaaagaagtcagaatgtattcgtaagcatattagaattaatatttaaattgatagagtaaaaaatagactttaggcattggcctagttttcctttccctgttgttatactaagtaaataattcagataattttattttacttcatctgatcttaatgcaactaataaagctcagtgttaaatgtcattactggtgagtaccatagccttgttgacatgtaacagagaagcacaagcttggaagattttta

SEQ ID NO: 698405 - DNA, 1797 bp, Homo sapiens
tttttaaagtatttctgcaaaatagttttattactaattttgaattgcataaatctatacagttttccccatcattgtgcatatttcaagccaatacttttctatgaacatacaataaaactatatgtcctcacctgcttgcatttaaatgtgatcatgatgtttattccctgaaggtatagcactaatgtgttcttattcttccgtactttggttggaagcaaagaatttccatatagggaaatcacatgatggaaagagccagagccctgcaacctctgttggaagagtcaactagaagtgtttcttggactgcatgagtttttgctctaagcaaggaaaaaaaatatgtgtttgcttgagtcactaagattcgtttgttttgtttgcttgagtcactaaaatttgctagttaccattaatttcaacaactttactgttaaatatttcatattttgtattattagacaataggcaatgatttgtcattaattagattgttattagcagtttttaaactgtagtaatgttttccatatactataaagttacttaatttaagaaagatttggctgggcacggtggctcacgcctgtaatcccagcactttgggaggctgcaacgggcagatcacgaggtcaagagatcaagaccatctggccaacatggtgaaaccccgtctctactaaaaatacaaaaatgagctgggcctcgtggcacacgcctatagtcccagctactcaggaggctgaggcaggagaatcgcttgaacctaggaggcagaggtcgcagtgagccgagatcgtgccactgcactccagcctggcaacagagtgagactctgtctcaaaaaaaaaaaaaaaaaaagttttatttggtgaatgaaggaacatgcaaagaagtaaaaatccaaacattggattctatttcctactcttcactcaaaaaaatcactagataagcaagtaaaaaatctcaacttgagtcttgattttgacacaattacattcttgatccttagataaaatatgcaatgtaaaacatgtttgaattaaattttctgactggcttctgttctctcatctcttgctatactgtcaaccattttaagcactccacttgagggtatgattctgaaaatactgatttttaagataataacccatataatattataataaatattttaaaagatatatctgatgtgacttgtgaagttactaagatacactcttcttttcaaaataaagatgtggtcatcaactttaataaattttaattagaaatttagcctcagatgtcatatcttagttgccagatatttctaaacatgtttttgttcttatctctcaaatatttctctcaaacatacgcaaattttagagttggttaatcactgcctagtgtgttgctatacatgctgtctttgcttacctgaattatttcactacagaagagaatcagttgaaaaagtcactttgcctgaagaaatacaatttgtagggcagtgggagttcaagattgatgctactaaaagagcaggcaagcaaaacattgaagaatacttcttgtcaaatgttccttgaaaataaactctatagcctacatgggaatgtagttaaacaaagagacgctaagggtaatttagcagactctttgaaggaatgaaaagtaggcaccatacttgctttgtcaattgtgtggaagaacatttaacttgagcccctgctgaaataaaactatttaattacayttgagaaaaagaaagagaaaaaagtttttcctttgaagtttcag

SEQ ID NO: 698406 - DNA, 669 bp, Homo sapiens
accccccagtcccaggcaccctctagctccctcagccgaacagcaccctgcatctgggggattgaagcagtcgctgacccccgtccccagcgggcccgggccctcactccctgaaccacacggggtttatttgcggatgttccctggagaggtcgctttgtgaagaaaccatcagcaggctgtgagcatcgccaggctgctgtgggggcgggagcagcctcagtgtcaagggcccgcccactgacccagccgtacctattcgtccacggtgccccgtagcagcaggtcctgcrgccaaatctgtctcccttcatgggcctcccagggaaggaggaagccctgctgtgcagacacctctgtggccccccaggagtgtgagtggcctggggagggggccgtggcactgaggccgaaagtgcctgccagacggcacggtctgggtgcgggtgttccctgtgagcccgagtccgcttcaggaggggagcctgcaggtgccggctggtgaggggatgacgcgctgtgggtgggaggaggcagcgcccatctcagcagcaccaggactgcctgggactccctggcaacccagcaccggggaagccgtcagctgctgtgacaataaaacctgccccgtgtctggagcgcaggctcggtcccgggtccatgtgcagc

SEQ ID NO: 698407 - DNA, 669 bp, Homo sapiens
accccccagtcccaggcaccctctagctccctcagccgaacagcaccctgcatctgggggattgaagcagtcgctgacccccgtccccagcgggcccgggccctcactccctgaaccacacggggtttatttgcggatgttccctggagaggtcgctttgtgaagaaaccatcagcaggctgtgagcatcgccaggctgctgtgggggcgggagcagcctcagtgtcaagggcccgcccactgacccagccgtacctattcgtccacggtgccccgtagcagcaggtcctgcggccaaatctgtctcccttcatgggcctcccagggaaggaggaagccctgctgtgcagacacctctgtggccccccaggrgtgtgagtggcctggggagggggccgtggcactgaggccgaaagtgcctgccagacggcacggtctgggtgcgggtgttccctgtgagcccgagtccgcttcaggaggggagcctgcaggtgccggctggtgaggggatgacgcgctgtgggtgggaggaggcagcgcccatctcagcagcaccaggactgcctgggactccctggcaacccagcaccggggaagccgtcagctgctgtgacaataaaacctgccccgtgtctggagcgcaggctcggtcccgggtccatgtgcagc

SEQ ID NO: 698408 - DNA, 669 bp, Homo sapiens
accccccagtcccaggcaccctctagctccctcagccgaacagcaccctgcatctgggggattgaagcagtcgctgacccccgtccccagcgggcccgggccctcactccctgaaccacacggggtttatttgcggatgttccctggagaggtcgctttgtgaagaaaccatcagcaggctgtgagcatcgccaggctgctgtgggggcgggagcagcctcagtgtcaagggcccgcccactgacccagccgtacctattcgtccacggtgccccgtagcagcaggtcctgcggccaaatctgtctcccttcatgggcctcccagggaaggaggaagccctgctgtgcagacacctctgtggccccccaggagtgtgagyggcctggggagggggccgtggcactgaggccgaaagtgcctgccagacggcacggtctgggtgcgggtgttccctgtgagcccgagtccgcttcaggaggggagcctgcaggtgccggctggtgaggggatgacgcgctgtgggtgggaggaggcagcgcccatctcagcagcaccaggactgcctgggactccctggcaacccagcaccggggaagccgtcagctgctgtgacaataaaacctgccccgtgtctggagcgcaggctcggtcccgggtccatgtgcagc

SEQ ID NO: 698409 - DNA, 1001 bp, Homo sapiens
aattcatgaaaggttgcccccacaaagtaagctgaacaaaggagtcctttcacttttgtttttagagttctctttctgtaaactggtagaggaaaatttcatgaagatttttgccttaagtrtaaattttaactgttaataaccttataagatggataacaagaaggttcattatgaagagaacatcagatacgggctctggattcctgtgcattaattggaatgaaataaaaaatgttattggctctttacttgaccatttacagtttagatgttagaaaaataggcaaattttaatagcctctgtaataagatcagtattcacttcccatttctatatattcaattaatatgttcaatcttgaagaaatcctaaaaatctatcctggaagtttgttttaaactgatattttctttaggatgtgtgtaatcctattttcattctgggttgagttatttaatgttattttaaaagaaactattcatgtctgttgtccttagaagcattaaaatcttattaagatagaaaaccttggccaggtgcggtggctcacgcctgtaatctcagtactttgggaggccgaggcaggcagatcacttgaggtcaggagtttgagaccagcctggccgacatggtgaaaccctgtctctactaaagatacaaaaaattagctgggcgtggtggtacgcacctgtaatcccagctacttgggaggctggggcaggagaatctcttgaacctgggaagcggaggctgcagtgagccaagattgcaccattgctctccagcctgggcgacagggagagactccgtctcaaaaaaaaaaaaaaaaaaaaaaaaaaggaaaacctcatatgacaccctctcaaaaaggtaggtagatagtagcttcaggaatcagtcagaagtatcccatttctaagtcatatgaccccaattttttaagacttaaattgatgaatttttttacctactcatttcacgtaccccaccatcactc

SEQ ID NO: 698410 - DNA, 617 bp, Homo sapiens
tgtatggtctgtcccaactactcagttcttttaatgtagcaggaaagcagccacagacaacacataaatgaatggctatggctgtgttctaatacaactttatttatacaaatagatactggactagattttggcccacaggttgtagtatgccaacttgatgatagaagaatttagtttttataagttcttcttaataatgaccttaaccctagatttaaaagctttaaaagggccggccatggtggctcatgcctgtaatcccaacactttgggaggccgaggcagccggatcacttgaggtcaggagttcgagaccagcctggccaacgtggtcaaaccgtgtctctactaaaaatacaaaaattagctggccatggtggcgtgtgcaggagaatctgttgaacccgggaggcagaggttgcagtgagccaagattgtgccactgcactccagcctgggcgacagagcaagactctgtctcaaaagaaaaaaaagagaaaagcctaaaaagccttaaaattttaaagatttaaaggctcatytatttaaaactataaataattgctaaaggaaaaatttgttttttgggggaaaaaagcagctatactcttacg

SEQ ID NO: 698411 - DNA, 628 bp, Homo sapiens
aattagaatttaaacatctagggaagatggtttttccttgtccccttatttgggactctgcatatgtattaaaattttcaggtttggtagcataaggtaacacccgatataattctagccactatatgtgttctgtaccacacactaccatttatggagaatctagggaagtaaaggggaaaaaaattaattaccctcccaaacaaacatagtaggtagtctctaggcctataaycccaaacactgtaagcctataaccctaaacctataacccagaaaaatagcaagcagagagtaggtaaaatcaagtagtaattatagtatcctctaacatggggcttatatatacaaaatatgtccaaactctacccacttaaataggcattcatgggaattacatagcatagcattttccaaatggtattcattaggaatattagcaggtcctactaacattacctattaatatcccagaagaccacattttgagaaacaaagagcactcttggttccatacagcatgaaatatgcattcccaaagattcaaggaaagcacaaaaagtaaagaacatgctctacattgggagggtagatgctgtagtgatatctcaaaataatcctcattaat

SEQ ID NO: 698412 - DNA, 617 bp, Homo sapiens
tgcatttttttcattgctggctcagtgttctgggcctatgtttgttgccttttgtggtagactttgcggtaatgataaatatttyttttatgaggctttattactgttgtcaaatcttttgatcttaaggattatggctgaaaaactctaataatctgaattatttccttaaataaagtttttgcttctttctctttctggttcttccttattttagaatctttataatcaactaaatgcattttccttctgataaaataactcatttaactataaatttcaccacatcttagggactatgggccttgactacttgggaagaatatgcatttaatgaggcatgttttatttactgtgttccaaatggtacttataccattaggtgattagtgttcatctgctgagtgcagttgctcagaaaatgcaacccttcatttaagattccttggaacttgatgtcagtctctctgaatgcatattttctctgattttagcatgtttgttagaaatccctggatgctcagagatattttccatagcttgaacaatgatttagcacaaattgtgttgcattttctggctttaaacagttattttaaaaattaaaattttaccct

SEQ ID NO: 698413 - DNA, 602 bp, Homo sapiens
taggcagggggcagaccaaaatatccacaagtgagacacaaaggaatggagaaatcactggagaacccagagcaggaggggctgacttagaccctggggacttggaggggagaggagaaccctggacaagaatragaaagaatgagaaaataggaaaggaaattggaggaaaaaaggtgttggttttcagcaggtaatagcaaggctaatccacgtggctattcctgcagaaagacacaaatatgaaagttgtgctgtggggctcagttttgaataaggatgcagacccacaaataaatcccttttaaggactgaagcagtgagattgggtgaagtcactgagggaagagatgggggcaaaaggggtgcaactgtggctaatgccagatccaaagatcaggaagaggaaggagaactgaggtggagcagggctttcaaattcctcaacgctatgctgttcccttcctgaaatcttgctcatgctgttcatttgtatgcagtagaagggtttgtttggtaaagttaaaatgagcactaccatctgtctgaatcaaaaatgccaaatttttggtagccatatgcatgaagtttaaaaaaatctg

SEQ ID NO: 698414 - DNA, 1340 bp, Homo sapiens
tcaagcgtacattatttcctctccacgaaagcctgcatttagcttacattagaagtggggaaattgtacaacaaaaggatcaggaattctgcctgggctgtgggaggagctaatcttggtgaaaacatttcctcagatgttttcttgaaaattctttcctcaagaaagaattaaggctgggcgtggtggttcatgcctgtaatcctagcactttgggaggctgaggtgagctgatcacctgaggtcaagagtttgagaccagcctggctaacatggtgaaactctgtctttactaaaaatacaaaaattagccaggcgtggtggtgtgtgcctgtaatcccagctacccaggaggctgaggcaggagaatcactggaacccgggaggcggaggctgcagtgagccgagatcacgccactgcactccagcctgggcaacaaagcgagactccatctcamaaaaaaaaaaaaaaaaagaaaaaagaattaagatagttttagcaagtttcaaccatatctgataccaacatgaagtaacaatgagtttccacaaatatttatttcttggtatttcctttactatttaagagatttcactgctcttcaagcactagtggttggattaatatgtgccattgccgggaactagggacacaattttcatgataatctcttaaagggtttggggtccaaggtcaaaagagaatactattgttattttatttttttaaaatttttgttgatcatgagaattgtttataatgtcaactaccagttttggaaagcggcaattctgaagtactctggccagtactggtggaatatcattagaaaaaaaaaaaaaaactgtgttaaacattctaatatgctaaatatggtgcctcgtgacttagtttgtaaaattagtatagcacatggatggatgtttttccattaggctgttgcggagtgcgttgaatagcctttcacattgactctgctcatgttttaatgtttttcctgttaattcctgacagcttttacaagttgtatttttctcaatatttttctctgtctagttgtcttttttgtttatttagttgttttattggatatttgaaattttatcttgtcaaatctatctttttattgaaattctttatgttgtatttaagtgttctgttattccctttgaagatttaataagtagtttgttctattttcttgtggatttgagatttatactcaactctttaaacgggctaatttattttagtctgtggtataaagtgatggttgaaagtggttttttccctgccaaagagcgaaattgctttctcaggacaattccctttctttcca

SEQ ID NO: 698415 - DNA, 613 bp, Homo sapiens
tgaatttccactgcagtcacatttcttacaggtgcttccaatgagtaaggggtttccatagtaaccgggagcacatctgaagaggaatatcacacatttaaatatttagcatcatggtttttcttccttttaatcttctttcctacaaagaagaaagatgtagtggatatttattgatttccctcccagaattcatttgcactctctcatcttcttcataggaccagatttcgtttttaaggaactacccctccccattatgttatagatcatttggttcacttcatctgtaggccattcagttcagccaggcttccagctataggattgaactggtatatccagccagggaactggtgtacacaaatgatatatgatgggtgggaccagatatgccaaaggtactgcaatgagatgtacctgtagcgtacagctgggaaatgtcctagccacaacgttaatagcacctctattgagaaacattgatcagtctagtcacaatgaattgtttaagtaactaagcttgagccattcagtgcctgctattctcctggctgaaagggattgactcaggagtgtagcttgggctcttgtttgagggtcatggkgtggc

SEQ ID NO: 698416 - DNA, 602 bp, Homo sapiens
ctgggcgacagagcgagactctgtctcaaaaaaacaaaaaaaaagtctgacttttgaatccttttcattgttaaatttcctttctttttctattgtcatttgtaaagaaacattttaaaaggtaaactgtttctaaaccttcgttagttgtcctgattgacatactctgtctaatcatttctcctgaggtcatttttttgkttaattgttttatttttaatctttgtattttttttaaaattgttgtgggtaaatagtaggtgtatatatttatgtggtatgtgagatgttttgatacaggtatgcaatgggaaataagcacaccatagagaatggtgtatccatcccctcatttatcctttgagtcacaaacaatccaattacatcaagttattttaaaatgtacaattaagttattattgactatagtcatcccattgtgctatcaaatagtaggtcttactcatgctttctattttttgtgtgcccattaacaattcccacctctccaccaaccccctactacccttcccagcttctggtagccatctttctattctctatgtccatgagttcaattgacttgatttttagatcccaca

SEQ ID NO: 698417 - DNA, 1933 bp, Homo sapiens
tgaggtgatgttgtgtatctcagtccctggggatggagcttttggggtagttggtaatactaataaattcagagctatatttagttccggtctttaatgttctctacagctctctacagctcacatgactgtctccctgtccatggctgtgttacggctcactagaaggcagcttttccaaacttatcaaatgggtcatgtccagctcatctctgtaagaatggaaagcctcctgagaatgtgctctatgaccttccactcacccctagattaggatatgtgggatgcccataagcccccaaatccaaaatactctactcttgcagagtaaaaaccaaacaaacaaacaaacaaamaaaaaaaaacaccagctgggcgcagtggctcacacctgtaatcccagcactttgggaggctgaggcaggtgggtcacgaggtcaggagttcgagagcagcctggccaatatggtgaaaccccgtctctactaaggatacaaaaattagctgggcgtggtggtgcacacctgtagtcccagctactcgggaggctgaagcaggagaatcactttcccccgggaggtggaggttggagtgagccgagattgcgtcattgcactccagcctgggcgacagggcgagactgtctcaaaaaaaaaaaacctatattctgtagcagactggctaaccgattctgtaacagaacaattcttcctccttccaagtatccatatcctttgccaggtaactgccccacacccttgactctgggctctgtgacggggctttgtccagaagcatgagaacgcacctgctcattttgttctcacgcttccatttgctgtcatgagaaggacatgcctgagacagcccgccattcatgacagcatagatttttctatttattacaaccacttcctggcagatggcaacaaagtttctaattttctcaaaggtgggttagcagatgtcctaataccattcttccccacatcccagtattgacttcacttcctgtgtatttctcaaagcagtcccccttctctgcttgcatggtttgtctttttaatccctgtctagcagcaaggtttgtgctttctttttttctttttctttttttgagatggaatctcactctatcgcccaggctggagtgcaatggcgcaatctcggctcactacaacctccgcttcccaggttcaagtgattctcctgcctcagcctactgagtagctgggattacaggcatgtgccaccatgcttggctgttttttgtatttttagttgagacagggtttcgccaagttgaccaggctggtctcgaactcctgacctcaagtgatccgcctgcctcagtctcccaaagtgctgggattacaggtgtgaaaaactgcacccagtgctttgtgctttataaatatgttctgaatgaatgaaggaagcatcagcaatagagacattagcagaaaatagtaagataagaatatgagaaaatattaaatatgtttttgttgttgttttagaaagtgtctgactctgtcacccaggctggagtgcagtggcacgatcttggttcactgcaacctccacctcccaggttcaagcgattctcatgcctcaccctcccaaatagccgggattacaagcacgtgccaccacaccagggtaattttttgtttttgtttttgagacggagtttcgctctgttgcccaggctggagtgcagtggcgcgatctcagctcactgcaacctccgcctcccgggttcaagcgattttcctgcctcagtctcccgagtagctaggactacaggcgcgtgccaccacgcccagctaattttttatatttttagtagacatagggtttcaccatgttggccaggctggtctcaaattcctgacctcaagtgatccgcccaccttgccctcccaaagtg

SEQ ID NO: 698418 - DNA, 602 bp, Homo sapiens
tgatccacctgcttcagcctcccaaagtataattagatgaagtgaagatgctagaactgctctggcacaatattgagaaagggaccagaaggcttagggaggcagggcagctagctatatttattatgtgagatgggcaaacccaccctccacagaggcaataagccacatgctgttgggagggaggcaggccagggtgtagggaaagcaaaccagcatctctgagaagcctggggcagccacctctgcaggcgtcagttccaaaatgtcatctggaggattgctttcaagggacactttcagttcccgatgtttatcctggattcccccaaaagtttatgtggatagtttatttgggaatgtgatcccagaatgaaggcgtgaggatcgggggaataaaaacaggaaagaaggggagctaayaccatgacctcttatccttttgataagagtggtagatgttgccagggaactggtatgtccagtgttggtggacatggtgaattccagtcaaatggcagctgttcatcttcagtggccaagtggatgaatttactgagatagcaaggttgagtggcaacgagggggttccctcattatcc

SEQ ID NO: 698419 - DNA, 1253 bp, Homo sapiens
tcctgccttggcctcccgaagtgctgggattacaggcgtgacccacgatgtctggctgaatctgtctttcmtctggcaaatgattcttgggctcgcagatgttttagaaccagtgcattacagagtgagttcctaagcagagggactgcatcggatacagcaccacgtaccacggtcccctgtgcaaatcttacgctcaataaatgcatgttgcttgaatgaatgaggttttaggcagggatgtggggagagtcattttattcttcctagaatcccccacactcgctgatggtccccatgttcgacaagaggtctcaccaaatttttctgccactgggaaacttctccagtaagaattcccctatgccccactgtataatcttctcattaatacacagtattgtaaaggtgatctataattagatgctaaccgcgtttgccgtaaaattgggtgggcgaggtcaacaaggtaagctgggagccggctgattgttatgatcaatcaataacctatttatttcccaacatttctattaacctctgccagccaatcacagtttcaatttgaaaggctggggtctgctttgctgactggagaagtctgattgaaagcgggcctctgacatgaccccaagggcgaaatccaattaaaatcattttcactggtagattaatatttttagcatgttctacatcctgggattcatcattcctggcaataactaatgtcttgtgacacgagcaggtggattggcactgccatcaataataattgtgattaattagctcatcaggtgctaggatggctttggggaggcagttggtgcagcttctgggaacttctcccgtcaaaccctggttatgtggatgtctctgggtcataccaatgtaacggccttttctgagtaggaatggtgtttatctgtctctgggtctgaaactcccttggaactatgagttccttgagggcaggtattatttctcattgctttcagcaagtcacttattgtttggcacacccagctgcccttttctgaagactgtcctttactttctccatccgcacagctacagtagaagccaccatatttgtgtaacatggccccattcctggctgctgcttattgaactggggtagagcccatcttaagccaatggctccattcttggatgctcttgattggaccaggggtaggtcccgacccaagctgggacaatgaaagcatcaaggcaccacttgtggacactgttga

SEQ ID NO: 698420 - DNA, 1253 bp, Homo sapiens
tcctgccttggcctcccgaagtgctgggattacaggcgtgacccacgatgtctggctgaatctgtctttcatctggcaaatgattcttgggctcgcagatgttttagaaccagtgcattacagagtgagttcctaagcagagggactgcatcggatacagcaccacgtaccacggtcccctgtgcaaatcttacrctcaataaatgcatgttgcttgaatgaatgaggttttaggcagggatgtggggagagtcattttattcttcctagaatcccccacactcgctgatggtccccatgttcgacaagaggtctcaccaaatttttctgccactgggaaacttctccagtaagaattcccctatgccccactgtataatcttctcattaatacacagtattgtaaaggtgatctataattagatgctaaccgcgtttgccgtaaaattgggtgggcgaggtcaacaaggtaagctgggagccggctgattgttatgatcaatcaataacctatttatttcccaacatttctattaacctctgccagccaatcacagtttcaatttgaaaggctggggtctgctttgctgactggagaagtctgattgaaagcgggcctctgacatgaccccaagggcgaaatccaattaaaatcattttcactggtagattaatatttttagcatgttctacatcctgggattcatcattcctggcaataactaatgtcttgtgacacgagcaggtggattggcactgccatcaataataattgtgattaattagctcatcaggtgctaggatggctttggggaggcagttggtgcagcttctgggaacttctcccgtcaaaccctggttatgtggatgtctctgggtcataccaatgtaacggccttttctgagtaggaatggtgtttatctgtctctgggtctgaaactcccttggaactatgagttccttgagggcaggtattatttctcattgctttcagcaagtcacttattgtttggcacacccagctgcccttttctgaagactgtcctttactttctccatccgcacagctacagtagaagccaccatatttgtgtaacatggccccattcctggctgctgcttattgaactggggtagagcccatcttaagccaatggctccattcttggatgctcttgattggaccaggggtaggtcccgacccaagctgggacaatgaaagcatcaaggcaccacttgtggacactgttga

SEQ ID NO: 698421 - DNA, 1253 bp, Homo sapiens
tcctgccttggcctcccgaagtgctgggattacaggcgtgacccacgatgtctggctgaatctgtctttcatctggcaaatgattcttgggctcgcagatgttttagaaccagtgcattacagagtgagttcctaagcagagggactgcatcggatacagcaccacgtaccacggtcccctgtgcaaatcttacgctcaataaatgcatgttgcttgaatgaatgaggttttaggcagggatgtrgggagagtcattttattcttcctagaatcccccacactcgctgatggtccccatgttcgacaagaggtctcaccaaatttttctgccactgggaaacttctccagtaagaattcccctatgccccactgtataatcttctcattaatacacagtattgtaaaggtgatctataattagatgctaaccgcgtttgccgtaaaattgggtgggcgaggtcaacaaggtaagctgggagccggctgattgttatgatcaatcaataacctatttatttcccaacatttctattaacctctgccagccaatcacagtttcaatttgaaaggctggggtctgctttgctgactggagaagtctgattgaaagcgggcctctgacatgaccccaagggcgaaatccaattaaaatcattttcactggtagattaatatttttagcatgttctacatcctgggattcatcattcctggcaataactaatgtcttgtgacacgagcaggtggattggcactgccatcaataataattgtgattaattagctcatcaggtgctaggatggctttggggaggcagttggtgcagcttctgggaacttctcccgtcaaaccctggttatgtggatgtctctgggtcataccaatgtaacggccttttctgagtaggaatggtgtttatctgtctctgggtctgaaactcccttggaactatgagttccttgagggcaggtattatttctcattgctttcagcaagtcacttattgtttggcacacccagctgcccttttctgaagactgtcctttactttctccatccgcacagctacagtagaagccaccatatttgtgtaacatggccccattcctggctgctgcttattgaactggggtagagcccatcttaagccaatggctccattcttggatgctcttgattggaccaggggtaggtcccgacccaagctgggacaatgaaagcatcaaggcaccacttgtggacactgttga

SEQ ID NO: 698422 - DNA, 1025 bp, Homo sapiens
agagtgggagtgaggaattaaagggctggcctaggaagaccacaggaaaatatgtggtgaagaatctgcttgagtaaagatttccatgaaaccaccaataacataaattgtttactaaccatgtagcttccttgcctcaagcagaattaggaaatggctttgtcagtaaaagattctttaattgcccaaggaaatgaatctaatgaaggagattctttctgtattgaggtactctaagataagaaattagcaaggaaaagttggtattcttagtattgataataaaaccaaaattattttctrtggattctttagaaaaaatggaaagtaagcatttatctgaataattaataggcttgatgaacaaggaatggttttggtttctacttgtagaaagtacagaagagaaacaggttttatttggaagttagcatataatctagctttgtgtgttttggctgtagtattttaattataactgtggcttggcaaaaattccatagcttagttcagtttgatttttctggggtagaaagcatgctaaagaatttggccagttatagctttgtcctaaaaaggtgttagctggtgggaatggatttaagaggaaataaagagagtaacagtgttttgtgggaaaagtacccatagtcttattccatagttgttatatgtggtgaggaaactaaggcattgtgatgttaaattactaaaagcacacacccagttagtgacagaactggggctagaacccaggtgtctagatagcatgttctctaccacagcatcaggctcattacttgttcctgttctatctgtctgtctctctctcacattacataatatatgtcagatacctcagtctactaatttgggttgtgaacaggaatatggttgtaaatgaagacatgaaagttacatacacataggcatagcatctaaaaaagcattggaacatttttattccgcccttgaagcactatggaagttgcttttttgctgaaaacaaaccagaaaaaagaaaa

SEQ ID NO: 698423 - DNA, 1025 bp, Homo sapiens
agagtgggagtgaggaattaaagggctggcctaggaagaccacaggaaaatatgtggtgaagaatctgcttgagtaaagatttccatgaaaccaccaataacataaattgtttactaaccatgtagcttccttgcctcaagcagaattaggaaatggctttgtcagtaaaagattctttaattgcccaaggaaatgaatctaatgaaggagattctttctgtattgaggtactctaagataagaaattagcaaggaaaagttggtattcttagtattgataataaaaccaaaattattttctgtggattctttagaaaaaatggaaagtaagcatttatctgaataattaataggcttgatgaacaaggaatggttttggtttctacttgtagaaagtacagaagagaaacaggttttatttggragttagcatataatctagctttgtgtgttttggctgtagtattttaattataactgtggcttggcaaaaattccatagcttagttcagtttgatttttctggggtagaaagcatgctaaagaatttggccagttatagctttgtcctaaaaaggtgttagctggtgggaatggatttaagaggaaataaagagagtaacagtgttttgtgggaaaagtacccatagtcttattccatagttgttatatgtggtgaggaaactaaggcattgtgatgttaaattactaaaagcacacacccagttagtgacagaactggggctagaacccaggtgtctagatagcatgttctctaccacagcatcaggctcattacttgttcctgttctatctgtctgtctctctctcacattacataatatatgtcagatacctcagtctactaatttgggttgtgaacaggaatatggttgtaaatgaagacatgaaagttacatacacataggcatagcatctaaaaaagcattggaacatttttattccgcccttgaagcactatggaagttgcttttttgctgaaaacaaaccagaaaaaagaaaa

SEQ ID NO: 698424 - DNA, 1487 bp, Homo sapiens
actgcaacctctgcctcctggattcaagcgattctcctgcctcagcctcccaagtagctgggactataggcgtgtcccaccatgcctggctaattttttgtatttttagtggagatggggtttcactgtgttagctaggatggtctcaatctcctgaccttgtgatctgcctgcctcggcctcacaaagtgctgcaattacaggcatgagcaaccgtgcccaaccagaatcatattatttttgattctcatttttttcatttacaaaggagatattatattaagagtttcctactacaaggagaatctgtaaaaatcaaaagaaaaaaacatacaaatgcctataggttctcaaatgaaaagagaaaagcaaagatatcacctgcccaccttatggtttcaaagaactaaaactaagactttaggttcaagatgtcagactacctcttgggtttatcttctgtctccccaggttcaggacattttacctaactaaatgagaataaaatgattttttttttttttttttgagacagggccttgttctgtcgctcaggctggagtgcagtggcgccatcatagctcactgcagcctcaacctccctggctcaaatgatcttcccacctcagcctcctgagtagctggggctacaggcacctgccaccacacccagctaatttttttgtattttttgtagagggagagttcatcatgcttctctggtttgtcttgaactcttgagctcaagcaatccacctgtctcagcctcccaaagtgctgggattacaggtgagccactgtgcctggcaagaataaaatgatctctaaaagtataaattcaacatgtatagaatggaagggccacgctcctgtcttagggtcactgcattctctacccctctgcctagaacagtcttccccagccactcacacagcaaaatccctcacttcctctgtctttacatgaatcttgctttgcagtgaagtcacccaaatggctctgcgctcctcctacccaacattcttttctgtttttcyccatgggatttatcgcttatactatatgctttcctttttttttttttttttttttaagagttggggtcttgctttgtcacccaggctggagtatagtagggtgaacatggcttactgcagtctcaaactttcgggctcaagcaatactcttgagtagctgggactacaggcacaagccatcgcacctggctaattctttttttaagagatggggtcttgctatcctgcccaggctggtcttgaacccttggcctcaagcctccaaagccactgggattataggcatgagtcactgcacccagatatttacttctttattatgtttttgttctccactgtctacttttctccaacagaatgctgttttgttcaccgatgcatttcagatgcctagagcagtaagcaatgcctggcacataaataaataattgtggaatgagtaaatgaaa

SEQ ID NO: 698425 - DNA, 1467 bp, Homo sapiens
agggttactttgaaaagcctagtgtgccatgctgagaatgatggactttatgaagcaatggaggagcttttaaatgtgttttcaataagaaattgtcatggacaaatcagcattgaattcagatctcattaaaaacgtgtccaaaggataactcgacagtaaacatatctcgaaagtacccatggctgtaaaaaaggcgaagtatttctttctccatttaatttaccctcccctgggtgattggtttgtggttaggccgtttgtccagctgcagcagactggttttacaccctgaagtaaacttgaatttctttttttttttttgagacggagtctcgctctgtcacccaggctggatggagtgcagcggtgcgatctcggctcactgcaacctccgcctcccaggtttaagcgattctcctacctcagtctcccaggtagctgggattacaggtgcccgccatcacgccgggctaattttcgtatttttagtagagatgggatttcaccatgttggccaggttggtctcgaactcctgacctcaggtgatccacctgcctcagcttcccaaagtgttgggattacaggtgtgagccactgcgcctggcctttgaatttcttaaaaccaagcagaacagtgattttcaagctctcttcattrgattctagcagctggagtttatttatttatttatttgagacagtctcactctgttgcccaggctggagtgcagtggcgtgatctccgttcgctgcaacctctgcctcctgggctcaagcaatcctccccgctcagcctcccaagtagctgagattacaggtgtgcgccatgaggctcagctaattttttttatttttggtagagatggggtttcaccatgttgcccaggctggtcttgaactcctgagctcaagcgatccacccacctcagcctcccaaagtgctgggattataggcgtgagccactgcacctggcacagctgcattttagagcttccaaatgcttagtgcgtatttcatttgtttccaaagtacattttaaaccattaaaatcacaataaaaaatagcacacacacttgtgggtggttatatgaataattcgtggactttggacaccaatgtcctgttaactcaggctgccagtgcagtcttcagaataaagtagatttttgtaatttctctgccgacatgtaaacttatacaagtgtgttattgattaagaagctgagtagagcactgccctggtattttgaaaagttcaggttcatgcatgtgcactaataatgtattttacaagtgaacatacctatacctacagtcaatcaaatgccaggcaaggtgtggctcgtctgcttcaggcatggtcttattgtataatagcatcgtaagtgaagtcccaacatctcatttgtatgctgggtagtaattacatgtttcaaatcacctgggggccttttaaaaatc

SEQ ID NO: 698426 - DNA, 643 bp, Homo sapiens
tgttggatttttttcaaatgccctttctgtgtcaattgagatgatgatgtggtttccttctttgttctgttaatgcagtgtgttacattgaatgattttcaaatgttgaatcagccttgcatctttcaaatattgaaccagtgtggcataaagtccacttgttttatggcccaaggtaaagtgttctctgtatgtctattaggtacagtcagtttatggtgttgttcaagtcttctattccctgttaatcttccatctaactgttcygttctctagttttcttgttagacttaatttttcaaacagttattttatgtaaaccatttttgcatcttgtgaatattatgatattagacataatgtcagattctatgcacatataattttatgttcacattaaatattaactaatatatttagccatttttctgttagaatttaagatcatcatagttttatttaaaattaaaactggtatttttgcgtttaagagcttctctgtatttggagttgtttcataaggtagttgaattactggtaaaatagtatggcaattaaagcattcaccaccaaccttcatatacttcagcctgaaggtgggcttcacatggcccaatagcctcaatgtgaaagtaatggaaga

SEQ ID NO: 698427 - DNA, 1471 bp, Homo sapiens
tggaaggtaggcaggcacaaagctactcgtggggagaaagtgaaattttctaggtgacctccaaaagatggcaagttgattggcagaggaggaagatgtccctgttgcttctttcctatcagtgcctgctgaccttcagggcagatatgaagaggtgtcccagtggggcacaacctcaacaagtggagagatgcaagtaactccatgcacctttccaccttcctcttcaccacttcctccccaacacccaggatgcctaagaggtaaaagctccacctctgctgataataataggctggccttgaaagggactattccaggctcttctacggactgttttaatggatggagctggaagccattatcctcagtaaactaactcaggaatagaaaaccaagcaccacatgttctcacttaaaagtgggagctgaacaatgagaacacatggccacacgtaggggaataacacacattggggcctgttggtgggggtgggggagtggagggagagcataaggaaaaatagctaatgcctgctaggcttaacagttagatgatgggttgacaggtgcagcaaaccatcatggcacacgttcacttatgtacatcctgcacataccccagaacttaaaaattttaaataaaaaaagaaaatacagggtatcctcttattacttgagggaaaagccagtatctatattatcaaaagggaaactatcgtgaaaatcacttcattaaataacaaaattgcttgctatgtgactgaaaggcatcattttctctccttacgaaatacagatcccacaaaaatagtttggttgagacttacaaatggaagttaaaattagatcatctctatagaggacctacacaggatgtgaacttggtcctagatttcagtttctgatgaaataccttgcagctcttgctcacagacagctgtttgaaaccagaacgcaaacaattttacttttctgttattcagaatctattctgattatatccataacagtagtaaaaaataattcagaaaataataatcgtgaatgaaacgcatcattcattcctctgcctaccaagtgaccagtagtatgagccttcatatctctttgatgccaaggatagctgtttgaaggaggaaaagccttagaaggtgggtctgattgcaacacttcatcatcagctcagcctccgcaatggtttataatttactcggtaaaaacagatagtcaaacattggtcaagaccacgtacgggcatccagaaagatatcctagcctactgcactgcacgtagctggaaaagttacgtgcaagcaccatgttcccttatgaaacagacagctgccctccagaacttggtcagtttgcatgttcttyagaaaacagtagtgtcagaccacaggcataagggcaggagaaatggttcctgacgagaaaccaaagattacccatttaaaaacaaaagcca

SEQ ID NO: 698428 - DNA, 1147 bp, Homo sapiens
tatttacaaaccattttgctgaacaaagttcatttcagctgacatcagagacatatgccacaaattgcagagaatggggcttactaatcctgagtttcatgcccaggtctagtgatatttgttttatataaaaggacaactacatgtcacaaacatatataaactacagtaaaaaaataaaaaagcaaagacaamagatataattttaggacctctgcaaatgtggaatttacttagaagaaaataagcctcagataatctgccttaggtatttcctataccactcttattttctcctatgcaattgctggtggggtcagtgagggtgcagaaaaagtctccatttgaaccctgtggggttggtctttcttgtaccctgagatctgaagttgaaacatatacagccctcccttgattaccagcccagcacttgtctgagttctgcctgttggctctgtcctcttcccattttggagtcatgaagccaagatccataagacagtcttcagagaactggcaaaatgatgataatgtccctccactgaacatccaccaggtgaagccattcaaagaggactttattatggcctgtacgagcgaagtgtttaggctacacaagctcatcaccatgtgttccagaatactatttaccaatggcctaaagaaaatcaagcagcaagttcatagaataatgtgctattagtatatatgaatgtgaatttttgtgtctaaagacaaattcacagtgtatcatggtaacctgtactatcctaggtttaacacgtggtaaggaaaagtgagtattaactgcagaggtgtgtaaaactttgcaacaaataaaaaacatgtggctgggcacattgggtcatgcctgtaatcccagaactttgggaggccaaggcagtaggattgcttgagcccaggagttcaagatcaacctgggtaatgtagcaagaccccatctctacaaaaaataaaaataaaaaattagctgggtgtggaggtgcacgcctgtaggcccagatactcaggagggtgaggcacgaggatcacttgagaccaggagtcagaggttgctgtgagctacagttgcatcactgcacttcagcctggacaacacagggagaccctctctcttattttaaaa

SEQ ID NO: 698429 - DNA, 1147 bp, Homo sapiens
tatttacaaaccattttgctgaacaaagttcatttcagctgacatcagagacatatgccacaaattgcagagaatggggcttactaatcctgagtttcatgcccaggtctagtgatatttgttttatataaaaggacaactacatgtcacaaacatatataaactacagtaaaaaaataaaaaagcaaagacaaaagatataattttaggacctctgcaaatgtggaatttacttagaagaaaataagcctcagataatctgccttaggtatttcctatacyactcttattttctcctatgcaattgctggtggggtcagtgagggtgcagaaaaagtctccatttgaaccctgtggggttggtctttcttgtaccctgagatctgaagttgaaacatatacagccctcccttgattaccagcccagcacttgtctgagttctgcctgttggctctgtcctcttcccattttggagtcatgaagccaagatccataagacagtcttcagagaactggcaaaatgatgataatgtccctccactgaacatccaccaggtgaagccattcaaagaggactttattatggcctgtacgagcgaagtgtttaggctacacaagctcatcaccatgtgttccagaatactatttaccaatggcctaaagaaaatcaagcagcaagttcatagaataatgtgctattagtatatatgaatgtgaatttttgtgtctaaagacaaattcacagtgtatcatggtaacctgtactatcctaggtttaacacgtggtaaggaaaagtgagtattaactgcagaggtgtgtaaaactttgcaacaaataaaaaacatgtggctgggcacattgggtcatgcctgtaatcccagaactttgggaggccaaggcagtaggattgcttgagcccaggagttcaagatcaacctgggtaatgtagcaagaccccatctctacaaaaaataaaaataaaaaattagctgggtgtggaggtgcacgcctgtaggcccagatactcaggagggtgaggcacgaggatcacttgagaccaggagtcagaggttgctgtgagctacagttgcatcactgcacttcagcctggacaacacagggagaccctctctcttattttaaaa

SEQ ID NO: 698430 - DNA, 1147 bp, Homo sapiens
tatttacaaaccattttgctgaacaaagttcatttcagctgacatcagagacatatgccacaaattgcagagaatggggcttactaatcctgagtttcatgcccaggtctagtgatatttgttttatataaaaggacaactacatgtcacaaacatatataaactacagtaaaaaaataaaaaagcaaagacaaaagatataattttaggacctctgcaaatgtggaatttacttagaagaaaataagcctcagataatctgccttaggtatttcctataccactcttattttctcctawgcaattgctggtggggtcagtgagggtgcagaaaaagtctccatttgaaccctgtggggttggtctttcttgtaccctgagatctgaagttgaaacatatacagccctcccttgattaccagcccagcacttgtctgagttctgcctgttggctctgtcctcttcccattttggagtcatgaagccaagatccataagacagtcttcagagaactggcaaaatgatgataatgtccctccactgaacatccaccaggtgaagccattcaaagaggactttattatggcctgtacgagcgaagtgtttaggctacacaagctcatcaccatgtgttccagaatactatttaccaatggcctaaagaaaatcaagcagcaagttcatagaataatgtgctattagtatatatgaatgtgaatttttgtgtctaaagacaaattcacagtgtatcatggtaacctgtactatcctaggtttaacacgtggtaaggaaaagtgagtattaactgcagaggtgtgtaaaactttgcaacaaataaaaaacatgtggctgggcacattgggtcatgcctgtaatcccagaactttgggaggccaaggcagtaggattgcttgagcccaggagttcaagatcaacctgggtaatgtagcaagaccccatctctacaaaaaataaaaataaaaaattagctgggtgtggaggtgcacgcctgtaggcccagatactcaggagggtgaggcacgaggatcacttgagaccaggagtcagaggttgctgtgagctacagttgcatcactgcacttcagcctggacaacacagggagaccctctctcttattttaaaa

SEQ ID NO: 698431 - DNA, 1147 bp, Homo sapiens
tatttacaaaccattttgctgaacaaagttcatttcagctgacatcagagacatatgccacaaattgcagagaatggggcttactaatcctgagtttcatgcccaggtctagtgatatttgttttatataaaaggacaactacatgtcacaaacatatataaactacagtaaaaaaataaaaaagcaaagacaaaagatataattttaggacctctgcaaatgtggaatttacttagaagaaaataagcctcagataatctgccttaggtatttcctataccactcttattttctcctatgcaattgctggtggggtcagtgagggtgcagaaaaagtctccatttgaaccctgtggggttggtctttcttgtaccctgagatctgaagttgaaacatatacagccctcccttgattaccagcccagcacttgtctgagttctgcctgttggctctgtcctcttcccattttggagtcatgaagccaagatccataaracagtcttcagagaactggcaaaatgatgataatgtccctccactgaacatccaccaggtgaagccattcaaagaggactttattatggcctgtacgagcgaagtgtttaggctacacaagctcatcaccatgtgttccagaatactatttaccaatggcctaaagaaaatcaagcagcaagttcatagaataatgtgctattagtatatatgaatgtgaatttttgtgtctaaagacaaattcacagtgtatcatggtaacctgtactatcctaggtttaacacgtggtaaggaaaagtgagtattaactgcagaggtgtgtaaaactttgcaacaaataaaaaacatgtggctgggcacattgggtcatgcctgtaatcccagaactttgggaggccaaggcagtaggattgcttgagcccaggagttcaagatcaacctgggtaatgtagcaagaccccatctctacaaaaaataaaaataaaaaattagctgggtgtggaggtgcacgcctgtaggcccagatactcaggagggtgaggcacgaggatcacttgagaccaggagtcagaggttgctgtgagctacagttgcatcactgcacttcagcctggacaacacagggagaccctctctcttattttaaaa

SEQ ID NO: 698432 - DNA, 670 bp, Homo sapiens
tgaggtgcaaaagagacacagcccctgtcctggagctaacaggccagtaagggaaacggccattcttaaaaattacatataaatacaaacactacataaatacagsacacacagccaactgtactaattgcaaagaaaagaccacaattcaaggagagataatagtggaaacctggttcaagatgggagatcaatgaaggcttttctgaggaagtatcattttatctgaaaactgaagaatgatggatgatgtatataggacagggagcagagaatatgtgggaagatttccagttacaaagagaagcttatgtgaagaactgaacaagagaaataatttcccagatggtagacaatgcagcttatttcaatacaaatgtctacattcagaataaggcaaaaaatctgaattcctcgaagttgaacaggctgaagtcaagtgctggcatagtcccatcacctatatgagtagaatcctctactccccatgtgttgagtggttgctgagctgctggaaatgtcccagagaaagagagatgccatcggtcttggattgtttaatatactgtgtcactttttattaaagagtttaaaaccgcattggtttatgatattgtttagatgttcttgcaatttattatttgatacttggttttcacaagtttatgca

SEQ ID NO: 698433 - DNA, 630 bp, Homo sapiens
agaaccacacaaaagaatgctggttcaatatcctctatgtcttcccttcttgggaatttgaaccaagcagtatttttttttcagacatagacaaattggcattttaaggatttctgaaggtaaagattcaagwtgtttttcaagagcgcacaggtatagattatatgtcagcattctgaaatggtttccagggttatgaaaaaaaatctctgccttgatcatttagggcctagatttttagtgatagagtaggactatttgtgaggacatggaacgacacagtatcagggctgagtaggatttagtttaagctttcaatctaagataaaatgacaggtctagagaagtgtggggtggttagttgtcaggctctgaatgtaggcattatcttaggtcacaaattttgtctctctgcctttctctctctctcatctctcatctgtctagtttattatttttaagcatacaatttcagcagttttcactgtttgcaaagttctgcaagtgtcataattatttaattccagaacatttttatcatcctctaaagaaacctcatactgataagcagccactccccactgccctctctccctacactcagccctaggcaatcacaaatttactttc

SEQ ID NO: 698434 - DNA, 630 bp, Homo sapiens
agaaccacacaaaagaatgctggttcaatatcctctatgtcttcccttcttgggaatttgaaccaagcagtatttttttttcagacatagacaaattggcattttaaggatttctgaaggtaaagattcaagatgkttttcaagagcgcacaggtatagattatatgtcagcattctgaaatggtttccagggttatgaaaaaaaatctctgccttgatcatttagggcctagatttttagtgatagagtaggactatttgtgaggacatggaacgacacagtatcagggctgagtaggatttagtttaagctttcaatctaagataaaatgacaggtctagagaagtgtggggtggttagttgtcaggctctgaatgtaggcattatcttaggtcacaaattttgtctctctgcctttctctctctctcatctctcatctgtctagtttattatttttaagcatacaatttcagcagttttcactgtttgcaaagttctgcaagtgtcataattatttaattccagaacatttttatcatcctctaaagaaacctcatactgataagcagccactccccactgccctctctccctacactcagccctaggcaatcacaaatttactttc

SEQ ID NO: 698435 - DNA, 630 bp, Homo sapiens
agaaccacacaaaagaatgctggttcaatatcctctatgtcttcccttcttgggaatttgaaccaagcagtatttttttttcagacatagacaaattggcattttaaggatttctgaaggtaaagattcaagatgtttttcaagagcgcacaggtatagrttatatgtcagcattctgaaatggtttccagggttatgaaaaaaaatctctgccttgatcatttagggcctagatttttagtgatagagtaggactatttgtgaggacatggaacgacacagtatcagggctgagtaggatttagtttaagctttcaatctaagataaaatgacaggtctagagaagtgtggggtggttagttgtcaggctctgaatgtaggcattatcttaggtcacaaattttgtctctctgcctttctctctctctcatctctcatctgtctagtttattatttttaagcatacaatttcagcagttttcactgtttgcaaagttctgcaagtgtcataattatttaattccagaacatttttatcatcctctaaagaaacctcatactgataagcagccactccccactgccctctctccctacactcagccctaggcaatcacaaatttactttc

SEQ ID NO: 698436 - DNA, 630 bp, Homo sapiens
agaaccacacaaaagaatgctggttcaatatcctctatgtcttcccttcttgggaatttgaaccaagcagtatttttttttcagacatagacaaattggcattttaaggatttctgaaggtaaagattcaagatgtttttcaagagcgcacaggtatagattatatgtcagcattctgaaatggtttccagggttatgaaaaaaaatctctgccttgatcatttagggcctagatttttagtgatagagtaggactatttgtgaggacatggaacgacacagtatcagggctgagtaggatttagtttaagctttcaatctaagataaaatgacaggtctagagaagtgtggggtggttagttgtcaggctctkaatgtaggcattatcttaggtcacaaattttgtctctctgcctttctctctctctcatctctcatctgtctagtttattatttttaagcatacaatttcagcagttttcactgtttgcaaagttctgcaagtgtcataattatttaattccagaacatttttatcatcctctaaagaaacctcatactgataagcagccactccccactgccctctctccctacactcagccctaggcaatcacaaatttactttc

SEQ ID NO: 698437 - DNA, 932 bp, Homo sapiens
aacagttatccaagggatgcaggtgaagaaaggtctaggttaaccgaaaccaacgaggcagcttttcaccccacaaaaataacctccaacaccagaacacaaccaagaaacataaaagtgcaaaaaaactgtgttctttttttgactccctctttctcaagctcctaaatcaaaaatgcctgtgctagccaataattgatgttcacgtgtgctttatgatttttcaggtgctctcacatgagatacatgatcggctctcacagcagctccttgagctccaacaagcagttactatttccatcatcttgatttttcagctggggacatgggaggttcagaatttgtgatttgcggccaggttaggaagtggcagttggtaaaagacagacttggcattcagaccttttgacttrgagttctgtactctttttattatgagctcttggcagtgttcacaccgttttaaaaaatctagataaaggtactctgattttttcccccaagattcacattaatagagtttgagcttggctttgggaagcttcgataaacatcatatttggatctttggcatgagagagaaatgccgtgttgtacccttgatcccaacacgtgtgtacaagcccacttgcccagtatatttttacaagtgtattttctgtgttcatgcatgtgaggtttcttagcccccttggctgatctaaaagccttacttttgagctgtaagaggcaatattaggatgttcctgttattttgagtagctagtaaattccagactggtggagaggctcagctgtgggctcaaaaaccgtttacagaaactttgaggatgtttccttttgtctgcgtattttagaaatcagcttaattgaggttgtctgagcatttttgtaaatttcagagaggcagttgtgtattatacttcgctgtg

SEQ ID NO: 698438 - DNA, 932 bp, Homo sapiens
aacagttatccaagggatgcaggtgaagaaaggtctaggttaaccgaaaccaacgaggcagcttttcaccccacaaaaataacctccaacaccagaacacaaccaagaaacataaaagtgcaaaaaaactgtgttctttttttgactccctctttctcaagctcctaaatcaaaaatgcctgtgctagccaataattgatgttcacgtgtgctttatgatttttcaggtgctctcacatgagatacatgatcggctctcacagcagctccttgagctccaacaagcagttactatttccatcatcttgatttttcagctggggacatgggaggttcagaatttgtgatttgcggccaggttaggaagtggcagttggtaaaagacagacttggcattcagaccttttgacttggagttctgtactctttttattatgagctcttggcagtgttcacaccgttttaaaaaayctagataaaggtactctgattttttcccccaagattcacattaatagagtttgagcttggctttgggaagcttcgataaacatcatatttggatctttggcatgagagagaaatgccgtgttgtacccttgatcccaacacgtgtgtacaagcccacttgcccagtatatttttacaagtgtattttctgtgttcatgcatgtgaggtttcttagcccccttggctgatctaaaagccttacttttgagctgtaagaggcaatattaggatgttcctgttattttgagtagctagtaaattccagactggtggagaggctcagctgtgggctcaaaaaccgtttacagaaactttgaggatgtttccttttgtctgcgtattttagaaatcagcttaattgaggttgtctgagcatttttgtaaatttcagagaggcagttgtgtattatacttcgctgtg

SEQ ID NO: 698439 - DNA, 932 bp, Homo sapiens
aacagttatccaagggatgcaggtgaagaaaggtctaggttaaccgaaaccaacgaggcagcttttcaccccacaaaaataacctccaacaccagaacacaaccaagaaacataaaagtgcaaaaaaactgtgttctttttttgactccctctttctcaagctcctaaatcaaaaatgcctgtgctagccaataattgatgttcacgtgtgctttatgatttttcaggtgctctcacatgagatacatgatcggctctcacagcagctccttgagctccaacaagcagttactatttccatcatcttgatttttcagctggggacatgggaggttcagaatttgtgatttgcggccaggttaggaagtggcagttggtaaaagacagacttggcattcagaccttttgacttggagttctgtactctttttattatgagctcttggcagtgttcacaccgttttaaaaaatctagataaaggtactctgattttttcccccaagattcacattaatagagtttgagcttggctttgggaagcttcgataaacatcatatttggatctttggcatgagagagaaatgccgtgttgtacccttgatcccaacacgtgtgtacaagcccacttgcccagtatatttttacaagtgtattttctgtgttcatgcatgtgaggtttcttagcccccttggctgatctaaaagccttacttttgagctgtaagaggcaatattaggatgttcctgttattttgagtagctagtaaattccagactggtggagaggctcagctgtgggctcaaaaaccgtttacagaaactttgaggatgtttccttttgtctgcgtrttttagaaatcagcttaattgaggttgtctgagcatttttgtaaatttcagagaggcagttgtgtattatacttcgctgtg

SEQ ID NO: 698440 - DNA, 653 bp, Homo sapiens
acgacaggagtaggcttgtatttaaaagcggcccctcctctcctgtggccacagaacacaggcgtgcttggattyttgacaagcagacctgctcctgcagaggagacagccacatttggaattgggcaccgagaagacctgagaaaaacccactctctcttttttttttttttgagacggagtcttgctctgtcacccaggctggagtgcagtggcacgatctcggctcactgcaacctccgcctcccaagttcaagcaattctcctgccccagcctcctgattagctgggattacaggcgtgtgccaccatgcccagctaatttttgtgtttttagtagagacggggtttcaccatgttggtcaggctggtcttgaactcctgacgtggtgatccacctgcctcggcctcccaaagtgctgggattacaggcgtgagccaccacgcctggccgaaaaacccactctcataacagaagtgcagactcattgctagattcagtgcccttgagtgtgccagaggtcctctgtgtttgagacaatcctgtgtgtgccaggaggctccgtgtgcaccaggggctctcagaatcccgcttacccagctggagaccatgcctctggcagccccatctcagccagccctgctctctccct

SEQ ID NO: 698441 - DNA, 1938 bp, Homo sapiens
ccccatgactccttccagccaccttcccacttcaaggaaccacctctttctcctggtggctcactaagggctctgcagtcttgctcccatgtattgagtggctagagtcttttccccaacaggaaggcaggttgcttggtgggaacactgccactgtgctgttgacccatgcctgcaccctgcctggtccttcagggtcctgcagctaccacctacctttccacagctgtcggagtcatgctggtcagggcaggagcacctggtgtggctttggaccgctctgtgaaccgggagtcaaacgctttcatgggttcgatcttggacggggtcgttaacacagaaggtgacaatgcagcaggagtagaggtagcattcatactggggtgaagaagaggggaggcatgtcaagcgcaatcctgaaaggatctggaggtctagtatttgcattatttggagcctactaaaaaaggcacaaatatcaaacttccataaacacaaaaaatgtcaagatacaatctactactcccatttctttaaaattttcatgtgtcaaaattatggacacctagaaggttgtgagcaaatgcattcacatttccccctttgcactgttctgagagcttttgcgggtagaatgaggcctagaacatggttcttacaacccttttctctagtcacactgccctatctccacaacttaaatacagcacctctaccccaaaccactccagccactcacctttcccactttgacaatgagtctcatgagataagcctgcacctggggtcctgaagccatggtctgcttttacccttagtcaggcatcctccatcctgagcggcccctcccatatctccctgtgacagtgtcacattcttagcattatgctccaagtgctcatcacacaactttcatcttctattccacagagaaaggagaggccaggcagaagcctgcctggtccatccttcatgtccaagcccacaccacacgctttgggaccatggccactggacctcctcctaagcacacccaggctaacaccttccactcctatctgcccagacaccacaccacatgcctggtagtcaccctggacagccccattcttctcctccatgatctgtggccactagaatgggccatccccacagagttctcagatctggcatggtctgtccttcccaggctcccttcgtcctggcatgctttgcttcctcactggtcttgctgctcagtcttctcttcctaccctctcagggtccccccagggcagtgacctaatgtttgggcatgccttcacagccatggtgctagcacccagaagtaggaggctgaagtaacataagactccattccaccaatggagaattgctctgacggtatcagctgtatcccagaagcagggggctgcagtaacacaagactccattccaccaatggagaatcgctctgacggtatcagctgtatgtgccagggagtggcctatttggggcaccaccgcctaacagagtcactttcctaaaatggagatctcaaagccttctacgtctccactctggggaaaagcccagactacctgatccagcacagacaccttggccttctccctcttcttggccttcctcaggggactggggggctgctgcccctaatccccaggcctcatcccctggtaggcctgtatgagycctgtggagggtaccctctgaggcacctccctgatccctgagataccagcccctctttggatggctagccatttctatccaggggacctgaggggccacctgcaaccctgtggctacctctcccccaccagcctacacactccctgaggatgaggacccacccattaagcccctgcgatgcctggggcctagcagggtgtataacccagagcaggtgctgagcaaacgttcactcctggctttca

SEQ ID NO: 698442 - DNA, 623 bp, Homo sapiens
aaaccacaaaaacaaaaaaataatccttggaagaattaagagttaaatttctgtggcagcartgtaagtctaaccaggtgggctcaccgcctactgagaagagtcatctagcactaaaacatcaaaactagcctgggttcctgccatgcctttggtatggggcatcagttttttctcaggatatgatcagtatttcccctccggggactttgcagttggcacaactatttcttttcatttttgactgcaattctagtctaaatagtctcatgggctctggctccactcatgtcattctaatctcaggcagccaagatcagatactggggtatctctttactggcagccccagacttgaactttggaaattgtgggaaattccattcttcgggcacgtagaacttgtgactctaccatggaagagtttctaccatagaaaatttttccctgctgagtagaaatggcatcagaataatatggagaaaagcataatgaaaatagtcctttatgtgtatatgatattttactgcttaaaaagtgattttatgtttattgtcttgttttttcctccttataaccccaggaagcagactggcagagtggttaaagaatatcaattctgg

SEQ ID NO: 698443 - DNA, 646 bp, Homo sapiens
cccacatatctaaataagcatagtattatctctctaatcatttcagacttttctctcaataacgtttatattttctattttttcctaagtaacatatagttttagttgatgttatgaaaagcattttttcaggtgggcggatcatgaggtcaggagatcgagaccatcctggctaacacggtgaaaccccgtctctactaaaaatayaaaaaaattagccaggcgtggtggtgggcgcctgtagtcccagctactcagaaggctgaggcaggagaatggcgtgaacccgggaggcggagcttgcagtgagccgaggtcgcaccactgcactccagcctgggcaacagagcgagactctgtctcaaaaaaaataaaaaataaaaaaaaaagaaaatcattttttctgttacatttttaatgagctagttctggtacagaagacagagttacttactagcaaatgtcactgtgggcaagctctttatctcgctgtgcctcagttttctcaaatttcaaatgggaataatagtgctacctaataaagttactgctggtgagagataaataagttaacacatgcctagtgcctggcacatagtaattaaatgcaaatgttagcttttattattaaaagaatattaatttg

SEQ ID NO: 698444 - DNA, 801 bp, Homo sapiens
tctgacctccagaaccttccaaaaagagagggtcctcaggccaatttggagggagatagccatggtcatagtagtggcgcttgcctaagtgtgggggactcagcgggcctcagccccgccccacatgatctcattccacagagggatcctctctcatcacaacctatagtccaggagtctgagccccagcgaaggccaccagtggcaggcggctctgctggcttcaggaatcattcccctcttgtccaggccaactggctgggaacagcgcctggccactgggaagaygggcaacaggcagccctgtgggtcctgagcccttgcccccagccagggccaagcaggaaggggactctgttcccagcagggtccacgctatcacaaaggacccctgccccaaccctttatttgcagagctacatctgataataacagacatgtcactccaggggactgattagttccatgggtggagaggtcccctgtagccccacccttcatgggtttgattccaaagcacctattcctaaacaggaggcagagttcccctcaccttggtcttcctccctctcagcttgacccccacctggccaggtatctgctctggtccgaccctcaagctgcacccaggtgaggtcaggggcccaggattgaaggtgcatcccctacggattctttcaacaagaatcgtgcgtaataagctctgtctgggtctgagaacattgtcgattcacctcactcctctcacccctggaggatgtgggtttccaggctgacagttatgttcgaagctctgtgctt

SEQ ID NO: 698445 - DNA, 643 bp, Homo sapiens
cctgtcccaccgagcccatccccgggagcagcctgcggccgagcctgtcccaccgagcccatccccgggagcagcctgcggccgagcctgtcccaccgagcccatccccgggagcagcctgcggccgagcctgtcccaccgagcccatccccgggagcagcctgcggccgagcctgtcccaccgagcccatccccggtgtccctggtgtgggcctttccttcctcccttgtggagaggagccccractcctcagggatctcagacccatcctgacgcagtcactgctggcggagtagggagagaccccggggcttgcagatgctgaggggccttctctgcagaggggccctggccaccacaggccagtctggaggtccccagctttgggggctggccacagtccagacgcccctccctcgcctcccccatacccacttctaccctctctgtctggctctaggtgacccagggcctggtcatcgggcagctgagcagccacttctcggaggaggtgctgctccgggccagcgtgctggtcttcatcgtggtgggcctggccatggtgagggctccccgctttgggcccactcacctgaccctctcactgggcaaggccacctgggcggtaccatctgtgcttaa

SEQ ID NO: 698446 - DNA, 1646 bp, Homo sapiens
tggagaacccataggtaggaagcacctgggcctgaagacataaatagctggaggaggaatgmagccccctggactctccctgcacccctcctctgtgctcctctctgtccgtcctaatttttctctctcacagatgcctggtttctctgctccccagaccccaagacagaacacaggtctctctcactgctgggttgaattctgcttttttaaagagatggccagagcaaggataggatgtcttccaaattcccaggaaaacagcctacctttagtgcccaaccttgagctaagcacactgaccagggcagtggacaccatgggaagccccatgaccggtacaggttgaatcaggggctcatccactgtggccaagacgatccaacaggtgctctctacgacctggcaatggcctacgtgggtcaggcaatgacttgacagccactccttaagtctggacagtgttttctaccttacgagacactttcacactcatgattacttttccgcctttgtatcttcttgggattttgatgtgagggctaacttacagatgagaagatgggttcctggaagacaagtgacctactcaggatcacgcagtgagtgcagcccagccggggctcagctccaggtgtgcatcttgatatggcatttgggactgggcacccctgcctgctccccgctactacactcctggagctggagtggtttatggcagagccagaggcctgaatggtgtgtgtcacatgcagcctccacgctcctgtggccgaggcttttacaaagtacactgcaaacccctttgccattaaagcaattaccacttcaaggacaaccacccttcaggcctttggctagacacggggcctgaatgcccagtcccatgaaaatgaaaaacccaagtgtatgtggaatggcaaagagcaagcaggcccagggtcacggtctatgagcaccagcctcttcctgactgtctgcccctccccaccctaaaaagacgcccggcactctgggatgcttctctttctttgttttgttttgttttgttttgtttgagacggagtttcactcttgttgcccaggctggagtgcaatggcgcaatctcggctcactgcaacctccgcctcccaggttcaagcgattctcctgcctcagcctcccgagtagctgggattacaggcatgcaccaccacgcccagctaattttgtgtatttttagtagagacagggtttctctatgttggtcaagctggtctcaaactcccgacctcaggtgatccacccgcctcagcctcccaaagtgctgggattacaggcgtgagccaccatgcccagccttgggatgcttcttaatagcatatcccaggttacaggagcacgctggtgcccatttgttcacaggattggtcctcatggccactatgggagaagatggatgggaacaggaacccgtggctcctaagggttttctggcccagctgggattctaacccgagtctcctgatctcgagccccatgctccacccacagccctctgctgctccctgcacccatgggacaatcagagaggacaggacaaaactacatgacaagtgagtgactgagatcccaagagccatgagagaattaccaggccatcttc

SEQ ID NO: 698447 - DNA, 638 bp, Homo sapiens
tgttgtgagcaggcacagatattctgtgatgagacccgtgagaaaaggctcacatggaaaggaactgaggcccctcccaccagcactcagacctagctgagatcccagccaattgccaaggccaacgtgtcaatcccagctgcctctgtgagtgagtccaccgtattggaagtggatcttgtagccctcagttgagcctaatcagctgatgctacatagagcacagaccaggctttctcaccaaactgtgtctaaactgcagatttatgagtgaaataaacattgttgtgggctactatgttttggggtagtttgttatgtagtgatagataaactggaacaagtttcaaccactgttttgctttcctgacagatacattgaactgtccctgcatgtgttcgcttgaatgtcctcaaatcacttcagacttcacgtgtttagggacttccacttccacttccacttccactttggacacggaaaycccccgagaaatgtcattcccatcctcactatgagaaagaaatccaggtaatctacaaaattatacgttttttgagcccattagagagctgagctcagaaggcagccaagtgaactgaattctgaagagtggcaaatccttttaaggagcaat

SEQ ID NO: 698448 - DNA, 638 bp, Homo sapiens
tgttgtgagcaggcacagatattctgtgatgagacccgtgagaaaaggctcacatggaaaggaactgaggcccctcccaccagcactcagacctagctgagatcccagccaattgccaaggccaacgtgtcaatcccagctgcctctgtgagtgagtccaccgtattggaagtggatcttgtagccctcagttgagcctaatcagctgatgctacatagagcacagaccaggctttctcaccaaactgtgtctaaactgcagatttatgagtgaaataaacattgttgtgggctactatgttttggggtagtttgttatgtagtgatagataaactggaacaagtttcaaccactgttttgctttcctgacagatacattgaactgtccctgcatgtgttcgcttgaatgtcctcaaatcacttcagacttcacgtgtttagggacttccacttccacttccacttccactttggacacggaaatcccccgagaaatgtcattcccatcctcactatgagaaagaaatccaggtaatctacaaaattatacrttttttgagcccattagagagctgagctcagaaggcagccaagtgaactgaattctgaagagtggcaaatccttttaaggagcaat

SEQ ID NO: 698449 - DNA, 1074 bp, Homo sapiens
ttgagatgttcagagtatgtcctactttgatgttttgcctaccagcatcctgcctctctcgtcacagttcgtttactcagtagccctgtaactcaagctttcttttcctagtgtcatcccacgttgaaccagttgttcacgtgggctagattaatccacttaaatgccttttcttccttcgtatatcttccctgctgaggagcctgcagtgattatccattgttcatcagatcaaacctaaactcttcctgacatttagaaccctttgtaatcmaatcccacatcacctctctgatctctgttatttatttatttgagacagagtcttgctcttgtcgcccaggctggagtacagtggcgcagtctcagctcactgcaacctccgcctcctgggttcaagccattctcctgccttagcctcccaagtagctgggattacaggcacctgtcaccacacccagctaatttttgtatttttagtagagatggggtttcaccgtgttggccaggctggtcttgaactcctgacctcaggtgatccgcccgcctcagccccctaaagtgctgggattacaggcgtgagccaccacacccagcaatctctgttatttattaaaaatagaaactacacacgaagtcccagctagtaataacttaaaattttaccattgctatatttctaaaactgtaagcatgtaaatttgatttctcatatctttccctgatattttcccagtttttcaattagccctaccaatatgttgttaaaaattgtattttccttcatttttggagatgtgtttgatatgtttgtcagcctcatttctcatatttagttggaacatgtattcaaagaaatgaaaaatattgtcttaatgtattctaaaataaggaaaaagcaaggtataggacattatgtatcatatgaaaaaatatattcatgtgcatagacaatttcgggaaagataacagaaactgttaatggtagtagcccctgggaaatagaactaggtcgggaagaaggtgatttccttttcattttatacccttttgtactattggaatctcttagta

SEQ ID NO: 698450 - DNA, 1074 bp, Homo sapiens
ttgagatgttcagagtatgtcctactttgatgttttgcctaccagcatcctgcctctctcgtcacagttcgtttactcagtagccctgtaactcaagctttcttttcctagtgtcatcccacgttgaaccagttgttcacgtgggctagattaatccacttaaatgccttttcttccttcgtatatcttccctgctgaggagcctgcagtgattatccattgttcatcagatcaaacctaaactcttcctgacatttagaaccctttgtaatccaatcccacatcacctctctgatctctgttatttatttatttgagacagagtcttgctcttgtcgcccaggctggagtacagtggcgcagtctcagctcactgcaacctccgcctcctgggttcaagccattctcctgccttagcctcccaagtagctgggattacaggcacctgtcaccacacccagctaatttttgtatttttagtagagatggggtttcaccgtgttggccaggctggtcttgaactcctgacctcaggtgatccgcccgcctcagccccctaaagtgctgggattacaggcgtgagccaccacacccagcaatctctgttatttattaaaaatagaaactacacacgaagwcccagctagtaataacttaaaattttaccattgctatatttctaaaactgtaagcatgtaaatttgatttctcatatctttccctgatattttcccagtttttcaattagccctaccaatatgttgttaaaaattgtattttccttcatttttggagatgtgtttgatatgtttgtcagcctcatttctcatatttagttggaacatgtattcaaagaaatgaaaaatattgtcttaatgtattctaaaataaggaaaaagcaaggtataggacattatgtatcatatgaaaaaatatattcatgtgcatagacaatttcgggaaagataacagaaactgttaatggtagtagcccctgggaaatagaactaggtcgggaagaaggtgatttccttttcattttatacccttttgtactattggaatctcttagta

SEQ ID NO: 698451 - DNA, 1074 bp, Homo sapiens
ttgagatgttcagagtatgtcctactttgatgttttgcctaccagcatcctgcctctctcgtcacagttcgtttactcagtagccctgtaactcaagctttcttttcctagtgtcatcccacgttgaaccagttgttcacgtgggctagattaatccacttaaatgccttttcttccttcgtatatcttccctgctgaggagcctgcagtgattatccattgttcatcagatcaaacctaaactcttcctgacatttagaaccctttgtaatccaatcccacatcacctctctgatctctgttatttatttatttgagacagagtcttgctcttgtcgcccaggctggagtacagtggcgcagtctcagctcactgcaacctccgcctcctgggttcaagccattctcctgccttagcctcccaagtagctgggattacaggcacctgtcaccacacccagctaatttttgtatttttagtagagatggggtttcaccgtgttggccaggctggtcttgaactcctgacctcaggtgatccgcccgcctcagccccctaaagtgctgggattacaggcgtgagccaccacacccagcaatctctgttatttattaaaaatagaaactacacacgaagtcccagctagtaataacttaaaattttaccattgctatatttctaaaactgtaagcatgtaaatttgatttctcatatctttccctgatattttcccagtttttcaattagccctaccaatatgttgttaaaaattgtattttccttcatttttggagatgtgttygatatgtttgtcagcctcatttctcatatttagttggaacatgtattcaaagaaatgaaaaatattgtcttaatgtattctaaaataaggaaaaagcaaggtataggacattatgtatcatatgaaaaaatatattcatgtgcatagacaatttcgggaaagataacagaaactgttaatggtagtagcccctgggaaatagaactaggtcgggaagaaggtgatttccttttcattttatacccttttgtactattggaatctcttagta

SEQ ID NO: 698452 - DNA, 1191 bp, Homo sapiens
cggccaattttttttttttttttttttttttgagacggagtctcactctgtcacccaggctagagtgcggtggcatgatcttggctcactgcaacctccgcctcccaggttcaaacgattcttatccctcagcctcttgagtagctgggactacaggcatatgccaccatgcccagataatttttgtatttttagtagaggcggggtttcaccatattggccaagctggtctagaactcctgacatcatgatccgcacacctcggcctcccagtgtgctgggattacaggcgtgagccaccgtgcccagcccaatttttgtatttttagtagagacgggttcaccatgttggccaggctagtcttgaactcctgacctcaggtgatctgcctacctcagcctcccagtgtgagccaccgcacccagcctggattgttgaattcaatgcttgggtcacctccaaattcattttcacagtctttcatgttttggtcatactacattgtattttgctgccatatgactgatctttttttgttaaatgtgagatactttttaaaaaatatttaacaatgcattgaggcctagtagcatgttatcttgctgcagaagagatgggagtctacttctgggggatggtcaggggtcctccgtacaggctgcaattgaggtcgtctctgcaggctcagtccctacaaaggccagggtatttcctgtccacctctattctgatgcatgactcttctgggtctcaaccagagccagtggacttcagtatggatcgctttcattggcagaccctcaatccacttgttttccatctaaccccacgcatgtgtgcaaaagctgctgtgcttctttgcatctcagtagttccttctggaattcagcaatgaaactcagggaaatgggttccaaatgcgaggctgactttcgtcctgggtttccttcttctccatcttcacctcatgtctgtttactgccatgttagcaatttgatgtattcaatcatggkttttatattctgtttggtgtcccccattgttctcatcggagatcagaagcttcagatgcacttatgtcaactcaagagtagaatgcttccttagcttccctccagagtcaggttttgtgtttctagttcccaagtgcacagcaggagtagtgctgtcctcactggcttctcatttg

SEQ ID NO: 698453 - DNA, 626 bp, Homo sapiens
actgtgggccaaattccacctcttgcttgctttgtgttgcccgtggactaagacctttttttttttttttttttgcagtttgaaattgttttttaaaaattaaaagaagtatattatttttgacacatgaaaattacatgaagctaaaattgtagcaccataaagttttacgggagcacagccacacctgttgctttatctgtggttactttttgtgctacagcagcagagttgagtatttccaacagactgcrtggcctgaaagactcaaatgttcactctctggcacttgaggaagagcttgctggctgctgggcttcccctgcttcggggcttctccccttgtcacactctcactttgtcattttgttctgccatggtgatcatttcactcttgttgtttgagccttgcaatttataatgttgttcagatgtttatttgaatgaaatatttgtctttcatgtaaatctaagtatttcctaatttaaaattaatgtttaagtgtatgattttttatagtgaatgatgttttaaaacacagttcctaagaagccagaatctacggctgatgaagaaaaaattggaaacgaagagagtgatttagaagaagcctgcattttgcctc

SEQ ID NO: 698454 - DNA, 1656 bp, Homo sapiens
gttgcaaagctccaaagggagttcatatccaaggatacttgggtctgtttcttccaggcagctgtcctcattgtggctcaagtaaactctttgaattacgttttgtgcttcagccccttccacttagattaacaacatggatttgtgtcaccatrtacagcaattaaaatgtttacacttttcccctcgagggcactgatgtgttttcctgagcacttggaatagctacgtagtgtttcctgtctagattatggtttctgaaccttggtgctacttacctttaggactagaggattctttgttgtgggaggctgccctagcaatgctaggtgtttcatttgacctctaaatttcacacctccaccagtcttgacatgcccacaataaccctagacattgacaaatgtctcctggggaaaactctctaccagttgacaggcaaagttctggaaatattggaattgtcaattgagattttatgttatccaaaacaaatatttttctttgtttttaaacatctacttccatctacttatctacttatttttacttttatttgtaacttaattccatcaaggagagagagtgcattttctgttatgctaaatttttgaagaatgtattgattttttatgacctgatatatggatgatatgtagatattacatgtttgtattatcaaatttcagggcgttaataaaataaatacttacaatatttatactgtcactgtatattagttattttctttcttcactacaggagtttttcaacctataggctatttttcaattctaggttatccagtagattttgaaatgttatgattaaatatctatttctcaagcattcatctttgcaaatgaaactatcccaagctcttataaagcacatcatataaagggcagattagtcaatatatggttcagaaataattatgtaatatttataaggaaattaaaaatttagatccttaactcagataacaataatccaaattaaaatttgatttcattacataatttaaaatgacaccagaatactagtaaaatgtagctaagtttatataatcttttttagctgtaggactttattagcataaattgaaatacaggatccaaagcaagattgagacctatagtcaaagattaaaatgtacacatcataggggcatgattaaactaatttaaagcataataacatggagaaatattgcgaaacatacattttactgaattaattgttaatatctaatcattatgtgagaacaaaattaaagagtagctacacaggcgcacacccacacacaactgcaatattgtcaaataaacgatgttcagctacactagaaatcacaactgtgtttttttccacagaagagcaaagattaaaaatcacaatattatttattgtacatatggaggtaaagatactcaaaatattacccaaaaatgcattttttttgagatggagttttgcttttattgcccaggctagagtgcaatggcacaatcttggctcactgcaacctcagcctcccagggtcaagtaattctcctagctcagcctcccaagtagctgagattacaggcatgcaccaccacactcggctaattttttgcatttagtagagacggggtttcaccatgtaggtca

SEQ ID NO: 698455 - DNA, 1656 bp, Homo sapiens
gttgcaaagctccaaagggagttcatatccaaggatacttgggtctgtttcttccaggcagctgtcctcattgtggctcaagtaaactctttgaattacgttttgtgcttcagccccttccacttagattaacaacatggatttgtgtcaccatatacagcaattaaaatgtttacacttttcccctcgagggcactgatgtgttttcctgagcacttggaatagctacgtagtgtttcctgtctagattatggtttctgaaccttggtgctacttacctttaggacyagaggattctttgttgtgggaggctgccctagcaatgctaggtgtttcatttgacctctaaatttcacacctccaccagtcttgacatgcccacaataaccctagacattgacaaatgtctcctggggaaaactctctaccagttgacaggcaaagttctggaaatattggaattgtcaattgagattttatgttatccaaaacaaatatttttctttgtttttaaacatctacttccatctacttatctacttatttttacttttatttgtaacttaattccatcaaggagagagagtgcattttctgttatgctaaatttttgaagaatgtattgattttttatgacctgatatatggatgatatgtagatattacatgtttgtattatcaaatttcagggcgttaataaaataaatacttacaatatttatactgtcactgtatattagttattttctttcttcactacaggagtttttcaacctataggctatttttcaattctaggttatccagtagattttgaaatgttatgattaaatatctatttctcaagcattcatctttgcaaatgaaactatcccaagctcttataaagcacatcatataaagggcagattagtcaatatatggttcagaaataattatgtaatatttataaggaaattaaaaatttagatccttaactcagataacaataatccaaattaaaatttgatttcattacataatttaaaatgacaccagaatactagtaaaatgtagctaagtttatataatcttttttagctgtaggactttattagcataaattgaaatacaggatccaaagcaagattgagacctatagtcaaagattaaaatgtacacatcataggggcatgattaaactaatttaaagcataataacatggagaaatattgcgaaacatacattttactgaattaattgttaatatctaatcattatgtgagaacaaaattaaagagtagctacacaggcgcacacccacacacaactgcaatattgtcaaataaacgatgttcagctacactagaaatcacaactgtgtttttttccacagaagagcaaagattaaaaatcacaatattatttattgtacatatggaggtaaagatactcaaaatattacccaaaaatgcattttttttgagatggagttttgcttttattgcccaggctagagtgcaatggcacaatcttggctcactgcaacctcagcctcccagggtcaagtaattctcctagctcagcctcccaagtagctgagattacaggcatgcaccaccacactcggctaattttttgcatttagtagagacggggtttcaccatgtaggtca

SEQ ID NO: 698456 - DNA, 1656 bp, Homo sapiens
gttgcaaagctccaaagggagttcatatccaaggatacttgggtctgtttcttccaggcagctgtcctcattgtggctcaagtaaactctttgaattacgttttgtgcttcagccccttccacttagattaacaacatggatttgtgtcaccatatacagcaattaaaatgtttacacttttcccctcgagggcactgatgtgttttcctgagcacttggaatagctacgtagtgtttcctgtctagattatggtttctgaaccttggtgctacttacctttaggactrgaggattctttgttgtgggaggctgccctagcaatgctaggtgtttcatttgacctctaaatttcacacctccaccagtcttgacatgcccacaataaccctagacattgacaaatgtctcctggggaaaactctctaccagttgacaggcaaagttctggaaatattggaattgtcaattgagattttatgttatccaaaacaaatatttttctttgtttttaaacatctacttccatctacttatctacttatttttacttttatttgtaacttaattccatcaaggagagagagtgcattttctgttatgctaaatttttgaagaatgtattgattttttatgacctgatatatggatgatatgtagatattacatgtttgtattatcaaatttcagggcgttaataaaataaatacttacaatatttatactgtcactgtatattagttattttctttcttcactacaggagtttttcaacctataggctatttttcaattctaggttatccagtagattttgaaatgttatgattaaatatctatttctcaagcattcatctttgcaaatgaaactatcccaagctcttataaagcacatcatataaagggcagattagtcaatatatggttcagaaataattatgtaatatttataaggaaattaaaaatttagatccttaactcagataacaataatccaaattaaaatttgatttcattacataatttaaaatgacaccagaatactagtaaaatgtagctaagtttatataatcttttttagctgtaggactttattagcataaattgaaatacaggatccaaagcaagattgagacctatagtcaaagattaaaatgtacacatcataggggcatgattaaactaatttaaagcataataacatggagaaatattgcgaaacatacattttactgaattaattgttaatatctaatcattatgtgagaacaaaattaaagagtagctacacaggcgcacacccacacacaactgcaatattgtcaaataaacgatgttcagctacactagaaatcacaactgtgtttttttccacagaagagcaaagattaaaaatcacaatattatttattgtacatatggaggtaaagatactcaaaatattacccaaaaatgcattttttttgagatggagttttgcttttattgcccaggctagagtgcaatggcacaatcttggctcactgcaacctcagcctcccagggtcaagtaattctcctagctcagcctcccaagtagctgagattacaggcatgcaccaccacactcggctaattttttgcatttagtagagacggggtttcaccatgtaggtca

SEQ ID NO: 698457 - DNA, 1656 bp, Homo sapiens
gttgcaaagctccaaagggagttcatatccaaggatacttgggtctgtttcttccaggcagctgtcctcattgtggctcaagtaaactctttgaattacgttttgtgcttcagccccttccacttagattaacaacatggatttgtgtcaccatatacagcaattaaaatgtttacacttttcccctcgagggcactgatgtgttttcctgagcacttggaatagctacgtagtgtttcctgtctagattatggtttctgaaccttggtgctacttacctttaggactagaggattctttgttgtgggaggctgccctagcaatgctaggtgtttcatttgacctctaaatttcacacctccaccagtcttgacatscccacaataaccctagacattgacaaatgtctcctggggaaaactctctaccagttgacaggcaaagttctggaaatattggaattgtcaattgagattttatgttatccaaaacaaatatttttctttgtttttaaacatctacttccatctacttatctacttatttttacttttatttgtaacttaattccatcaaggagagagagtgcattttctgttatgctaaatttttgaagaatgtattgattttttatgacctgatatatggatgatatgtagatattacatgtttgtattatcaaatttcagggcgttaataaaataaatacttacaatatttatactgtcactgtatattagttattttctttcttcactacaggagtttttcaacctataggctatttttcaattctaggttatccagtagattttgaaatgttatgattaaatatctatttctcaagcattcatctttgcaaatgaaactatcccaagctcttataaagcacatcatataaagggcagattagtcaatatatggttcagaaataattatgtaatatttataaggaaattaaaaatttagatccttaactcagataacaataatccaaattaaaatttgatttcattacataatttaaaatgacaccagaatactagtaaaatgtagctaagtttatataatcttttttagctgtaggactttattagcataaattgaaatacaggatccaaagcaagattgagacctatagtcaaagattaaaatgtacacatcataggggcatgattaaactaatttaaagcataataacatggagaaatattgcgaaacatacattttactgaattaattgttaatatctaatcattatgtgagaacaaaattaaagagtagctacacaggcgcacacccacacacaactgcaatattgtcaaataaacgatgttcagctacactagaaatcacaactgtgtttttttccacagaagagcaaagattaaaaatcacaatattatttattgtacatatggaggtaaagatactcaaaatattacccaaaaatgcattttttttgagatggagttttgcttttattgcccaggctagagtgcaatggcacaatcttggctcactgcaacctcagcctcccagggtcaagtaattctcctagctcagcctcccaagtagctgagattacaggcatgcaccaccacactcggctaattttttgcatttagtagagacggggtttcaccatgtaggtca

SEQ ID NO: 698458 - DNA, 621 bp, Homo sapiens
gctgctaaattcactttatcctagtaacttcctattgtrtacattcatttttaatgtaataagaaatccttccaaaatttttaaaagaatcacattacccaagaagaggctcaacatttctagaaaataaacatgttcttaagacacttaacaattcttgaaatgaagacctaactcttcagggttttaaaatatttgatgtgcactctttacatatatagtttaaatttaataattacccttctcaaaaaataagtgaaacataccacaaacatatcaaagcaagttattcatacttctcatttaagtaactgtattgtcatagcaaaattattttgtatcatcaaaaagcacaaaagccttattagaatactaatttcaacatctgtttcacagatttgctcataatagatgtttttcatgcttctgcactaattcattgaaggacaatgttttaccgattcttgaaaaactatcattatctgccccacagtggtggctcatgcctgtaatcctaacactttgggtggccaaggctgccgttttgcttgagcgcaggagttcaagaccagcctgggcaacatggtgaaaactcatctctaccaaaaaaaaaaaaaaaaa

SEQ ID NO: 698459 - DNA, 1479 bp, Homo sapiens
gttatgtgcttaataacatctttcatttattgtggcaacctgtcaactttaattcaataattatgaaatgccttgaaataaatgagagttagaggcatcctaaacttaccctgatttgaaaggaccaagaaaagtagctgaccttcaatagaaagccaataaaagttaactgaacacattaaactaatcatcaaactaaaatgctaaagtcatgaaacataagaaaagattgaaataagaaatattaagggtttgatcatacagaaataaagttatttagctatttttaagttattttcatctccttgttactatatgaaatttctcccaaactgttatcaatacagtgcagaagacagttcttcactaactttcccttatttggattcatagagcatatgtaatagacctataattaggaatagcctttaagagttattttgatttagcaaattgtaaatgaacattccttctttcccattgattggtattgcttcctagatcaagaattttttgccaaagcaccctatatctgggatgaaaaattggttaataaaatttagaaagtttttcttagtaaaatttagaaagagctccaaaacagaaagaatgaaataatatataaacttttctgtgagaaaaactatgaatggaaagtaacaagtagatgcagtgatatacattttgtatagttttaaaaaccctgcctataacatacatttacatttaaaaaaccccacaaacataaattgtgtcattgtggattatctgcaaagtaggtaatatactcatggattattcaaggctgacagtaaatagcttaacccaaccaggatacttgatcctaccagaaggtagtaaatcactggcttcttagaggcttagtattattttcaagccactgtcacaccatttagtagatggaaaggagtcatttcttttttttttttgagacagagtctcgctctgtcaccaagctggagtgcagtggtgcgatcttggctcactgcaatctctgcctcccgggttcaagtgattcttctgccttagcctcccgagtagctagggctataggcgtgtgccatcatatccagctaatttttgtatttttagtagagacaaggtttcaccatgttggccaggatggtctcgatctcttgacctcatgatctgcccacctcggcctcccaaagtgctgggattacaggcgtgagccactgtgcccggctaggagttacttctttttcctaagtttttggcagtttttgttgaagtttgagctgtccaaattagttcataggcctgatatgttatttttccatttttaccaaaaagacaaaatatattttattattttaagataaagtgattattttaagccctgattcattatatgtgagtgggagaggtgaactcatatataaaaacmaacagaatttccattaaaaataaaagagatcaaatcattacataaagaaa

SEQ ID NO: 698460 - DNA, 633 bp, Homo sapiens
catttttacaactcatcgtaaatgtaaagagggaagaatgtacacagaaagtgcctttaagctctcagaggatgagttccatccgctgaaaagcaccaggggccttgcggatactatttttttttttttttttataaaaaggcaggcctggggcaggcttgcacagcactctacacacggcaaaacagccctgtgctgcacactgagaggaacacgtaagccgcggtggttagatrcgctttactttcagagccctgggctttcagcctgggctggccacccattagctggatgggacgttcggaagtaactctcgagccttctctgtaacaggggaacgaccaaggagctacctctcgcgttgtgaggacaaagcgctcgctacatgcccggcacacgaccacaattccactgaaagcattttaatacggaacttgtcactcccagggagcctccgctcagccggcagttggttcatttcaatccccacgacaacccttcaaagtgcagggcagacagcaggtggctctgcccaggcgcctggatcacagcccggcctgcagccctcacctgggcgcggggagaccctgaggacgctcctccaggcggcgctggccggggcctgcggacacg

SEQ ID NO: 698461 - DNA, 670 bp, Homo sapiens
ataggtcttatctgtaattatatctaaatgttctcttttttctctccctctctctttctccttcaggaaagccatttaaaacacatttgggaaatgtttgaaaaaattaattctattacccttatttccagaattttcttaaatattttatggctatattttttccttctcaaggcaaagccgtayatcaccacatacattatcatatttgtttacaaaatatgagagtcaaggaattaattttacaccagttaaataacagaagaaaaagttatactgtattttcttctttattatactaattttttcacatccttaaatggttttatattttgtggctatctgaaattatatttaagggcgagtattatactaccatttgtttcacatccaacttggagcattgcatatttgtgtagacatataaggttagtcaggggtgagagataggaggattaaactcatctagtttgcgtgccctttctcagtcacaatgcagtctttacaaacaattttttcctttaacagaaaaactgaaaaggtgtctaaaaaaataatttgccttaagacaacctttctaggaaatggtgaagatctgtttcaaacccaggcctgcctcatgccaaagcctatgaccttttcactattaatgaccaaatggttgaatgac

SEQ ID NO: 698462 - DNA, 623 bp, Homo sapiens
atcacatacctcatgtattactcagaactatttattcaaagctataggtactaatatactaatgtgttttatccagtcttctcaggtcacgaattataattattacacctaacacatatggtacatctaactaataattattataactaaaaacaccaataatggttataactaacacatagtagctgggcagggtggctcacgcctgtaatcccagaaccttgggaggccaaggcaggagggtcacttgagctcaggagttcaaaactagcctgggcaatatggcaaaaccccgtctctactaaaaatacaaaaaattagctgggtgtagtggcacgygcctgtagtcccagctattcaggtggggctgaggcggaggatcacttgagcctgggaggtcggggctgcagtgagctatgatcacacacctgcactccagcctgggtgacagaatgagaccctgtctcaaagaaaaaaaaaatgattataactaatatatagtgaagattgacggggcactatctcatttaatccacataacctataaggtagttactgttactaccctcattttacagattatgaaaataaagctttgagaagttacacaatgctacacagct

SEQ ID NO: 698463 - DNA, 664 bp, Homo sapiens
attatttttaaagagtaaaatgggccccaagaacagacaatagtttataaattttcattggaaagttaatggtaaaaacagacaatagcttacgacaaagcctgcctaggtgtgatgacattcctcagtctttcttcctgtgatatgagtttaaccttccctggttaataaaattgcaggaaagacatcaaaagcaattgtcttcttctatggaagacctggtctctaggtagatgagagaactttagagaacaacctcatccacccttttgctgaaccccaagtgtctttacaatcagcgaaccaaggtgccatatttgggggtgatattcactaggctccttcagtagacagctcggggggcaagaatgagtggacactgagccaatgagataagattttattcaacatttcatgggcaaagctgacctcaaagtatgaacaaaaataagccgacaagacataagtgaaaatattgattggatcagaagataggaggaacaagataacaaggggctaggatggtaattagttgtggtgagagaaggaattgtgggcgaggtagggtagcattttgataaaagccygagatcctggcaactagccccacagctcatataagcaagcccagggaggctgccctaatctacctaatctatggaga

SEQ ID NO: 698464 - DNA, 574 bp, Homo sapiens
cactctagctgtattatctcattttatcctcctgatacctctattggaaaggtactattactaactttaatttacagacaagaatgctgacattcagagaagttaagtaactggtgcactgtcacacagctgctaagtagtggagctaagatttgctctgcaagactctagaaccccaaacccggaagcctttgctaacytacctgtgccttaacttcacattcctggttttggcttatagaatattttcactttacagccaggcacagtggctcacacctgtaacaccagcactttgggaggtgtaggcaagtggattgcttgaatccaggaggtcaagaccatcctgggcaacatggcaagatcccatctctacaaaaaattagctaggagtgatgcacgcacccgtagtcccacctacccaggaggctgtggtgggagggtcaactgagcctgggaggtcaaggctgcagtgagccatgattgcatcactgcactccagcctgagctacagactgatactttgtctcaaaaaataaaataaaataaaataaaatataaaatattttcactc

SEQ ID NO: 698465 - DNA, 729 bp, Homo sapiens
ctttatcagcagcatgaaaacggactactacaggtagtgacattatctggttaayttttaaaaagtatcatttctggctgttccatggaccaaatcaagcaggggaaaagtggactgagagactccagtcagggtcaccaaggaacacatagctggacaatataaccccttaacacaactgagcttacaacacctaggattcagagtttgagctgctttgcccagagcaatatctgtctagaagtgatcatccttctactgcaggagcaggagattgacaagccagtacttagaaaggccagaatgactaggttctgaattcaggaagagggagtggatagggggccatgaaaaggagagggcagccattatcatttccattaattaaaagaagaaaaggaaattaaatgaagtaggcatctgattcaagaagttaggaaaggaaatgaaagcacattgtgagactctatgctagctcactggaaaatcttgatgaaatggatgcttttctgggaaataattactaaaattccttcaagaaataatataatcttaaataaagtagcagagggattaagaacaggctctgccatcagatggatatgggttttaatccattctccatgtcttactaactgtgggaatttgggcaacagtcaatatcttcacttctaaaacagggatagactggatacagtggctcacatttgtaatcccagaattttggga

SEQ ID NO: 698466 - DNA, 669 bp, Homo sapiens
tgctgctgaataacaactccttcaaaggactcagtggcttaaaacaacaaccattcattattttcacaagtctacaggttggctgcatggttggatggggccaaagttggctgatcttggctggactcacacataaatctgtggtcggctggacctagatgattttttccccctttgagatggagtctcgctctgtcgcscatgctggagtgcggtggcgcaatcttggctcactgcaacttccacctcccaggttcaagtgattctcctgcctcagcctcctgagtagctgggactacaggtgcctgccaccacacctggctaatttttgtatttttagtggagacggggtttcaccatgttggccaagctggtcttgaactcctgacctcaggtgatccacccgcctcggcctcccaaagtgctgggattacaggcgtgagccatcgggcctggcccctagatgatcttttaaccccagcctcacaatagacaccaacacctccttctgggtccccagggaagtcctctgaggctctgcagatcagagcctgtttattttcctcaggaccactgcatgttccgtcaaagtttaaagatatgattgctctctacagtgattttttgtttcaagcattattgcctgaagtagttgtttgactagagatg

SEQ ID NO: 698467 - DNA, 669 bp, Homo sapiens
tgctgctgaataacaactccttcaaaggactcagtggcttaaaacaacaaccattcattattttcacaagtctacaggttggctgcatggttggatggggccaaagttggctgatcttggctggactcacacataaatctgtggtcggctggacctagatgattttttccccctttgagatggagtctcgctctgtcgcccatgctggagtgcggtggcgcaatcttggctcactgcaacttccacctcccaggttcaagtgattctcctgcctcagcctcctgagtagctgggactacaggtgcctgccaccacacctggctaatttttgtatttttagtggagacggggtttcaccatgttggccaagctggtcttgaactcctgacctcaggtgatccacccgcctcggcctcccaaagtgctgggattacaggcgtgagccatcgggcctggcccctagatgatcttttaaycccagcctcacaatagacaccaacacctccttctgggtccccagggaagtcctctgaggctctgcagatcagagcctgtttattttcctcaggaccactgcatgttccgtcaaagtttaaagatatgattgctctctacagtgattttttgtttcaagcattattgcctgaagtagttgtttgactagagatg

SEQ ID NO: 698468 - DNA, 2029 bp, Homo sapiens
gcattgctaactggcaatgttgcaacaggttgtcttcagagctgcactgtaaattcctctgacacacgatggtgttccagaaatcctccctgaacgttgctccccattaaccatctcttaggtggatctcggcctgtgctctgtgaaattcagggctgacatggtggtcaggatttggccaagtcctgaggccccaggatctttgctacatgtggagaggaggcacacacctttgggctctatgctgacctccctccaagaagactgtcaccccttgccacagaatgcacactcttcttccggtcccgtccagttggcctgcattctgacgctgcagctctcacctgcccagggcacattccacccctgcccgtttctcccagtcactcctgggacagtcagcttgccttccgttgctctgtagaaatgctgtctgccaactcagtctccaccacctccagatcttcacctcatctccctccacatttttgggagccacatgcccccttttcacctagccgatcacccagccgtaggttttctgtcatgacactcccttggcctgtgtgtccattagcatggctttgtcacctggtgcagccacgtcctcgtcctctcctcatgcctcatcctcgcgcctctccttgccatggtgcctcgtgtggtgcagccctcattttagggagagatgaaacaagggctagacctttgtggactgaatacctccttgagcatctagttccaaaacacacgaggagggttttggtttattttgttagtgttatttattatttttttttggggggggtgtatatttcttaagagatgggtgtctcactatgttacccagacaggagtgcagtagctcttcagaagcgtgggcatagcacactgcagcctccaactcctaggctcaggtgatcccgccatagcctcctgaggagcttttttgtattgtattatcatttttcttgctttcttactaattttgtcaactatgaggaaaggaattttttctttcctaatagagattttattgatactttggaagatcaatacaaagctgtttcaatgtgtatcctgttgttaatgtccttacagaaaatctaaagagctgtgtcattggattcttttccaggtactccagcgaccttctagctgaaaacttggaggcaaattttccttaaaaggccaggaattaggattttttgaagtctcagcacctttgggtggtggtttccatctttaggagcacgagtctgtctccgggcgaaacttcagtgtagatgcatgttctcaggatatttcacaacttgctgccttgctggatgggtcacatttccttccccaagcgccggtaccttcagatgttgacgagctgtcacatcagaagtcacagtcactcaccgttatcagcaacactgcatactcaagttttcagcctttcatagcacattaacagagagattaggaaaaccgactgccacgaccagaagactttcagggtgcatgcctctctgatagggagagccaggatcaaggagtccttttccttccgaaacagttctactaaaaaacaacccatgggctcacacctataataccaacactttgggagaccaaagcaggaggtcaaggtagtaggattgcttgaggcctggagattgagaccagcctgagcaacatgctgagacctcgtctctacaaaaaataaaaataaataggccgggcgcggtggctcacgcctgtaatcccagcactttgggaggccgaggcgggcagatcacgaggtcaggagatcgagaccatcccggctaaaaaaaaaaacggtgaaaccccgtctctactaaaaatacaaaaaattagccgggcgtagtggcgggcgcctgtagtcccagctacttgggaggctgaggcaggagaatggcgtgaacccgggaggcggagcttgcagtgagccgagatcccgccactgcactccagcctgggcgacagagcgagactccgtctcaaaaaawaaataaataaa

SEQ ID NO: 698469 - DNA, 686 bp, Homo sapiens
ggagagtttgggggaagaaatgaagtacccgacacagccttggccctttctacaaagtgaggggcataccttatctgtaacaaaagcctgttttttttgttgttgttgtttgtttgttttaatgtcacttgctaatttattcacacaaagaaaatgctccataatgaaaacaacttcatcccatgtctccctcccacccacacacactcaaacccctcctgtccccaactgcaagatgcgttcctacgtcttggctatctgaaggtacttttagaaccaaatcctcataaaaaccatttagaatagttgcctgataacttggttttattgttaaagaaagcctgtttgtggcagttagagtccaaaggcctttggaatggaatggagtggcatgtttaaggagagtgctcagaaggctttgctgaatggtagtcatgacagcattgatggggaggtgaagtgggctgattaaataactcgagtagttccgacgtccagaccatgttttggtaaggtagccagcgtcatggacagggcaggtagcaacagttctctgcaccacggagggtagttgtaccatttactctgctggttgtgggtgtgcttgcctttaatagtacggaaagcaaggycattggtctgcagttatagtaaatgacaaagaagaggaaggaatcagatctttc

SEQ ID NO: 698470 - DNA, 1617 bp, Homo sapiens
aatgcatagtttagccacagccattatagcaattttcatattattcaaaaagaaaagattctaaagagtacaaataaagcacaaagcagatgttcaaaacaagtctgcatcaaaaattcaaaaacatttgccacaggaatggcgcactttcatcattaatatacacctactatgtacccacaaacattaaaaattaaaacaaattaaaaataaaaaagaaacggatcataaatattacagctgccagtttcctggtgagaaatctttgtgaagaaattgcagttaaagtggcgctctggaaaataagataaaatgacaattaagagattatcttttctttctgctgtgacgtgacatatgtgagtaagactgttggcatacccacagatacagtgatgcaagttaacatttgcaaaatgtcccaaatctgaagaacatctcaagaaaatcactggagaataaagaaaacattttattgatcatctctacagtacagagtttctcaatcttggcattcttgctatttgggcgagatcacttgtttttgtggtgggtgttgctgtcctctaaactgtgggatgtttagcagcatccttggccagtagcaaatcacccctcccaaatgtgaccacaaaagtctccagacattggcaaatgtgtcctggggggaggtacaaaatttccccagtgaaaaacactgatagcatatttttyttttttgagacagagtttcactcttgttgtccaggctggagtgcaatggcatgacctcagctcactgcaacctctgcctcccaggttcaagcaattctcctgcctcagcctcccaagtagctgggattataggcatgcaccaccatgcctggctaattttttatatttttagtagagacggggtttcaccatgttggccaggctggttttgaactcctgacctcaggtgatccacctgccttggccttccaagatagcatacattcacataaacttatttgatcaattgatgtggtaaataggataaaattgtccacaatgttatattcatacagaactcattctgtgaattttgcctaagtgttgtatgtacacatttttcatatttaagcacaatagattgacaaatctggagtgactatttcttaggtataaacatttttaaactctactagaatgcttctgctgattatattaaaatttgaaggattctcacccagaagttgtgatttggggtttaacccaaaatgttatcactgctttacatgatgtaacttatattatattttggataaaggaaaacaatctgtttctgctgtttgaatagaagctccaagtaatattgctaagcatagtataccctgaattctgaaggttttgatattagttatcagaaataccttagatgaatgtgaatggtttgtaacaattattcaggaatgagctggaaaaacttctccctggacagaactggcaataatgtggaatattacagaaatacttaattataaaaaccatacaagtcatacttttgtccttaaaacttatcttagtcaaacacgctagtaaaatgaacaaagagaaagtatgaggggacttcaaaaagttcatagaaaatatgca

SEQ ID NO: 698471 - DNA, 1012 bp, Homo sapiens
atttcttttacatcatattttccaagtagaatatagtcactaaataggaaaaaactctacggtcaaagctactgaataaacatgagaccaaaaaagtacctctaatgttatgctattcttgactttcatgagaaacatagactaaaaattactccatcccccattcctgtgtgctggaatgttcctattagagaaacagatcttgcatgctgtcctgacctttaatctgctccacttggcagcaacaagatgtaacacctttctactgttcaaaaagaaataagctgggaaaattgaattgtctcttgtttttgtttcctcaaaaacctagcaatcaatacaaactttattgaaggtcatctacgagctggtttctacctaatgaacagtataaatgggctgtatacatgaagaaatttaggttcagatttcttcaggaccatttataatatttatgtcacaaaaacctccaaagcttacatttaaaaaaaaactgtctattctcatccatactactgtttttatttttagttattacctcaaacatatactctttagttctccaactagacactacacttgaaacctatgcccaatataatattccatttattattcccaaccctaacacataatagatgcttaataataataacagtaataacaaataattactttccaatgaatccttaccataaggcaggttcagtgcagtgctctttacacttttattatcttattgatttataacaaccttgtatattaaatattaatatctttatgtgacaaatgacaaaacaaagtcaaagagaattgggtatgagggtccacaatacctagggacctgtattaaatccaggttaatctgattcaaagccattatatgaccatttcytaaattccgatgcatatatatcctttttaagaaggagtatttacaattatgtctaaccctacctatatgcaaaaacaaaacagaaacaaaaaagaaagttgaggcgatccttatgaa

SEQ ID NO: 698472 - DNA, 644 bp, Homo sapiens
gtgctcaayctaatggtgagttcattgtccttatcttatttgacccagcaacagcttgttgacacagtttaccattcctatctctgggacacccccaaactcttggtttaccttctacttcactagttgctccccaccaatctccttaaactactttgctggctcctcctcacctccccattctctaaacactggagttgcagagtcagtccttagacttttccgtctatacttatttccttggtgttgtcatccagtttcatagatttaaatagcatctatttgctggacaactcccaaatttatatctccaatccagacttgatcagcctatataaaaacaatgcagcttacctgcatccacagcactgggcaattccacttattgggttatgttttgtttgttcctttagcatgtagctatatctaatgtacgatgtcattgtttaaaagccataatcttgctctgtcatccaggatggagttcagtggtgcaactacagctcactggaacctcgaactcctgggcttaagtaatcctcctgcctcagcctccagagtagctgggactacaggtgtgtaccatcacacccggctatatcatttttaaacatgtttattttctgtcttcccctattagaaca

SEQ ID NO: 698473 - DNA, 601 bp, Homo sapiens
agtgttcaataatagttaaatattgaatcactatggcttgtattagtcttttagggctgctataacaaaacactgttttgtttttttaaaaaatacaccagactgggtgtcttatacatcagaaatttattttctcacagttctggagaccagaaattcaagatcaaagagtctgcaggtttggtctctcttgaggcctctcttcttaaatttacagatggccaccttctctctgcatcttcacatggccttccctctgtgtgtgtctgtgtcctaatcttgttgttttatcaagacaccagtccttttggaatagggccccacccttaaggcttcatttaaccttaatcacctctttaaaatccctatatttaattatactcacatttggcattaaggtttcaacatatgaatttggggagaggtataattcagtccataacaggctgaagcccagttcctagagaatcaggataccaaaatcagagttgctgccaaagaccagagatgccagggaagagagaaattcatgtgccatgtactccattggttttcaaactcgtgtgtgtgtgtgtgtgtgtgtgtgtgtgtgtgtgtrtgt

SEQ ID NO: 698474 - DNA, 973 bp, Homo sapiens
tcatttgtggaatcttaaaaagatgatattacagaagtggaaaagtaattaccagaggctggggactgtagtgggaaggaggatagggatggattatgcaataggtacaaaattacagttagataggagaaataatttctgctgttctatagcacagtagggttgacaatactgttataactagaacaaataactagaagagaggattctgaaagttcttaccacaaagagatgataartgatgtgatggatatactaaataaccttatttggtcattatacaatgtatacatgtatggcaacaacacattttacctcaaaaatatgtacaataattgtgtcaattaaaaagcaaataaacttacaaaaataaaataaaaagggacgtgcaatctcaaaacttacaaagataagtatataaactcaaattaagttttagtgaatcctaaatatttacaaagttttcaaatgattcagccttttaaaaatctggaagagtttttcttctttcctagtaagaatctaaaagaaggaaagtcacatttatattttatcttattctttgaatcactatttaccacctacaagagaaaaaagcaacataataaactaggactatgaaccatgaaaaaagaattcagatgtttgaaaattgttcttccagaacaatggtaaaactaaaagcaatttttgatttcacgaacatttgcaactttagttacactaattactagttgacaggattttaaggaatgcatttaacttaataataccctcaaacagaaaaacattttgcaaacggtaatttcagtctattagctatttacggcaagtcttatccagcttggcaaatatttgagtgcctactaatggttcaaaagtggtactgcaccataaagcctcatctggtctaaagctggggaaattgaagggtcctgtgtacttgatttagagtctacaataaccaaccaac

SEQ ID NO: 698475 - DNA, 1611 bp, Homo sapiens
cacatgagtagtagctgcattaaagcagtgggaaaatccctgacccactttcccacctttcccttacttctacatcacacagccggaaacaaagttcggggagaagagagcatgaggaatgtacttcaaaagcatgtccacatcacacttgcacagcttctctccacatctgtgcttcttctgctctattttttgatacgataaggaatgtaccatcagcagaaaatggtgggtggttttaaatctatcatcaccttttcacataggagagaaccaaggtgcaaatggcattatacacattgtccctaagtttgggaaactggtgagcaataaagttggattaagtaaatgaatgattgggttgtgtcaacaccaagcccatgattctactgttcctcaaggaatgcttcagaccctatgttcactcaaaagtggcatgtgtattgaagtttagcttttctccttttcttcagcaaccaactagaccctcccaatcagccctgccccaggtcaggacataggacatgcaggggcatttagagggtattagaaaaaagaataatgatattggaagtatggggaggctgatgaagggaaaatgagtataacatgtttctagtacattcttctttctcttttaccatatgctctttcctgccacatagttcagaagggtaggatttgcacggaaactgtcaaaagttgcttctgatttgagcctaagtgttaaggtctattttgccatttctagcataaaccaaacagaggttttaaaatggcatgcttgggaaaccgtgggcttctatggttgtattgaaggatcaatacaagagactcaaatgcaatgcaaataatttcacagcattaaagaaggacaatggcacaatggatgaaaattggtaaatatcagaaacctgtactcaagttagagaatattttattaattcaagcaagagatactaagaacttggaatcagccaacggtaatgtcaatgaaaaggaaatagcaagtatgacaggaactttgtgggcagaaccaactagaattagtatttcataagttgtggaagattaaggaaaatgaggagttggaaatggcttcaagatttccagccaggagactagaaggatgtttatggcattaactaagagaggagcttggtgaaaaggaaaagatgtgaagaaataatattgtaggtggagaaaatgttgggttggatttataatatgtttcaartataaataaaagcatgaacaaacgaacaatatgctccaagtttgtcaagaaacttaaagattgtcattttaatctttttcttgctgaaatttatagtcttaccaaaacccagttcttattgggagattaatgactaaatatatattaaactttctttctctaaaactctgttcctctctgtgggagataacaaccagcaaattatgaccatgaatcaagaaacctgtaatcaaatagttcataactatgaacagttcataaacaaatcacggcttctttgaagcagactgtagattcacacttctctaatagcctctaattttgagcaaataagttagtatgtataattttccacattattcaataaacttgta

SEQ ID NO: 698476 - DNA, 1164 bp, Homo sapiens
aaaaatgaggaagagagtataaaaatgatcaatatggagaagaagagctattttaatttctcaatttttaacaaaatatctgaagaagacattctaacaagtcatagtttggcattaaagtttttaaataatgtcaatacacagaataacatattccaagtcatattagataatagtaattaatattaaaaggaaactattgaaaatgtttattcaacaataaaatgaattttataggaaaatggaataatgacaaattaatgtggcaagccataaaaacatagcttatttttaaatataataaaatgtaaagtcattctgtgctttaccaaagatatttatggcaagcattatgtattagctattgcccaaaactactttcttcttttttcttgataaaaacctaattttctcaggcaatggctgataagtagcctgagccgatgttgacaattctgttcctctttgccagacacttgttttcacagtcttcttgatagctaggctgggcatgtgactcaaatctggccagtgagacataaggacatgttggcttaggcaatttggggaaggatattataacaacaccttttgactcacaactggctctgccccacctctgtaccttgaacacagacataatggctaccggcatgacagctatcttgtgaccatgatgggacaagcaaaagcacactaaggatgatggaatggaaaaaagaaaggcctgaatccttgttgaatagttgaaacaatgttagcaccacctacacccagtcaaatctgttggtgtaagccactattaatctagcttgctgttaacagttcatacagcctcatccagcaccatcattgattgaaagacaatatataaaaaaatacatgggcccataacaataatttttaacagatgaaaaacaaaagaataaaatcacatctcatctgctacctttggtggtgactactgtatcaactcattactctataaagyggtaatgacagtgaaatttctaagtatttatatatcattttcaaaagaaactgcagttcagggtaaccaaatatgcacagttgatgagttaaagttctttacaaaataatcgcagctagtaaacacaaggaataacaaaaatagaaaatcacactttcataatccctaagtaa

SEQ ID NO: 698477 - DNA, 957 bp, Homo sapiens
ctcatgcctgtaatcccagcactttgggaggccgaggcgggtggatgatctgaggttgagaccagcctggccaacatggcgaaaccccgtctctactgaaaatccaaaaatttagccgggcttggcggcaggcgcctgtaatccctgctacttgggaagctgaggcaggagaatcgcttgaacctgagaggcggaggctgtagtgagctgagatctgccactgcactccagcctgggcgacaaaagccaaactccagatcaaaaaaatcaatcaatcaatcaataaaattaaaaaaataaagcagtcacacacacacacacaaatgtaaaatgtactttgaaagaaatctggtaatgaatgtgggaatgaagaggatattgtagccctgtttttaaaatatatgaaatgaaacttcacaatattaatgtttggtactagaaaacaagtcaggtttatggtataacccaaaattataagactgtctagcacataagtgtgatagagtttcatagcagtggaaaaagtagacactgtttaacaaacttttgttagsaactactttgctgcttaatataaggacgtattcctaatacccttcttgtaggtattttaaacaaaacatatgagtgaacctaacattaaaatagagttttcgtatcataatttaatagccagaaggcaaaaagtaaaaaaacaacaaaaaagactgatgatagatactattataaatattgctagtaggattgtaaataaccttctgtaaagaaaatgtaacactctctgtcataacttaaatgtgcatatactttgacccagaagttccgcttcagggaatttttctcattcatatcctaatgtgaatgaaaaggttgtgaacaaggttttacactgaaataacataactgaacataagtaatgaaattatttattataaagttgtataatgagattaaata

SEQ ID NO: 698478 - DNA, 646 bp, Homo sapiens
ttcattccttggtgactttagctgtcactcattataatgtgatgatttgtcacagttagctgttcctagcagacatacattgctatgaatagttttatttattcatctggaaaaattgtaagtgtcatgagatccaaagaataaccacttctttagaatccaaaccctctaacatcaaagatacttgcacccttttctccaaatcttttccacatttttagaaaatayttccaataacttggtcttccagttccttgtcctcctgttctccaatggccttgacttctggtctatctcagccactcattcctatctttataccataacatttaatgcctattttttttagaactctgaagtgtctattattatttataaatcttttatatagatatagacacagaaaaaaacacaaatctatagatacagacataaatagaatttgaggaaacttcttgaggacctcctctctcattggccaccaacaaaattaggcatttctaacagagattggcaatgtttatatagccttttgtagataacaaggtgattcttcagacattcccatacaattgatacaaaatgatttctcctctgctgatttttatttccatatgcaatggcattcattttaagaaatgttttt

SEQ ID NO: 698479 - DNA, 2847 bp, Homo sapiens
agaagttttcaaaattacctcttaagttttcctactagtttatggccccagaggcttctactccaggtaagcagttctctgcaactctgaatttgcttgtatttctagattttaaggtgacagtttgccctgtaatatcagttctctgacgggtccaagacaagccatcaattttaagtttctttaactatttcttattgtaaggatgggaattggaaatgctaagctctttaaagatttgggctaaaactggaggtaatgctcatattctgtttttatcaaattcactgttaaatatatatcatctatccttcacactcagacaaaatcaaaacaatattcagtgatcagtcactcatttttagatatttgggttaactgacgaaggctttcatttccttctcctatataatccttgtacaatggaacaaggagataagcagtgaaaggccaagggaatgtctggagttaggacttcaggtgattcacaacttggctgccactcacccgagactgcccaagcccagatttcttccttctataagaatattgattcttgcaaataagatgaacctaaatgtggtccaggagtcagcatcttctacatggtactcagatcttcaaaaagaaaaaaaggaaaaaaatacaaccccattaaataagacagttatagctgctgctttttctttttcatcatccttgtctctgttttccttttcttacccctcttcttcatgtaaggctttccttataacccaatataattagacagaaacataatagtaacatattaccaagagtgcaattatttctactttaaagtataaaactggtcaaacaaaattgataatattaatctcaagttagttattttaatacagacagatgaaaaaaggactcatcacttcagtaagtttcacataccacctcttctaaccagaaaggagtattctctcaagtaaaatagttcctcattctttcaaaaatttaaagtgctttatctataatgctttggtatcctaatttccctttatctggattacataggccattgacattcaagcatagtaaaagaaaatgctaaaattttatcttgaatgttaaagcacaaggacttctgtgaatgatgagagatttctcgagtgtcactggtcaacactcattccaacatattgacagaacgaaaatactaacacctaactccctagtaaaatatatactttcagtacagaaaataaaataaccctgtcttctacttgttgagaaaaagtaggtaaaatattaaagtggaaaaatatggcattagagagagaagtacctgaatttgaatcctgaacttgctatgcagcttcaatgagttatacaacctctctaatccttggtttccttaaccttaaaatggatacactaatatttaactggaagaattgttgaaatgtttaatttggctcatcaaaataactaatgcagaatgatagatattcaataagtgataactataattattgttaatgtgtaaaagttttcttgcaaagatatatttcattaaaaaccatcacaacttgcatttgaaatgaatagagaaagatctgctactctatttctactcatacctccagatagcatgatgcttcttcctgaaataaaaataggaggaagggctgggcgcggtggctcacgcctgtaatcccagcactttgggaggccgaggcgggcggatcacgaggtcagaagatggagaccatcctggctaacacggtgaaacctcatctctactaaaactacacaaaaattagccgggcttggtggcgggcacctgtagtcccagctactcgggaggctgggacaggaggatggcatgaagccaggaggcggagcttgcagtgagccaagatggcgccactgcactccagcctgggcgacagagcgagactctgtctcaaaaaaataaaatagaggaggaggaaggggaagaggaggaggagaaagaaaggaggaggcagagatggctccactcctgaatacgttttaggtagtgtggtatttaagcacttcatcttggccaaatttgataacaattaaagtttgtttccaggttccttgggactctattttagtgttcgtttccactccagattagacctttccaaatactctcagaaactttagatgtcctccaatcaaactctgctctcttgaaaagactgccagcagtcttttatacctctctatattgccattccagaaatactggtatttggggtcatgtttctaactagggaattgagagttacagatagcataaggagtagtataaggatattgcaacaaggattttgtaaaggatccctgagtaagggatctcaagccttagatggaagaaatatatcatgtttgcatgtgtgttmgtgtgttagtgtgtgtgtgtgtgtgtgtgtgtgtgtctcatccagcttgtggccctatgagccctgtacagaaaatggtagaggctgagaacatagacattcccacatttaataatgcaagagggtattcctttagttgaatacttcttttcagaaatccacacaaaatcagatataaagaaattcaacagaaaagaaaaatcaggctaggcacgatggctcactcctgtaatctaagcattttgggagactgaggcaggaggatggcttgagctcaggagttcaagaccagcctggccaacatggcaaaactctgtatctacaaaatatacaaaaattaggtgggcgtggttgtgcatgcctatagttaagctgcttggagactgagacagaaggatcacttgaacgcaggaagctgaggttacagtgagctgccatc

SEQ ID NO: 698480 - DNA, 2847 bp, Homo sapiens
agaagttttcaaaattacctcttaagttttcctactagtttatggccccagaggcttctactccaggtaagcagttctctgcaactctgaatttgcttgtatttctagattttaaggtgacagtttgccctgtaatatcagttctctgacgggtccaagacaagccatcaattttaagtttctttaactatttcttattgtaaggatgggaattggaaatgctaagctctttaaagatttgggctaaaactggaggtaatgctcatattctgtttttatcaaattcactgttaaatatatatcatctatccttcacactcagacaaaatcaaaacaatattcagtgatcagtcactcatttttagatatttgggttaactgacgaaggctttcatttccttctcctatataatccttgtacaatggaacaaggagataagcagtgaaaggccaagggaatgtctggagttaggacttcaggtgattcacaacttggctgccactcacccgagactgcccaagcccagatttcttccttctataagaatattgattcttgcaaataagatgaacctaaatgtggtccaggagtcagcatcttctacatggtactcagatcttcaaaaagaaaaaaaggaaaaaaatacaaccccattaaataagacagttatagctgctgctttttctttttcatcatccttgtctctgttttccttttcttacccctcttcttcatgtaaggctttccttataacccaatataattagacagaaacataatagtaacatattaccaagagtgcaattatttctactttaaagtataaaactggtcaaacaaaattgataatattaatctcaagttagttattttaatacagacagatgaaaaaaggactcatcacttcagtaagtttcacataccacctcttctaaccagaaaggagtattctctcaagtaaaatagttcctcattctttcaaaaatttaaagtgctttatctataatgctttggtatcctaatttccctttatctggattacataggccattgacattcaagcatagtaaaagaaaatgctaaaattttatcttgaatgttaaagcacaaggacttctgtgaatgatgagagatttctcgagtgtcactggtcaacactcattccaacatattgacagaacgaaaatactaacacctaactccctagtaaaatatatactttcagtacagaaaataaaataaccctgtcttctacttgttgagaaaaagtaggtaaaatattaaagtggaaaaatatggcattagagagagaagtacctgaatttgaatcctgaacttgctatgcagcttcaatgagttatacaacctctctaatccttggtttccttaaccttaaaatggatacactaatatttaactggaagaattgttgaaatgtttaatttggctcatcaaaataactaatgcagaatgatagatattcaataagtgataactataattattgttaatgtgtaaaagttttcttgcaaagatatatttcattaaaaaccatcacaacttgcatttgaaatgaatagagaaagatctgctactctatttctactcatacctccagatagcatgatgcttcttcctgaaataaaaataggaggaagggctgggcgcggtggctcacgcctgtaatcccagcactttgggaggccgaggcgggcggatcacgaggtcagaagatggagaccatcctggctaacacggtgaaacctcatctctactaaaactacacaaaaattagccgggcttggtggcgggcacctgtagtcccagctactcgggaggctgggacaggaggatggcatgaagccaggaggcggagcttgcagtgagccaagatggcgccactgcactccagcctgggcgacagagcgagactctgtctcaaaaaaataaaatagaggaggaggaaggggaagaggaggaggagaaagaaaggaggaggcagagatggctccactcctgaatacgttttaggtagtgtggtatttaagcacttcatcttggccaaatttgataacaattaaagtttgtttccaggttccttgggactctattttagtgttcgtttccactccagattagacctttccaaatactctcagaaactttagatgtcctccaatcaaactctgctctcttgaaaagactgccagcagtcttttatacctctctatattgccattccagaaatactggtatttggggtcatgtttctaactagggaattgagagttacagatagcataaggagtagtataaggatattgcaacaaggattttgtaaaggatccctgagtaagggatctcaagccttagatggaagaaatatatcatgtttgcatgtgtgttartgtgttagtgtgtgtgtgtgtgtgtgtgtgtgtgtctcatccagcttgtggccctatgagccctgtacagaaaatggtagaggctgagaacatagacattcccacatttaataatgcaagagggtattcctttagttgaatacttcttttcagaaatccacacaaaatcagatataaagaaattcaacagaaaagaaaaatcaggctaggcacgatggctcactcctgtaatctaagcattttgggagactgaggcaggaggatggcttgagctcaggagttcaagaccagcctggccaacatggcaaaactctgtatctacaaaatatacaaaaattaggtgggcgtggttgtgcatgcctatagttaagctgcttggagactgagacagaaggatcacttgaacgcaggaagctgaggttacagtgagctgccatc

SEQ ID NO: 698481 - DNA, 2847 bp, Homo sapiens
agaagttttcaaaattacctcttaagttttcctactagtttatggccccagaggcttctactccaggtaagcagttctctgcaactctgaatttgcttgtatttctagattttaaggtgacagtttgccctgtaatatcagttctctgacgggtccaagacaagccatcaattttaagtttctttaactatttcttattgtaaggatgggaattggaaatgctaagctctttaaagatttgggctaaaactggaggtaatgctcatattctgtttttatcaaattcactgttaaatatatatcatctatccttcacactcagacaaaatcaaaacaatattcagtgatcagtcactcatttttagatatttgggttaactgacgaaggctttcatttccttctcctatataatccttgtacaatggaacaaggagataagcagtgaaaggccaagggaatgtctggagttaggacttcaggtgattcacaacttggctgccactcacccgagactgcccaagcccagatttcttccttctataagaatattgattcttgcaaataagatgaacctaaatgtggtccaggagtcagcatcttctacatggtactcagatcttcaaaaagaaaaaaaggaaaaaaatacaaccccattaaataagacagttatagctgctgctttttctttttcatcatccttgtctctgttttccttttcttacccctcttcttcatgtaaggctttccttataacccaatataattagacagaaacataatagtaacatattaccaagagtgcaattatttctactttaaagtataaaactggtcaaacaaaattgataatattaatctcaagttagttattttaatacagacagatgaaaaaaggactcatcacttcagtaagtttcacataccacctcttctaaccagaaaggagtattctctcaagtaaaatagttcctcattctttcaaaaatttaaagtgctttatctataatgctttggtatcctaatttccctttatctggattacataggccattgacattcaagcatagtaaaagaaaatgctaaaattttatcttgaatgttaaagcacaaggacttctgtgaatgatgagagatttctcgagtgtcactggtcaacactcattccaacatattgacagaacgaaaatactaacacctaactccctagtaaaatatatactttcagtacagaaaataaaataaccctgtcttctacttgttgagaaaaagtaggtaaaatattaaagtggaaaaatatggcattagagagagaagtacctgaatttgaatcctgaacttgctatgcagcttcaatgagttatacaacctctctaatccttggtttccttaaccttaaaatggatacactaatatttaactggaagaattgttgaaatgtttaatttggctcatcaaaataactaatgcagaatgatagatattcaataagtgataactataattattgttaatgtgtaaaagttttcttgcaaagatatatttcattaaaaaccatcacaacttgcatttgaaatgaatagagaaagatctgctactctatttctactcatacctccagatagcatgatgcttcttcctgaaataaaaataggaggaagggctgggcgcggtggctcacgcctgtaatcccagcactttgggaggccgaggcgggcggatcacgaggtcagaagatggagaccatcctggctaacacggtgaaacctcatctctactaaaactacacaaaaattagccgggcttggtggcgggcacctgtagtcccagctactcgggaggctgggacaggaggatggcatgaagccaggaggcggagcttgcagtgagccaagatggcgccactgcactccagcctgggcgacagagcgagactctgtctcaaaaaaataaaatagaggaggaggaaggggaagaggaggaggagaaagaaaggaggaggcagagatggctccactcctgaatacgttttaggtagtgtggtatttaagcacttcatcttggccaaatttgataacaattaaagtttgtttccaggttccttgggactctattttagtgttcgtttccactccagattagacctttccaaatactctcagaaactttagatgtcctccaatcaaactctgctctcttgaaaagactgccagcagtcttttatacctctctatattgccattccagaaatactggtatttggggtcatgtttctaactagggaattgagagttacagatagcataaggagtagtataaggatattgcaacaaggattttgtaaaggatccctgagtaagggatctcaagccttagatggaagaaatatatcatgtttgcatgtgtgttagtgtgtkagtgtgtgtgtgtgtgtgtgtgtgtgtgtctcatccagcttgtggccctatgagccctgtacagaaaatggtagaggctgagaacatagacattcccacatttaataatgcaagagggtattcctttagttgaatacttcttttcagaaatccacacaaaatcagatataaagaaattcaacagaaaagaaaaatcaggctaggcacgatggctcactcctgtaatctaagcattttgggagactgaggcaggaggatggcttgagctcaggagttcaagaccagcctggccaacatggcaaaactctgtatctacaaaatatacaaaaattaggtgggcgtggttgtgcatgcctatagttaagctgcttggagactgagacagaaggatcacttgaacgcaggaagctgaggttacagtgagctgccatc

SEQ ID NO: 698482 - DNA, 2847 bp, Homo sapiens
agaagttttcaaaattacctcttaagttttcctactagtttatggccccagaggcttctactccaggtaagcagttctctgcaactctgaatttgcttgtatttctagattttaaggtgacagtttgccctgtaatatcagttctctgacgggtccaagacaagccatcaattttaagtttctttaactatttcttattgtaaggatgggaattggaaatgctaagctctttaaagatttgggctaaaactggaggtaatgctcatattctgtttttatcaaattcactgttaaatatatatcatctatccttcacactcagacaaaatcaaaacaatattcagtgatcagtcactcatttttagatatttgggttaactgacgaaggctttcatttccttctcctatataatccttgtacaatggaacaaggagataagcagtgaaaggccaagggaatgtctggagttaggacttcaggtgattcacaacttggctgccactcacccgagactgcccaagcccagatttcttccttctataagaatattgattcttgcaaataagatgaacctaaatgtggtccaggagtcagcatcttctacatggtactcagatcttcaaaaagaaaaaaaggaaaaaaatacaaccccattaaataagacagttatagctgctgctttttctttttcatcatccttgtctctgttttccttttcttacccctcttcttcatgtaaggctttccttataacccaatataattagacagaaacataatagtaacatattaccaagagtgcaattatttctactttaaagtataaaactggtcaaacaaaattgataatattaatctcaagttagttattttaatacagacagatgaaaaaaggactcatcacttcagtaagtttcacataccacctcttctaaccagaaaggagtattctctcaagtaaaatagttcctcattctttcaaaaatttaaagtgctttatctataatgctttggtatcctaatttccctttatctggattacataggccattgacattcaagcatagtaaaagaaaatgctaaaattttatcttgaatgttaaagcacaaggacttctgtgaatgatgagagatttctcgagtgtcactggtcaacactcattccaacatattgacagaacgaaaatactaacacctaactccctagtaaaatatatactttcagtacagaaaataaaataaccctgtcttctacttgttgagaaaaagtaggtaaaatattaaagtggaaaaatatggcattagagagagaagtacctgaatttgaatcctgaacttgctatgcagcttcaatgagttatacaacctctctaatccttggtttccttaaccttaaaatggatacactaatatttaactggaagaattgttgaaatgtttaatttggctcatcaaaataactaatgcagaatgatagatattcaataagtgataactataattattgttaatgtgtaaaagttttcttgcaaagatatatttcattaaaaaccatcacaacttgcatttgaaatgaatagagaaagatctgctactctatttctactcatacctccagatagcatgatgcttcttcctgaaataaaaataggaggaagggctgggcgcggtggctcacgcctgtaatcccagcactttgggaggccgaggcgggcggatcacgaggtcagaagatggagaccatcctggctaacacggtgaaacctcatctctactaaaactacacaaaaattagccgggcttggtggcgggcacctgtagtcccagctactcgggaggctgggacaggaggatggcatgaagccaggaggcggagcttgcagtgagccaagatggcgccactgcactccagcctgggcgacagagcgagactctgtctcaaaaaaataaaatagaggaggaggaaggggaagaggaggaggagaaagaaaggaggaggcagagatggctccactcctgaatacgttttaggtagtgtggtatttaagcacttcatcttggccaaatttgataacaattaaagtttgtttccaggttccttgggactctattttagtgttcgtttccactccagattagacctttccaaatactctcagaaactttagatgtcctccaatcaaactctgctctcttgaaaagactgccagcagtcttttatacctctctatattgccattccagaaatactggtatttggggtcatgtttctaactagggaattgagagttacagatagcataaggagtagtataaggatattgcaacaaggattttgtaaaggatccctgagtaagggatctcaagccttagatggaagaaatatatcatgtttgcatgtgtgttagtgtgttwgtgtgtgtgtgtgtgtgtgtgtgtgtgtctcatccagcttgtggccctatgagccctgtacagaaaatggtagaggctgagaacatagacattcccacatttaataatgcaagagggtattcctttagttgaatacttcttttcagaaatccacacaaaatcagatataaagaaattcaacagaaaagaaaaatcaggctaggcacgatggctcactcctgtaatctaagcattttgggagactgaggcaggaggatggcttgagctcaggagttcaagaccagcctggccaacatggcaaaactctgtatctacaaaatatacaaaaattaggtgggcgtggttgtgcatgcctatagttaagctgcttggagactgagacagaaggatcacttgaacgcaggaagctgaggttacagtgagctgccatc

SEQ ID NO: 698483 - DNA, 2081 bp, Homo sapiens
ggaggagaataatacacactggggcctattggaaggtgaaggttgggaggagggagagaatcaggaaaaataactagtggatactagtcttaatacataactgatgaaataatctgcacaataaacccccatgacacatgtttacctatgttacaaacctgcacatgtactctcgaacttcaaatacaagttagaataagtaaataaatggaaatggaaatatgtgtgaattctgataaggaatattcatcacagaggtggctgagatataagayccctgagaaatttgaagagggtaaatgaaagtgtattggagctttgggaggagaaatttttattactccttcatagcaagagggaagaaggaaagaatagatgttgatgcaggtaggtatatgtatagtgttctgaagatggaaaaattccctcttgtgcatttatctatgacatgtaagaaatagtcattaacttagaatgagaatggatgaaaagctggaagcatcaagaaagtgaaagtccacaagcattctcagccgggctgcatggcactttcgaaaccacttttgagaatactaatggtaaatatataataataacaatgtacaaatatctaatcactaagaacagtggaggaatgtgatttatatggattctacacattttaaggaatctggacttttttctgtttttttgaggtagaaagaaaagatttagaatattgcacttacatagtgaccaaactttaactggagttaggtatctgattcaaaatcagctgctcagtttctcttctggcaatttccatttgagaaacagaatgagttactcaaatgtgtggagctgaggtgaaagctttgacagactagaaactgaagctgccatgggttagccctgataagccaagaatgcagtgatatgtaagcacagagagctgggccacagagagaggcaggggaatcaagccaacaggcagaaagagaaaatatgagaatttgtgcccagaaaggctaagtagctttataaagaatttcaagttcccatgatactctcctatgtttccctgagtttactgataccactaaaatataacttattttaaataagttaattcaaacttgtttccattctccacaacaaaacatgcctggataagaaaatcagggttttcatcttggttatgtttatttcaatgttatatgtataatcacaacaaccataggatttaacattaaattatctagacccataatatatgtgaattaaaagaatgtagttttacacaaaggaatggggatcactcattttcaaaggactcaaataatggaggataagaagtattctttattcccccattggttttaatcttgttctgtcagtatttcctaaataacatatagataatcttgttctctgtcttttggttacaaacattgtttttaccattgctgacacttgtgctttaaactgtcttttagatatgtgttgtatttatctagaaaacagtgttttgcctgtcatttgacatttaaaataactgagagtcaactcacagttttaattagaattgtcatattaatatatgctatccttgacacaagctgttagcgttaatttatttgtgtacctaaacgataaattgaaaagaaaattgcaaagcaatccaaagcatggaggttgtttgccggtttcattcattgtataattattgagattacatatattgagagttgcaaaaggctgataatggacatataaatattaatggaaaagagaaaatactattcttcataaaatattaccataaataatataaaacaccagggaaaaaaaggaacactgtggtcttttagaaggttttgtaaagactgaaattcagtatgaaacctaggagaatacactgcagaaattcttctgaaacaggataattttacatcagtgtataactgttctaatcatgaattacctgatttgctcacataaagcattttataattgctactcatgttcctttctaatatatgaaaaaaatacaaagttatatatatgggtagcattaaaattcatcgaattaatatctagta

SEQ ID NO: 698484 - DNA, 2081 bp, Homo sapiens
ggaggagaataatacacactggggcctattggaaggtgaaggttgggaggagggagagaatcaggaaaaataactagtggatactagtcttaatacataactgatgaaataatctgcacaataaacccccatgacacatgtttacctatgttacaaacctgcacatgtactctcgaacttcaaatacaagttagaataagtaaataaatggaaatggaaatatgtgtgaattctgataaggaatattcatcacagaggtggctgagatataagacccctgagaaatttgaagagggtaaatgaaagtgtattggagctttgggaggagaaatttttattactccttcatagcaagagggaagaaggaaagaatagatgtwgatgcaggtaggtatatgtatagtgttctgaagatggaaaaattccctcttgtgcatttatctatgacatgtaagaaatagtcattaacttagaatgagaatggatgaaaagctggaagcatcaagaaagtgaaagtccacaagcattctcagccgggctgcatggcactttcgaaaccacttttgagaatactaatggtaaatatataataataacaatgtacaaatatctaatcactaagaacagtggaggaatgtgatttatatggattctacacattttaaggaatctggacttttttctgtttttttgaggtagaaagaaaagatttagaatattgcacttacatagtgaccaaactttaactggagttaggtatctgattcaaaatcagctgctcagtttctcttctggcaatttccatttgagaaacagaatgagttactcaaatgtgtggagctgaggtgaaagctttgacagactagaaactgaagctgccatgggttagccctgataagccaagaatgcagtgatatgtaagcacagagagctgggccacagagagaggcaggggaatcaagccaacaggcagaaagagaaaatatgagaatttgtgcccagaaaggctaagtagctttataaagaatttcaagttcccatgatactctcctatgtttccctgagtttactgataccactaaaatataacttattttaaataagttaattcaaacttgtttccattctccacaacaaaacatgcctggataagaaaatcagggttttcatcttggttatgtttatttcaatgttatatgtataatcacaacaaccataggatttaacattaaattatctagacccataatatatgtgaattaaaagaatgtagttttacacaaaggaatggggatcactcattttcaaaggactcaaataatggaggataagaagtattctttattcccccattggttttaatcttgttctgtcagtatttcctaaataacatatagataatcttgttctctgtcttttggttacaaacattgtttttaccattgctgacacttgtgctttaaactgtcttttagatatgtgttgtatttatctagaaaacagtgttttgcctgtcatttgacatttaaaataactgagagtcaactcacagttttaattagaattgtcatattaatatatgctatccttgacacaagctgttagcgttaatttatttgtgtacctaaacgataaattgaaaagaaaattgcaaagcaatccaaagcatggaggttgtttgccggtttcattcattgtataattattgagattacatatattgagagttgcaaaaggctgataatggacatataaatattaatggaaaagagaaaatactattcttcataaaatattaccataaataatataaaacaccagggaaaaaaaggaacactgtggtcttttagaaggttttgtaaagactgaaattcagtatgaaacctaggagaatacactgcagaaattcttctgaaacaggataattttacatcagtgtataactgttctaatcatgaattacctgatttgctcacataaagcattttataattgctactcatgttcctttctaatatatgaaaaaaatacaaagttatatatatgggtagcattaaaattcatcgaattaatatctagta

SEQ ID NO: 698485 - DNA, 982 bp, Homo sapiens
tgaaatgacaacaaaggatttagcatattccataaacttagttgataaagcagcagcagggtttgagagtatttattccaattttgaaagaagttctaatgtgggtaaaatgctaccaaacaacattaaatgctacagagaaatctcttgtgaaaggaagagtcaatccgtgtgcaaacttcactgttgtcttattttaagaaattaccacagacaccccaatcttcaacaactactaccctgatcagtcagcggccgtcaacatcaagacgagatcctccaccagcaagaagatgatgactcactgaaggttcagatgatggttagcatttttttttcagtcaagcatttttaaattaaggtacgtaaagattttaaacataaygctcctgcacacctagactacagtatagtgtaaatataacttgtatatgcactgagaaaccaaaaattcatacaaattgcttcaatgaggtatttgctttattgcagtggtctggaactgaacccacaatatctctgaatcatgtctgtatgtggcttaatatgtaaactgcccacttccgagagaaaagttcaggtacattttgcacatgttttcccttggacactgcaaaacaccttgccagcataaaaagacactgtaagatttccctctgttctaattcatttcatttaaacctgcaatggattaattatgtcctgaagattgatcatatttttcctttaagaatttgttttttactatttaaaatataaatagcctattatctacatcagtcaagatttcttgcctgtgcaaaaatctctcaacatttttgagatacagtttttacttcatatttctttagattaagttttccctaaaggaaattagtaaaggagctatttaactttacttcaagattaaggctattcattttaaaatcacaagtcccagctagtgtgtctctaaatgtagaagagcttgctgttctttgca

SEQ ID NO: 698486 - DNA, 1027 bp, Homo sapiens
gtttcactgacaattattaaagacacattgcttctaaaacattgtactgtgaacattaagtgatagaaagataagactctgcctcactccaaagcggctgatttatttgaataaaaactgtagtcacagataaatacaatatatagcataatgtaataaatctataggagagaccaacaaatatgaaagaaagcttagcaaacatataacaaaatagtaacaatttttggatgataggatgagtgaaaggaagagtagtgctaagtgaaggctggccatgtatgctggagccagatcttagaagactttggatgtctttctgcatgtttgaactatattctccaggtaatatggagaaacttaggaggactttttatgcccttctccatctccattagaaagtaatacttgctcattatacagaattyggaaagtacaaaaaagtatacaaaagaaatgtaaaatcattcgtaaattcattctctctcctctgtcactctactccatcccgtcttccagtgctgtttcctgacccacagtgatgtgattagagccacgctttaggaatggcacctagatgtggtgtatcataagttgcaggataacttattaggaatcttagtgtgcagagggaataggaaggagtgagtagaacaagaatccttttaaagatagaaacaggctgggcatggtggctcacacctgtaatcccagcactttgggaggccaaggcacgtggatcatttgaggtcaggagtttgagaccagcctggctaacatggtgaaattctgtctctactaaaaatacaaaaattagccgggcatggtggcatgcgcctgtaatcccagctacttgggaggctgaggcaggagaatcgcttgaacctgggaggcagaggttccaatgagctgagatcacaccactgcactccagcctgggcgacagagggagactgcgtctcaaaaaaaaaaaaaaaaaaaaaaaaaaggaacaaaaggcgatttttactgatttcatgtgggtgtg

SEQ ID NO: 698487 - DNA, 650 bp, Homo sapiens
gacaaattgagattaaaaaataaaaaataatctgattatctcaagtatcgataaacaaagtccaaagtcatcaaataatctcaatcctttccctttgtttttgaatccaagcagtgttcacccagatgcatgagagagtctgagcagagatgaaagtagagattagattcttctatctactggtttatgataatgacccctgttagaacttctaatagcatagtcttctccagatgctttctcagaattgtgacatgtatactcatctaggaatgtgtagctattggtagtgttgaagtttatatgtgaacttcacatataaattggcacagtcccccttttttgaagcatttgttatagctttctccacagggaatatttttcaggctgtgtaggaataagaaaattgggaggaaaatgaacgctatagagagtcagagctcttaaaaatcttaagaatcttaaaaatcttaraaatcttaagaatcttaaaaatccacagctatttatatatcttgaaataaatggccttcctttgattggaagaggcacttctaaaagaactttttttaaaaaaaaattgaacaacagcatgatggtaaagtgggagaaaaaatgatctaagacctgtctgtctggtataagtttct

SEQ ID NO: 698488 - DNA, 970 bp, Homo sapiens
ttcttaaaggggcctcttccttttcctttggaatcatgtaaaagttactttacattacaaaagcattagacagcaagttataaagcactaggcttgaacttttaagactgtactaaagggtgagtgggttattagaataacaacaacaacaaaaaaaataccatgaggacctatcctttcttcatgttactaaggagtcctcttagtaaccaagacattctttcaaagaaaaaaacaaatggttgtaggtgacaaaaggtgacttttccatggccctgtgaaacaaaccatccctttacaccctttgtctctctgcctagacagccccagctaagtaaaagattgtggtagtcaggtctctgggcaggtggtatccagcaccacattgaaaatatatcctaggtgcagtaatgggatgagaatggagacagctgctgaatgatgaaggtgggagtgcacaagggtgaagtgatgaaacaggtacagaaacacttgctttcacaggtcagatgggccggggcaatattctaatactaacctgtgggataatatatatatatataatatatatatttgggataacaaatatatatatatatatatatatttgggataacaaatatatatatatatatatatttgrgataacaaatatatatatatatatatatttgttacttatttgccaggccctcatcacaaatggccactgaaggaatagcataattgctaatctatttccatggactccaactcccatttccatggactcccagaaaccaggcagcaaccgcagacaggaaacctgtcttgattttactgaggcatctcagatgcctcctttttgttttaaagcataatgaggacaggatatgcataaatgaccagaatttccaagagggcagggacaattctgggaagcttgacatcaggttctatcaaaatcatctcatagaattcttaaaaaaca

SEQ ID NO: 698489 - DNA, 970 bp, Homo sapiens
ttcttaaaggggcctcttccttttcctttggaatcatgtaaaagttactttacattacaaaagcattagacagcaagttataaagcactaggcttgaacttttaagactgtactaaagggtgagtgggttattagaataacaacaacaacaaaaaaaataccatgaggacctatcctttcttcatgttactaaggagtcctcttagtaaccaagacattctttcaaagaaaaaaacaaatggttgtaggtgacaaaaggtgacttttccatggccctgtgaaacaaaccatccctttacaccctttgtctctctgcctagacagccccagctaagtaaaagattgtggtagtcaggtctctgggcaggtggtatccagcaccacattgaaaatatatcctaggtgcagtaatgggatgagaatggagacagctgctgaatgatgaaggtgggagtgcacaagggtgaagtgatgaaacaggtacagaaacacttgctttcacaggtcagatgggccggggcaatattctaatactaacctgtgggataatatatatatatataatatatatatttgggataacaaatatatatatatatatatatatttgggataacaaatatatatatatatatatatttggkataacaaatatatatatatatatatatttgttacttatttgccaggccctcatcacaaatggccactgaaggaatagcataattgctaatctatttccatggactccaactcccatttccatggactcccagaaaccaggcagcaaccgcagacaggaaacctgtcttgattttactgaggcatctcagatgcctcctttttgttttaaagcataatgaggacaggatatgcataaatgaccagaatttccaagagggcagggacaattctgggaagcttgacatcaggttctatcaaaatcatctcatagaattcttaaaaaaca

SEQ ID NO: 698490 - DNA, 970 bp, Homo sapiens
ttcttaaaggggcctcttccttttcctttggaatcatgtaaaagttactttacattacaaaagcattagacagcaagttataaagcactaggcttgaacttttaagactgtactaaagggtgagtgggttattagaataacaacaacaacaaaaaaaataccatgaggacctatcctttcttcatgttactaaggagtcctcttagtaaccaagacattctttcaaagaaaaaaacaaatggttgtaggtgacaaaaggtgacttttccatggccctgtgaaacaaaccatccctttacaccctttgtctctctgcctagacagccccagctaagtaaaagattgtggtagtcaggtctctgggcaggtggtatccagcaccacattgaaaatatatcctaggtgcagtaatgggatgagaatggagacagctgctgaatgatgaaggtgggagtgcacaagggtgaagtgatgaaacaggtacagaaacacttgctttcacaggtcagatgggccggggcaatattctaatactaacctgtgggataatatatatatatataatatatatatttgggataacaaatatatatatatatatatatatttgggataacaaatatatatatatatatatatttgggatawcaaatatatatatatatatatatttgttacttatttgccaggccctcatcacaaatggccactgaaggaatagcataattgctaatctatttccatggactccaactcccatttccatggactcccagaaaccaggcagcaaccgcagacaggaaacctgtcttgattttactgaggcatctcagatgcctcctttttgttttaaagcataatgaggacaggatatgcataaatgaccagaatttccaagagggcagggacaattctgggaagcttgacatcaggttctatcaaaatcatctcatagaattcttaaaaaaca

SEQ ID NO: 698491 - DNA, 970 bp, Homo sapiens
ttcttaaaggggcctcttccttttcctttggaatcatgtaaaagttactttacattacaaaagcattagacagcaagttataaagcactaggcttgaacttttaagactgtactaaagggtgagtgggttattagaataacaacaacaacaaaaaaaataccatgaggacctatcctttcttcatgttactaaggagtcctcttagtaaccaagacattctttcaaagaaaaaaacaaatggttgtaggtgacaaaaggtgacttttccatggccctgtgaaacaaaccatccctttacaccctttgtctctctgcctagacagccccagctaagtaaaagattgtggtagtcaggtctctgggcaggtggtatccagcaccacattgaaaatatatcctaggtgcagtaatgggatgagaatggagacagctgctgaatgatgaaggtgggagtgcacaagggtgaagtgatgaaacaggtacagaaacacttgctttcacaggtcagatgggccggggcaatattctaatactaacctgtgggataatatatatatatataatatatatatttgggataacaaatatatatatatatatatatatttgggataacaaatatatatatatatatatatttgggataacawatatatatatatatatatatttgttacttatttgccaggccctcatcacaaatggccactgaaggaatagcataattgctaatctatttccatggactccaactcccatttccatggactcccagaaaccaggcagcaaccgcagacaggaaacctgtcttgattttactgaggcatctcagatgcctcctttttgttttaaagcataatgaggacaggatatgcataaatgaccagaatttccaagagggcagggacaattctgggaagcttgacatcaggttctatcaaaatcatctcatagaattcttaaaaaaca

SEQ ID NO: 698492 - DNA, 1203 bp, Homo sapiens
attttccatatcataccttccttcacttcctgttttttgtcctgattttccagttctgagtcctggccaactttagattccaccatttcctcatcttcctcatcctctagaaaaaagaaagagaaaaatacaatattttctttcctccaaatcaaagtctttggttgatagtgggaggtaggggtaaagggtaaagttccaatcatttagggcaacatctaagtaaatcagtccacaatgaatgcccaagataaatgttcatgaatttatgaataaattatctccaaaaggggcctctttgaaaatttccccaagctgttgagaaaaccatactgaatgggcacctgtacatccagctccaggccctcaccacgtgggatgtcttggaattgcctccctgacctctgaagcttcttcgaagayggcccaggaacagattttaaaatgtttccacctggagcacatttcccacagggaacacctgttgtacagatgactcatttccaatttaattctcaccaaattaatttgtttttgacctacaggaaagggttaaatacaggtctgaccccaggtcaaatgccattggcaagtaaacaaccaagggaagggcccccaaagtcaatgccattggtctgggagaaaacaactcaaaatggtatttacacattcagagcagttcatgcattaatgtgaatttaatgagactaacaagtcgactgagttggctacccctgccagatgttacagtgcccttcctgccctatgcaaatgtatgctcatttttcctctactctcaacttgcctttcctagaggccccttccattatatagtgtttgaaagcatcaggcacagtgtagaaggtttaagggagtgtcaaggtgtcacaagaaaatccaaattatagaaaataaaacgacataaaaaattaaaatttgctttcagtctttaaatatggtattgtactccatgtaggttattgatttcattggttcaaagagagttgaaaagaaatgactttgcttcttcctccaccccatatgttcgctcattcaacaaatatttacagacctataaaatctcaagctctgtagatagtcccgtttccatcacaataaatcctgagatttatcaactcaaaatttcagcaccaatcacttagaatacattataaatgcacacttaaatgctcaaataaataa

SEQ ID NO: 698493 - DNA, 1441 bp, Homo sapiens
atttctgtacgtttaaaacattttatataagcattttgaaaacacttaaaaaagaaatgagaaattagccaaaatctgacatggaggagaccatcaatttggtggctgttcaagtcaaaacaaataattcttgagtacagattaagttcccaatatggtgagggaataaaaaaataaggaaaaggcactttctgggagtctagagatcagttaaaaatacagagccaggccaatacaataactaggaaacaacatatgcatacgcagagatttgtgtagcacaacctacacatactagataaatttcacttgagaggttttagcagcttgtctatggtcagtgttgcagaggaaagatgactttattgggctagtctttgacctatggctggccctttgagtatgatgcctgatgtgagtggtagctgggattcagctctcaaggaatggagaataggaagcacttagctatccacccacattgacagcctgtttctgatgtagagaagccaaaaatgtaattttattatttttttagccagctctgtttatatatctcatgtccatagatttggtgtaattacagcctagagataatacctaaggtatttattgaacaagttcattctgactgggtaatatttgttatttatttagctctctaaatgtacacggtacttgacaaatatgtagaaagacaagtttcctgccctggggagtttatgttctaatgcagacaaacagaacagaaggggtgggatcttgacttgaagacttggcaggttgggagaggctggcttggtaggagagaagggaacctgaagactctggaaaagtgagactggaaatgtgaaaggaatagaggacttttagagacatcctttaaaagtaaacacaatgttcaatcagtataatgctttttttttttttgagatggagttttgctcaggctggagtgcaatggcatgatctcagctcactgcaacctctgcctcccaggttcaagcaattctcctgcctcagcctcccaagtagctgagattgcaggtgtccgtcaccacacctggctaattttttttttttaattagtataaacgaggtttcaccatattggtcaggctggtcttgaacacctgacctcaagtgatycacctgccttggcttcccaaagtgctgggattacaggcatgagccactgtgcccagcctagtataatgttcttaaaaaacgtttttgaggatgggggttaaggggagggagagcattaggacaaacacttaatggatgtgggacttaaaacctagatgacgggttgataggtgcagcaaaccaccatggcacatgtaaacctatgtaacaaacctgcatgttctgcacatgtatcccagaacttaaaataaaaaaaaaaaatgtttttgagggtagggaagaggttaagaca

SEQ ID NO: 698494 - DNA, 1441 bp, Homo sapiens
atttctgtacgtttaaaacattttatataagcattttgaaaacacttaaaaaagaaatgagaaattagccaaaatctgacatggaggagaccatcaatttggtggctgttcaagtcaaaacaaataattcttgagtacagattaagttcccaatatggtgagggaataaaaaaataaggaaaaggcactttctgggagtctagagatcagttaaaaatacagagccaggccaatacaataactaggaaacaacatatgcatacgcagagatttgtgtagcacaacctacacatactagataaatttcacttgagaggttttagcagcttgtctatggtcagtgttgcagaggaaagatgactttattgggctagtctttgacctatggctggccctttgagtatgatgcctgatgtgagtggtagctgggattcagctctcaaggaatggagaataggaagcacttagctatccacccacattgacagcctgtttctgatgtagagaagccaaaaatgtaattttattatttttttagccagctctgtttatatatctcatgtccatagatttggtgtaattacagcctagagataatacctaaggtatttattgaacaagttcattctgactgggtaatatttgttatttatttagctctctaaatgtacacggtacttgacaaatatgtagaaagacaagtttcctgccctggggagtttatgttctaatgcagacaaacagaacagaaggggtgggatcttgacttgaagacttggcaggttgggagaggctggcttggtaggagagaagggaacctgaagactctggaaaagtgagactggaaatgtgaaaggaatagaggacttttagagacatcctttaaaagtaaacacaatgttcaatcagtataatgctttttttttttttgagatggagttttgctcaggctggagtgcaatggcatgatctcagctcactgcaacctctgcctcccaggttcaagcaattctcctgcctcagcctcccaagtagctgagattgcaggtgtccgtcaccacacctggctaattttttttttttaattagtataaacgaggtttcaccatattggtcaggctggtcttgaacacctgacctcaagtgatccacctgccttggcttcccaaagtgctgggattacaggcatgagccactgtgcccagcctagtataatgttcttaaaaaacgtttttgaggatgggggttaaggggagggagagcattaggacaaacacttaatggatgtgggacttaaaacctagatgacgggttgataggtgcagcaaaccaccatggcacatgtaaacctatgtaacaaacctgcatgttctgcacatgtatcccagaacttaaaataaaaaaaaaaaawgtttttgagggtagggaagaggttaagaca

SEQ ID NO: 698495 - DNA, 534 bp, Homo sapiens
tgttttcaaaaagcagttagcagaatatcactgatgtttacacccatgaagaaaatagcaagccagtgtattattttttcaagcattcatttgtgggtaaatttgtgcctcataatcaaagtgttgtatttgccttctttaattaygtgatttcttaagaatgctcagctgtcagatttttttttttttttctggaaatagagcctggggaaggagaagacatactgcagtgaattgcaaaaaccaagaatcacaatttacattttctttactcacttttaagtaaaaccagaggtgtgaactgtgggtaagctaaaagcatcactggccaattttggttaaaaacagaccttttttctcatcattattaatttaaggtgatgggtgtttcactctttcatgagatactgaggccctcaataaagaaataatcacatctgcttaatgtctgatttagcaccttgtcagtcttaaatgagagagtgtaagcaccaagaaaatctctagacccgtcttgatgtcattggcaacaac

SEQ ID NO: 698496 - DNA, 593 bp, Homo sapiens
gggaagaaaaaagaaaaatggaaagaactaacattggctgagcacctggtacaggtcacaccaaggaactgtgaagatctgtagcagacctcacaataacctgtaagggagatggtgttatctctatgatagaggaaacgaaaataaacatcatgaagtaaaataacttgtaagttactatgaattgtaagtttacactactgttaggtagtagatacaggattcaaactcgggtctttttgcattctaagtttatatatagatattatctttagtgctgtagattaaataatttatcaattatttgctaaattagcaaatatatggaattactggaattagctacctagcaaaacccagcaaaaaagggtmatggacaaaactgatacattttggtcactacagtattttaaaaatacaaagagagaggaggtgagaaagcagtagggttactattgagtattggaaggaaaaagaaatagtcaaaggagcaaaaaatgtgagagataaatgttgtctcaacaactttgtctatgggttgtcataagaaaatgtttgccgtgagctaagtgaaactggaataaaataacata

SEQ ID NO: 698497 - DNA, 1233 bp, Homo sapiens
tttgatctatttctcaacttttaaaagaaatattctctttttcatgaatacaggatccattcactgactgccggctttcaaatgaccacctcttgaagtttaattttaagttttaaataaatattgtatgcatgcagaataattacgatgctctagagagatactgtataatgacattgattcttttttatctgaaaatgccaagcccttaaggcagcaaagtctgcatttgccacagacgtgggaaggttccttgcatgtgttaaatttcagaaggggcatgcgtggcactttcattaagatgctaccggtatttcctgagtaaactctaattttcatgagtttagaacttcttttctttaggttcatgtgatctaacctaccaagtggaactcactggccttcaaatgtatgttttacacatataactttttagtgaatcaaaaatttcttcattctagaaatgaaaaagcctaataaaatcttgtttgtagatgtatgaaaatcctttttcatgttgcatagtattttacatgacaagtaactattgctttttacagactaaaatatttgttaggtttctgtctatatatggtatcacagtttcataccaaatgccattagtggatactatcatgtatctttttcacatattcagaaatatgatgagaataagtcaaggtacagagacagaaatcagcattatgtcttgtcttttgtgtcctctgtcagggttccttaaaaaattgtgttcttcttctaaatatatcccactcatgacttagcaaccatacacatacactaggaaataataatkctgcaataaagatgtgttcagattcaagaacttttctaaatgtgttggctcattaaaatttgttggtgtattcagatcaaaaatagcctagtagaaatattttttgtcaattgtttaacagacaaactttatttgacacatggccttctctgatgtgattttgaccaatagcttgttatggctgaaactttccaatccatcatcaagtctcattgctttaccctcaacatatttctcaagtctgtttgttgctcatcagctccaccactaccatcctggtccagccttgactatctatcacctggactacagttgtagcctcctcattgttcttcctgtttccaatcttgctccattacagtcacagttctgcatggaagcctgaattaatttctcataaaatagaaaccagatat

SEQ ID NO: 698498 - DNA, 1233 bp, Homo sapiens
tttgatctatttctcaacttttaaaagaaatattctctttttcatgaatacaggatccattcactgactgccggctttcaaatgaccacctcttgaagtttaattttaagttttaaataaatattgtatgcatgcagaataattacgatgctctagagagatactgtataatgacattgattcttttttatctgaaaatgccaagcccttaaggcagcaaagtctgcatttgccacagacgtgggaaggttccttgcatgtgttaaatttcagaaggggcatgcgtggcactttcattaagatgctaccggtatttcctgagtaaactctaattttcatgagtttagaacttcttttctttaggttcatgtgatctaacctaccaagtggaactcactggccttcaaatgtatgttttacacatataactttttagtgaatcaaaaatttcttcattctagaaatgaaaaagcctaataaaatcttgtttgtagatgtatgaaaatcctttttcatgttgcatagtattttacatgacaagtaactattgctttttacagactaaaatatttgttaggtttctgtctatatatggtatcacagtttcataccaaatgccattagtggatactatcatgtatctttttcacatattcagaaatatgatgagaataagtcaaggtacagagacagaaatcagcattatgtcttgtcttttgtgtcctctgtcagggttccttaaaaaattgtgttcttcttctaaatatatcccactcatgacttagcaaccatacacatacactaggaaataataatgctgcaataaagatgtgttcagattcaagaacttttctaaatgtgttggctcattaaaatttgttggtgtattcagatcaaaaatagcctagtagaaatattttttgtcaattgtttaacagacaaactttatttgacacatggccttctctgatgtgattttgaccaatagcttgttatggctgaaactttccaatccatcatcaagtctcattgctttaccctcaacatatttctcaagtctgtttgttgctcatcagctccaccactaccatcctggtccagccttgactatctatcacctggactacagttgtagcctcctcattgttcttcctgtttccaatcttgctccattacagtcacagttctgcatggaagcctgaattaatttctcataaaatagaaaccagrtat

SEQ ID NO: 698499 - DNA, 1049 bp, Homo sapiens
tgtcacatatagcatcagcaaaaggcaaagtattctaagtgtaactaccagtaaaacagaatatagtgctgtactcaatgcctggccatttggcattctttctctctactcagtttggtcacatgatttgtcttggagaaatttgtatttggatttttcctgattttgcgcactctgcatttgtctcaaacatcctcaaggctttcttaaatttccttccaacaagctaccttcatctgtttttaaatataaagtcctacagtgccatgttatttatttaatttattggggtgtgacatatcttttagggtatattagtgtgttctcagagttgttattatttttgctagtgatatggaaacagagttgcctagagtttcagtagttcaccccactcctctttttcctctaagtacaattttactaaatgcaaggtttttccagaatgcctaaatcacttttaatcacaatgcctttactgcatgcattgttttgtctacatgttacagatgaaagacataaaggacaatgatctacacaagttaatattcacaacaaatatattaagaactttgtaagagtttctatttttaaaaccacgttttatttgttgtgagtaaaatattcaatattctttaaaatgattatcactgaagggtcaactaaaccatttctggatgtcttattttggattttaaaagagaaattaagctgaaataattatttttataagacatttgttaaaaatttatagtaaactaaatcactgtaacagaaactatccttcaaaataaaaatataagcaaaaacacacacaaaaatgttaacttatcttcttgccttgatcartctttacacttaatatacttgtttggtttccacatagttcaaatttactaagaaatatagtaagtaataataatttgtttaatgtattaaaaaattgtcaatgcaaaaaggggaagtaatgactttgctcccatgaggtaaagaatgtgaataaaatgtgactcaatcctgtagtctgcaagagaaatcacaatcctgct

SEQ ID NO: 698500 - DNA, 1872 bp, Homo sapiens
tttgagatctcattagattaatcattaaatgtatttttgatgattgaataattatttcaatgattatatagaaaaaaaataattcaaattctaagatatgtaggacacattttcccaaattgtatacaatcttacttaaattttcaagctgattaatgaatttgaggaagggaaaatatgtgcatttatcaatcacctaaattgtgccactatgctttttcatctattaatatattgcaccttcaaaatatactatgttaatatgctgctttttgcatggaaaaaaattgggtcatagtttggtacactgttttaggtcatatacttagcaaatggtgaagctggaattagaacccctgtgtctctgacttcaaactctttacatttataccatatcataatagccatgtatttttactccacacttatgtaagtggataatgtataaaataaacacagattccaatgattatcttaaattaattttaagatatttaaaatttgaagatatcttagtaatatcttaacatttaaagagctaaaaaagaaattgctatagtcatgatagcaatataagctattaatattcaagggtaatatgtattttttccatctcttaaaatcaaaacatatgacactgaaaaaatgtatgtacttctttgggctaatgtgtttgcattttaaacttgaactgtgaatttataattttgttacaaggcaaaaaaaaaaagaaaaatatatcaagttgtatttcttatcaagaattcaaatgcaatacattaaaatataaactcattgccaattttttctcacccttgcttcacttttacctcctgatcgtctacacagaacaaatatttattatctacttgaaccatgatacagccaagaatgttaccactgtttttttacaccatcttcttacttaagcccatcattcactgatggaattccattgactataggacaaaatccagctgtagcatacaaaattggtaatgaccttacttttgattatttctccagcaaatttttgccctctcccattggcactttatactttaataagattaaaatacctagatttttctgagcagtttatctctattccagactaaatgtacagcagatatctgatataatcctggggttgacttctttctttttctatctgtattatcaagtgagtagtagctcaatcactacttcctatttaaagcattccttgacttttaaagcagaattaaaactctccttatccttagctcttttgataggcattaatgctacctttcaatattcccaggtcttctccttctgggtcatagtaagcttgcactttagtaactacattgcattatgtatgaccatattattattgttagacagtgtgaccctagacttacctaagcagattttaagagccaattatatgctatttttccctttttagcgaaccactcactccrgcatactagttgatacttccttgtatttgagattgacggttatttatcttttcttttttctcagcagcttaaagatgttattcatttatcttgtgacttttattgtgtcttaaaggctaagtgctctaaataaaaattaaaattatccagcacttatttaaaattgaataggcaaataaataactgtatgttgtatacaagagacacatctatgacataaaacaattggtaagataatataaaaatattcaagttttagcttaaaagaaagctgatgtgattatattatcaaataaagtgaatgtttaagtccaaataattataaaagaatataatgaacacttgaaaattatgatcttaattcaccaaaagaaaaatatgattctaaatttgaatatgcaat

SEQ ID NO: 698501 - DNA, 1359 bp, Homo sapiens
gcttaatgttagtttgcttttaacttcagtatagcactgtagccaaatgagtcagtctattttcttagttagatccattgtttgtctaatctcccagggcagtgtaagagaactcatttacaactgagccatctccaccctttaaaaatggagagttacttctcaaccaaatagtcatttgtcttccagtctgaactgacttcttcctcaggcaatgactcctaagatagccactcactaaccaaaggataarttatagtatcaatcgtttaaatctcagtgtgcctttaaattaatgtgcaccgaagttttttgcttccagccatgagagagtagcaagtacctgagtagctctccttttcaggtattggacagtaggccccacacggctgtgatccttgagagaaggaaaacacattagttttgctccacaactatcttacaattgtccaggtttttctgctgaagagaaaaacatttttctagaatgtaggaaggtagaatacaggcaaggcagtagtttcagttaaggagggagagactggagttttgggctgttgaagcagctgaaatttctgaagataagtagctgtggaacagggactcccccgcaagtctacatggagattcaccaccagtctgggccaacagctaagctgaatatagacatgacaaaactctgcagggcctaacagagattacctgctgcatgtagtgcattattgagagacattggagttccatcacagcagggcagagagacctcactgagcatgtcagggattcaattgagatgctggaaaggccttgccttaaaagcaatagtcaggctaaaaagcatgtcttagagcaaaaatcaaaatgttgtttctccatagcacatactgtaacaaagaatggtaagaaatcagacaggaccagggaaatttataagaatgaaacaacacccattaaaaaaaaaacaacatgatacagattctctacaatggataattaacaataaaaaatttaataggctggacacgatggtgcacgtctatagtcccagccacttgggaagctaacaaaggaggatcgcttgagtccaggagttcaaaaccagcccagggaaacatagcaagactctgtttctaaacaaaccaaccaacaaacccaacaaacaaatatggacaagtgaaaaacacacaaaagtgatctatacttaagagaaagcagtcaatagaaactgatcctgagatggcccagatataggaggaattggcaggaaagaaatttttaaagtaactattataaatatgttcaggtatttaaaggaaaatagaatgaacaagtggacaatgaacaaatagagaatctcag

SEQ ID NO: 698502 - DNA, 1359 bp, Homo sapiens
gcttaatgttagtttgcttttaacttcagtatagcactgtagccaaatgagtcagtctattttcttagttagatccattgtttgtctaatctcccagggcagtgtaagagaactcatttacaactgagccatctccaccctttaaaaatggagagttacttctcaaccaaatagtcatttgtcttccagtctgaactgacttcttcctcaggcaatgactcctaagatagccactcactaaccaaaggataagttatagtatcaatcgtttaaatctcagtgtgcctttaaattaatgtgcaccraagttttttgcttccagccatgagagagtagcaagtacctgagtagctctccttttcaggtattggacagtaggccccacacggctgtgatccttgagagaaggaaaacacattagttttgctccacaactatcttacaattgtccaggtttttctgctgaagagaaaaacatttttctagaatgtaggaaggtagaatacaggcaaggcagtagtttcagttaaggagggagagactggagttttgggctgttgaagcagctgaaatttctgaagataagtagctgtggaacagggactcccccgcaagtctacatggagattcaccaccagtctgggccaacagctaagctgaatatagacatgacaaaactctgcagggcctaacagagattacctgctgcatgtagtgcattattgagagacattggagttccatcacagcagggcagagagacctcactgagcatgtcagggattcaattgagatgctggaaaggccttgccttaaaagcaatagtcaggctaaaaagcatgtcttagagcaaaaatcaaaatgttgtttctccatagcacatactgtaacaaagaatggtaagaaatcagacaggaccagggaaatttataagaatgaaacaacacccattaaaaaaaaaacaacatgatacagattctctacaatggataattaacaataaaaaatttaataggctggacacgatggtgcacgtctatagtcccagccacttgggaagctaacaaaggaggatcgcttgagtccaggagttcaaaaccagcccagggaaacatagcaagactctgtttctaaacaaaccaaccaacaaacccaacaaacaaatatggacaagtgaaaaacacacaaaagtgatctatacttaagagaaagcagtcaatagaaactgatcctgagatggcccagatataggaggaattggcaggaaagaaatttttaaagtaactattataaatatgttcaggtatttaaaggaaaatagaatgaacaagtggacaatgaacaaatagagaatctcag

SEQ ID NO: 698503 - DNA, 1203 bp, Homo sapiens
aataagtgaaaaataactcaaaattttatcagtgaaggaatagagaggtaaaatatgggatgaacatgtgatggcatactgtagagcagttacatggaattaattacatcttcactttttacgtggatgaatctgaaaacatgttgatggaaaaaataaagaacagaatgaagcaacattagtataaccccatattagttgggagtgtctttagcaccactgacakaaaacttagctacagttgcttaatcaaataggggtttacttttctcatgctgtaagaagtccagaggtagactatccagagctggtgcagctgctctagcatatatacaaggaaggttctttctgtctcactgttcttagcgtatggctccatcttatggctttgagatatttagtaacagccccaatgcttaaaatggaatatttcagtttatttagcaattctattaacctgggcttttccatgtctttagtattagttttcaaatagacttgaagtaagtaaatacttttaaaatcaggtgaattcaaatcaagaagaagctgagaaaatatgtatatctcaagtgcataacctctggtgcccatgatggtatgtaaaatgtttcaggaagatgaggtcctctgtgtgacttggggaggtgaaagtgtaggtaggtgttaggataagtaccaagtagacaatctgaacaagattgagtcatgtacatttccacgccgccaccaatcttcatctgtggaacaacaagaatgtaatctctagttctctccattatcacaagagggtttaataagtttggccttatatacagtggtttctgcttctaacctgcaactgattgcacatctttgcatttgagtaggtacagttcgttgaagaggaagaagagaaatagagggagtcttatgagataaattattctctgtttgactattagctgtcttgtggattctgaatatgtctgtgccagtttagataatttaagtatttttaattatgtcactgtattatagaaaatatttctttcaaacaaaaatatggcaatttgaaaaatctgactccttttctcacacagagtatcacttttggtgcaaggcactataacatatgctttattatgaataacaacaatagaaattttactgactaccatttattcagtttataccatgtagcaggtattgtagaaaataatt

SEQ ID NO: 698504 - DNA, 1203 bp, Homo sapiens
aataagtgaaaaataactcaaaattttatcagtgaaggaatagagaggtaaaatatgggatgaacatgtgatggcatactgtagagcagttacatggaattaattacatcttcactttttacgtggatgaatctgaaaacatgttgatggaaaaaataaagaacagaatgaagcaacattagtataaccccatattagttgggagtgtctttagcaccactgacagaaaacttagctacagttgcttaatcaaataggggtttacttttctcatgctgtaagaagtccagaggtagactatccagagctggtgcagctgctctagsatatatacaaggaaggttctttctgtctcactgttcttagcgtatggctccatcttatggctttgagatatttagtaacagccccaatgcttaaaatggaatatttcagtttatttagcaattctattaacctgggcttttccatgtctttagtattagttttcaaatagacttgaagtaagtaaatacttttaaaatcaggtgaattcaaatcaagaagaagctgagaaaatatgtatatctcaagtgcataacctctggtgcccatgatggtatgtaaaatgtttcaggaagatgaggtcctctgtgtgacttggggaggtgaaagtgtaggtaggtgttaggataagtaccaagtagacaatctgaacaagattgagtcatgtacatttccacgccgccaccaatcttcatctgtggaacaacaagaatgtaatctctagttctctccattatcacaagagggtttaataagtttggccttatatacagtggtttctgcttctaacctgcaactgattgcacatctttgcatttgagtaggtacagttcgttgaagaggaagaagagaaatagagggagtcttatgagataaattattctctgtttgactattagctgtcttgtggattctgaatatgtctgtgccagtttagataatttaagtatttttaattatgtcactgtattatagaaaatatttctttcaaacaaaaatatggcaatttgaaaaatctgactccttttctcacacagagtatcacttttggtgcaaggcactataacatatgctttattatgaataacaacaatagaaattttactgactaccatttattcagtttataccatgtagcaggtattgtagaaaataatt

SEQ ID NO: 698505 - DNA, 1203 bp, Homo sapiens
aataagtgaaaaataactcaaaattttatcagtgaaggaatagagaggtaaaatatgggatgaacatgtgatggcatactgtagagcagttacatggaattaattacatcttcactttttacgtggatgaatctgaaaacatgttgatggaaaaaataaagaacagaatgaagcaacattagtataaccccatattagttgggagtgtctttagcaccactgacagaaaacttagctacagttgcttaatcaaataggggtttacttttctcatgctgtaagaagtccagaggtagactatccagagctggtgcagctgctctagcatatatacaaggaaggttctttctgtctcactgttcttagcgtatgkctccatcttatggctttgagatatttagtaacagccccaatgcttaaaatggaatatttcagtttatttagcaattctattaacctgggcttttccatgtctttagtattagttttcaaatagacttgaagtaagtaaatacttttaaaatcaggtgaattcaaatcaagaagaagctgagaaaatatgtatatctcaagtgcataacctctggtgcccatgatggtatgtaaaatgtttcaggaagatgaggtcctctgtgtgacttggggaggtgaaagtgtaggtaggtgttaggataagtaccaagtagacaatctgaacaagattgagtcatgtacatttccacgccgccaccaatcttcatctgtggaacaacaagaatgtaatctctagttctctccattatcacaagagggtttaataagtttggccttatatacagtggtttctgcttctaacctgcaactgattgcacatctttgcatttgagtaggtacagttcgttgaagaggaagaagagaaatagagggagtcttatgagataaattattctctgtttgactattagctgtcttgtggattctgaatatgtctgtgccagtttagataatttaagtatttttaattatgtcactgtattatagaaaatatttctttcaaacaaaaatatggcaatttgaaaaatctgactccttttctcacacagagtatcacttttggtgcaaggcactataacatatgctttattatgaataacaacaatagaaattttactgactaccatttattcagtttataccatgtagcaggtattgtagaaaataatt

SEQ ID NO: 698506 - DNA, 1246 bp, Homo sapiens
tgtttgagttacatgttcaaactggcattttactagctttcactaaattacttttaaaattctggaccagtttaaaatgtttaaatagtatattacaattttattcctggggccagaataagattttattactcttttatagagcttttaaattactataagtgcttcttgtttcatagaagatgaatactctagcaaaataaagttctcattacctggctggaggaaagatacatatttaaacatttaataattgccagatacactataattacacttttaattctaacagaataatacaaaagttctacaaatgataatgtgatatgccacagaaaataagtttaatatgtacagaaggatacctcatgatgtttgtttctttttgcaatctcacttggcatctttccatctttggtttgtagcattttattagctccaagttcaagcaacttcaaaactatatttttatgaccctgacgtgctgcccacgttaaagcctgtaagtagggggaaaagaagattgtttaaagagaaggagtgtatatgagacagacaggaaaagttttcaacagtatttatgacacaataaaaaagagaacatagttaattaatggaatgatgcaatctcttcattttacaatataatgtaaacatatttccaaagttgtaattgcaaagctgactgcaaagctcattgattttttaaaaccagtgttttatacaattaactgatgttaaggaataaaatgatttatttgccaatcactgaagggttttctacaaaaaataattcttatgtatattttagagcccagattttgctgtrtgttacaatttttttttttaatcaagagtaaggactacgagagtcagttaattcctcatttctatttcttttcttttctttttttttgagatggagtttcgctcttgttgcccaggctgaagtgcagtggtgcgatcttggctcactacaacctctgcctcttgggttcaagcgattctcctgcctcagcctcctgagtagctgggattaaaggcacgtgccaccatgcctggctaattttttgtatttttagtagagacagggtttcaccatgttggccaggctggtctcaaattcctaacctcaaatgatccgcctgcctcggcctcccaaagtgcagggattacaggtgtgagtcaccatacccttctatttcaactgttgctttttttcaccagatagcaattatattccagc

SEQ ID NO: 698507 - DNA, 1118 bp, Homo sapiens
tctgtttccagcctggcctctgcccgttaattagagtatctcaaaaatgcttaaatgtgcctcccactctccccaccttgtcttgtccacacccttctcttttctctgagatgaagctaagcatcccagagggaagaaagcaaaaagaacattttgtgaatatccacctcgtgcccagctcagagctggaagcttgacattcattcagtcctcaaaaaaagacctgcaatgtaggtataattatcatcccattgtatacagggagaaactaaggcaagcttagagaggttaagcaatttgcccaaaattacacagctagtgattgatggagctatcatttgagtccaagttctttcattccaaagcccatgctatgtgtcctataatgttgaagtggtgagagtgaacacccttgtctttttcctaaacttgaagggaaagcattcagtctttcaccattaactatgacgttgttcactgtggggtttttagaagtgtcctttatcaggttaaggaagttcccttctatttctagtttaagtatttttattatgaaaaggtgttgggttttgtcaaatgtttttctgtctattaaaatgactgtgtaagttttttcttttattccattaatgtggtatattacattgattgacttttaaacattaaaccagacttgcattcttgggataaatgccatttggtcatggtgtataatcattttcttatgttgctagattttgtttgctagtatttttcttgaggatttttatgtctatatatccgaggtatttgtctatagttttcttttctgtacagcagcaataggaaacaaatataatatcccagtccagggtctgactcttaccctaaatcaagccaaagacctggctcatcaacsctgcagccacaggtctctctcccactattatctccagatggatatatcaaccagaatgtcactttacttatctgcaaggagagctctacctgtaagacagaatcctcatcttggcatgatcagcacctcctatcagaccaacacaggaagtcaacccatatttggatggaggctcaggaacacagagttggaacaggcagaagcagatgagtcactgctc

SEQ ID NO: 698508 - DNA, 1368 bp, Homo sapiens
gaacagtgcaggggttcaatgatagctcactgtagcctcaaactcctggactcaagcaatcctcctgcctcagcctcctaagtagctgggattacaggcatgtgtcactatgcccagctaatttttatttttatttttgtagggataggttttgctatgctgcccaagctagtctcaaattcccgggctcaagtgatcctcctgcctcagcctcccagaatgttgggattacaggcgtgagccaccatccatgacaataagcttatagatgaggaagatacctaagtcttctttcgcctgcttctcctgaactatgtaatctctactaacgtagttggtattttttatctttcatctacccctacaaaaactcatggtattagctttagctcactgtacaaatctgtgattcccagctttgtgccttctccaaatgaaatcaacttgctttccagatcttcattcacagcactagcttgttttgctccaatgacaggagggtcctgctaggccgatacctcactgatcaccctttgggacagtccttcaggcagttctgcaaaccctccaaaccatttggccctcagcccatataactggtccaggatgtcaggaaaggtgcttgtccaaagcatttatgaagatccactagaatgcagcaacttcatttctctcaaccattcttcttagaaaacccaggcaaagaaaaaatgaagttggtgtgacatgacttgttcataaccaagtcaaatctcttacattttcctaatattaagtaatgctgaataatctacaaaagcttgaaaagcaatagtttttccattttatttatttattttgagaccgagtctcactctgttatccgggctggagtgcaatggcatgatctcagctcactgcaacctctgcctcccaggttcaagtgattctcatgcctcagcctcccgagtagmtgggattacaggctcctgccaccacgcccggctaatttttatatttttagtagagatggggtttcttcatgttggccaggctggtctcaaactcctgacctcaggtgatccacccgcctcagcatcccaaagtgctaggattacaagcctgagccaccgcacccagccactttttccattttatatgttaaagtcatgttatcacctttggtgttgacctctttattctgataaattttattcatagaaaagcccttaatgtccaactttttaataaaaacacattattctaacatatttaagtatttctttagccaacctacaaataaatgaagaatctaaattagtcaaaatacatcactaactgggaacatttagaatgcagacaagcaactaggcactgtttggaagaacc

SEQ ID NO: 698509 - DNA, 1368 bp, Homo sapiens
gaacagtgcaggggttcaatgatagctcactgtagcctcaaactcctggactcaagcaatcctcctgcctcagcctcctaagtagctgggattacaggcatgtgtcactatgcccagctaatttttatttttatttttgtagggataggttttgctatgctgcccaagctagtctcaaattcccgggctcaagtgatcctcctgcctcagcctcccagaatgttgggattacaggcgtgagccaccatccatgacaataagcttatagatgaggaagatacctaagtcttctttcgcctgcttctcctgaactatgtaatctctactaacgtagttggtattttttatctttcatctacccctacaaaaactcatggtattagctttagctcactgtacaaatctgtgattcccagctttgtgccttctccaaatgaaatcaacttgctttccagatcttcattcacagcactagcttgttttgctccaatgacaggagggtcctgctaggccgatacctcactgatcaccctttgggacagtccttcaggcagttctgcaaaccctccaaaccatttggccctcagcccatataactggtccaggatgtcaggaaaggtgcttgtccaaagcatttatgaagatccactagaatgcagcaacttcatttctctcaaccattcttcttagaaaacccaggcaaagaaaaaatgaagttggtgtgacatgacttgttcataaccaagtcaaatctcttacattttcctaatattaagtaatgctgaataatctacaaaagcttgaaaagcaatagtttttccattttatttatttattttgagaccgagtctcactctgttatccgggctggagtgcaatggcatgatctcagctcactgcaacctctgcctcccaggttcaagtgattctcatgcctcagcctcccgagtagctgggattacaggctcctgccaccacgcccggctaatttttatatttttagtagagatggggtttyttcatgttggccaggctggtctcaaactcctgacctcaggtgatccacccgcctcagcatcccaaagtgctaggattacaagcctgagccaccgcacccagccactttttccattttatatgttaaagtcatgttatcacctttggtgttgacctctttattctgataaattttattcatagaaaagcccttaatgtccaactttttaataaaaacacattattctaacatatttaagtatttctttagccaacctacaaataaatgaagaatctaaattagtcaaaatacatcactaactgggaacatttagaatgcagacaagcaactaggcactgtttggaagaacc

SEQ ID NO: 698510 - DNA, 590 bp, Homo sapiens
tggtgagttggtgtgtgggcaggcaggcacaaagcagcccagccgtctgcacatgctcacatgtgaccttgggctagtcccttcccctcccagagcctcagtttccaccacatctgtcaaatgggaacccccaaccgcccccactttacggagctgttggggaaggtatgtacygggctcagcccaggcctggcacagtggatgctcccagtgcccgctgcccagtaacactcatctccatgccctgcgagagttgacatagacgagactcgaactggcttctgctccagctgaagtgccaatttgggtaggggccaagatgggaggtggtagcacctgcaggggctgaggaggtatggcatgctgtccctccacttaagggcctcatggagcacttcttggagaaggtgatatctgaggtcttgcgggaggcaccgggtctgtgggagaccgggtagtggggaccagggtgcatgaaggcctcaggtagacagcccctggaggatcagtctggggctggcacatcaagcgcatgctgtagggtgtggagagtgactacgcagaaggcagggacaggggagtggacacag

SEQ ID NO: 698511 - DNA, 590 bp, Homo sapiens
tggtgagttggtgtgtgggcaggcaggcacaaagcagcccagccgtctgcacatgctcacatgtgaccttgggctagtcccttcccctcccagagcctcagtttccaccacatctgtcaaatgggaacccccaaccgcccccactttacggagctgttggggaaggtatgtactgggctcagcccaggcctggcacagtggatgctcccagtgcccgctgcccagtaacactcatctccatgccctgcgagagttgacatagacgagactcgaactggctyctgctccagctgaagtgccaatttgggtaggggccaagatgggaggtggtagcacctgcaggggctgaggaggtatggcatgctgtccctccacttaagggcctcatggagcacttcttggagaaggtgatatctgaggtcttgcgggaggcaccgggtctgtgggagaccgggtagtggggaccagggtgcatgaaggcctcaggtagacagcccctggaggatcagtctggggctggcacatcaagcgcatgctgtagggtgtggagagtgactacgcagaaggcagggacaggggagtggacacag

SEQ ID NO: 698512 - DNA, 590 bp, Homo sapiens
tggtgagttggtgtgtgggcaggcaggcacaaagcagcccagccgtctgcacatgctcacatgtgaccttgggctagtcccttcccctcccagagcctcagtttccaccacatctgtcaaatgggaacccccaaccgcccccactttacggagctgttggggaaggtatgtactgggctcagcccaggcctggcacagtggatgctcccagtgcccgctgcccagtaacactcatctccatgccctgcgagagttgacatagacgagactcgaactggcttctgctccagctgaagtgccaatttgggtaggggccaagatgggaggtggtagcacctgcaggggctgaggaggtatggcatgctgtccctccacttaagggcctcatggagcacttcttggagaaggtgatatctgaggtcttgcgggaggcaccgggtctgtgggagaccgggtagtggggaccagggtgcatgaaggcctcaggtagacagcccctggaggatcagtctggggctggcacatcaagcgcatgctgtagggtgtggagagtgactacgcagaaggsagggacaggggagtggacacag

SEQ ID NO: 698513 - DNA, 730 bp, Homo sapiens
acctgttgagtcttgtggcttgagagtgctaaggattctcagctctgctgcttattagctgcatattctttttttttttttttttgagatggagtttcactcttgttgcccaggctggagtgcagtggcacgatcttggctcactgcaacctccacctcctgggttcaagtgattctcctgcctcagcctcctgagtagctgggattacaggcatgcaccaccacatccagctaattttacattattagtagagacggggtttcaccacgttggccaggctggtctcgaactcctgacctcaggtgatctgcctgcctcagcttctcaaagtgctgggattacaggtgtgagccaccacacctggctttagctgcataatcttagataagtttatttttccaaatctgttgcttcatatgttaaagctggggtgtgtgcttatgaaaactgtccacctctcctatraagtgttttgtgacctataaagttgtgtaaggagtaaatttgagattttctttttttctttctttctctttctgggggatatggcactgtcagtttcagattttcagtccttttagcttcttacttagacctactggagctcctcctggccttcattttcgcctggtgggaagcctagctccaggacagatgagtacacagtacatcagggcagagcatccatttactccattatgaaggtcttgtctgtctatatgccatcag

SEQ ID NO: 698514 - DNA, 623 bp, Homo sapiens
tcgcgccctccaacccctcgccttttgtttaatctccactaaggaacgtttgtgcrtttctctagagcagtggttctcagacttcagcgtgtataagattacccgggggcatattaaaacaccgattgttgggctgtccacccacagtttccggttcagtatgtctgggatgaggtctgagattctcatttctaacaagttcccatgagatatggaagcattcccagatcacactttgagatagaccgtttagagcttacaaaccctcccacacgttagcttatttatttttattttattttatttttttttgagacggagtctcagtctgttgcccaggctggagtgcggtggcgcgatcttggctaactgcaacctccggccccgggttcaagcgattctcctgcctcagcctcccgagtagctgggattacaggcgcctgccactgtgcccggctaatttttgtatttttagtagagacgggggtttcaccatcttggccaggctggtcctgaactcctgacctcgtgatccacccgcctcggcctcccaaagtgctgagattacaggcgtgagccaccgcgcccagccaccttatttaaaacctaacagccggtcctga

SEQ ID NO: 698515 - DNA, 623 bp, Homo sapiens
tcgcgccctccaacccctcgccttttgtttaatctccactaaggaacgtttgtgcatttctctagagcagtggttctcagacttcagcgtgtataagattacccgggggcatattaaaacaccgattgttgggctgtccacccacagtttccggttcagyatgtctgggatgaggtctgagattctcatttctaacaagttcccatgagatatggaagcattcccagatcacactttgagatagaccgtttagagcttacaaaccctcccacacgttagcttatttatttttattttattttatttttttttgagacggagtctcagtctgttgcccaggctggagtgcggtggcgcgatcttggctaactgcaacctccggccccgggttcaagcgattctcctgcctcagcctcccgagtagctgggattacaggcgcctgccactgtgcccggctaatttttgtatttttagtagagacgggggtttcaccatcttggccaggctggtcctgaactcctgacctcgtgatccacccgcctcggcctcccaaagtgctgagattacaggcgtgagccaccgcgcccagccaccttatttaaaacctaacagccggtcctga

SEQ ID NO: 698516 - DNA, 623 bp, Homo sapiens
tcgcgccctccaacccctcgccttttgtttaatctccactaaggaacgtttgtgcatttctctagagcagtggttctcagacttcagcgtgtataagattacccgggggcatattaaaacaccgattgttgggctgtccacccacagtttccggttcagtatgtctgggatgrggtctgagattctcatttctaacaagttcccatgagatatggaagcattcccagatcacactttgagatagaccgtttagagcttacaaaccctcccacacgttagcttatttatttttattttattttatttttttttgagacggagtctcagtctgttgcccaggctggagtgcggtggcgcgatcttggctaactgcaacctccggccccgggttcaagcgattctcctgcctcagcctcccgagtagctgggattacaggcgcctgccactgtgcccggctaatttttgtatttttagtagagacgggggtttcaccatcttggccaggctggtcctgaactcctgacctcgtgatccacccgcctcggcctcccaaagtgctgagattacaggcgtgagccaccgcgcccagccaccttatttaaaacctaacagccggtcctga

SEQ ID NO: 698517 - DNA, 623 bp, Homo sapiens
tcgcgccctccaacccctcgccttttgtttaatctccactaaggaacgtttgtgcatttctctagagcagtggttctcagacttcagcgtgtataagattacccgggggcatattaaaacaccgattgttgggctgtccacccacagtttccggttcagtatgtctgggatgaggtctgagattctcatttctaacaagttcccatgagatatggaagcattcccagatcacactttgagatagaccgtttagagcttacaaaccctcccacacgttagcttatttatttttattttattttatttttttttgagacggagtctcagtctgtkgcccaggctggagtgcggtggcgcgatcttggctaactgcaacctccggccccgggttcaagcgattctcctgcctcagcctcccgagtagctgggattacaggcgcctgccactgtgcccggctaatttttgtatttttagtagagacgggggtttcaccatcttggccaggctggtcctgaactcctgacctcgtgatccacccgcctcggcctcccaaagtgctgagattacaggcgtgagccaccgcgcccagccaccttatttaaaacctaacagccggtcctga

SEQ ID NO: 698518 - DNA, 623 bp, Homo sapiens
tcgcgccctccaacccctcgccttttgtttaatctccactaaggaacgtttgtgcatttctctagagcagtggttctcagacttcagcgtgtataagattacccgggggcatattaaaacaccgattgttgggctgtccacccacagtttccggttcagtatgtctgggatgaggtctgagattctcatttctaacaagttcccatgagatatggaagcattcccagatcacactttgagatagaccgtttagagcttacaaaccctcccacacgttagcttatttatttttattttattttatttttttttgagacggagtctcagtctgttgcccaggctggagtgcggtggcgcgatyttggctaactgcaacctccggccccgggttcaagcgattctcctgcctcagcctcccgagtagctgggattacaggcgcctgccactgtgcccggctaatttttgtatttttagtagagacgggggtttcaccatcttggccaggctggtcctgaactcctgacctcgtgatccacccgcctcggcctcccaaagtgctgagattacaggcgtgagccaccgcgcccagccaccttatttaaaacctaacagccggtcctga

SEQ ID NO: 698519 - DNA, 1172 bp, Homo sapiens
tacctatatcatatagagtgggtattttaattttttttttttttttgagatggagtcttactctgttgcacaggctggagtgccactgtgccatctcagctcactgcaacctcggcctcctgagttcaagtgattctcctgcctcagcctcccaagaagctgggattacasacacaccaccaccatacccaggtaattttcgtatttttgtagatacgggtttcaccacattgaccaggctggtctcaaactcctgacctcaagtaatctgccggccttgggctcccaaagtgctgggattacaggcatgagccaccacactcggcctaatttgtattattgatattagcaggtttattgctaattagtgtttcttctttgagtttttctttttccttatttttttctgtataagcctttgatctgctatgtatgttgcaaatttttccccatctttctcacttgttctttaactttgttcagagtatattctgtcatgtaaatattttaaattttcatgtggtcaaatatgttggtcttttaggatttctaggttttacactgtgcttagaaaggcctttcctatctcatgatgataaaaatactcattcttctggagttttgttgtcatctttttgcaaatcatttattcatctagatagagcctgaatataaagatctaacttttttctttccaaatagtttaaaagacctcttatacctccattctccaatctgaatagctgaatgaatgagagagtgaaaaatagtactggcaattagttgaatgggctcttactgtttttcaccaccgcctcagatccaggacaaagggaagggactgaattcccattctgcagaggttacacctccctccttattttgtcatatcttccctgagtctatataataattagttagcaaaataacataattggaaaaaaagcttctctgagatgtgtagatactttctcaaatgtgcactgactaaggtcttatcataattttcttaaggaacaactctctttccatcctaaatgccagaccaatgatatgatctttggcaatgtactctggaagaaataaagtagcatctcattcattccttgctgtcttcagatgacagtctatggagtatgggtgtatttgtaggggtgaaagtgacaaaaaag

SEQ ID NO: 698520 - DNA, 641 bp, Homo sapiens
tcacagatgaactagctgcagtttttgcatacaaataacctgtaatttgaggtatgagataaagaaaaaaaatttttgtggggggggcgggtaatacaatgccagagcatctcagaatgctgagtcagcctctttagcacatacttttaaaaacaagtgtggcttgtggaaagccacattatgctattgcaaatgtygaaaggcaagttgctagttttgctgtgactctaaacaactagaggatttaaaatgggagtttgcccacgagttacaaataaatttagatctttcagaatattctgtaataaacttaaactatagtgagagcgcatattaacataatggacctcagtgtcatttgaggtcaaatactaaactggtgacttcataataacatgctgtggagaaaatataatttagaatccatgagtatttttgcctgacaaataagcaacctgatcttagaacctgatgagacgaccactttaaaagtaaatgaaatactatggtgtgagagataaaataaaaaatatcatactattaaagataatcacaatgagaaatagacagtaaattttaagtgaatgacaagaattatattttttcctttggaaatctaactcctgaggggacagcaattt

SEQ ID NO: 698521 - DNA, 641 bp, Homo sapiens
tcacagatgaactagctgcagtttttgcatacaaataacctgtaatttgaggtatgagataaagaaaaaaaatttttgtggggggggcgggtaatacaatgccagagcatctcagaatgctgagtcagcctctttagcacatacttttaaaaacaagtgtggcttgtggaaagccacattatgctattgcaaatgttgaaaggcaagttgctagttttgctgtgactctaaacaactagaggatttaaaatgggagtttgcccacgagttacaaataaatttagatctttcagaatattctgtaatraacttaaactatagtgagagcgcatattaacataatggacctcagtgtcatttgaggtcaaatactaaactggtgacttcataataacatgctgtggagaaaatataatttagaatccatgagtatttttgcctgacaaataagcaacctgatcttagaacctgatgagacgaccactttaaaagtaaatgaaatactatggtgtgagagataaaataaaaaatatcatactattaaagataatcacaatgagaaatagacagtaaattttaagtgaatgacaagaattatattttttcctttggaaatctaactcctgaggggacagcaattt

SEQ ID NO: 698522 - DNA, 1208 bp, Homo sapiens
atgatttatctatgagaatgacagttcacttccttatgcaaattcacagacaagctgattgaaattaatytggggagatatggcaatggaggagactctttggaatgcactactaaactataatttggatcctaaacatcttcctaggaagaaaattaaaaataataataaatgaataaaagctaagaccacttcatgtaaactttcctcagccctcagccacttctaacattgtagctcagaatctctttttggttaccaatttgtaaaccaaagtacctgaggtaggtctcaataaatttagaaagtttattttgccaaggttaagaacacacccatgatatagcctcagaagttccctacaacatgtatccagggtggtcagggtacagcatggttttacgtattttagagagacatgagacatcattcaatacatgtaaaatgtacattgcttcagtctgggaagatgggaccactagaagggaagcttccaggtaataggcagatttaaagattttctaattggcaataagttggaagaattattatcaatataaaggaatgtctgggttacaataaggggttgtgtagaccaaggttttatcatgcacatgaagtctccaggtagcagtcttcagagagaataaattataaattttttgtccgacttaaagagtcttctctatcagtaattccaaaaaggaggagggtataattaggaatgtccatcaccctctttgtatcatggacttaactagtttctcaggttaactttggaatacccttgccaagaggaagggtctgtgttggtcagcgttctctagaggaacagaactaataggatatatatattagtttatataaacaaatatataaactaacaaatatataaacaaaaagcggagtttatcaaggagtattgactcacatgatcacaaggtgaagtctcacggtgggccatctgcaagctgaagaacaaggaaatcaatctgattccaaaacctcaaaagtacggaagccaacaatgcagtcttcactctgggaagaggaaggcacaagcttcagaatacagggaatgttacagaggaaaagtgaaatcccacaatgaccatagtgcaacaggcccagaaacaacagtatagattgatttagaaagaagaagagcagaataaattatatctctttgaaataaagtttcaattcat

SEQ ID NO: 698523 - DNA, 1208 bp, Homo sapiens
atgatttatctatgagaatgacagttcacttccttatgcaaattcacagacaagctgattgaaattaatctggggagatatggcaatggaggagactctttggaatgcactactaaactataatttggatcctaaacatcttcctaggaagaaaattaaaaataataataaatgaataaaagctaagaccacttcatgtaaactttcctcagccctcagccacttctaacattgtagctcagaatctctttttggttaccaatttgtaaaccaaagtacctgaggtaggtctcaataaatttagaaagtttattttgccaaggttaagaacacacccatgatatagcctcagaagttccctacaacatgtatccagggtggtcagggtacagcatggttttacrtattttagagagacatgagacatcattcaatacatgtaaaatgtacattgcttcagtctgggaagatgggaccactagaagggaagcttccaggtaataggcagatttaaagattttctaattggcaataagttggaagaattattatcaatataaaggaatgtctgggttacaataaggggttgtgtagaccaaggttttatcatgcacatgaagtctccaggtagcagtcttcagagagaataaattataaattttttgtccgacttaaagagtcttctctatcagtaattccaaaaaggaggagggtataattaggaatgtccatcaccctctttgtatcatggacttaactagtttctcaggttaactttggaatacccttgccaagaggaagggtctgtgttggtcagcgttctctagaggaacagaactaataggatatatatattagtttatataaacaaatatataaactaacaaatatataaacaaaaagcggagtttatcaaggagtattgactcacatgatcacaaggtgaagtctcacggtgggccatctgcaagctgaagaacaaggaaatcaatctgattccaaaacctcaaaagtacggaagccaacaatgcagtcttcactctgggaagaggaaggcacaagcttcagaatacagggaatgttacagaggaaaagtgaaatcccacaatgaccatagtgcaacaggcccagaaacaacagtatagattgatttagaaagaagaagagcagaataaattatatctctttgaaataaagtttcaattcat

SEQ ID NO: 698524 - DNA, 1208 bp, Homo sapiens
atgatttatctatgagaatgacagttcacttccttatgcaaattcacagacaagctgattgaaattaatctggggagatatggcaatggaggagactctttggaatgcactactaaactataatttggatcctaaacatcttcctaggaagaaaattaaaaataataataaatgaataaaagctaagaccacttcatgtaaactttcctcagccctcagccacttctaacattgtagctcagaatctctttttggttaccaatttgtaaaccaaagtacctgaggtaggtctcaataaatttagaaagtttattttgccaaggttaagaacacacccatgatatagcctcagaagttccctacaacatgtatccagggtggtcagggtacagcatggttttacgtattttagagagacatgagacatcattcaatacatgtaaaatgtacrttgcttcagtctgggaagatgggaccactagaagggaagcttccaggtaataggcagatttaaagattttctaattggcaataagttggaagaattattatcaatataaaggaatgtctgggttacaataaggggttgtgtagaccaaggttttatcatgcacatgaagtctccaggtagcagtcttcagagagaataaattataaattttttgtccgacttaaagagtcttctctatcagtaattccaaaaaggaggagggtataattaggaatgtccatcaccctctttgtatcatggacttaactagtttctcaggttaactttggaatacccttgccaagaggaagggtctgtgttggtcagcgttctctagaggaacagaactaataggatatatatattagtttatataaacaaatatataaactaacaaatatataaacaaaaagcggagtttatcaaggagtattgactcacatgatcacaaggtgaagtctcacggtgggccatctgcaagctgaagaacaaggaaatcaatctgattccaaaacctcaaaagtacggaagccaacaatgcagtcttcactctgggaagaggaaggcacaagcttcagaatacagggaatgttacagaggaaaagtgaaatcccacaatgaccatagtgcaacaggcccagaaacaacagtatagattgatttagaaagaagaagagcagaataaattatatctctttgaaataaagtttcaattcat

SEQ ID NO: 698525 - DNA, 601 bp, Homo sapiens
atttgtttgtaaaaacattttataactatatttcaatattatttgtgtcttttgtaacctcatttattttattatattcatttaaataccattttctgatatgggcctataggattcaccagaccaccaaaggggccagggtaccaatacaggttaatacaggttacctgccacatagtaaacagtgctctcattcagacaaggttaacctctaggtgggaggacaacagcaaaatcctgtctcaccaataaataacattgtcttctaaatctccaaatgtgtgtctaatgacatgccccaaaatggacctgaaatcagttcttcccatgattggatttcaactttacccccttycctaactaaacacagaagaaagatcgtaatgagccaagaacagctgagggacaaagaaagatcttgcccctgctacaaatgcttttggaaggcagagagctggcttttcatactcagatcacaaactcaccaactagcaacagagtgtatgtccccactccaaaagttctggaacacacaatcgctgggatcacagaagggaaaaatgggctgaagtaattctaagaatttctcacttaggagcac

SEQ ID NO: 698526 - DNA, 621 bp, Homo sapiens
ctgggtatgtccttattagcagtgtgaaaaggagctaatacagtgtgagagtgtttttagaaaagattagcatttgaattgctatacctagtaaaaaatattttcttcagcattgtgggtgagcatcatccaatttatagacagcctagatagaacaaaaaggcagaggaagggcaarttgactctctgtgcttaagcagagacatccatcttctcctgcccttggacatgggtgctttttattttccatcctttggacttgtaccagatcttacactattgttccccagttcttaggcttttggatttcgagtaggatttacacccactccccattcttaggtctttggaattggaataggactcacaccattggctccctggttctcaggcctttgggcttcaactgtaactataccatggctttccataatctccagcttgcagacagtagattgcaggacttctcagactccataattacacaagcaaattctgcatactaaatctctttccatatttctaaatatatcccattgattctatttctccggaaagccccaactagtacaaaagaaacccatttcttcagatttcaatcaaaatatgtaacaatctttt

SEQ ID NO: 698527 - DNA, 621 bp, Homo sapiens
ctgggtatgtccttattagcagtgtgaaaaggagctaatacagtgtgagagtgtttttagaaaagattagcatttgaattgctatacctagtaaaaaatattttcttcagcattgtgggtgagcatcatccaatttatagacagcctagatagaacaaaaaggcagaggaagggcaagttgactctctgtgcttaagcagagacatccatcttctcctgcccttggacatgggtgctttttattttccatcctttggacttgtaccagatcttacactattgttccccagttcttaggcytttggatttcgagtaggatttacacccactccccattcttaggtctttggaattggaataggactcacaccattggctccctggttctcaggcctttgggcttcaactgtaactataccatggctttccataatctccagcttgcagacagtagattgcaggacttctcagactccataattacacaagcaaattctgcatactaaatctctttccatatttctaaatatatcccattgattctatttctccggaaagccccaactagtacaaaagaaacccatttcttcagatttcaatcaaaatatgtaacaatctttt

SEQ ID NO: 698528 - DNA, 1208 bp, Homo sapiens
tgatgattttttgttctttgacccaagttgttttagtatagtttcaaaatcctttaagatgttgatgtgtttgtttatcattttgttctttatttttcatttcataacgttatctttcaatatatagaacggaccwtctttacatctataggatttcatctactaatgcaaacggcatggtgcacatgccactgtgggctttcagcacaacagataagtgtgtgtgtgtgtgtgtgtgtgtgtgtgtgtgtaaagaatctacatttaatgtagccaaaacattacacgtatccatacaattatgtatcgctcttcggtatcacaaagagcacatctaagctgttactattaagaccttaagatttttacaaaggcaaacacaacaaacaaaacacttttcaaccaaaatagagctaaatgtaacctgaaagggaactaagaagcagacgttcattcctatgtcatcaaacatagggtttttcctaccatgtttcggttggagtatggcttcctctaccgcagtgtttactaaatgttgtctgcaggctagaatcacctgcgaaatttctagacattttaaatcccaggccaaacccatgaacaattaaatcaaagtctctggaatggaatacaggcatcagtatttatgaatcaccccaaataattccaatgtgcagattccatgcacacgatctaggacacacacagctgaaccttgcttgcaattaatcctcagtgttgtaagtcagttgttctcaaacttgagctgcatcagaataactggaaaagctgttaaaacacagatttctgggcctcaccttagggtgtctgattcagtaagtctggaatgaagcataagaactgacatttctaacaagttccctgataatgttgatgctgctattcctcaaactacattttgagaatctttttgtattgagccttagtttcagaaaagaaaacatatttgaaattaatctttttattattattattttttattacactttaagttctagggtacctgtgaacacatgtaggtttgttacatatgtatacaaaaaattataatttaggaaaacataatgaatgagttatttacacaccaacaacccagaggaactgctggagaattatgctggtaaaaaaaagctaaccatcgaaagttatatgctgtacaattccatatatgtaacattctttaaaaa

SEQ ID NO: 698529 - DNA, 2173 bp, Homo sapiens
aaaactcaaaatctgcacaaataggggtggtggaaggagagaaagaaaactccatgccagaaataacatgcttagcagagagagagagagaagaagaagaagaaggaggaggaggaggaggagaagaggggggaagggggaaggggaaggggaagggagagagagagaaggaaggaaggagaaagaaaagaaagagaaagaaaagaaaagaaggaagaagaggaaggaggagaaaaaaacagcagaaataaagtaatgtggcacctatatccacagacatatcttccagcaggtaaagtgtaaagtagtttttattttgaaaagttgattgatacacacagggctagataactgataaactgcagataagaaactgggtttggtgcttgcctgtgggaaatgaggatgttccttaaatgtcacctagatggttaaaaggaagggaagtatgagtgagtcactgccgatttgatgagtaagggttccttctttaaaaggttctttgggatgggcamggtggctcacacatgtaatcccagcactttgggaggccaaggtaggctgatcacctgaggtcaggagttcaagaccagcctggcaaacatggcaaaaccttgtccctactaaaaatacaaaaattagctgggcatggaggcaggcacctgtaatccccagccacttgagaggcagaggcaggagaattgcttgaactcgcgaggcagaggttgcagtgagccaagactgtgccactgcactccagcctgggtgacagagcaagacttcatttcaaaaaataaatgaataaagtaaaataaaataaaatgttctttgaaagttcccaaacattgaaaataatgatgaattaacagaagattgaatgaaatgagatagtaagaatcgaaggtttctgtttcattctccccacaaaacaacaacagactcttttatctctaaccaactgctgcctttggaggttttatagggatgttggctggggtagaagtggagaacgagacagggagagagagattgaggcttttaagagttgctggctactccttctgttgcacttctccttgaaaggcctccctagggcagtctacctgttattgctctaaaattaagttaggatctagctctgttgtagttgggcagcagaggtagacattatgccaatatatgccattttgatgttcagatagaagtccagcattgtgagttactttcattatgtgtgaaaatacggtgtgtagaagtaggtaaaaatttgctcaaaaattcactacattctttcaggagctatagcaaagcagcaatttatgattttgtttcttttaaatgtggaagtttgggattcacaaatgctatgaaatagataaatacataaaagttgtacacaaaatgcacattaaccagctgactagaattttgccccaaccccgaactggaatgtttatgaacccctaatctcttgtactctgcaattctaacctcagtgtgccacattgctgcatgttactcattgctgaatggagtggcacataacatctatttaaatgctgcataatagaactatggtatcgtttaggactttatataaaagttataacatttgaaatgccatgaatttcatcccagtggcaacatttctgtagtcagcttttaaggaatatgattagatgagatgtatactccacttttaaaatattttaattatcagaattatagaattacatgttttttttttaagtcacatagattcttcaagcttggatcttaccaagcctggacatcaatgagctatttcagtttgttgttgttgttgttttaatcaatgatagggcatcttggaaagcctatggcatttcctcaaaagtttccttcttattttccctcctaattattaatcttacataagatgtgccaagattgattcttggggatttactattttttgtttatagatcaagcttcaaaaagtgcatggtggttatgctgttgaagaacttagacaagaaaataactcacttggcagtgagcacagtggagaatcaaagaatcaatgaattgtggatctgaaagaaatagagaacatcaaattcagtgcactcattttacagatgaaaaactgtagacctacaaagacagttgacatggagggtcttctgattcc

SEQ ID NO: 698530 - DNA, 680 bp, Homo sapiens
tattactcacaaaaaattgacccttgcccttgagaaattacctatattattttagaaatccacacaggtgaactagttgaaaaaagttaccaattcacactcttataattaggaaaactgaaaaggaggcagccacataagtgtcctttttcttgtatgttttcctcattgcggcgctcagcatgagtagaccaaacatttgcttgttaatttgcactttaactaaatgcctacttgatcctgacagccttttacaccaattcagcttctccttgattttcagtcatttcaccttggttggttattattatttataataaatacattaaacgaataattttattctttataaagtcttyatgaaccaaatttgaattgtgtttttataattacctctatgcccccagatatacattaaatacttagttgatatttgataactgaatagggaattacagagaaactaatgtctttcagaatctgttagtctaatgggaaacactgggcaaactcagttattttataatttcccaaagaacacacaaattaatttaatgagctttcactttaaagctgaactagagtgcattactcagtgtgactgaaatttttgtgccccccccaaaacacacagagaaatctaatgtatggtatgagcactgtagacaaacagaatatct

SEQ ID NO: 698531 - DNA, 3169 bp, Homo sapiens
ggagtcttgctctgtcgcccaggctggagtgcggtggcacgatattggctcactgcaagctaagcctcccgggctcacgccattctcctgcctcagcctccagagtagctgggactacaggcgctggccaccacgcccggctaatttttttggtatttttaatagagatggggtttctccatgttggtcaggctggtctccatctcctgacttcttgatccacccgcctcggcctcccaaagtgctgggattacagacatgagccgccgcacccggcctacatttttcttaaaacttaagcagcaaacatgggggcgcgcgcacacacacacacaaacacacacacacacacacacacacacacacacacacacacacacacactctctctctctctctctctctgtctctgtttctccctctacctctgtttaatatttaagtgaaagtctgtgtaaaatgtattccacatttttctgctttcttacacacagtatgctgaagagagtatgaacaaacttttctccatgctttgagatctctggaactgtttgcttcatctctaaattgccccaagctgttaggaattagtatgtcttccttcacgtattctttgtttcttatatttcttgttaatgtcaatttgtctatcaatattggccagtcttttttactttccctaggtggccatttctaatcctttatgaattaagaaaccagataagcaagcttttaaagatcggatccaaactgcacagttctgcctgaagacctcagtgaccccctgaataaactgcccaatatttgatgttctgattttgtggcaggccttttggatgctcagagtttttttatttccttactgttagtctctcttttcggcagttgcaattgccatgtgagtgcccataggattgagtcagcttttcctacgtttgatcttgaaggaaagaaacagggacattgcaacttttatccttttatttcctttgattggtattaatttgacttgaaaaaacaggtttttttttgttagtgtcactaaattatttttggtttactgaaacagtcaagctgattcctggataggtcctaaattcactaatgagaaacttcttagctaatcaatggttatgaagtattatttctctcatgatacctaaataatatcaacaataaaaaaatctgtctctactcattgacccaaagaccctcaggtcaaagctgggtatattttgttgcttcactattcaaaacagtctttatttgtttcattattaataacaaaataaatatttttagagggtaaataaagtcttttgtgatgactttgtaatgctgacagtgactaactattattaatatctttaaaatgatgatgttagtgaaacccaacagttggttatcttactggaaggtcttgtaatagcaagaattttcctatattcagttccattttggagaacacaatgcaatgcgcagtatgtctcagtgcaagagaacatataataattcctgtgctttaatgggattgcaccatattcttttaaataataacactgccttttcttaaagaaaagatgctagtattagtgttcttaagccccagctaaaacatgttgatgctaacatgaaaaatgtcggcacagaccgtgtcattcrttctttttactttctaacctgagtcaatgaccataggatccacatggaatccccacgccttcatgaatttctctgttttgccattcttttttttttctctctgtttttcccaatttctaaactgcttgttgctctagtcttctttgaagcacttacagatcacactctggggtgaacaattggaatgaaaaggtgagagaccatttttctccagtaattttccataattcccattagaaataatggggcagtgaagccctatgcagttgttagggaagaacaaatgagacaaacacttgtacctgtgacaggagtctacaatatatgggtaagtgaaaaataatggttgcaaaacattattattatctcatgcttgtgcaacaccaacacatagaaatagcaatgcataggaatgcattagatcctttcatccaacaacacatagaaataataatgcaaaaaggcataggaatatgtctagaaggaaaatcaccctagttatcaaaagagctattactgagaaaggggagactaagagggaaggatttgaaaaatacattgcatgattattatatagaaatatctgcattatatgtatacataatatatagaaaaatttacattgcatgattatattaaacaaccacacatgacatttatcataaaataatgccattttggggggttattttatagaaaaacaaactagagaagcagggtgatgtatttctctggggacataaaggtgtcacagaaaggagagattttcctggccaggatcactggtagatatacactctgtccatgctggcaacacgatattctatggccttagcaccaagactgaatagctacaagcagttaagtgagagcattgaaggatagcctttctgtcaccctccaaatcactgaaaataattggactgaccctgtgattagcccagaagaaaatctcatggaggtgcattgacccaattctttgtagtcattttctgacagtggttgggcttgcttgcatttaattggattgtagagatgaaaagagtggagttatgtatttagaaccattatcatcttgagatgagctttcttgcagcatgtgtggagctggggtcagcctcagactgaccactggaaagtgatccagagtcatttttcaagcattgcttttgaacaacatggcttgcaaatttggaattccagataaccagacattacaatttccatgagccattttcacggttttgaggataaacaagaagctctctaactcactgatttgacggacaaaactgtctttccctgtctgtgtgttgggcacaagagaaacagcaaaagctcctaattgcaaatagaaattacaaaagtttttttggctttggcaccaaagtaaaaagttcagctagaaaaatggttcataatctttctcagtgtaaaaagatgggttgtaggaacataggaatctttatgtactaatggtagaaaagtaaaagatacagccaccttg

SEQ ID NO: 698532 - DNA, 620 bp, Homo sapiens
ttgagacctttcttcttttccaatatatgcctttaaagctgtaaatgtctttctaaacactgcttagctgtacatcataaattttgatatattgtggggtttttctgtttgttttcattcatgcaaagcctttcctaatttaccctgtggtttcttctgtgacttgaatttggcaacttgtgcctcctttgtctttgtctgtctcactctctttttattggttagtctggttaaagatttgccaattttgttgatcttttcaaaaacttttagtttcatttttagaatttagaagtgtattgtttaatttccaagtacttaaggatttcccatattccttttagttgtttatttctaaattccattttggttgaaaatacactgyatgaattcaatatttttaagtgtgttgagatttgttttatggcttaccatatgatctcatcctgaaaaatattccacgtgcacttaaaaagagcatgcattctgcattcaatgagtggaccattctacctaaattagtttgagttggttgatagtattgttcaagtcttgtatatctttactgattttttttaatatagtggttctatcaattattgaatctttggtattgagtc

SEQ ID NO: 698533 - DNA, 655 bp, Homo sapiens
ttagagattttcctcctatcttttttatagatttctatttttatttcaatgtagttgaaaaacacactgtatccttttcgttcttttaaattcattaaggtttgttttacggcccaagatacagtctatttcacatatattctatggacactgctattattgggtgaagcgttccataaatgttgattccatcctggtgctcagcagtgttgagttttccatgtccttgctgatttctgtctgggtattctgctaatggttgagaaaggagtatcaaagttttcaaccatgactgtgggtttgtctgttcctcctttcagtcctatcaatttttgcttcacatattttgcagtttttgcttcacatattttgcagctccacctattgaaggaaatagtgtcaaagtattatgggcaagttkttttttttttaacttttattttaggcttgtgggtggacatgtgttaaaaccacatgatataaagcaaatcccttcacttataccaaaggacatcactctaacaagtgtcccctttctcctacatcatccatttttacatctctacttgatcattctcatcatttaacaaacttgtcattttcccagcttttaaaagaaactcccccagatacactcaaatatttttctcgcctt

SEQ ID NO: 698534 - DNA, 638 bp, Homo sapiens
ttttctatttcaaatgtaaattaaatataacacttgggagattatgaagaatgtaatttggcccagagaaagtgactgcctcaattgaacgttctttcttagactgaagctgcgtccgtgttcctcggtaggcagcagaaacaacataggtcactgtgtgatttcccaaaaccaggagatcttttgcatggcatgctcccccaaagtgaataatggttggcttccagagctagattttttgaggacattttttttgtagcacatcataaaaatgcaacccmatcttattacttaccttaagtacatttcttgtcagattcatggctttgtttccgcatattgcttccccaactacttctccgggtgaggggtgagccctctcctcatgatcaatatatctatatcatggaaggaagaaaaaggtgctggaagaagaagaagatggaaaacccatcctgatgagacagttgttggctagctcttgaggacagctgtacataagactgtattatcagcaaatatattttaaaatagtgacatgatcacacatgaagctggcccagcaaaacactgttcctgaactaagatccaagatcccctgagtgatgtagtaaaggcaagaaattgtttctatcaat

SEQ ID NO: 698535 - DNA, 2240 bp, Homo sapiens
atcagtatagattcatggatttatagtctattaatgggctatagtcaactgcaactactacttattttgatgcttgagctcaaaagagatcatttgatatgacccaatcattttctgtgcactttcttgctttctggcataagatgttccaggcttattttgaacattttctccaacagtccaggaatcaaccatttttccaagaaacattagtttcattttagtgcagaataatgtttacaatccagtatctcgcactaggggtacttgttggtagagggtgtcacttctcccaggtcctctcagtggacaaagtaaaggaatacaatttatacacacacacatacacatacacagagatatctatatagaatccataaggttacacaatacattcaattccaatccaacaccacacagttcattctagttttttatttttccatatttgaatattctttgacggttagaaacctggctcctcaatcattactaatatggtccaacccctgcacataaccaatttcccatcaccacaactacaatcactcccttccccgacacagatattctcctcacaatgcttagtctccattgtaaggtgccccttctagcagaagtccatgtcacccctctcatgtctgacactcctcttttggttatcttcccatataaattcccaccttatcatccctgcttgggttataacacccaacaataggccattcgcatgtgtggatgcatctgcaccatacgtggtcttctacatttcattctgggccaccaaaatcacctccatactccagaatcaatgtctatcttcctcagtcctgccaagtggcttttggactaaattatttcaagaaagggaagaaaagaggaagagcaagagcttgtaatgcttaaaatatcttgtgaggtgcaaatgctctaatggagcttaaagtgctttggaagcagggaagcattatacaaaaattaaatgtatttgattctagatagtgcccccagcacacacagctgccttctcctacatcatagatccttagaaaaactagaaaataactaagaaaagaaaaagctagttagagtggatgggtggatattagatacaagatagatagtagaaaaaagaaggggaatttctagaggacgactagggaaattactctcaataatttctaaaacatgcacaggattgtacttgaataaggaaaccaaagtgccttagatatgagaaatggattggaggatctaaaaccaagtgataagtgaataattgggacagtgcaggaggaacagtcagatagaaaacatcctgtgttctatcccccagctccatctctcccaatagcgttgtcctcctgcaggtaggaacattgagtgtggacttggttcagagtcaggaccacacattggtggctggtgatgcccaagaagaatgagaacacccttcttcttataaggccagccatacaataccagctctggctgggcttcyctctcctctgaatcccatgaggagaggttggagcaaaactgcctcaactcatctctcaccttcccctcagcatgaatctcaagtaaaagataaacatacatgcaggtatcaccaacttgtaatttgcgaaaaaaaaaatcaacaccatggatgtcatacaccagagaatagaggaaaatatatatatgaaaatgaaagagaaatggggaacagattcagaagtgcctacacattcttttgctattccaacactgaggaatatgaagaaagaaaagaaataagagaacttcccagaactgaggaaagtcagggtactcatgttgtaaaggcaactaagagtagaagggtacttcctaattaatgtgatataacaagtaagagatactaatgtttagcaaggaagacatgcagaagatgtgattgattatctgagtattggcagaaaatatcaggaaaccaggacctgtgtaccactgggcagggcaggcgagggagggatggacaccaaaatcagggcagtttagttatgtctaaaagatatatgttatgactcagaaaaggttgtataacaagattataacattaaaaaaatgtgttctcttctcctattttgataagtataccttcattgtcataaaattggaaacaggcataatgctacatcttttgatttactgaaagttagtcaaataccaagtggctaatttagttattattgccatggtctaaatagtctctt

SEQ ID NO: 698536 - DNA, 1472 bp, Homo sapiens
cttggatatatgattacattttaataagttatataaatatgcagatattcatgcggcttttcctcatttgggattttggaaactaaaatagtagtaagagcattaaaaaaaagatgtcctggaagttctcgttcattgcaaatgttcttgaaatgtgaaattcttggaaaagtaatcagggacaactattgacagttgtgtgacatttgggtagccctttctacagttaaagtcattgtgacttttagtagccacactgaaacctttggaataatgaaagaccctttcaaaagatcttccatactgatgatcagtttgcgcctttgccatctatggggtatgaaatgtaaaggcacatttagccaggagttaacacaggtgttttgtaatgcgtgcatgttatgaaacatcccaagaaagatgtgtatttctgttcacttctcttaagatgcagtatttaaaagaatcatagtgtacttgctagtcttaaatgtaaattttgggccaggcacggtggctcatgcctgtaatcccagcactttgggaggctgaggcaggtggatcacctgaggtcaggaatttgagaccagcctgaccagcgtggtgaaacctcatctctactaaaaaaatacaaaattagccaggcgtggtggtgcacacctgtaatcccagctacttgggaggctgaaacaattgcttgagcctgggaggcagaggttgcagtgagccaagatcacgccattgcactccaaagagtgaaactccatctctgaatgaatgaatgaatgaatgaatgaacgaatgaatgaatgaatagtatagatttgggggcttgaaactgaggacttcttaaaggcagatgctgtgtagacatatccaaatttgacattctgagtattatgcaaaagctttattgtaagtttgaccagtagtgctagctattgcagaatacgcaaaatattcacaggttaagattaaaatagccgattaaatttttaaggtctagttagcattagaaattaatgtcaggtcattcacatttaagcagatgtattgagagagctgttctaggcgttgtggagtttggaaaatagaaaaccgtttcttaaagcaatctacaaactactcatggaacaacagtgttttcctacccttgtcacatcacaacatatgtagaaaatgatatttgtggctgggcacagtagctcacacttctaatcccagcacttcgggaggctgaggcaggtggatcctttcagtctaggagttcaagaccagcctaggcaacatggcaaaactctgtctctactaaaaawacaaaaattagccaggtgtggcgtacgcctgtagtcccagctactcaggagctgagctgggaggatcacctgagcctggacaggttgaggctgcagtcagctgtgatcgtgccactgcactctaacctgggtgatagagtgagaacctgtctgaaa

SEQ ID NO: 698537 - DNA, 1950 bp, Homo sapiens
ggaaactaagaaaaataggttttccctgctgcacctgacccgatagcatctcattaagccagtccaggtcacggtcgttcctgacgtcatctcaggacaatcttcacaaatgtgtttgtgtgttaggctcctccacggaccaacagaaactgatgcccacgactaaccagatgcagcggcaaccacccctgctttccacaaaattctgtaaaatgctgatggagcaggaaatagctataaaagttcccctgaaatcctctagggatgtcctgtaacattttccatggaaatgtcataaaatattccatgcaattagtttcacttaaagaaacatttgtcaacttgttttaccttcttaaaggtgactttttttctttaaatatgtgtcatgtataaaaaggtttttgttgtttaacaaaatacatcaacagcattaccaccgtgggattctgactgacagaaagataacaatggcaagattaacttcaacaaaaaccaaagtaaaataccataaatgaggagcagagttgggggtggtggagtatagaatgtggacgaaatttttttaaagatttttttaaatcaaagtcctgcctttttatggggctattttcattttcagaaaatatgaaattacctaagaatagaaagactcactgttatccatgtaaccctagagaattcatatgaattaaaatttattcccaggctcctaatctgacattaagaaaacatgctacaaatcaaactatattttcccaagaagacagtaatgttaccatgtcgtccccacatgcttgggatggaaaacaggtgtatgggtgaggtttcctgaatgcagctatttgacgctcaatccccaggtggctcatctataccctgctccacacataggtcactccaaaatcggcatagagtaattttccactgggaaccccagggttttcagagtgactgtggaaatgcaggattatcccacaacactttccctccctgaagccatgacacctttatatgtctttccatttcaccagaaagtctgccatctgcaggcccccatgaccttgccgggttctgcccaacagcaaccaaaagctaaaaattcccccgtctggactgattgggttgtttgattagtagttgttgctcaaatgccttcatttcaccagtttcccaaaagtcttcttgctcttcttctgcggttcacctttaccgtataaggggatgatatgactaaraagaattatccagcttcaaaaggcatttttaaaagtttagagagattggaacaatggagagggggaaaaagaggtagacgaaggaagaagtaccagatagaagtcttagactctgtgtacacagtctttagaaggagtcactgttgagcaaggtgcaggaaaactggaaatataacttatacacagaactgaaatcagtcatcaaaagacatgggcaaaagacatacatcaaaacttactttgtgaagcaaaagcagacttaaggatgtgacaaaccaggagatacccatctgaggtgaacaaaggcaacatttagaagatatagagaaaggtaagatttattaagagaatgagctcaaaagtcatcatgggcacataattttttcagacaaatttctagagattaatcccatgtctgcttttaggttcttggagggaagaatagtatgaggcactctctgtactaccagattctggaacagaagtgactggctttccttcccatttaaaaacttaatgagacttttaaggcctattattgtacttttcttatttgtatgttcatatcaacaggccccaaatcattttagtcctcccagcatgctggacatggaaagttctttttatcaaggtcattaatgaattcacactaacaaagaagctttatctgtgttacactcaatatttgcagaggcaaaatagtgagcttctc

SEQ ID NO: 698538 - DNA, 1950 bp, Homo sapiens
ggaaactaagaaaaataggttttccctgctgcacctgacccgatagcatctcattaagccagtccaggtcacggtcgttcctgacgtcatctcaggacaatcttcacaaatgtgtttgtgtgttaggctcctccacggaccaacagaaactgatgcccacgactaaccagatgcagcggcaaccacccctgctttccacaaaattctgtaaaatgctgatggagcaggaaatagctataaaagttcccctgaaatcctctagggatgtcctgtaacattttccatggaaatgtcataaaatattccatgcaattagtttcacttaaagaaacatttgtcaacttgttttaccttcttaaaggtgactttttttctttaaatatgtgtcatgtataaaaaggtttttgttgtttaacaaaatacatcaacagcattaccaccgtgggattctgactgacagaaagataacaatggcaagattaacttcaacaaaaaccaaagtaaaataccataaatgaggagcagagttgggggtggtggagtatagaatgtggacgaaatttttttaaagatttttttaaatcaaagtcctgcctttttatggggctattttcattttcagaaaatatgaaattacctaagaatagaaagactcactgttatccatgtaaccctagagaattcatatgaattaaaatttattcccaggctcctaatctgacattaagaaaacatgctacaaatcaaactatattttcccaagaagacagtaatgttaccatgtcgtccccacatgcttgggatggaaaacaggtgtatgggtgaggtttcctgaatgcagctatttgacgctcaatccccaggtggctcatctataccctgctccacacataggtcactccaaaatcggcatagagtaattttccactgggaaccccagggttttcagagtgactgtggaaatgcaggattatcccacaacactttccctccctgaagccatgacacctttatatgtctttccatttcaccagaaagtctgccatctgcaggcccccatgaccttgccgggttctgcccaacagcaaccaaaagctaaaaattcccccgtctggactgattgggttgtttgattagtagttgttgctcaaatgccttcatttcaccagtttcccaaaagtcttcttgctcttcttctgcggttcacctttaccgtataaggggatgatatgactaaaaagaattatccagcttcaaaaggcatttttaaaagtttagagagattggaacaatggagagggggaaaaagaggtagacgaaggaagaagtaccagatagaagtcttagactctgygtacacagtctttagaaggagtcactgttgagcaaggtgcaggaaaactggaaatataacttatacacagaactgaaatcagtcatcaaaagacatgggcaaaagacatacatcaaaacttactttgtgaagcaaaagcagacttaaggatgtgacaaaccaggagatacccatctgaggtgaacaaaggcaacatttagaagatatagagaaaggtaagatttattaagagaatgagctcaaaagtcatcatgggcacataattttttcagacaaatttctagagattaatcccatgtctgcttttaggttcttggagggaagaatagtatgaggcactctctgtactaccagattctggaacagaagtgactggctttccttcccatttaaaaacttaatgagacttttaaggcctattattgtacttttcttatttgtatgttcatatcaacaggccccaaatcattttagtcctcccagcatgctggacatggaaagttctttttatcaaggtcattaatgaattcacactaacaaagaagctttatctgtgttacactcaatatttgcagaggcaaaatagtgagcttctc

SEQ ID NO: 698539 - DNA, 1035 bp, Homo sapiens
tctctgaagtagtgttatcagctgtttttaagaagtaccctaagagtgattggcgagagagaaaaaatttttgaagactgatgtttgctatgctaagcrgaagtttgaaataagcatcagcttgaaagctgtggtttgaaagggagttgaatatttcaaccccacaaatagtatttgtgacaaatatgtatacaggcttacgtgaatgagaaatttaaaatagaaatgttcattgttggtttcatcttacattttttaattagtgatttaaaaattcaggaatgactgagagaggtaacatgttgtaaactaggaaatggactagtttaaaatcatttttctttccttttaaaagtccttcagcctgctccacatcaagtgataactaatctccctgaaggcgttcggcttccgacaactcgaccaaccaggccaccgccccctctcatcccgtcatccaaaaccacagtggcttcagaaaaaccatcttttataatgggaggctccatctcacaggtgaaacgacttctctttacagtagatttcttgttgaatatggctttgttaaaacttgtcctccctcctcgcactgatttgtcagagttgtaataaataataatctgtctgaatatgaagtttcaagagataatgaccagaagatgcagcagtcactgtactcttgccacaaatcagaactttcagtgagttatgtacccagattgagtggtcataacataccacccatttaattacacttggcacttggcataccacttggtttaatttacatcactctaaacttaccaagttttaaacttagtttcaaacagtagaatatttgttcactaacatatggtaaaggctcaaaatattaaattgtaggtggttagtattataatttattctgactttggccactaaatcttttttctggttcattactttttaaaaaattgagatatggtctggtcttcacagttccatcagttttgactaactgtacatcagtggtcacacccctgtcaacttattgaa

SEQ ID NO: 698540 - DNA, 2979 bp, Homo sapiens
cacacatatgtttattgcggcactatgcacaatagcaaagacttggaaccaacacaaatgcccatcaataatrgactagataaagaaaatgtggtacatatacaccatggaatactatgcagccataaaaaagcatgagctcatgtcctttgcagggacatggatgaaggtggaaaccatcattctcagcaaactaacagaagaacagaaaaccaaaacccacatgttctcactcataagtgggagttgaacaatgagaacacatggacacagggaggggaacatcacacactggggcctgtcacggggtggggggctaggagagggatagcattaggtgaaatacctaatgtagatgatgggttgataggtgcagcaaaccaccatggcacctgtatgcctatggaacaaacctgcatgttctgcacatgaaccccagaacttaacgtataataaaaaaatcaagtatattgatactggggtcaggggatgagatatgaatgctgttttaaaatcaagagtcagggatttagcaatgcctaacatctaaaaaaaaaaagtcaacaaaccacgtgataagtttcacaattactaaatattgagtggagactttaaaaatagtaaaataataaatgctattataattattcttcaaatgtttaaatttttacttgataaatcagattaagaattttgagagtggtcatctttaggcctattttctcaaaggaaaaataatccaacatcctattatttcaaaaacattgtcagctaatgtttccttcaaattgttattaatctcccagcagtaatttgagggttttgtatcttaaaattcataaggtagtagtatatgaaagccaataaaaatcggtatgaccattttgttcctgggccatcaagacctgtggttttaatctttctttaatatcaaataacttaagctttcatcccatccagagaaattttttatctccataatttttctagagccttccagaaaagggaggagagtcataggaaggggatttcattcattcatcatttttctttctagattccttctttctaacttgagtttcaattacccctcactatactagctcctaaagttatggtcctctctctatatggcttaccacaaatgtaccataactcttctaacatttgcccgaacacttttaatgtattgtcattgcagatggtaaattttatcaaagatttaatgaacagtgtacaacaattacagtgctctacaggacagatacaaattcagattgcagtgtggtatccgaagcatctttgatagttccttacaaagggaaatcttgtttaattgccatttgcctctttgggtcttggcctaaatgtcatgttgctgggctcctttctctccctgatcctgttctctgaattacaagaccttgaaatcatctcaatttttttttaatgttgtagaaaaattcagctccctagttgaagcaatcatcttccaactatcctagcctcaaaggccagatctgtcccaacaacaagaatcatccagttgtttttctaaacaaaagataaagcagcaacaacttggagaaagatttatgtatcatccaaagagaaagcacattcaaattttaaaatagaaatatttttcatactcatatttgtggaaataaaaataataaaatgaagtagaccaaaagcatacttgagagagtagtagacttgaaattaggaataaatagtatattctagacttttttattatgaaactctgtaaatttgtaaatttaagtaagttattaacttctctgagcatcggtatcgtctccgtacaataaatacatattagcaattgagtttgtgctgtttgggtatacaaaggtaaataagaaatatctaccaaaagaaggtaaatgcatggtatgcagctgcaaaacaggttatattggatgatcattatggagccttttatatctgtgacactggcttttgaagggaacacattcctgccattggatgatgtacaagcagaagtaaaacaaaattatctgattcaagcttccagtgggatattatgagtagaaaataagaaaccccacaccaatgaattaaattctcatatgtaccctgaaaatacatacatctattatgtaccaatacaataataacatttttaaaaagaaaacccacacccagtgagtggcacagtgtcaccctagttctactttacctgattctttgcataacaattcgtctttcgccagaagagaaaggaagtccataatggaaaagaaaaaacatagaaataaatttcttccttaatgttattcctaaactgaaaacatggtgaaaagattttttttaatagtgaaaattatagagaaaagaagaaatctattccagaaaaattataatcaatttaaagaagactcagttttttttaccatggtaaaaagaaataggataagaaggctgctactataatattataattaaacaaacagaatatccctgtcttgtgactatacacacagacacatactattacttatcaaagtttcctactactcagggcttttcttagggcaaatttaacatctttgttcctcaggctgtagattaaggggttcaacatgggaaccacatttgtataaaagacagaagataattttctcttatccatggacccagcagaagatgggttgagatacataaatgcacctgatccaaagaacagagaaacagcaattatatgggaactgcaagtgctgaaagctttggacctgccctccttggaactgatatggaggatgctggagaggatgaaaccataagagataaagatggtaacagtgggcacaatgatgttgatgccaaccacagtgaaaaccaccagctcattgatgtaggtgctggtgcaggagagctggagcagagggaggatgtcacagaagtagtgatcgatggtgttcgcatcacaga

SEQ ID NO: 698541 - DNA, 2979 bp, Homo sapiens
cacacatatgtttattgcggcactatgcacaatagcaaagacttggaaccaacacaaatgcccatcaataatggactagataaagaaaatgtggtacatatacaccatggaatactatgcagccataaaaaagcatgagctcatgtcctttgcagggacatggatgaaggtggaaaccatcattctcagcaaactaacagaagaacagaaaaccaaaacccacatgttctcactcataagtgggagttgaacaatgagaacacatggacacagggaggggaacatcacacactggggcctgtcacggggtgkggggctaggagagggatagcattaggtgaaatacctaatgtagatgatgggttgataggtgcagcaaaccaccatggcacctgtatgcctatggaacaaacctgcatgttctgcacatgaaccccagaacttaacgtataataaaaaaatcaagtatattgatactggggtcaggggatgagatatgaatgctgttttaaaatcaagagtcagggatttagcaatgcctaacatctaaaaaaaaaaagtcaacaaaccacgtgataagtttcacaattactaaatattgagtggagactttaaaaatagtaaaataataaatgctattataattattcttcaaatgtttaaatttttacttgataaatcagattaagaattttgagagtggtcatctttaggcctattttctcaaaggaaaaataatccaacatcctattatttcaaaaacattgtcagctaatgtttccttcaaattgttattaatctcccagcagtaatttgagggttttgtatcttaaaattcataaggtagtagtatatgaaagccaataaaaatcggtatgaccattttgttcctgggccatcaagacctgtggttttaatctttctttaatatcaaataacttaagctttcatcccatccagagaaattttttatctccataatttttctagagccttccagaaaagggaggagagtcataggaaggggatttcattcattcatcatttttctttctagattccttctttctaacttgagtttcaattacccctcactatactagctcctaaagttatggtcctctctctatatggcttaccacaaatgtaccataactcttctaacatttgcccgaacacttttaatgtattgtcattgcagatggtaaattttatcaaagatttaatgaacagtgtacaacaattacagtgctctacaggacagatacaaattcagattgcagtgtggtatccgaagcatctttgatagttccttacaaagggaaatcttgtttaattgccatttgcctctttgggtcttggcctaaatgtcatgttgctgggctcctttctctccctgatcctgttctctgaattacaagaccttgaaatcatctcaatttttttttaatgttgtagaaaaattcagctccctagttgaagcaatcatcttccaactatcctagcctcaaaggccagatctgtcccaacaacaagaatcatccagttgtttttctaaacaaaagataaagcagcaacaacttggagaaagatttatgtatcatccaaagagaaagcacattcaaattttaaaatagaaatatttttcatactcatatttgtggaaataaaaataataaaatgaagtagaccaaaagcatacttgagagagtagtagacttgaaattaggaataaatagtatattctagacttttttattatgaaactctgtaaatttgtaaatttaagtaagttattaacttctctgagcatcggtatcgtctccgtacaataaatacatattagcaattgagtttgtgctgtttgggtatacaaaggtaaataagaaatatctaccaaaagaaggtaaatgcatggtatgcagctgcaaaacaggttatattggatgatcattatggagccttttatatctgtgacactggcttttgaagggaacacattcctgccattggatgatgtacaagcagaagtaaaacaaaattatctgattcaagcttccagtgggatattatgagtagaaaataagaaaccccacaccaatgaattaaattctcatatgtaccctgaaaatacatacatctattatgtaccaatacaataataacatttttaaaaagaaaacccacacccagtgagtggcacagtgtcaccctagttctactttacctgattctttgcataacaattcgtctttcgccagaagagaaaggaagtccataatggaaaagaaaaaacatagaaataaatttcttccttaatgttattcctaaactgaaaacatggtgaaaagattttttttaatagtgaaaattatagagaaaagaagaaatctattccagaaaaattataatcaatttaaagaagactcagttttttttaccatggtaaaaagaaataggataagaaggctgctactataatattataattaaacaaacagaatatccctgtcttgtgactatacacacagacacatactattacttatcaaagtttcctactactcagggcttttcttagggcaaatttaacatctttgttcctcaggctgtagattaaggggttcaacatgggaaccacatttgtataaaagacagaagataattttctcttatccatggacccagcagaagatgggttgagatacataaatgcacctgatccaaagaacagagaaacagcaattatatgggaactgcaagtgctgaaagctttggacctgccctccttggaactgatatggaggatgctggagaggatgaaaccataagagataaagatggtaacagtgggcacaatgatgttgatgccaaccacagtgaaaaccaccagctcattgatgtaggtgctggtgcaggagagctggagcagagggaggatgtcacagaagtagtgatcgatggtgttcgcatcacaga

SEQ ID NO: 698542 - DNA, 2979 bp, Homo sapiens
cacacatatgtttattgcggcactatgcacaatagcaaagacttggaaccaacacaaatgcccatcaataatggactagataaagaaaatgtggtacatatacaccatggaatactatgcagccataaaaaagcatgagctcatgtcctttgcagggacatggatgaaggtggaaaccatcattctcagcaaactaacagaagaacagaaaaccaaaacccacatgttctcactcataagtgggagttgaacaatgagaacacatggacacagggaggggaacatcacacactggggcctgtcacggggtggggggctaggagagggatagcattaggtgaaatacctaatgtagatgatgggttgataggtgcagcaaaccaccatggcacctgtatgcctatggaacaaacctgcatgttctgcacatgaaccccagaacttaacgtataataaaaaaatcaagtatattgatactggggtcaggggatgagatatgaatgctgttttaaaatcaagagtcagggatttagcaatgcctaacatctaaaaaaaaaaagtcarcaaaccacgtgataagtttcacaattactaaatattgagtggagactttaaaaatagtaaaataataaatgctattataattattcttcaaatgtttaaatttttacttgataaatcagattaagaattttgagagtggtcatctttaggcctattttctcaaaggaaaaataatccaacatcctattatttcaaaaacattgtcagctaatgtttccttcaaattgttattaatctcccagcagtaatttgagggttttgtatcttaaaattcataaggtagtagtatatgaaagccaataaaaatcggtatgaccattttgttcctgggccatcaagacctgtggttttaatctttctttaatatcaaataacttaagctttcatcccatccagagaaattttttatctccataatttttctagagccttccagaaaagggaggagagtcataggaaggggatttcattcattcatcatttttctttctagattccttctttctaacttgagtttcaattacccctcactatactagctcctaaagttatggtcctctctctatatggcttaccacaaatgtaccataactcttctaacatttgcccgaacacttttaatgtattgtcattgcagatggtaaattttatcaaagatttaatgaacagtgtacaacaattacagtgctctacaggacagatacaaattcagattgcagtgtggtatccgaagcatctttgatagttccttacaaagggaaatcttgtttaattgccatttgcctctttgggtcttggcctaaatgtcatgttgctgggctcctttctctccctgatcctgttctctgaattacaagaccttgaaatcatctcaatttttttttaatgttgtagaaaaattcagctccctagttgaagcaatcatcttccaactatcctagcctcaaaggccagatctgtcccaacaacaagaatcatccagttgtttttctaaacaaaagataaagcagcaacaacttggagaaagatttatgtatcatccaaagagaaagcacattcaaattttaaaatagaaatatttttcatactcatatttgtggaaataaaaataataaaatgaagtagaccaaaagcatacttgagagagtagtagacttgaaattaggaataaatagtatattctagacttttttattatgaaactctgtaaatttgtaaatttaagtaagttattaacttctctgagcatcggtatcgtctccgtacaataaatacatattagcaattgagtttgtgctgtttgggtatacaaaggtaaataagaaatatctaccaaaagaaggtaaatgcatggtatgcagctgcaaaacaggttatattggatgatcattatggagccttttatatctgtgacactggcttttgaagggaacacattcctgccattggatgatgtacaagcagaagtaaaacaaaattatctgattcaagcttccagtgggatattatgagtagaaaataagaaaccccacaccaatgaattaaattctcatatgtaccctgaaaatacatacatctattatgtaccaatacaataataacatttttaaaaagaaaacccacacccagtgagtggcacagtgtcaccctagttctactttacctgattctttgcataacaattcgtctttcgccagaagagaaaggaagtccataatggaaaagaaaaaacatagaaataaatttcttccttaatgttattcctaaactgaaaacatggtgaaaagattttttttaatagtgaaaattatagagaaaagaagaaatctattccagaaaaattataatcaatttaaagaagactcagttttttttaccatggtaaaaagaaataggataagaaggctgctactataatattataattaaacaaacagaatatccctgtcttgtgactatacacacagacacatactattacttatcaaagtttcctactactcagggcttttcttagggcaaatttaacatctttgttcctcaggctgtagattaaggggttcaacatgggaaccacatttgtataaaagacagaagataattttctcttatccatggacccagcagaagatgggttgagatacataaatgcacctgatccaaagaacagagaaacagcaattatatgggaactgcaagtgctgaaagctttggacctgccctccttggaactgatatggaggatgctggagaggatgaaaccataagagataaagatggtaacagtgggcacaatgatgttgatgccaaccacagtgaaaaccaccagctcattgatgtaggtgctggtgcaggagagctggagcagagggaggatgtcacagaagtagtgatcgatggtgttcgcatcacaga

SEQ ID NO: 698543 - DNA, 2979 bp, Homo sapiens
cacacatatgtttattgcggcactatgcacaatagcaaagacttggaaccaacacaaatgcccatcaataatggactagataaagaaaatgtggtacatatacaccatggaatactatgcagccataaaaaagcatgagctcatgtcctttgcagggacatggatgaaggtggaaaccatcattctcagcaaactaacagaagaacagaaaaccaaaacccacatgttctcactcataagtgggagttgaacaatgagaacacatggacacagggaggggaacatcacacactggggcctgtcacggggtggggggctaggagagggatagcattaggtgaaatacctaatgtagatgatgggttgataggtgcagcaaaccaccatggcacctgtatgcctatggaacaaacctgcatgttctgcacatgaaccccagaacttaacgtataataaaaaaatcaagtatattgatactggggtcaggggatgagatatgaatgctgttttaaaatcaagagtcagggatttagcaatgcctaacatctaaaaaaaaaaagtcaacaaaccacgtgataagtttcacaattactaaatattgagtggagactttaaaaatagtaaaataataaatgctattataattattcttcaaatgtttaaatttttacttgataaatcagattaagaattttgagagtggtcatctttaggcctattttctcaaaggaaaaataatccaacatcctattatttcaaaaacattgtcagctaatgtttccttcaaattgttattaatctcccagcagtaatttgagggttttgtatcttaaaattcataaggtagtagtatatgaaagccaataaaaatsggtatgaccattttgttcctgggccatcaagacctgtggttttaatctttctttaatatcaaataacttaagctttcatcccatccagagaaattttttatctccataatttttctagagccttccagaaaagggaggagagtcataggaaggggatttcattcattcatcatttttctttctagattccttctttctaacttgagtttcaattacccctcactatactagctcctaaagttatggtcctctctctatatggcttaccacaaatgtaccataactcttctaacatttgcccgaacacttttaatgtattgtcattgcagatggtaaattttatcaaagatttaatgaacagtgtacaacaattacagtgctctacaggacagatacaaattcagattgcagtgtggtatccgaagcatctttgatagttccttacaaagggaaatcttgtttaattgccatttgcctctttgggtcttggcctaaatgtcatgttgctgggctcctttctctccctgatcctgttctctgaattacaagaccttgaaatcatctcaatttttttttaatgttgtagaaaaattcagctccctagttgaagcaatcatcttccaactatcctagcctcaaaggccagatctgtcccaacaacaagaatcatccagttgtttttctaaacaaaagataaagcagcaacaacttggagaaagatttatgtatcatccaaagagaaagcacattcaaattttaaaatagaaatatttttcatactcatatttgtggaaataaaaataataaaatgaagtagaccaaaagcatacttgagagagtagtagacttgaaattaggaataaatagtatattctagacttttttattatgaaactctgtaaatttgtaaatttaagtaagttattaacttctctgagcatcggtatcgtctccgtacaataaatacatattagcaattgagtttgtgctgtttgggtatacaaaggtaaataagaaatatctaccaaaagaaggtaaatgcatggtatgcagctgcaaaacaggttatattggatgatcattatggagccttttatatctgtgacactggcttttgaagggaacacattcctgccattggatgatgtacaagcagaagtaaaacaaaattatctgattcaagcttccagtgggatattatgagtagaaaataagaaaccccacaccaatgaattaaattctcatatgtaccctgaaaatacatacatctattatgtaccaatacaataataacatttttaaaaagaaaacccacacccagtgagtggcacagtgtcaccctagttctactttacctgattctttgcataacaattcgtctttcgccagaagagaaaggaagtccataatggaaaagaaaaaacatagaaataaatttcttccttaatgttattcctaaactgaaaacatggtgaaaagattttttttaatagtgaaaattatagagaaaagaagaaatctattccagaaaaattataatcaatttaaagaagactcagttttttttaccatggtaaaaagaaataggataagaaggctgctactataatattataattaaacaaacagaatatccctgtcttgtgactatacacacagacacatactattacttatcaaagtttcctactactcagggcttttcttagggcaaatttaacatctttgttcctcaggctgtagattaaggggttcaacatgggaaccacatttgtataaaagacagaagataattttctcttatccatggacccagcagaagatgggttgagatacataaatgcacctgatccaaagaacagagaaacagcaattatatgggaactgcaagtgctgaaagctttggacctgccctccttggaactgatatggaggatgctggagaggatgaaaccataagagataaagatggtaacagtgggcacaatgatgttgatgccaaccacagtgaaaaccaccagctcattgatgtaggtgctggtgcaggagagctggagcagagggaggatgtcacagaagtagtgatcgatggtgttcgcatcacaga

SEQ ID NO: 698544 - DNA, 1480 bp, Homo sapiens
ggccacggggtgaattcctatgtgtgttcaccaaatatacgtgtgtgtgtgtgtgtgtgtgtgtttagtattaattttattttttaaattgtttacagaggcaaaatacacgacataaaatttaccattttaaccattttttaagtgtatagttcagtggcattaagtacactcatgttattgtgtaaccaccaccaccatccatttctagaactttctcaaactcccacccatatttttcattttaatttttaatttttattttgagacaggctctcactctgtcacccaggctacagtgcagtggtaccatcagagctcaatgcagcctcaaacacctgcgctcaagtgatcctcccacctcagcctcctgagtagctgggactagaactgcacaccaccacacttggctaatttttttttttttttttttttttttttgkagagatggggtctcactatgttgcctatactggtctcaaactcttggcctcaagcaatcctcacgcctcagccacccatattttttaaagtatcattcaataaaatattttatactcacccgcaaaaatgtcactatacttttcaaacttaacagcataacaatattatttctatcagcaaagtgcctcaggagctatgggtatcacgtgacaaaacctcatcagccagaacagggcattctggttaattaaactgtcaggctcactaagggttaaacagaatactctttggagtccaatttttcattataaagtgcatttgtccttgcaggtcaatcctaaagaacaaagcggaatcatcagtgattcaacacacagggctctggttggggagtgggaggtagtcatcaatttaaatagccgttctcagagttctgtgaaaaggtaccagccatcacgtaagggatgggtttagaagatcagtctgagcttgtctattatgcttcaaaagcagggcacacattatttttaactaaattacccaatgttcaaaaaccttcatgaaatttggtactcagaataatctgataaaattctgccctgtgcaggaagctaatttgcatggatgtcctatcggcatgaaacttaatatactttggatattagctctaaagaacaatttaactcaatattcattcacccatgtatttaataaacttctatttggcacacacttactatgtgcttgacactccattaagcatcacatagaaggataaaaatgacagagaccctctggccttcatgacatagtcttttaatgtgttaaataccttaagacaagtattacatgacccccatactcttacttgaaaattctaatttcaaaatatctaatttggatctgacaaattgtcaatttcaaaattccacctagaacggaaagctaactactgcacattctcacttacaagtgggagctaagctatgagtatgaaggcatacaagtggtataatagacactgtggattcagaag

SEQ ID NO: 698545 - DNA, 1480 bp, Homo sapiens
ggccacggggtgaattcctatgtgtgttcaccaaatatacgtgtgtgtgtgtgtgtgtgtgtgtttagtattaattttattttttaaattgtttacagaggcaaaatacacgacataaaatttaccattttaaccattttttaagtgtatagttcagtggcattaagtacactcatgttattgtgtaaccaccaccaccatccatttctagaactttctcaaactcccacccatatttttcattttaatttttaatttttattttgagacaggctctcactctgtcacccaggctacagtgcagtggtaccatcagagctcaatgcagcctcaaacacctgcgctcaagtgatcctcccacctcagcctcctgagtagctgggactagaactgcacaccaccacacttggctaatttttttttttttttttttttttttttgtagagatggggtctcactatgttgcctatactggtctcaaactcttggcctcaagcaatcctcacgcctcagccacccatattttttaaagtatcattcaataaaatattttatactcacccgcaaaaatgtcactatacttttcaaacttaacagcataacaatattatttctatcagcaaagtgcctcaggagctatgggtatcacgtgacaaaacctcatcagccagaacagggcattctggttaattaaactgtcaggctcactaagggttaaacagaatactctttggagtccaatttttcattataaagtgcatttgtccttgcaggtcaatcctaaagaacaaagcggaatcatcagtgattcaacacacagggctctggttggggagtgggaggtagtcatcaatttaaatagccgttctcagagttctgtgaaaaggtaccagccatcacgtaagggatgggtttagaagatcagtctgagcttgtctattatgcttcaaaagcagggcacacattatttttaactaaattacccaatgttcaaaaaccttcatgaaatttggtactcagaataatctgataaaattctgccctgtgcaggaagctaatttgcatggatgtcctatcggcatgaaacttaatatactttggatattagctctaaagaacaatttaactcaatattcattcacccatgtatttaataaacttctatttggcacacacttactatgtgcttgacactccattaagcatcacatagaaggataaaaatgacagagaccctctggccttcatgacatagtcttttaatgtgttaaataccttaagacaagtattacatgacccccatactcttacttgaaaattctaatttcaaaatatctaatttggatctgacaaattgtcaatttcaaaattccacctrgaacggaaagctaactactgcacattctcacttacaagtgggagctaagctatgagtatgaaggcatacaagtggtataatagacactgtggattcagaag

SEQ ID NO: 698546 - DNA, 1480 bp, Homo sapiens
ggccacggggtgaattcctatgtgtgttcaccaaatatacgtgtgtgtgtgtgtgtgtgtgtgtttagtattaattttattttttaaattgtttacagaggcaaaatacacgacataaaatttaccattttaaccattttttaagtgtatagttcagtggcattaagtacactcatgttattgtgtaaccaccaccaccatccatttctagaactttctcaaactcccacccatatttttcattttaatttttaatttttattttgagacaggctctcactctgtcacccaggctacagtgcagtggtaccatcagagctcaatgcagcctcaaacacctgcgctcaagtgatcctcccacctcagcctcctgagtagctgggactagaactgcacaccaccacacttggctaatttttttttttttttttttttttttttgtagagatggggtctcactatgttgcctatactggtctcaaactcttggcctcaagcaatcctcacgcctcagccacccatattttttaaagtatcattcaataaaatattttatactcacccgcaaaaatgtcactatacttttcaaacttaacagcataacaatattatttctatcagcaaagtgcctcaggagctatgggtatcacgtgacaaaacctcatcagccagaacagggcattctggttaattaaactgtcaggctcactaagggttaaacagaatactctttggagtccaatttttcattataaagtgcatttgtccttgcaggtcaatcctaaagaacaaagcggaatcatcagtgattcaacacacagggctctggttggggagtgggaggtagtcatcaatttaaatagccgttctcagagttctgtgaaaaggtaccagccatcacgtaagggatgggtttagaagatcagtctgagcttgtctattatgcttcaaaagcagggcacacattatttttaactaaattacccaatgttcaaaaaccttcatgaaatttggtactcagaataatctgataaaattctgccctgtgcaggaagctaatttgcatggatgtcctatcggcatgaaacttaatatactttggatattagctctaaagaacaatttaactcaatattcattcacccatgtatttaataaacttctatttggcacacacttactatgtgcttgacactccattaagcatcacatagaaggataaaaatgacagagaccctctggccttcatgacatagtcttttaatgtgttaaataccttaagacaagtattacatgacccccatactcttacttgaaaattctaatttcaaaatatctaatttggatctgacaaattgtcaatttcaaaattccacctagaacggaaagctaactactgcacattstcacttacaagtgggagctaagctatgagtatgaaggcatacaagtggtataatagacactgtggattcagaag

SEQ ID NO: 698547 - DNA, 929 bp, Homo sapiens
atccaacttgtcgtattcttaaggttctgactaaattgctgtttggatcaactcttacctaacactttcccccggggcctgatttcagcaagagtgctatctttaggggtccctaaattctctcaaaagggacaggtctgttttctcagaggctggaggctatctcgtgggactgaatgtggatctgaacaggattctcgtggttgacttaaagccaagtcagaacactggcactaagtgaaggcacatgagcctgaagtttgtaacatacatctaacctgggaatccttcacctctaagttgtcagctggccctggcagtttgttagggcatcaagaagtactcatgtgagaacctaaaagcattctgtgaaaggtggttgcaagagccattccagtttttcaggagacttagtaaggagctgctgctgcagaggctaggagcctcaactcaccacctgagcccaccctccacgtggcacggcccagaccagagccaggcctcccgattcctctgtgaagtgaaagggctggaagcagatacctctctgccacgttggcctctgtgatggcccggggtggcaccttccaagggcagttgatgcgcccaccaggcaggcgtttgaaatcaaattggcagcagatcttgggatctgggccacaggtatgggggacgtcatagctgtagaagggcatcatgtgacagaagatgtctgtgctggagtccgagtctgcaggagacacaccacgtggtcaccaccagcaggcagcctctggacgccaggggggcaaggatctgttcaggctaaaggcagccctgatagaccgtgaggctgtaactggacctagggctggagagagtgtgtaggccagggagaaagacatgaggggctccctcaggggacgggcacacagggcaygctgaagccc

SEQ ID NO: 698548 - DNA, 598 bp, Homo sapiens
agcatctgcttccagggaacccaacctgtgaccatatgaacgtgttatgagatcttattctgtgtgggcctctgtgctaaacrctgcatgtacattacctcatttaattcacacaacagccttttggggtggcactatcgtcactcccatctttttttttttttttttttgagacggagtctcgctctgtctcccaggctggagtgcagtggtgcaatctcggtcactgcaacctctgcctcctgggttcaagcaattctcctgtgtcagtctcctgagtagctaggactacaggcgcccgctaccatgcccggctgattttttgtatttttagtagagatggagtttcaccatgttagccaggatggtctcgatctcctgacctcatgatctgcccgcctcggcctcccaaagtgctgggattacaggcgtgagccaccacgcccagcctcatcactcccatcttacggatgagcgagccaaggctcagagacaataatgagcagcccaaagtcacagagttaacaagtggagattccctcattgaagacaggtaagagacaagatttgggcaagaacactagtttgttttttcttg

SEQ ID NO: 698549 - DNA, 598 bp, Homo sapiens
agcatctgcttccagggaacccaacctgtgaccatatgaacgtgttatgagatcttattctgtgtgggcctctgtgctaaacactgcatgtacattacctcatttaattcacacaacagccttttggggtggcactatcgtcactcccatctttttttttttttttttttgagacggagtctcgctctgtctcccaggctggagtgcagtggtgcratctcggtcactgcaacctctgcctcctgggttcaagcaattctcctgtgtcagtctcctgagtagctaggactacaggcgcccgctaccatgcccggctgattttttgtatttttagtagagatggagtttcaccatgttagccaggatggtctcgatctcctgacctcatgatctgcccgcctcggcctcccaaagtgctgggattacaggcgtgagccaccacgcccagcctcatcactcccatcttacggatgagcgagccaaggctcagagacaataatgagcagcccaaagtcacagagttaacaagtggagattccctcattgaagacaggtaagagacaagatttgggcaagaacactagtttgttttttcttg

SEQ ID NO: 698550 - DNA, 598 bp, Homo sapiens
agcatctgcttccagggaacccaacctgtgaccatatgaacgtgttatgagatcttattctgtgtgggcctctgtgctaaacactgcatgtacattacctcatttaattcacacaacagccttttggggtggcactatcgtcactcccatctttttttttttttttttttgagacggagtctcgctctgtctcccaggctggagtgcagtggtgcaatctyggtcactgcaacctctgcctcctgggttcaagcaattctcctgtgtcagtctcctgagtagctaggactacaggcgcccgctaccatgcccggctgattttttgtatttttagtagagatggagtttcaccatgttagccaggatggtctcgatctcctgacctcatgatctgcccgcctcggcctcccaaagtgctgggattacaggcgtgagccaccacgcccagcctcatcactcccatcttacggatgagcgagccaaggctcagagacaataatgagcagcccaaagtcacagagttaacaagtggagattccctcattgaagacaggtaagagacaagatttgggcaagaacactagtttgttttttcttg

SEQ ID NO: 698551 - DNA, 598 bp, Homo sapiens
agcatctgcttccagggaacccaacctgtgaccatatgaacgtgttatgagatcttattctgtgtgggcctctgtgctaaacactgcatgtacattacctcatttaattcacacaacagccttttggggtggcactatcgtcactcccatctttttttttttttttttttgagacggagtctcgctctgtctcccaggctggagtgcagtggtgcaatctcggtcactgcaacctctgcctcctgggttcaagcaattctcctgtgtcagtctcctgagtagctaggactacaggcgcccgctaccatgcccggctgattttttgtatttttagtagagatggagtttcaccatgttagccaggatggtctcgatctcctgacctcatgatctgcccgcctcggcctcccaaagtgctgggattacaggcgtgagccaccacgcccagcctcatcactcccatcttayggatgagcgagccaaggctcagagacaataatgagcagcccaaagtcacagagttaacaagtggagattccctcattgaagacaggtaagagacaagatttgggcaagaacactagtttgttttttcttg

SEQ ID NO: 698552 - DNA, 613 bp, Homo sapiens
ttgtaaaagaagcaaaataaaggcctgataccttctggaggggcacaggccacccacctgccactgtacacagacacacacacacacacgtactcaaattcacacacgcactcacatgggcacacaacccgtatgtgctcaccctagaacacacctgtgcttatgcacacatggcacctgcacttacatgtgcacgcatgtgtacacgcctccatgcccacgttcacacatgctcacccagctcatccacaggcatgcatgcgtgcacacacatagcagcagccactcatgcacaygcacactcacccttacccgggacacacgcacacatgcatgtgcacatacacaggccctgctttctggaagccagatttggagcaaagttgacccaggagctccaaggccttgggaattatgggatgcacatcccagaggactgcacatcccagagggctgcacatcccagaaggctgcagacagtggagaggtgtgaagcgcaggcctggatttcacccagctctgcctctcatgaggtgtgagacctaagtgacttcatctctctaagccttggtttcttcatctgtcaggtgggagtgagaatgacagccccttc

SEQ ID NO: 698553 - DNA, 554 bp, Homo sapiens
gtccacacccccatcatccctcccacagtcccagcatgcactggacagaatggaagggtgatgaccctcaggactactctgtcagacagggagggcagacagtccccatccaccagcctctcccactccactgagagctcaagaaactcagggctttgcaacagggtgtctggctcccagggccctgttgcccagggatgctgaagaagatgctatcacagggctttggggagccaccaaggyaggaaagatgtccccagagagagcagagctgccacagctcagctggggtcacactcacctttctccgatgccggggccaggtcaatgaagctgcgacatttttcacctttgaaaagaagagaagcgttttcagaatgtgagaggacacgtgggcttccgaggtttgcctgctcccatcccatgagccctggagcaagccagtgtctctgacccaagcccagtgacatctttctccaaccctggttcctagaagcccaacatcccaggagtgtggatggcgaaactgccaattctcccacctcctgacccca

SEQ ID NO: 698554 - DNA, 554 bp, Homo sapiens
gtccacacccccatcatccctcccacagtcccagcatgcactggacagaatggaagggtgatgaccctcaggactactctgtcagacagggagggcagacagtccccatccaccagcctctcccactccactgagagctcaagaaactcagggctttgcaacagggtgtctggctcccagggccctgttgcccagggatgctgaagaagatgctatcacagggctttggggagccaccaaggtaggaaagatgtccccagagagagcagagctgccacagctcagctggggtcacactcacctttctccgaygccggggccaggtcaatgaagctgcgacatttttcacctttgaaaagaagagaagcgttttcagaatgtgagaggacacgtgggcttccgaggtttgcctgctcccatcccatgagccctggagcaagccagtgtctctgacccaagcccagtgacatctttctccaaccctggttcctagaagcccaacatcccaggagtgtggatggcgaaactgccaattctcccacctcctgacccca

SEQ ID NO: 698555 - DNA, 1042 bp, Homo sapiens
tgagtgcaagagctaaagtctggaatcagaattgggtaaaacaaaacaaagtaaatacaaacaaagaacagccagaaagtaataaacaaaggacaattgggtgaatggaatgaaacatgaagaaattccagagataaagtgagtgcagaagccttccacattttttcttaacccagccacagcacaggtttaagtgggtttgtatacaaaaatcatataaaacagcttgagtagagggaagagtctgtttttttcttgttttgttttgtttgtactcatattttgattactggacccttgccttgtttcttttaacttggtgctccctttgctcccttattcttgcataccagacttggtaatgtcagaatcctgattcatctgggcctggggccctgccatacctgtcctaatgttgtctctgcttgaacttcaatctcctctacttattycctaatactcattatctattccagtgctttggatatagccaaatgcctctatcaatgagctcttccaggctactgaggacccacctacaatttctagttagatgttgctaatgccaattatttatttacctattgcctgttgttagactttaccaatgtgctatctactggtccagatgtcttatctttgcacaataaatgtgtattgaatttaacttcctggaaccttcccagattgcctgcgctgctccagtgggtctggctctccctggtgaggttccagggttgccagctgtctggttttgacaaagacagtctaacatttgaacttgctgcccagtaaaaaataccagacatatgactgtccctttttttccaattaaataaatggtatcattttcttatagcaaaactagtatacacataagcagtgcaatctgatgaaagctagaaattgttttcagtgcactttttatactatctcttttcaaaattagagcttcaggtacgtatccaatgtgtctagtattttgcagataccatttagcaacatgagctggactattgtttctccaaccacatcttacagc

SEQ ID NO: 698556 - DNA, 1042 bp, Homo sapiens
tgagtgcaagagctaaagtctggaatcagaattgggtaaaacaaaacaaagtaaatacaaacaaagaacagccagaaagtaataaacaaaggacaattgggtgaatggaatgaaacatgaagaaattccagagataaagtgagtgcagaagccttccacattttttcttaacccagccacagcacaggtttaagtgggtttgtatacaaaaatcatataaaacagcttgagtagagggaagagtctgtttttttcttgttttgttttgtttgtactcatattttgattactggacccttgccttgtttcttttaacttggtgctccctttgctcccttattcttgcataccagacttggtaatgtcagaatcctgattcatctgggcctggggccctgccatacctgtcctaatgttgtctctgcttgaacttcaatctcctctacttattccstaatactcattatctattccagtgctttggatatagccaaatgcctctatcaatgagctcttccaggctactgaggacccacctacaatttctagttagatgttgctaatgccaattatttatttacctattgcctgttgttagactttaccaatgtgctatctactggtccagatgtcttatctttgcacaataaatgtgtattgaatttaacttcctggaaccttcccagattgcctgcgctgctccagtgggtctggctctccctggtgaggttccagggttgccagctgtctggttttgacaaagacagtctaacatttgaacttgctgcccagtaaaaaataccagacatatgactgtccctttttttccaattaaataaatggtatcattttcttatagcaaaactagtatacacataagcagtgcaatctgatgaaagctagaaattgttttcagtgcactttttatactatctcttttcaaaattagagcttcaggtacgtatccaatgtgtctagtattttgcagataccatttagcaacatgagctggactattgtttctccaaccacatcttacagc

SEQ ID NO: 698557 - DNA, 651 bp, Homo sapiens
gaatgtgtctgtgtttagagataaggtcttttaagaggtaattaagttaaaatgaggtcattagggcaggccctaatccactatgactgctgtccttataagaggaggaaatttgaacacagacamacacagagaggagaccatgaagacacagggagaagacaactatctccaagccaaggaaagaggccacagaagaaaccaatcctgccaactccttgatcttggcacctagtctccagaattgtgagaaaataaatgtctgttgtttaagccactcagtctgtggtactttgttatggaagccctagtaaaccaatatattgtctgaaactgctgtttatcagattcctaagtgataacaatctgattttaaaaattatatagtacattaagctatctctcacactttaaacatcaatggcaaaactaaaggtatagtaacaattatatctaatttggctctacatttcttggggaaaaaagaataaacacatttgctatgttattggtgaagaaagtctggagaaatagtattttcttctaatgtcttcatttagaaacaaaatactaaaattatgtaaatatgtgaacttatctttacaatacaaaatgcaacaatttcaaacagcatgacatgaaagcagtttt

SEQ ID NO: 698558 - DNA, 366 bp, Homo sapiens
tttctctctccccaaggtcccaagatccayaacaacccattcttcccaccaaagatgatgagattcagaataatcctgtctgtgtaggattcattttttaagagggatttaataaattctatttgttcaatatagaagtccatgggggaaatttccttcctttgatttctaacaaggggaaaaccagcaaggcaaggcaaagaaacagtctggagagggctgcaaaataagtgatcttcctgagaactaaacttcagtatttgaagttacttcaattggagagaaatcgactactaagtggtgccatgcagacttggaagggaataactactgaaagaaccattctttgattttctgttggggaga

SEQ ID NO: 698559 - DNA, 2066 bp, Homo sapiens
ggctgtataatgtttgttggtttgtctgtcttttccattccccatgaaatcaggatctgtaatctgtcacaatatcccctgactaggacataataggcacttagtacatatttattcagttttaaaatatgagcaaagctataggatggaaatttgttagatgtgttatgggagaatgattaatacattttaaggatgaaggaaggtaagatttgaaatgttgaattctgaaccaccggacaaataaagggcagggagtgagactagggttgcagcgagacatgaaaaccaaagaaaagcagctctacaatggaaccattgatgtaaagggacacacacacacacacacacacacacacacacacttcaattttgaggcagaagaatatagactgaggttgacatgcaagggcacagggttaaaagtgaagaatggactccaaatcaggagtcaatttttctggtgtaactacagcttcagaactaaaattaaggagctgttgaggttttctacctgacttggataggaaagctaaactaggattataccatgaaacatcttaaataccaggctgaagaggggttctaagtcttgcagtccttggaccattactgaataattatgaacagagggggagaaattaaagattagaaaacragtctaaccatgttctataacactgaagttagcacatagaaacttaatgtgactgaatattaggagaataaatattttattaatgataataaaaacttaaactagaggtgtggcagcgatacttagaggaagaaaaatgtagcatccatgggaaaaactggaggtagtctgagacttgataagagagaggaaagacataaattttactgaaatagttaaacataaattttagtgaaatggaatagttaaatatttcactgaaccaggtactttacttctttgagaaataactccttgagtttagattatctgtgttattctggtacaaagaataccaatttatatgctatttttaaaaaataaacagggactttaatttttaacaaagacagaatcttatacctcaggtatccactggtaccctggaggtaccaggcagctgtgcagagctgcaggcatagactaggaagtgctgccagcttcaatgaggtatatgttgccttgccaacttgtattagggacatttttctgtatcctgtgatccactctttcttccctgaaacattttttttcttaaaaacaaaaccaaaactacattctaatcagacaaaactgtttttgaaaagccaattcaagaaaattactgttagaagtattgaggaacagatactgataacattttttctactgattattctccaatgttctatcttcatgattcacttttaatataaaattttaaagatctcaaacctctctatattgctggttttctaaatgtataagggaagccagaaacatatgttaatatgattttctgtgttttgatactagaattgaaaacaagttagtatcattatgaaaacacaaaatcttatcacttggttttataacactcattatatgaagctctggaagatcacattcacatggaaaagcacacagttgtcaagaaatgatgcttttaattaagtaaaagatctatacctgattgggatgattacttatgttcttgtcattctctactagacacgacatccttgaggatagggatatgacttatttgtctatgtatcttcaggcttagtgcaatgcttggcatataacaataaaaatttttttgaatgaatgacatttaaaaaaatataacacatagaacttaccatgtaccagacacctacccaaatgctttacaaatattaactcatttaattcttattctacaaagaaaattaaggcaccgagaagttacattatgtgcccaaatcacacagatagaaagttatggaatcagaagtcaaactcaagcagagctgtgccagaatttgtactcttaacttatattatctctaaataaatgctgctgttaagttgtaaaaaatacaaatatgtaaataaatatataatg

SEQ ID NO: 698560 - DNA, 2066 bp, Homo sapiens
ggctgtataatgtttgttggtttgtctgtcttttccattccccatgaaatcaggatctgtaatctgtcacaatatcccctgactaggacataataggcacttagtacatatttattcagttttaaaatatgagcaaagctataggatggaaatttgttagatgtgttatgggagaatgattaatacattttaaggatgaaggaaggtaagatttgaaatgttgaattctgaaccaccggacaaataaagggcagggagtgagactagggttgcagcgagacatgaaaaccaaagaaaagcagctctacaatggaaccattgatgtaaagggacacacacacacacacacacacacacacacacacttcaattttgaggcagaagaatatagactgaggttgacatgcaagggcacagggttaaaagtgaagaatggactccaaatcaggagtcaatttttctggtgtaactacagcttcagaactaaaattaaggagctgttgaggttttctacctgacttggataggaaagctaaactaggattataccatgaaacatcttaaataccaggctgaagaggggttctaagtcttgcagtccttggaccattactgaataattatgaacagagggggagaaattaaagattagaaaacaagtctaaccatgttctataacactgaakttagcacatagaaacttaatgtgactgaatattaggagaataaatattttattaatgataataaaaacttaaactagaggtgtggcagcgatacttagaggaagaaaaatgtagcatccatgggaaaaactggaggtagtctgagacttgataagagagaggaaagacataaattttactgaaatagttaaacataaattttagtgaaatggaatagttaaatatttcactgaaccaggtactttacttctttgagaaataactccttgagtttagattatctgtgttattctggtacaaagaataccaatttatatgctatttttaaaaaataaacagggactttaatttttaacaaagacagaatcttatacctcaggtatccactggtaccctggaggtaccaggcagctgtgcagagctgcaggcatagactaggaagtgctgccagcttcaatgaggtatatgttgccttgccaacttgtattagggacatttttctgtatcctgtgatccactctttcttccctgaaacattttttttcttaaaaacaaaaccaaaactacattctaatcagacaaaactgtttttgaaaagccaattcaagaaaattactgttagaagtattgaggaacagatactgataacattttttctactgattattctccaatgttctatcttcatgattcacttttaatataaaattttaaagatctcaaacctctctatattgctggttttctaaatgtataagggaagccagaaacatatgttaatatgattttctgtgttttgatactagaattgaaaacaagttagtatcattatgaaaacacaaaatcttatcacttggttttataacactcattatatgaagctctggaagatcacattcacatggaaaagcacacagttgtcaagaaatgatgcttttaattaagtaaaagatctatacctgattgggatgattacttatgttcttgtcattctctactagacacgacatccttgaggatagggatatgacttatttgtctatgtatcttcaggcttagtgcaatgcttggcatataacaataaaaatttttttgaatgaatgacatttaaaaaaatataacacatagaacttaccatgtaccagacacctacccaaatgctttacaaatattaactcatttaattcttattctacaaagaaaattaaggcaccgagaagttacattatgtgcccaaatcacacagatagaaagttatggaatcagaagtcaaactcaagcagagctgtgccagaatttgtactcttaacttatattatctctaaataaatgctgctgttaagttgtaaaaaatacaaatatgtaaataaatatataatg

SEQ ID NO: 698561 - DNA, 1245 bp, Homo sapiens
ttccttccttaggcagagaaccacacagacagtcccaggctaatctgcaaagcgcactgcagttgcactaaatcctcccagcaaaacatcataaaacccttcctgtttgactttacacagcatttaaacatcaaaataattaccaggaggctgaggaagccgtgtcacagctcaggtcaagctgttctctcccgaagcagaggtacagagcagaatgtgcacggcggctgattagggcaagtgggccaggcttagggatgggagaaaaggtaggacactgtaatgggaggtcaattatctcatgccatctttaggtaccagcaatgagtaactttatgaagaactactttatgttctttagaagtccttcagagctaacgtgatgcaatatagctgttactcattcacttccttaaactttaaactttttgaggtttacaaattaaatcataataatataaaacaattatgtccagtaacagccacatctgactgattggcactgctgttatataaaactccttagagaactctcggtttgatgttaaaataaaaaaagaaaaaagcctcgtttttcaaaaaggaggacaactgactcttcaagatgcatttttcttccttttagcccttcatgcatgcctcattctgtgcatgaaaaaactgaatatatttcctagggtcggtcacactgctttccacagtttgcaaaaattaagggatattactggattaaaaacaagcaaacaccgtgcccattctgtcaaacagccatgctgttctgagtatgatgtgccatgctcagaaaataggccgtgctcatttttattgatttatttcaaaacttctctcagtcaaagcgaccctggaggtttaataacattttttgctatagactgcagcagagacatattaggcaggactggtgaaatatagccattaacatataaatccaatgccttatcaataacacattttaaagttggtgacaagacctaaaaatcatcatttaataccattacattcagcagctttttcatttgacatgatgctttagtgatttagtgccatgactataaaatgtcaggaggatttattggcgtgaatcagatcaattcgtattagaaaataggaacaaaaactaaaacatcctttttgcgacctactatattctgttctaagcagagaggattgaagyaatatctaattagaacccttaatattagcattagaattattttttcttaa

SEQ ID NO: 698562 - DNA, 590 bp, Homo sapiens
aaaattatctaatttaaatcttccaacaaaattttgaagttggtgctaacttgttagctccacttcagagatgtgtmagttgagtcttagattaaactgtaagtaagtgtgtagtgtataagcatccaggaagtctgagttcagtaacttctctctgaactactttctatgtccttcctgtctgattaattatgggttaagcagaatattcttttggttcaattctggttattgtaaatcgctctgaaagtatgtagaatgattttctaagtttaatattcacttaagcttagtaaaatataataaaggtaatctcatccttcttttataaatgagcatctcatagtacttcaagattataattcaagtcataatttgtgtgggacgtaaatgtcaggattggattgatactgcactgatactaactcaggattgggttgagtcttaatcttcaaaaaatcatccttttgtagtgatgttgtttgcaaaggactttttcttttgcttaacttctcctatatttttcttaaaatctctacattttttaatcttccagagttttctatttttacatacttatttgccttcta

SEQ ID NO: 698563 - DNA, 2263 bp, Homo sapiens
aatgaggaaataaacacataaatgaggtgataggacccacacatggtttctgggcaggaatgacaagggaggttgtggccaggaagacatgagaacaaatttgagagctggttcaaaagaaggaattatccatcatgtaaaagtgtatcttagctattcaatggtttgaccattttcctgacacctagaaatttataagaaatttatagcataacacacacaggggtttctacatctctcaaccatttttgtttcaatcaacttaaatgtttttactccaatagctctgtgttctgagccccagcaaggtaactggtggagccatcttgtgtttctgtgtttagctcggcctccacaatcagagggtggaggccgctgggatcccagaggctgagcaaaaaggaaaagcttaagttccaccactcagagctccccggagctccccgaggagtctgctggatttgaccactatgacccgctctttcgagactccacaaactgaaccatgtcaaccttattttttcacatttctattgaacacaaagaaagctgttaccagggaaatctgtccgcaacaaggcaaattgaaatatgatttatttaatggtgctgctcagctgattaaatattattcactcttcattttgtccttcagcccaagcagaacattgatatgacacttggatcttggtataagaaaatacacatttggtgcatctgtgacccttgaaatttacaaaattatgtaccaaaaaatcccatcaagtgcaatgcagtgcatcccacactgatgtgtcatcctaatggagaaggagaccttctcccaggcattccatggaaggccactgcagaaattctgaaggctcacaactctcctagcagtttgggggttagtactgctatgttacacgcatgccgataattttatatgcacatatatatatatatagtataatgtcatacatatataacaatgtaaacatatatgtccataagtaaatgtatacatttaaaagtgaaaatcgttcagaaaggtcttctcctccttccctcaccaaaatgggattcattcagttctttatactattttattccaatttaaagcttgtagcgttaattttctttttttcttgtaacccaccacttgtgggttcagagggcctgcctgtaggtactctcctttccaataattcaaatagctacagatgttgagaaggctgttatttctttaataatttctgttcaaagattttcagttctggagtgtaccagattcaatggctataacctcaataataaatagtaaaatgctctgattttaatctactttcagaggttagttcttatcagtgaactcttttaaaatctttcatgcatgaaatgtcaggtttataaaaatcaagtttctttgttctctgttttatttactgattttctaattttgcatttaaaagaatacaggctatataaatacctttgtttgtatttttaatactttaaaaattttcagatgagttatttgtttattgcatacaatttttctccagactggaaggaaggcaatgattatactctcagatttcaatagaccggtagatgctgaggactaataacgaagcagggcctttaggggagggttttttgtcttttatttctacattctgcacacacagtagtcaaagtcatattttcaaaaaacatacgtaaccaatcagatcatgttgatcactgctcaaaatcctctaatgattcctgccacatttagaagatcattaaccttggccttcagtcctgcctgacctgccttgtcttctctctgcttccatctctcattattgtttcttactcacttcggcttccattgccttgggcttctggaaattcctgagcaggttgttctcccagagtctgcagagtagcttctcttccatcatgcaggtgtcccctaaacctgattagccatcaagaatgatggtatgaccaccccttcccccttcatcctcaatcttccccttctctaggttccatcttagctccatttaccacctgacatatttcacatacttattggttcattttccgcttccatcctcacccagagagatgtcagtgctgtgagagcagagatcttgcccracttgctcaatgctgtgtccacagggctgagaggagtgcctggcagccagcagacattccatatatccatgtcatctttagactgagcgcagttttgactactgactttgaacttctgcaatatgtc

SEQ ID NO: 698564 - DNA, 640 bp, Homo sapiens
tctcacgttcaccttcgaatcaactaacatagatgttcttttaaaacatgttttgctaagagcattctgataagtctttattcttagttctggccatcagaatgaycaattaactgaaatacttatttcaattatttggtctatctaatatatagtttaaaatacaaggagaattgtcaattttccaaaggatagtcatttgatattatgggttgaattgtgtccttcaaaaagctatactgaactggcgaatccagaacctgtgaatgtgactttatttggaaacagggtctttgcagatgtaagtaagttatgaggtcatattggattagggtaggctgtggcagtgggcatggctatgttccaataaaactttattttcagaaacaaacagtgggccaaatttggcccatgggatacagtttgctgatgactgctgaaactgtttgaggaagataatggttttactgggttcacaggtgagggaagtgaggttgaaagtttacaatcttgtagaaaaatcacacagtgaatacagggtagccctggagtttcaactgacaccacatctccagaagccgccgttgtaatcactcggctacactatcttagaggcaagaacaattctgcacttttgtta

SEQ ID NO: 698565 - DNA, 640 bp, Homo sapiens
tctcacgttcaccttcgaatcaactaacatagatgttcttttaaaacatgttttgctaagagcattctgataagtctttattcttagttctggccatcagaatgaccaattaactgaaatacttatttcaattatttggtctatctaatatatagtttaaaatacaaggagaattgtcaattttccaaaggatagtcatttgatattatgggttgaattgtgtccttcaaaaagctatactgaactggcgaatccagaacctgtgaatgtgactttatttggaaacagggtctttgcagatgtaagtaagttatgaggtcatattggattagggtaggctgtggcagtgggcatggctatgttccaatraaactttattttcagaaacaaacagtgggccaaatttggcccatgggatacagtttgctgatgactgctgaaactgtttgaggaagataatggttttactgggttcacaggtgagggaagtgaggttgaaagtttacaatcttgtagaaaaatcacacagtgaatacagggtagccctggagtttcaactgacaccacatctccagaagccgccgttgtaatcactcggctacactatcttagaggcaagaacaattctgcacttttgtta

SEQ ID NO: 698566 - DNA, 1191 bp, Homo sapiens
tgagttctaattttccagaaattatattaggaaagtaactttaaaataaatatgttaaattctacagaaaaccaatgacctaaatttaaattctaaacttgaaaccagaaggtttgaccctatcttcagggtgcttttgtcgtgcatattgtaaggagaagatcgggttataccccactgaggaattcctcagctaatgtcttatagaactataaagactcttccaatttactcatcctgggaaaatgattacttaatgcatttacagtctttacctccagattaaaataatctcaatttaattttctttataggctgtatttcttttttgctaacctgtgaatttccttgatttttctgaaaatgagatgcccgaaattaaagcttacactaatacagtcagtatactaattcattctaatgctgggaggatttcactcccagcacttttaagataattaatctcagattatgaaaaggcagcaacttgtagagcagcctaccctatggttacaaagataaaatagaacatgcaaatcagatgataagctcaactagtaataataattattgtttattaagtggtaatagtaaggacattgttttaattcatcacacctgctataaatatttggcctgaaggctggctcttcaagcagatttccagctggcttcccagagtgtcttattatttcctattggcaatacccaaggaccagctattcttccagcaccttaatcctggtcctaagggtctttccttgcacctcttatgagatgaaccttgcagctcatcttaatagcgctaaccaaaacagctacttagagtgcgtgaaggacctcttcaaggagaactacaaaccactgctcaatgaaataaaagaggatacaaataaatggaagaacattccatgctcatgggtaggaagaatcaatatcgtgaaaatggccatactgcccaaggtaatttatagattcaatgccatccccatcaagctaccaatgactttcttcacagaattggaaaaaactggccgggcgcggtggctcacgcctgtaatcccagcactttgggaggccgaggcgggcggatcacgaggtcaggagatcgagaccatcctggctaaaacrgtgaaaccccgtctctactaaaaatacaaaaaattagctgggcgtagtggcgggcgcctg

SEQ ID NO: 698567 - DNA, 1268 bp, Homo sapiens
ttttttwaaaaatgcatgtatgtggaaccaatttttgtatgtgttaagtatgtggaacttttagtcattgctttgttgaatgggccacctatgtcattctttctttctattttgttttcatttcatcaaataattagttcccttctctgaaatttttacagtaatggaagacatagcattggctaatcaaatgaaatgtaaagaacaacaatgaagaataaaaacctacaacaagatgatactctaatcagaggacatggaaatggaagaaagtgtgtgctatgagatgttagcatatatttcctttgtttataagccaaataggattaggcttccagaatttttggaaagaaaattaaatcaacggaattctatttaactgattggtgtattgtttattgacactgtctcttctgttccctgccttatctcagtttgctttaatgcttcagtgcctcaacagttcagttggagtaagtgcccagcaaatgtataaagccaattaatgcaacccagttaccattcaaatttgccaagacaaaagaagtgtaaccttctttaagttctttggcttcattaaacttctatttatttaatacttccattaacaggcaattaattcaaatcaaacgagtttggaatgaggataaaagcagaacagcagcagtgaaaggtgagacacaagggccaaactgtggtgcagaagctgaggaaactcaggtgaggttaggagagtctaaattcctccaaagaggaatacactttctttcctaaagtgtttttcttgtttgtttgtttgtttttttttgagacgtagtcttgctctgtcgcccaggctggagtgcagtggtgccatctcggctcactgcaagctctgcctcccgggttcacaccattctcctgcctcagcctcccaagtacctgggactacaggcgcccaccaccacatccagctaatttttttgtatttttagtagagacggagtttcaccaggttagccaggatggtctcgatctcctgacttcgtgatccacctgccttggcttcccaaagtgctgggattacaggcgtgagacaccgcacccggcctctttcctaaagtcttaagaccatcactagttgaggaagaggactgacagcgagtgtgatgagttgagaaagcagtctctatgggccccgcagttaggagagtgaaggcaagaaaaggatgttcctggcaacgaatcagtcacgtctctttgtgaagcaggccctagggatcaccctc

SEQ ID NO: 698568 - DNA, 1268 bp, Homo sapiens
tttttttaaaaatgcatgtatgtggaaccaatttttgtatgtgttaagtatgtggaacttttagtcattgctttgttgaatgggccacctatgtcattctttctttctattttgttttcatttcatcaaataattagttcccttctctgaaatttttacagtaatggaagacatagcattggctaatcaaatgaaatgtaaagaacaacaatgaagaataaaaacctacaacaagatgatactctaatcagaggacatggaaatggaagaaagtgtgtgctatgagatgttagcatatatttcctttgtttataagccaaataggattaggcttccagaatttttggaaagaaaattaaatcaacggaattctatttaactgattggtgtattgtttattgacactgtctcttctgttccctgccttatctcagtttgctttaatgcttcagtgcctcaacagttcagttggagtaagtgcccagcaaatgtataaagccaattaatgcaacccagttaccattcaaatttgccaagacaaaagaagtgtaaccttctttaagttctttggcttcattaaacttctatttatttaatacttccattaacaggcaattaattcaaatcaaacgagtttggaatgaggataaaagcagaacagcagcagtgaaaggtgagacacaagggccaaactgtggtgcagaagctgaggaaactcaggtgaggttaggagagtctaaattcctccaaagaggaatacactttctttcctaaagtgtttttcttgtttgtttgtttgtttttttttgagacgtagtcttgctctgtcgcccaggctggagtgcagtggtgccatctcggctcactgcaagctctgcctcccgggttcacaccattctcctgcctcagcctcccaagtacctgggactacaggcgcccaccaccacatccagctaatttttttgtatttttagtagagacggagtttcaccaggttagccaggatggtctcgatctcctgacttcgtgatccacctgccttggcttcccaaagtgctgggattacaggcgtgagmcaccgcacccggcctctttcctaaagtcttaagaccatcactagttgaggaagaggactgacagcgagtgtgatgagttgagaaagcagtctctatgggccccgcagttaggagagtgaaggcaagaaaaggatgttcctggcaacgaatcagtcacgtctctttgtgaagcaggccctagggatcaccctc

SEQ ID NO: 698569 - DNA, 2993 bp, Homo sapiens
ggctgaggcaggagagtgacttgaacctgggaggcggaggttgcagtgagccaagatcacgccactgcattccagcctgggcgacaagagcgaaactccatctcaaaaataataataataataataataacaacaataaataaacatactaatatcagctctgggtccatttttcctgattctcactctagagaatctgtttttgatttaagtgatgtcaaattctcttgaaactctgtttagtacctagaacagtgctgaacacagagcaagtggttaataaatgttattcttttcttccattcctaccctttttaccaattcttgcctctcctcaatcttacatctttaaaacattaggtgcattgccctaactggaattccaaaaaagctaaacatacccaaatttacatattgtataaatccaatgtagactactaagatctacttacagcctaagctcttcacacataacaagagaaatgcttgccagtaactcttctgcagaccccccctttttttttattgaaagggtctcactctgtccacccaggctggaggacagtgacacgatctcagctcactgcaacctctacttccagggtttaagtgattctcatgcctcaccctcctgagtagctgggactacagtagatgcacaccaccatgcctggctaatctttgtatttttagtagagatgagattttgccatgttgtccagagcagtcttgaactcctggccttaaacaatctgcctgccttggcttcccaaagtgctgggattacaggcgtgagccaccatgcccgactgggacccattttttgaatcttcrtaagtcctccttgtaactagtctaattctctgtgtatcctaagcataaaaatagtagcaaagtttcctatggtgtcttggtcagctccccagtaaccagggagtgaagatagtgctttttcttaaagatgggccagggatgctcactgccattagagagacataaagtcaaggaataatgacagtaacaaaaatttaaacagtgttgctttatcaaggtggtactttaacactgagacaggatcgcagttctcatctgtgatgcatactttaagcaaaggagacagactgtgccatttgcaaaatctcatgcttgcctctgaagctaggaaggcttccactggtgccaattcattctaacttcacggcaacctctgcaacagtgggagatgtggcagctacccattgaaagggccactgctggctgcctacttgaccatcatttctctttcttgcttgctaacagaatactgattctgttcaaatggcattgtgcccttactggggattaatccaagacatctaaatctctcttgcctactctgttgcccgtgactggttcacggatgggtctgaacccactgcaggctgacgtgatataaagtcccatttgctgcgggatcttaggaaatgttcctgagaaaagagaggcacgagagaggaaagctcttttgtcctctcattacatgcttggtatgctgtcatgcaggggtatgacactgaatggtaacaaccattttgcattcattaggggaaacaccacggcacactgggagtagcagaatgtatcctcactgatctgtgtgtccttgacacaggtaaattgcctatgtaacaaccctggagccaccccccccactcacttactgttgtgtaatagcacacagcctaacggtttaaaccaccagtcaaatggttttctgtttggttttttaccagcctgaagcatcctaacagttatatctcagaacaatggtttacaatatgactgtgacttggaaacaacataattttcggacttaggagatggaataagatgttaaagtatggtggggacatgctgatgaaagctggggttccctagctcttctgcccatatctgctccaagagctcagcacccttctggaatcacaggagtgatgaggatggcttttggggttaggtcagcctggggatagttaacatttgtaggtctcctgggtcactgcttttccaggaacactttcctctttgtccttgctgtagaatgacttcttgcatttcactgatactcttttatagtacccagtagagttatgcatgtggactgccagattccctcagagagtgcccatggattagcaatgcttgttctggggttaagaacccgggacccagcagcccagcagaggtgttgctgtaagtaagcatgacagggaggtgaagactggatgaaggaaagagggcctacacctctaacctagttcaaagcagaagaggctggagatgctgaacagacactactcctgtcctctgtggcttcttgtgtcatgcccacccatccacccactcacagcctggggtccacaaacccagacactcacttgctctccatacacaggcagaagaggagccgccgccacagtagatgctttcatgccatttcccaaacagccgatgaaccgcttttccactcctgtcaaacactgtgccttcaatctcatgggcattagtgctccagtattttgcctaggattcaaatgagttgttggcttagtcctttagcatcagcttattacagatattaaggaaagaaaaaaggaaaagctagagaaaggactgtaagagtggctccatactgcatattagtttgctagttctgggttccgtttttttaaccgacaaataaaaaatttatatatttatcatgtacaacatagtgtcttgaaacatgtatacattgtggaatggctaaatcaagctgattaacatatgtattaccttacatacttacttatgataacacttaactctctcagtggccgggcacggtggctcacgcctgtaatcccagcactttggagaccaaggcaggcagatcacctaaggtcgggagttcaagaccagcctgaccaacatggagaaactccatctctactaaaaatacaaaattagccggg

SEQ ID NO: 698570 - DNA, 2662 bp, Homo sapiens
tattatccctccacccgaagaaggcaagtgtcatgagcaagaatttactactgctgcccaaatgaaaaagtaactggaatttgctgataattttgcccacgtgtcatataataaagtcatttaaagcctgtttaaagtgttgattgactttgctattaaatcattagaggtcaacctatatgggggagaaaaagggactcagagtaaagcaaaattgtgccctaaagatacttgaaggggtggtctaaattgaaggaaaaaaaagaaattaatgataaaaatattataatttcataattgacacaatatgcaaataaatatttctagcctttaattgggaaaataaagatttttcttagaaagcaatacattttctccattcttcagtctaacatattgaaaataaactgcccagatgaaaacattttcccctcttatttaaagcctgtatctttgaatggctttggaaactatggttgagtatagcatctaagtacaaataggtagctttccaccagcattcaaaatgcattaccatatgcttgttcccttcatatttgaatttccccctttttaactataatgccaaattagtccttttgtcattctctgaaccagaagatcctccttctctctccatgctgagcctttcatagggcaatcatcttctcatttacttcccattgtctcctctgtggactttgcctatttgaaatcctacctatcttttcaggtttactgcaaagcccatctttttggatgctactcaagggtgcttttcatgatccttccagagaaaaggaatttttctttttttaccaaccatttttgctttacttttatttatcattcaccctatttatatcatacttatataatatatttatgtgtttatgtataatctctctccagctaaattataaatttttagaaatcagaaaatatgcaatattttttccttgaggtcatagtagcaactaggatgatgcctcaaatatttatgtgctcaataaatattgggtgaatcaataaaatactgtcagcaaattcaacactaacagcactctaataacatattttatgattctaatattctagttcacagaacaaatattttaagatttggagtatttcaatgtatgacaaggataaaaatttatgaagtgatatttaattccactctgtgattatttcgtttatttcgttggttattttatttgtctatcactagactggaatctccataaaagcaaatacatactttgttcaacattttattctcaagtatgtattgagtatgtgtaagaaggaaggaaagagataaggagagaaaagagagagggggaagaaagaagtgcacagaatttgcgtaagttagtgtactcatcaccccttccactaactagaaagtcacctctgyctcattccctagtttccattgctcctaacacacccaaacagaaagaaactctggtgaatccgggctgctagtgctgggtacctcgtataacagggagggctgatattattttacatatttcaatctttcttttgctcattaactaatgtgacaatcatgaaagtgcataactagaccagtgaaattccaatttaggtatttggtaaatatgtaagaaaatataaattcatgtcttcatatacatattaagcatcaaatctcatagcacaaaggtgtcaaacctatgtttatagaaacaaaaagccacagtgaaaatactgtaggttatgtaaagcagaggagagagagagagaaatgcacaaaatttcaagacaggcatagtgaaatgcacctgtaatctcagctactgagaggctaaggtgggaggattgtttgagtccagagttcacaactagcctgggcaacatagcaagactccatctcaaaaaaaaaaaaaatcaatggagaaagcatagtcgccttctatacattggggagggaaagaaagaaggaaagaaagagaagaaaaagaagaagaaagaaagaaagagaaagaaagaaagagaaaagaaaagaaaaagagagaaaggaaggaaggaagaagaaagatgaaagaaagaaagaaagagaaaagaaagaaagaaaaaagaaagaaacaaagaaaatttctaaatttttagaaatcagaaattatgcaatatttttcccttgaggtcatagtagcaactaggatgatgtcttaaatatttatgtgctcagtaaatactgggtgaatcaataaaatattgtcagcaaattcaacactaacaccactctaataacatattttatgattctaatattacagagagaaagagagaagaaagaaaagaaaggaagaagaaagaaagaagaaagaaaggaagaaaggaagaaagaaagaaagaaagaaagaaagaaagaagaaagaaaagaaagaaaagaaaaagaaaaaacttcacctaagccaagcctcatatcttacacaagaattaactcaaaagtattgaatgaatcacagacttacatgtaacatgaaacaataaaagttttaagaaaaaagtatgaaaagactttggaaattaagactaggcagaaattcttagagatttgataccgaaagcacggttaccctccaaccctgccaaaaaacatcgtaaatcatactttatcaaaagtaaaaac

SEQ ID NO: 698571 - DNA, 2662 bp, Homo sapiens
tattatccctccacccgaagaaggcaagtgtcatgagcaagaatttactactgctgcccaaatgaaaaagtaactggaatttgctgataattttgcccacgtgtcatataataaagtcatttaaagcctgtttaaagtgttgattgactttgctattaaatcattagaggtcaacctatatgggggagaaaaagggactcagagtaaagcaaaattgtgccctaaagatacttgaaggggtggtctaaattgaaggaaaaaaaagaaattaatgataaaaatattataatttcataattgacacaatatgcaaataaatatttctagcctttaattgggaaaataaagatttttcttagaaagcaatacattttctccattcttcagtctaacatattgaaaataaactgcccagatgaaaacattttcccctcttatttaaagcctgtatctttgaatggctttggaaactatggttgagtatagcatctaagtacaaataggtagctttccaccagcattcaaaatgcattaccatatgcttgttcccttcatatttgaatttccccctttttaactataatgccaaattagtccttttgtcattctctgaaccagaagatcctccttctctctccatgctgagcctttcatagggcaatcatcttctcatttacttcccattgtctcctctgtggactttgcctatttgaaatcctacctatcttttcaggtttactgcaaagcccatctttttggatgctactcaagggtgcttttcatgatccttccagagaaaaggaatttttctttttttaccaaccatttttgctttacttttatttatcattcaccctatttatatcatacttatataatatatttatgtgtttatgtataatctctctccagctaaattataaatttttagaaatcagaaaatatgcaatattttttccttgaggtcatagtagcaactaggatgatgcctcaaatatttatgtgctcaataaatattgggtgaatcaataaaatactgtcagcaaattcaacactaacagcactctaataacatattttatgattctaatattctagttcacagaacaaatattttaagatttggagtatttcaatgtatgacaaggataaaaatttatgaagtgatatttaattccactctgtgattatttcgtttatttcgttggttattttatttgtctatcactagactggaatctccataaaagcaaatacatactttgttcaacattttattctcaagtatgtattgagtatgtgtaagaaggaaggaaagagataaggagagaaaagagagagggggaagaaagaagtgcacagaatttgcgtaagttagtgtactcatcaccccttccactaactagaaagtcacctctgtctcattccctagtttccattgctcctaacacacccaaacagaaagaaactctggtgaatccgggctgctagtgctgggtacctcgtataacagggagggctgatattattttacatatttcaatctttcttttgctcattaactaatgtgacaatcatgaaagtgcataactagaccagtgaaattccaatttaggtatttggtaaatatgtaagaaaatataaattcatgtcttcatatacatattaagcatcaaatctcatagcacaaaggtgtcaaacctatgtttatagaaacaaaaagccacagtgaaaatactgtaggttatgtaaagcagaggagagagagagagaaatgcacaaaatttcaagacaggcatagtgaaatgcacctgtaatctcagctactgagaggctaaggtggraggattgtttgagtccagagttcacaactagcctgggcaacatagcaagactccatctcaaaaaaaaaaaaaatcaatggagaaagcatagtcgccttctatacattggggagggaaagaaagaaggaaagaaagagaagaaaaagaagaagaaagaaagaaagagaaagaaagaaagagaaaagaaaagaaaaagagagaaaggaaggaaggaagaagaaagatgaaagaaagaaagaaagagaaaagaaagaaagaaaaaagaaagaaacaaagaaaatttctaaatttttagaaatcagaaattatgcaatatttttcccttgaggtcatagtagcaactaggatgatgtcttaaatatttatgtgctcagtaaatactgggtgaatcaataaaatattgtcagcaaattcaacactaacaccactctaataacatattttatgattctaatattacagagagaaagagagaagaaagaaaagaaaggaagaagaaagaaagaagaaagaaaggaagaaaggaagaaagaaagaaagaaagaaagaaagaaagaagaaagaaaagaaagaaaagaaaaagaaaaaacttcacctaagccaagcctcatatcttacacaagaattaactcaaaagtattgaatgaatcacagacttacatgtaacatgaaacaataaaagttttaagaaaaaagtatgaaaagactttggaaattaagactaggcagaaattcttagagatttgataccgaaagcacggttaccctccaaccctgccaaaaaacatcgtaaatcatactttatcaaaagtaaaaac

SEQ ID NO: 698572 - DNA, 875 bp, Homo sapiens
cagcctcaaagtcctgggctcaagtgatcctcccaccttagcctctcgagtagctgggactacaggtgaacaccaccacacctggctaatttttaaatttttagtagacacaaagtctcaccatgttgcccaggctggtcttgaactcctgacctcaagtgatcctcctgcctcggcctcccaaactgctgggattacaggcatgcgccaccacacttggccaaattactggagatttttattctgtatgttaaatcattctgtaatttaagtgttttatacatgtattatttttgaaatctgaaaatacaaagatatgttttaatggaagtagagagatgatttgatgtgtgtgagtgtgcatgtgtcccccagcctgaaaagcattttytggtccatcttgggaaaaagtcagctgagcactcctgctgggccctcaggccataacccacacctcctgcttctgcttcctcacccagcccttccttccttacctcctgtcagctggctctgggcccaggtacatgggaaagaaaaccttctgaggtcaccatgtggtctgccaacccagcaggctttccatgatgtcacttcactttgctgagcaaatttcacccatttctcttcaggctacttctcagatatattccatttcatagactctattccttcaagatattccacctctctcatcactgggacagttactgcttgtccctcaggagtcagatcaaatgtctctccctccaagaagccctgccttactccagctccctctgctcctgccactccctgcacaatactagtgttttcttttgttttgtttttgagacaaggtctcactctgtcacccaggctggagtgcagtggcgcga

SEQ ID NO: 698573 - DNA, 1194 bp, Homo sapiens
taatgagacctcatctatacaaaacaaaatgaaaaaacaaatcacaaagctggtattccaaacaccttggcctcaaaggcccagggtcatgtgatgccattaagttgatccaatagcttcctcataattattaaggtctgcctagtggtccattctattgatggagggtaatttactgtaatttactaactgctgtcctatttctgagtatttgggctctttctagctttctgctcacatagatagtcctctaaattatcttcaggcccagagctttttgagtctgttgaattacttccttatcagggtggggttcctttgtgttcacacacaaatgttgacctcattacagtagttcattctcgttgacatggttttcacaaaagagttgaatggacaagcaggagttaaaacccagagactggccaggtgcggtgcctcacgcctgtaatcccagcaccgtgggaggcccaggcggatggatcacgtgaggtcaggagttccggaccagcctggccaacatggtgaaaccccgtctctaataaaagtacaaaaattaaccacggtggtggcttgagcctgtaatcccagctactcgggaggctgaggcaggagaatctcttgaacccaggaggtggaggttgcagtgagctgagatcgtgccgctgcactccagcctgggccacaagagtgaaacaccgtctcaaaaaaaaaaaaaaaaaaaagaaaactccccaaaaaacccagagactgtgtgtgtgtgtgtgtgtgtgtstgtgtgtgtgtgtctgtgtgtctgtgtgttgggggatgggggatcatgtgaggtacaggaagttggggtagtgtgaggcctccggccaggcaggaagtcagtctggggggattcctgtgtcccccacatttccctaatgccttcctggcccaagctgtttggggtctgaggtgcaacaaggggaattaggcaggctgtggtccagccactctctctttgccctgataccccgcccctaccccaggccccctctactccctcaagaaggcctccgaatcttctctaagggtgggaggagtgggatggatgagcagaaacctgaagtctgcacaccctcgctctgctccctggctctctgttcttaaggcccagcttcccgtgctggacatcacctggggatctggttaaaatgcagattc

SEQ ID NO: 698574 - DNA, 661 bp, Homo sapiens
ccatgcctggctaatttttgtatttttagtagaaacggggtttcaccatgttggccaggttgatctcaaactcctgacctcaggtgatccaccgaccttggtctcccaaagtgctgggattacaggcttgagccaccgtacccaacctcatcctgattcttttttttttttttttttttgagacgaagttttgctcttgtcacccaggctggagtgcaatggcacgatctcagcttactrtaacctctacctcccgggttcaaacgattctcctgcctcagcctcccgagtggcttggattacaggcgctcgccaccatgcctggctaatttttgtatttttagtagagacggggtttctccatgttggccaggctggtcttgaactcctgacctcaggtgatctgcctgcctcagcctcccaaagtgctgggattacaggcatgagccaccacacctggctgcctgattcttatttacaaggaagtttaggaaacactgacttaataggggtcagggccaggtggatatattaagagttttctgagggaagagtgaagaagtagggatcgatcccaagcagagtgggtgtggtgtggggcacagtggaacccaggtcctggggaaggcaggattttgagaagggcaatggagagcaagtt

SEQ ID NO: 698575 - DNA, 661 bp, Homo sapiens
ccatgcctggctaatttttgtatttttagtagaaacggggtttcaccatgttggccaggttgatctcaaactcctgacctcaggtgatccaccgaccttggtctcccaaagtgctgggattacaggcttgagccaccgtacccaacctcatcctgattcttttttttttttttttttttgagacgaagttttgctcttgtcacccaggctggagtgcaatggcacgatctcagcttactgtaacctctacctcccgggttcaaaygattctcctgcctcagcctcccgagtggcttggattacaggcgctcgccaccatgcctggctaatttttgtatttttagtagagacggggtttctccatgttggccaggctggtcttgaactcctgacctcaggtgatctgcctgcctcagcctcccaaagtgctgggattacaggcatgagccaccacacctggctgcctgattcttatttacaaggaagtttaggaaacactgacttaataggggtcagggccaggtggatatattaagagttttctgagggaagagtgaagaagtagggatcgatcccaagcagagtgggtgtggtgtggggcacagtggaacccaggtcctggggaaggcaggattttgagaagggcaatggagagcaagtt

SEQ ID NO: 698576 - DNA, 615 bp, Homo sapiens
tgccaccccaaaatatacaagattgttgagtgaaggcaagcaagaagaagcagatgcaggaaagttatcttatttgcctaaaagaaagacaaagatttataaagacaaaggtatcttgtcccctttctaccaggaagaacaagtgttaaccactaaaaacaactctagacccttatcagcctgaagatggtaccagaggaatctacaccaacaaactttcctaagtagactttatctgccagttatttgcctagccacaagttgctgtccckagagactcaaagttcttttcctttgtcttgtcacttctctgaaaatttttgttctttgttgaagatgcaacataagctgaaactcaaagcctctttgagaactacgcattctctgaatgtcttccatgtatatacgaaatatgaatgttaaacttctgtttttctcttgttattctgtcttatgttacaagggtccattcccactaagaatttatgagggttgaaaacagaaagttatttttctttccctaaaatattcttaagataagtgtttagtaaacttataaactttgataaattggccactaggcaatttggccatcggcaagagctctaagcaagg

SEQ ID NO: 698577 - DNA, 645 bp, Homo sapiens
cttccacacttagaataaattccactttgtcagggtatatacttctttttatactttgttggatgtgacttgctgatattttgtttagaatttttgaatgtacatttatgagttatattggtctgtggtattctattatatagtctttttctcattttagtatcaggctaatactgatgtcattacatgarttgggaagtgtctcctcttattttttggaagtttgcttccctggctgtagctgcttattgtagtatgattgcccttaactgttcctcccatatgtatgtggtgtctctgagtgaagacgtacagctttaatccatcctcctcctcaatgtttttcttcattttttcttctcttttcttcttttctcttctcttctctgctgtcttctcctttctttttctttcttttcttttctttctttctttttttttttttttttttttgacggagtttcgctcttcttgcccaggctggagtgcaatgttgtgatctcggctcactgcaacctccgcctaccaggttcaagcgattctcctacctcagcctcctgagtagctgggactccaggcatgtgccaccacgcccagctagtttttgtatttttagtagagacgggggtttcactatgttggcca

SEQ ID NO: 698578 - DNA, 807 bp, Homo sapiens
tgtgtgtgagtactgtgtgggggggaatgtgtgagtctgtgtgtgagtctgtgtgtgagtctctgggcatgtgtgtgagtactgtgtgkggggggggaatgtgtgactctgtgtgtgagtctctgggcatgtgtgtgagtattttgtgggggggaaagtgtgagtctgtgcgtgtgagtctgtgtgtgagtctgtgttcatgtgtgtgagaactgtgtatgggggaatgtgtgagtctgtgtgtgagtctgtgtgtgagtctctgggcatgtgtgtgagtactgtgtggggggaatgtgtgagtctgtgtgtgagtctgtgtgtgagtctgtgtgtgggagtctgtgcgcatgtgtgtgagaactgtgtgtgtgtgctttcatgagcacaatgcggcctccaaaggcaggattatctccccaacacatgtgacaatggcacctgtgcacacatgttcacatggttcttctcacatgtaacaacaacaggtacaaaatgccttctgtcccaaagtaagaggcctgagacagacctctggctggcttcagggaccctgctaaggagggaccaggcccttaaaccccccacctgctcctcacctctggcctcagacttcattgagatagggcggctcccagctgagtatgggaacccgtgtcctgctctagggccctcccaactgaatcccatcatgggtgaggctcctgatggcaccaggcaagtcccctggcccaacacaggccacagtcaggaagacttggaggtagccccttcaccccagtatggggacctccttgaaccccagga

SEQ ID NO: 698579 - DNA, 807 bp, Homo sapiens
tgtgtgtgagtactgtgtgggggggaatgtgtgagtctgtgtgtgagtctgtgtgtgagtctctgggcatgtgtgtgagtactgtgtgtggggggggaatgtgtgactctgtgtgtgagtctctgggcatgtgtgtgagtattttgtgggggggaaagtgtgagtctgtgcgtgtgagtctgtgtgtgagtctgtgttcatgtgtgtgagaactgtgtatgggggaatgtgtgagtctgtgtgtgagtctgtgtgtgagtctctgggcatgtgtgtgagtactgtgtggggggaatgtgtgagtctgtgtgtgagtctgtgtgtgagtctgtgtgtgggagtctgtgcgcatgtgtgtgagaactgtgtgtgtgtgctttcatgagcacaatgcggcctccaaaggcaggattatctccccaacacatgtgacaatggcacctgtgcacacatgttcacatggttcttctcacatgtaacaacaacaggtacaaaatgccttctgtcccaaagtaagaggcctgagacagacctctggctggcttcagggaccctgctaaggagggaccaggcccttaaaccccccacctgctcctcacctctggcctcagacttcattgagatagggcggctcccagctgagtatgggaacccgtgtcctgctctagggccctcccaactgaatcccatcatgggtgaggctcctgatggcaccaggcaagtcccctggcccaacacaggccacagtcaggaagacttggaggtagccccttcaccmcagtatggggacctccttgaaccccagga

SEQ ID NO: 698580 - DNA, 713 bp, Homo sapiens
cagcctgagcgatagagcgagactctgtctcaaaaacaaaacaaaacaaaacaaattagatttgactgggaagatagcttatgtatatatatataatgtgactgcagattgagagtttattttgtaattggaatttgatttctagttcagtgtcactacagatgagtacattttagttgggacatccgggatgcttgtgagagttttttcagatttctctgaaaaaaatctgaaagacrtaacagtgcatattgataggcttactgtataaacagtggtttcatgagagataaaactttgactctttaaattaattcttcaataactggaggttttgaggtagaattgccattatggttaaaaaaactttatgtgaaaatttcaaatatataaaagtagagaaaatagtttaataaatctccattaacttatctcactggtcttcaaaagttaccaactcatgacccatcttgtttcagaggtactcctactcattctgcctactccttggtatataactttatgtattttatagttaaaagataaattctttttaaaaacccatcaccacacacaaaaacctataaccacagtaacattgtcaattatatagaaaattaataactccttaatatcatcagatatttagtatgtggtcagatttccctaatagatgtctcagcttatactttgaataagaatccaaataagat

SEQ ID NO: 698581 - DNA, 594 bp, Homo sapiens
tgcttaaagaatgcatctgcattttcattcagctttctggtccttgtcgatttttgatgtctgttattctgcataaaactgtgtggcaggcgccagaacttttaagaatctttttgtttacagatggggagacaataacattaacattcattaacattcaaaataaaacattcttatactgataagcagtatgcaggttagctaggtttgggatactgatagatattttttkagtgtagtttacttccaaatgtcttctagaatttatgtttaatatctcaaatacctacacagaataggaatggcatgcttatttatacatgggcgtactcttgagttctaatggcaagccagccttcaaattaagttgtcttcctggaaaagaaacctcttaggcaactgtgaagggagagggataatataaaaaggatggagtttagaaatttgtctttttgtggtaagatctagaaacaaagcatattagaataagcagtgtaaattttgcacctttcaaaaagatactgatgtttttatcatgaaataataaaaacatattattgtctaaaaaaaaaaagccaaaaaacccagccaggt

SEQ ID NO: 698582 - DNA, 599 bp, Homo sapiens
tcacaacaagaatgattacttcaaactttctgataactatataaacacatgyaaagaaggaagcaatattttccgtattatggattctttgcgtagctttctgaaattcaaaactaaatattgcaagctaactaaaagagatggaatttcttctagaatatcaaccaatacttcaagaaagttgtttaaaaatagcagaaaggtcaatataataaaataagtcaatatcaatattccactaaatcatatttaatgcagatattcatttatattttaaacagtcaatacgtaaagtacctacctgattgttcactttaaagctggtgcaaattaaagtaatatgaaggataataatgctttgcagattactctttaaaaataaatgaaagagatatttagagaatatgtgaacttttagaaaaacacaaataagaaaaaatgtgacaaagtttgaatgaagtaagatttattcattcgtttatgtatatatttacttctgaggcggagtctcgctctgtcgcccaggctggaatgcagtggcacggtctcggctcactgcaagctccgcctcctgggttcacaccattctcctgcctcag

SEQ ID NO: 698583 - DNA, 599 bp, Homo sapiens
tcacaacaagaatgattacttcaaactttctgataactatataaacacatgtaaagaaggaagcaatattttccgtattatggattctttgcgtagctttctgaaattcaaaactaaatattgcaagctaactaaaagagatggaatttcttctagaatatcaaccaatacttcaagaaagttgtttaaaaatagcagaaaggtcaatataataaaataagtcaatatcaatattccactaaatcatatttaatgcagatattcatttatattttaaacagkcaatacgtaaagtacctacctgattgttcactttaaagctggtgcaaattaaagtaatatgaaggataataatgctttgcagattactctttaaaaataaatgaaagagatatttagagaatatgtgaacttttagaaaaacacaaataagaaaaaatgtgacaaagtttgaatgaagtaagatttattcattcgtttatgtatatatttacttctgaggcggagtctcgctctgtcgcccaggctggaatgcagtggcacggtctcggctcactgcaagctccgcctcctgggttcacaccattctcctgcctcag

SEQ ID NO: 698584 - DNA, 599 bp, Homo sapiens
tcacaacaagaatgattacttcaaactttctgataactatataaacacatgtaaagaaggaagcaatattttccgtattatggattctttgcgtagctttctgaaattcaaaactaaatattgcaagctaactaaaagagatggaatttcttctagaatatcaaccaatacttcaagaaagttgtttaaaaatagcagaaaggtcaatataataaaataagtcaatatcaatattccactaaatcatatttaatgcagatattcatttatattttaaacagtcaatacgtaaagtacctacctgattgttcactttaaagctggtgcaaattaaagtaayatgaaggataataatgctttgcagattactctttaaaaataaatgaaagagatatttagagaatatgtgaacttttagaaaaacacaaataagaaaaaatgtgacaaagtttgaatgaagtaagatttattcattcgtttatgtatatatttacttctgaggcggagtctcgctctgtcgcccaggctggaatgcagtggcacggtctcggctcactgcaagctccgcctcctgggttcacaccattctcctgcctcag

SEQ ID NO: 698585 - DNA, 391 bp, Homo sapiens
ggctgaggcaggagaatcgcttgaacctgggaggtggaggttgcagtgagccgagatcgtgccattgcactccagcctgggcaacaagggcgaaactccatctcaaaaaaaaaaaataawaaaaaaataaaaggatcagaaataaataatagtggagacaaacgattgtgatgccctaccttgttttaacctgattgtctctctcagctgagagagccaaacagactccatttttgtttcttcacttgcagcccccttatccccctcccttaaggacataactagtgcaagctgactccaagcacatccaggaatgcacttactgatagacactgaggcacgctgtaccagcagctcctaggaacgcactcagttaatggtacccaaagcc

SEQ ID NO: 698586 - DNA, 654 bp, Homo sapiens
acccaggcttctaccaacactcttcataaatgtcatggtcatgttacctgtgacatagcctattggatcattagtcttacccccacagggttctcggctacagcatggaggttgcattttgggtgagatattttcttggtccccatattatttactttaagtcctaaatcaattggctgggtctaatttgcattactatgtaaagtttacaaccattcatttgataaaaccaaaatcaagtgtaattgagtttgactaagtattatggtgcctgatgtcctaaaaataataagcataatgccattgagaagtaaaaaaaaaaaaaaaaggtttccttgtttatatgaattttctctttttggcaactaacatcatgtttaataaattactgttctttgtggtgtccttcatgttaggaagaattaatttacctttaccactttttttccactggcaaaattagacataattcaactccattacccattttgatattattctgaaacattattacccagaaatgagacttgtgaggctttgacaggatgtrgtgcatttaaaaatttacctaaataggatagttttgatagggctattaaatgactcataataaaagctaaacacagaaagagtatatcaactcccaggttgaca

SEQ ID NO: 698587 - DNA, 972 bp, Homo sapiens
gattccttcttacagctctcagaagaaatcaaccctgctgacaacaccttgatcttgggcttcttagcctccagagctatgagacaatcaatttctgtggtatacgccacaccacctcacagtttgtggtgctttgttatggcagacctaagaaactaatatgattgtcaaacttgctctggttcctttgacatattacagattagaagctattcattacagtattccaagaataacccacaaaagatgcattattctattctctggtgtacatgtgttagtaaacaaatagccattgctcaagccccaggctgaaattcttgacccattcaaacctactgaagtaaatatagtaatgcatcacttaaggatggggacacgttctgaaaagtgcatcattaggcaattttgtcattgtgcaaacatcacagaatgtgcgtacacaattttagatggtatagcccactccattatatagcccaattataatctcatgggatcatcctgctatagggagtcattcactcatgaaaacatcattatgaggagtgtgactgtagtctccttgtttttcttaaattaaaattcctcatgaaatatgcaatkagctccaaatagttccagattcaaagtctagaaaaataatcagtatttaaaaaataagacagcatttagtgcaagtttatttatattttttcatggctctttaagatatttaaatatctgtcacacattcaagacaatctaaagcaaactaatggttacttttagtgttactggaatattggtttagaatagctgcaatgtgcttaggttttcagtgatggtgtaaataatgtcaaatcagtgggctaaccctcttagagagccaacatttctacccccacttcctgcatttatttggcaacttcaggacgcctccctcacttatattttacctccctctcttgtcaactcttgccttcaggaatg

SEQ ID NO: 698588 - DNA, 972 bp, Homo sapiens
gattccttcttacagctctcagaagaaatcaaccctgctgacaacaccttgatcttgggcttcttagcctccagagctatgagacaatcaatttctgtggtatacgccacaccacctcacagtttgtggtgctttgttatggcagacctaagaaactaatatgattgtcaaacttgctctggttcctttgacatattacagattagaagctattcattacagtattccaagaataacccacaaaagatgcattattctattctctggtgtacatgtgttagtaaacaaatagccattgctcaagccccaggctgaaattcttgacccattcaaacctactgaagtaaatatagtaatgcatcacttaaggatggggacacgttctgaaaagtgcatcattaggcaattttgtcattgtgcaaacatcacagaatgtgcgtacacaattttagatggtatagcccactccattatatagcccaattataatctcatgggatcatcctgctatagggagtcattcactcatgaaaacatcattatgaggagtgtgactgtagtctccttgtttttcttaaattaaaattcctcatgaaatatgcaatgagctccaaatagtyccagattcaaagtctagaaaaataatcagtatttaaaaaataagacagcatttagtgcaagtttatttatattttttcatggctctttaagatatttaaatatctgtcacacattcaagacaatctaaagcaaactaatggttacttttagtgttactggaatattggtttagaatagctgcaatgtgcttaggttttcagtgatggtgtaaataatgtcaaatcagtgggctaaccctcttagagagccaacatttctacccccacttcctgcatttatttggcaacttcaggacgcctccctcacttatattttacctccctctcttgtcaactcttgccttcaggaatg

SEQ ID NO: 698589 - DNA, 1347 bp, Homo sapiens
atcctgttggtactgggtttgtcacccctgccccactgctcatggcctctccctccccaaaagccagctcagggatacttagcccttgaggaggcagagcccggctggtatcctggccaactatgctgggggagaccttgaatgcccagctctccccctggcaaagaccacactgcacagcccattggagtgggttgggggtgctgcatagtgtcctcccaggcatctggagtgccagggcctgcaggtgtggcctgtccctggctggcctgtaactcacctggcactgcccactgcaccctacaaggcctacacaaggtctcgctgtgtcacccaggctggagtgcaagtggcgtgatctcggctcaccgcaacctccacctcccgggttcaagcgattctcctgcctcagcctcccgagtagctgggattacaggcatgcaccaccacgcccggctagagatggggtttctccatattggtcaggctggtctcgtattccctacctcaggtgatccgcccgtttcagcctcccaaagtaccgggattacaggcatgagccaccacgcccggccgagatgagcttttcatagacgaggacggagggtgtgaaaggccaacgcgctggcccgatcctgccccaagcttggcaccgggtgagcctggctgagcacagcgctgcttccagttcctctgtgcctggccttccctgaggcttctgtggggtctgggaagtttgtgggcttggaatgggccagaattggcctctagggacgttgctgcatatctgtaaatggacagattggtctgtacaaacctttgtctgttcatcacaaacactgccatcaaccgatgcrgtgaaaagcccattcgaaatcaccactgacaacccatgcaggtgcacgaaatcctgctgttaccacctcacccctttgcgttaaaaggggttgtcttctcagggctcatttttaaaggcaggcactcctgggaagtatcagccgttaatacccaagtatgaattgctttcccagacttaaattttcagaaaactcagagatcacttagtccaaacagcacatctttttttctaatttatccacagtcaggagcagagcaggagacacaaggagcctttcctgagtctgtggtctagggcagtgggtggcaaactcttccagtaaatggtcagataataaatatgtcaggattcgctggccacacagtctttgttgcaactgctcaattctgctattaactctcttaaaagcagccagagacagcacaaaaaggaatgaatgcggctaggttcccatcaaactacccatggatgctaagatttgcatttca

SEQ ID NO: 698590 - DNA, 574 bp, Homo sapiens
ttctttttagtacagatctttcctgttacgtaatcagaaatactaaacagaaataaaattaaaaaaaaagaaaagctgcttgtattcacaccattcatttaaaatgattaagttayatgacttgtaaatgcctttaaactaaatattgcttactcagccagcttaaaattatgttggtaaagcaaatagcaggcctggttgctgagatacaaagattaacaacaaggaaaatgaactagcaaagaaagttcatatctagacacaataaaaatgatgtaaagccaggaaagtttcacactttggaaacaaaatatggaacattatcctctctgatcaaactgagaatttgcttctgtggaagcagaaacaaagctcctccttgatttcaggtttagagattgtcagacttacatttcattcaagctggatttatttttaacttttgcaagaaagaggacaatgaattgtgactgccatttcaaagccaaaaactttcactttttgataattttaaaggacaaaagactgatttttttttttttttttttttttttttttttgatgcagagtctta

SEQ ID NO: 698591 - DNA, 555 bp, Homo sapiens
ctcagcctcctgagtagctaggactacaagtgtgcgccaccatgccctgctaattttttgtatttttagtagagacagggttttgtcatgttggccaggctggtctcaaattcctaacctcaaccaatctgcccacctcagcctcccaaagtgccgagattacaggtgtgagccaccacgcccggccttaataccatatcttgatttttaaatctaccaccttctatagggcttttttgttttttgagacaggttctcattctgccacccaggctgaagtgcagtggtgagctcacagctcactgcaaatttgatttcctgggctcaagagatcctcttgcctcagcttctcaagtagctgggaccacaagcaagccaccatgcgtggtgatatatatatatwtttttttttggtagagttgtggtttcattatgttgctcaggctggtagggctttctatttatcctacctctttaacatttatttcctctcctttcttgccttttaaatttatttttgattgatggagaatgttttctactagtttctaatct

SEQ ID NO: 698592 - DNA, 1160 bp, Homo sapiens
atggacacacataccctccctgcatccctgcacatgccacccacacacacacctagtcctaacttccaagaataattcctctctccccaggatcatcctgggccccatatggcattgcctgaccacattcctcagtgccccagtcactccctgccttccttactcttctcagccccagggagatgcattttaccagcagagccacccayacccaagaccagagctatgaccaaggcatatgagctcaaaaagccccagcccaccagcaggagtgggtctgccgtgaactgtgttttaaggatccagtgtgcctggggaaggcattgagcatttgcagaaccactctactgtagccctccccatcttgggacacagcccataagacaagactactggccgggtgctgtggctcatacctgtaatcccagcactttgggaggctgaggcgggcggatcacctgaggtcaggagttcgagaccagtctgaccaacatagagaaaccccatctttactaaaaatacaaaatcagccgtgcgtggtggtgcatgcctgtagtcccagctactcaggaggctgaggcaggagaatcgcttgaacacgggaggtagaggttgtggtgagctgagatcacgccattacactccagcctgggcaacaagagcgaaactccatctcaaaaaaaaaaaaaagacaagactactgagtcagcctctaccagccaacagtttacagtggacctagagccttattagaagggctgctagcaggactggtccctggcccctgatagccccttatcctcagggaacacgggtaggatactgtccccattcccctagcaactggcaggtttcctatttcaagccatatggaccatccaaaaccctgaagctgccatgagctgacaaatagccctgctccacctgatgactacagtcaccactctccacctactaagaccatcatctgcccaggtgtagggacctaggctggactgctgactctggggctgagctaggccagactccagcttggtccttccagtccaagctttctctgtttccccttcagtccccagctaagacccaggctgtgtgggaataagtcttatgttatagtccctcaaggcaaggaagagaagaaatgtccagaaagaccc

SEQ ID NO: 698593 - DNA, 854 bp, Homo sapiens
agagaggaaagaacttcttgattaaaattcaggtcatccaggcaaaagtagtgaagaagtaataaactaggctacttttctcctaaccagagattgctgaattaacaccctagtctttccgtatcaaagatgtttcttcctgtattaactgtaagatgaataatccctgctgagatctataaagtactatagataggcttctgcttatctttaaaaccattattatttaaggaggatacaaaaaagtcaaagaactgaacagggacattcatcagagcatctgactgctacgtatttgccccagatgctggttcactcaatcagagaggagtaaggagtcagggacccaccccatgagtcagaaattcccctgcagagatacaagaactctctgcaattgaaaccaaaccaggaatgagggcctgcctaactagctctagaaaaactgacttttctgcaaaggtgctttttcttttccccaaaaaatcaaccttgaacctcaatgaaacatactatgaacatcaaagggaataaatacacacacatatcaaaagaaataaaaaatgatatgggattaggactgagatttagttagaaaaaaattaagatgcaaattctaagatatattactaagtgtcatagaacaagaaagaatcactacacaaagttgatagggattttaaatagtcatgtttgataaaaatacttcaataaatacctccataaaactgtttaaaacattaaaggacatagtaaatatgctttaaaaaggaaatcatctayatatcactactttaataaggaaatatttagaaagttgtcacaccaagaacagaaaggataaaattcaaaag

SEQ ID NO: 698594 - DNA, 1630 bp, Homo sapiens
catgtgagccatcgtcctgctttgctttcctcagttctccatgggtggagttgtttccttgattagtaccagtgtgagtacctggatgtttctgttgaaagtgctgtagttactcacccctttgcttcctctccatgagaaccatgcacctaagctgcttctagtcagccatcttggcccttccccactttgtaagaatgccagataacacwtatgaataattttagaggcttcagatggtgttggcttcacccaatgtttattcactttatcttctgaaggacaggaggcttgattaagtatattgagtcacaaagttatcagacaaaaggctagtttgaagttttcaacagggatagccttcctgtgtttgacctcactcctatgaccctccaggacttccaatgtaaatggtcaggtacattctaaggtccctaatatttgcaagatcctgaatctcaatttttgtttcctcaataccaggaagtggttttaagtgccatttttaaaagattctttctgtgtgccttcttaatttcttactttgaggagtttaagaatttggcacatacttggagagaaaaattctctgaatctcttccctaaatttctcttttctcagagattgtatctctaccagttttgctaccattaggaactctgatttttaatttgtgtttttcaggcccatgaatttgacgaaatctctgctaggtgtcttgcctttatcagcttgcagccttcatctctgcctgacttgggcaattttctgattgttacttttatcttactaaacattctctatatactcaagttctggctatttctgaagttcttgaactgtttaagcctttttttaaaaatcttgctttcgagttcatgaaggagttttggtatgctacacgctattctgtcagaactgcaaatggaagtcacctcaattttttaaaaggaaaatgagacagtagcgattaactttaattcaatgcatttttatgtgcatcatatttcacaattgctttacattgcataattgggggtacttgggggtacgggtagagataatttgaattaagtgacaaccaaaaagacgtttagctatgtcttcagtacctatcctttctgctgtataattaattgacttatctatgttctagatcacatttttgctttaaaattttgtttacttaaggaagatagaaagagtgtaactgttgaataaaatattgtgacatttgaactattattgaagtgcatgtttttaaaatctgtcattcgagtgacagatttggtcaatataaaaaataaaaacactgtaagccagtcttttctgtaacaactcctggctatatgctttaatagttatagtttccaaaagtagtatttgtgaacataattataatgaaaggaggtacatcaggaagtttggaaaaacttttaggtaatttactaattacctaaattccgtgggaagtagagatggaaaaagagaaattaaatcattttccctctagataacaaacaatatcaaatacatattggttatttaaaattcaatttttcagtttcctttttttctttttaaatttcagttccctactttcaggtcaattcatattttacttaaatc

SEQ ID NO: 698595 - DNA, 857 bp, Homo sapiens
tcaaacattcaggttttttttttcagacaagtcttatcttcatgaactagttatctgtttttcaacatattttatctacaatatttatcacataaagcattgcatttcttatccaagtcataatgtaagttccaatttctgctacaatggcatattttcgtttcttagagttactatgktcagcaaaattacaaacaaagccagtaaattttttggtcaacataggattaggtacagactacttcaaacctaaacaactctgtaaccagagcgctaaaattaatgttaataataatcctaataaaaataataaaacgaaatctaatataaacaaaggactttgggtgactatgatgtgtcaatgtaggtttatcaattgtaacaaatgtcccaccctggtggtggatgtttactaaacgggaacccatgcatatgtgagggcaagagatatatgggaaatatttgtagtctcaagttttctgtgaacctaaaaccgccttaaaaatctattttttaaatgttagcttggtttaaaagacattttaaatcaccaataagtaaatactaacaattatttattttcccttttaaaaaaggcaatggaaggttgtgtgaaaaagagttaaggctgcccagcgtaggcataaagggaaatgcacaaataaatgcaaagaatgaggcaattgacacttccaatacagtggccaagcagaaccaaggaaagattgtagattattgtaatctcccaggtcgtactttatttagctctgtgaatgacagaacttcgtattcagctatagtcagcatgtgacataaaacctaacgtggagaaaattgatatcacttccatattctgc

SEQ ID NO: 698596 - DNA, 857 bp, Homo sapiens
tcaaacattcaggttttttttttcagacaagtcttatcttcatgaactagttatctgtttttcaacatattttatctacaatatttatcacataaagcattgcatttcttatccaagtcataatgtaagttccaatttctgctacaatggcatattttcgtttcttagagttactatgttcagcaaaattacaaacaaagccagtaaattttttggtcaacataggattaggtacagactacttcaaacctaaacaactctgtaaccagagcrctaaaattaatgttaataataatcctaataaaaataataaaacgaaatctaatataaacaaaggactttgggtgactatgatgtgtcaatgtaggtttatcaattgtaacaaatgtcccaccctggtggtggatgtttactaaacgggaacccatgcatatgtgagggcaagagatatatgggaaatatttgtagtctcaagttttctgtgaacctaaaaccgccttaaaaatctattttttaaatgttagcttggtttaaaagacattttaaatcaccaataagtaaatactaacaattatttattttcccttttaaaaaaggcaatggaaggttgtgtgaaaaagagttaaggctgcccagcgtaggcataaagggaaatgcacaaataaatgcaaagaatgaggcaattgacacttccaatacagtggccaagcagaaccaaggaaagattgtagattattgtaatctcccaggtcgtactttatttagctctgtgaatgacagaacttcgtattcagctatagtcagcatgtgacataaaacctaacgtggagaaaattgatatcacttccatattctgc

SEQ ID NO: 698597 - DNA, 857 bp, Homo sapiens
tcaaacattcaggttttttttttcagacaagtcttatcttcatgaactagttatctgtttttcaacatattttatctacaatatttatcacataaagcattgcatttcttatccaagtcataatgtaagttccaatttctgctacaatggcatattttcgtttcttagagttactatgttcagcaaaattacaaacaaagccagtaaattttttggtcaacataggattaggtacagactacttcaaacctaaacaactctgtaaccagagcgctaaaattaatgttaataataatcctaataaaaataataaaacgaaatctaatataaacaaaggactttgggtgactatgatgtgtcaatgtaggtttatcaattgtaacaaatgtcccaccctggtggtggatgtttactaaacgggaacccatgcatatgtgagggcaagagatatatgggaaatatttgtagtctcaagttttctgtgaacctaaaacygccttaaaaatctattttttaaatgttagcttggtttaaaagacattttaaatcaccaataagtaaatactaacaattatttattttcccttttaaaaaaggcaatggaaggttgtgtgaaaaagagttaaggctgcccagcgtaggcataaagggaaatgcacaaataaatgcaaagaatgaggcaattgacacttccaatacagtggccaagcagaaccaaggaaagattgtagattattgtaatctcccaggtcgtactttatttagctctgtgaatgacagaacttcgtattcagctatagtcagcatgtgacataaaacctaacgtggagaaaattgatatcacttccatattctgc

SEQ ID NO: 698598 - DNA, 857 bp, Homo sapiens
tcaaacattcaggttttttttttcagacaagtcttatcttcatgaactagttatctgtttttcaacatattttatctacaatatttatcacataaagcattgcatttcttatccaagtcataatgtaagttccaatttctgctacaatggcatattttcgtttcttagagttactatgttcagcaaaattacaaacaaagccagtaaattttttggtcaacataggattaggtacagactacttcaaacctaaacaactctgtaaccagagcgctaaaattaatgttaataataatcctaataaaaataataaaacgaaatctaatataaacaaaggactttgggtgactatgatgtgtcaatgtaggtttatcaattgtaacaaatgtcccaccctggtggtggatgtttactaaacgggaacccatgcatatgtgagggcaagagatatatgggaaatatttgtagtctcaagttttctgtgaacctaaaaccgccttaaaaatctattttttaaatgttagcttggtttaaaagacattttaaatcaccaataagtaaatactaacaattatttattttcccttttaaaaaaggcaatggaaggttgtgtgaaaaagagttaaggctgcccagcgtaggcataaagggaaatgcacaaataaatgcaaagaatgaggcaattgacacttccaatacagtggccaagcagaaccaaggaaagattgtagattattgtaatctcccaggtcgtactttatttagctctgtgaatgacagaacttcgtattcagctatagtcagcatgtgacataaaacctaacrtggagaaaattgatatcacttccatattctgc

SEQ ID NO: 698599 - DNA, 597 bp, Homo sapiens
cgtaacatcttcagttaattgcataaggcctgcttacacagaaataagctccgccgggcgcggtggctcacgcctgtaatcccagcactttgggaggccgagacgggcggatcacgaggtcaggagatcgagaccatcctggctaacacggtgaaaccccgtctctactaaaaaatacaaaaattagccgggcatggtggcgcgcgcctgtagtcccagctacacgggaggctgaggcaggagaatggcgtgaacccgggaggcggagcttgcagtgagtcgagatcgcgccactgcactccagcctgggcgacagagcgaaactccrtctcaaaaaaaaaaaaaaaaaaaacaaaaaaaaaaacaaaaccaaataagctccattgtgttacagctcaaaagggtcacattctcttgtggatacatagaagttttgtttccacgtggataatgtatggaagtgcaggttgtttgaaaggacaaatgtggaaattaatagtgctttgatttctgcctacacagaatgagtttatttgaaatactattatgtttacaaaatgtttatgtactctttactgacaactgttgctctggtgt

SEQ ID NO: 698600 - DNA, 997 bp, Homo sapiens
cagaactccaacttgaggatgcttttgcagagcaggccttagcccctatgtgtacgtaaatctaggcattgttgattgaacagggattcatttagagcccatagggaggactccaaatgaatagaggtctgatcaggaggcatttgccaagttaagctccaggaagaggaagagtgggttacagtttcaccttggacttctggaatgctgctggactaacgtggtggtgcaggaggcttctctgcatttctgcctgtaccctcagtcactgtgcagtagatcaagaagggtcattctttcctactcagtgaagcagtagggagacggcccctgcccaggagagtatatttcaaagtgagggggagagggtagttgaaaagccatagacagtcattctaggtttgaaatatagaaaaataaaatattcagagacagtgtggtgaatttgttcacagtgcaggtttgaagggagacagatctgcattccaacaccaactctgcaacttactgacaagctctgtgatctttaataaactgcatcacctcttgtagcctcagatttctcatccacaaaatgagaataacaagacttcataaatttggcataagtaataaacatatgtaagttgatagcaagctaagtgttcagtaaatggtgggtaytgttaggattgttagtgcttttgtaataaaaacattagtgaaaagtgttttctgttttgatttttgaagagacagggtttcattcactctgtcacccaggctagagtgtggcagtgttatcatagctcactataaccttgaactcctaggcttaagggatccccccgacctcagcctctggactagccaggactacaggcgtgcacaaccgagccctgataatttttaaaaattttttttgtagagatggggtctctacaaacaatgttgtctaggctggtctcgaattcctggcatcaggtgatcctcctgccttggcctcccaaagcactgg

SEQ ID NO: 698601 - DNA, 1115 bp, Homo sapiens
gacttttaggatgttctcctattgtgccagaccccaagtgcacaattgctaaaccactctgttttgtaaatatggagaaccatagcaccctgtaagtcaggcactcctaaaatctatttttaatatcttagattattaaaaatagtttgaataaattccatgatttgtttttgtttcattgyatcccaatctggtcgatttcaatattagagtttgtcagagctggatggtcatattttaataactgattaattgtgaaattccattctcatgtaaaaaatatttaaagattactgagtttgtcttttcatgttttctctctttttatagtttattcataaatataaactttctgtgatttttttaccttgaaatgaatccttcccataaaatgtttcccctctgtttttcaaataagcattgtactcagagcataaacactgtgtctttaattccacaaataacagatcgaagttgagaacagaatgcttaagaaaaaggcaagtcacaaacaactgttttccacagttcatgagttggtaaaattaagagtcatttataatgttattctcttgggctgaacttaaccaagaaaaatgatacatgttttgtgttttgctttctggtctccactgtgttcccatttcctccctccccactgctctcctcccctcctccctgactctccaatcccttttcctttggtgtgtggccacagacagaaatttatggcaggggccaacctcctttacactccacacaaagcttgctgacttgagagagtttgtccgcgctctcccagaaaaaacacctgcagtacgctccccaagaaacctgaagagatgggagattaatgtggctgtaatagctgggcagtgtttttggtattatgccctctccctaggtagatgggtcttttccgagatgataccaattatttattgctgaaacatctgttgataactgcagctgcccttgtaaaacaaagcatatcacggggtcacaggctacggcgacctaaaatcctacctcatgctagtttcagtctattcagcaacaccctcaagtccatgggttaccatcatctttaatgtctcatcgtgccatagaaaata

SEQ ID NO: 698602 - DNA, 1115 bp, Homo sapiens
gacttttaggatgttctcctattgtgccagaccccaagtgcacaattgctaaaccactctgttttgtaaatatggagaaccatagcaccctgtaagtcaggcactcctaaaatctatttttaatatcttagattattaaaaatagtttgaataaattccatgatttgtttttgtttcattgtatcccaatctggtcgatttcaatattagagtttgtcagagctggatggtcatattttaataactgattaattgtgaaattccattctcatgtaaaaaatatttaaagattactgagtttgtcttttcatgttttctctctttttatagtttattcataaatataaactttctgtgatttttttaccttgaaatgaatccttcccataaaatgtttcccctctgtttttcaaataagcattgtactcagagcataaacactgtgtctttaattccacaaataacagatcgaagttgagaacagaatgcttaagaaaaaggcaagtcacaaacaactgttttccacagttcatgagttggtaaaattaagagtcatttataatgttattctcttgggctgaacttaaccaagaaaaatgatacatgttttgtgttttgctttctggtctccactgtgttcccatttcctccctccccactgctctcctcccctcctccctgactctccaatcccttttcctttggtgtgtggccacagacagaaatttatggcaggggccaacctcctttacactccacacaaagcttgctgacttgagagagtttgtccgcgctctcccagaaaaaacacctgcagtacgctccccaagaaacctgaagagatgggagattaatgtggctgtaatagctgggcagtgtttttggtattatgccctctccctaggtagatgggtcttttccgagatgataccaattatttattgctgaaacatctgttgataactgcagctgcccttgtaaaacaaagcatatcacggggtcacaggctacggsgacctaaaatcctacctcatgctagtttcagtctattcagcaacaccctcaagtccatgggttaccatcatctttaatgtctcatcgtgccatagaaaata

SEQ ID NO: 698603 - DNA, 2141 bp, Homo sapiens
ttaaatagtaaatattaaacatgatgtccaataaattagattgaaaactagaattggtgaataaagaagaaacatgagacagtgaggaagtcactgatgttataatgatattagtaatttctcattttgcctctacttccatttttaaatgaaaatagtactcaggacctttccaggaaaaatacaaacaaaaactaaggttatgggaacatttctgatggcactctgaggatcattcctgcatgcttagaggaatctcccatttcgtaagaacactggtataaccttaaggtgggttatcttctctcccaggagacagggcaggaaactcaggtgtactttgttgccacttgcatttctctcttctgactgggtgacagtgtgaatttgagttaggtctgggaaggtggtgggtgacaattgcaaactaggcctttcaatctttcaaccacatctctgacctttcaaatttggaaatgtgctttcttcctacctgccaaatggcctctttttgactgatttatgttggatttacttccattcaaattgaatttttatttttcattgagcacatgacctaaagtagattcctcagaaaaggctggaggaattaaatgtcagctgaatgaatttatgttttccttatttgcattctacctaattatcttttttatatgctgccttaaaattgtatatttttaaaaattcttgaaaattaaagtttttattttcttctcaattatcttcagtgttgagttcctcttttattttagtatgtgatgatttcttatacatgtatgaagtacatttgatgatagagagatgataaaaagaggaagataggaagtatgtaaggaagaaaaaaaggaagaagaaatctaagggggattcaaatatacttaattatatctagggaactgatgtgatcagttcaacaaaaatgtgtttttataagaacaaatgcgcatcctgagagagaaaccatctggagatgaaaatgaaccaccaagacatgatgactttgatctggtaagaaygcatcaatgtagaagtaatacacattgttcctcaatgtagagaggaacaaagcatgatttctgttatccagttttgtttcctagcccagacttcaaagattgtggttgagttctatgaaaagcaaagagactataaataaaacttgaagtaatttctcaactaacaacactatgcaacattaggagtaaaaacagctatcttaggagccttcaggtggtatatcattcacattgcaccttgctgtcaatcatagggtagttttagcattatgaagatcctttaaggcagtgaaaataatcagggaaacatggaaaacacccatcagaagatagcagtgtaccagcagagaggcagtagtgcccaaaagactggaaaggagcccagtgaattctggttgaaaggcattaccacccactggagcccttagaaactgtgttccaggaattaattgcagtggccaggaataaatgagtgccagcagtaatggcatagtgcccaaaatggttggactcattcctcagtacatttgattcaccctgtcaggatttccagattacttgacatggcatttagtatgaaatcctatatgaacaaatgaaaactcccacccgaattgatgagaccccatcagtattctgaagcagatgaagtcagaggaaattccatttacctaccaccagccatccaacagcaaaactgctagagaacaaatctttgtgctttcctttcacttgataagcatgaagttagaaatatcagtagataaaataaaaactgttagaaaacttcagatcatttcctgaaaaatctatattttattacgttggtgcaaacataattgtggtttgtgcaactacttttaatggcaaaaactgcgattacttttgcaccaacctaataaattcattgtatttcttttcttttcttctattgttttatagacaaggtcttaatctgtcacctaggatgcagtacagtggcacaatcacagctcactatagcctcaacctcctgggctcaagtgatcctcctacctcaccctcccgagtagttgagaccacaggtatgtgccaccatgtctggctaatttttaattttgtgta

SEQ ID NO: 698604 - DNA, 2141 bp, Homo sapiens
ttaaatagtaaatattaaacatgatgtccaataaattagattgaaaactagaattggtgaataaagaagaaacatgagacagtgaggaagtcactgatgttataatgatattagtaatttctcattttgcctctacttccatttttaaatgaaaatagtactcaggacctttccaggaaaaatacaaacaaaaactaaggttatgggaacatttctgatggcactctgaggatcattcctgcatgcttagaggaatctcccatttcgtaagaacactggtataaccttaaggtgggttatcttctctcccaggagacagggcaggaaactcaggtgtactttgttgccacttgcatttctctcttctgactgggtgacagtgtgaatttgagttaggtctgggaaggtggtgggtgacaattgcaaactaggcctttcaatctttcaaccacatctctgacctttcaaatttggaaatgtgctttcttcctacctgccaaatggcctctttttgactgatttatgttggatttacttccattcaaattgaatttttatttttcattgagcacatgacctaaagtagattcctcagaaaaggctggaggaattaaatgtcagctgaatgaatttatgttttccttatttgcattctacctaattatcttttttatatgctgccttaaaattgtatatttttaaaaattcttgaaaattaaagtttttattttcttctcaattatcttcagtgttgagttcctcttttattttagtatgtgatgatttcttatacatgtatgaagtacatttgatgatagagagatgataaaaagaggaagataggaagtatgtaaggaagaaaaaaaggaagaagaaatctaagggggattcaaatatacttaattatatctagggaactgatgtgatcagttcaacaaaaatgtgtttttataagaacaaatgcgcatcctgagagagaaaccatctggagatgaaaatgaaccaccaagacatgatgactttgatctggtaagaacgcatcaatgtagaagtaatacacattgttcctcaatgtagagaggaacaaagcatgatttctgttayccagttttgtttcctagcccagacttcaaagattgtggttgagttctatgaaaagcaaagagactataaataaaacttgaagtaatttctcaactaacaacactatgcaacattaggagtaaaaacagctatcttaggagccttcaggtggtatatcattcacattgcaccttgctgtcaatcatagggtagttttagcattatgaagatcctttaaggcagtgaaaataatcagggaaacatggaaaacacccatcagaagatagcagtgtaccagcagagaggcagtagtgcccaaaagactggaaaggagcccagtgaattctggttgaaaggcattaccacccactggagcccttagaaactgtgttccaggaattaattgcagtggccaggaataaatgagtgccagcagtaatggcatagtgcccaaaatggttggactcattcctcagtacatttgattcaccctgtcaggatttccagattacttgacatggcatttagtatgaaatcctatatgaacaaatgaaaactcccacccgaattgatgagaccccatcagtattctgaagcagatgaagtcagaggaaattccatttacctaccaccagccatccaacagcaaaactgctagagaacaaatctttgtgctttcctttcacttgataagcatgaagttagaaatatcagtagataaaataaaaactgttagaaaacttcagatcatttcctgaaaaatctatattttattacgttggtgcaaacataattgtggtttgtgcaactacttttaatggcaaaaactgcgattacttttgcaccaacctaataaattcattgtatttcttttcttttcttctattgttttatagacaaggtcttaatctgtcacctaggatgcagtacagtggcacaatcacagctcactatagcctcaacctcctgggctcaagtgatcctcctacctcaccctcccgagtagttgagaccacaggtatgtgccaccatgtctggctaatttttaattttgtgta

SEQ ID NO: 698605 - DNA, 2141 bp, Homo sapiens
ttaaatagtaaatattaaacatgatgtccaataaattagattgaaaactagaattggtgaataaagaagaaacatgagacagtgaggaagtcactgatgttataatgatattagtaatttctcattttgcctctacttccatttttaaatgaaaatagtactcaggacctttccaggaaaaatacaaacaaaaactaaggttatgggaacatttctgatggcactctgaggatcattcctgcatgcttagaggaatctcccatttcgtaagaacactggtataaccttaaggtgggttatcttctctcccaggagacagggcaggaaactcaggtgtactttgttgccacttgcatttctctcttctgactgggtgacagtgtgaatttgagttaggtctgggaaggtggtgggtgacaattgcaaactaggcctttcaatctttcaaccacatctctgacctttcaaatttggaaatgtgctttcttcctacctgccaaatggcctctttttgactgatttatgttggatttacttccattcaaattgaatttttatttttcattgagcacatgacctaaagtagattcctcagaaaaggctggaggaattaaatgtcagctgaatgaatttatgttttccttatttgcattctacctaattatcttttttatatgctgccttaaaattgtatatttttaaaaattcttgaaaattaaagtttttattttcttctcaattatcttcagtgttgagttcctcttttattttagtatgtgatgatttcttatacatgtatgaagtacatttgatgatagagagatgataaaaagaggaagataggaagtatgtaaggaagaaaaaaaggaagaagaaatctaagggggattcaaatatacttaattatatctagggaactgatgtgatcagttcaacaaaaatgtgtttttataagaacaaatgcgcatcctgagagagaaaccatctggagatgaaaatgaaccaccaagacatgatgactttgatctggtaagaacgcatcaatgtagaagtaatacacattgttcctcaatgtagagaggaacaaagcatgatttctgttatccagttttgtttcctagcccagacttcaaagattgtggttgagttctatgaaaagcaaagagactataaataaaacttgaagtaatttctcaactaacaacactatgcaacattaggagtaaaaacagctatcttaggagccttcaggtggtatatcattcacattgcaccttgctgtcaatcatagggtagttttagcattatgaagatcctttaaggcagtgaaaataatcagggaaacatggaaaacacccatcagaagatagcagtgtaccagcagagaggcagtagtgcccaaaagactggaaaggagcccagtgaattctggttgaaaggcattaccacccactggagcccttagaaactgtgttccaggaattaattgcagtggccaggaataaatgagtgccagcagtaatggcatagtgcccaaaatggttggactcattcctcagtacatttgattcaccctgtcaggatttccagattacttgacatggcatttagtatgaaatcctatatgaacaaatgaaaactcccacccgaattgatgagaccccatcagtattctgaagcagatgaagtcagaggaaattccatttacctaccaccagccatccaacagcaaaactgctagagaacaaatctttgtgctttcctttcacttgataagcatgaagttagaaatatcagtagataaaataaaaactgttagaaaacttcagatcatttcctgaaaaatctatattttattacgttggtgcaaacataattgtggtttgtgcaactacttttaatggcaaaaactgcrattacttttgcaccaacctaataaattcattgtatttcttttcttttcttctattgttttatagacaaggtcttaatctgtcacctaggatgcagtacagtggcacaatcacagctcactatagcctcaacctcctgggctcaagtgatcctcctacctcaccctcccgagtagttgagaccacaggtatgtgccaccatgtctggctaatttttaattttgtgta

SEQ ID NO: 698606 - DNA, 989 bp, Homo sapiens
ttcatttagttcacagctaagtgatggcaatactctgattactcatcaaagccagcaactttgcagagcagagagaagtacctcacatttttattaaattgtcaaatattatatataagaattgtagacattttggaattggaatggaccttaaagactacaaaaccatcacacttgtcagctgagccaactgtgctttaagggaggttaagacattagtataaggatccagggctagttggcagcagagctgaggttagtactataagctcctgaatgcctaattacattcttacctgcaacagctttttcacagcaaagtcagtcacaggactccaatatccacatttcattcttagagatgaatgaaatgccagccaatgacaactattgttcagcttgactcactgacaccaccacctctttcctccttgctccagccaatcacccaaagagaggattccaactaatggacagcaaatccatatgttgaccaagaatctgcagggaggcctcgtatataaagattaacttgaccatactctttggaatctaaatagagaaacacagacccayggccagttagcaataggatctgatattaaaagtatatgtaaagagaaaaagactgaattaaatcaaagccatgagggactatgacaagtcaaagttataagggggatctaatacctagagataaataagattccaccaggggaagatcatgaaaaagattgctagatcttcctgagatcctgatgtctatgttgatctattccagtactaattttatcattaagtcctctttatcttcctaacttataaataagccttctatatcttacagaggcctaaatgagtagctatgtttttacaactgaaaaaaatatacatgaaagaaaagcatttaaatatgtccttcaacctaatgtttgtaaatatatatataattatatatatttacaaatacacatttacaaatataaata

SEQ ID NO: 698607 - DNA, 691 bp, Homo sapiens
tgcagtaaccaaagtttaagaaagaatctcaaagatgagagaagattctttgcacaccaatcagttaaacattttttagcaggcacagtaacaggcaatctctttccctaaaattatccttgagaacttgagctcttttagggtgcttcttgtgatggtttatgatgacatcaaatacaacaattcttatgcaatatgtttctgggaaaattctacattttaatattttttcttatctgatttctaaataaaagtagttttccaaatataaaaatattgagaaagtttcaggaaaattctgctcaaaagatctgacaaaaaggcttagaggttttyatagttgtgaacataaatcatgttttttactatgccaaaccctaattaaatcatttaaatcattagaggaaaaaaatccaggcattttaacatttctagtttcttggaaagtataattctagtcactaaagcactctaattttgtaagaaagatagttaggaaaaaaaaaaagtatgaaatgtgggtgtactctgggcctctagttttcagctagctttgtcttgtctttctaccctacaaaattttaaacacagtcatgctctcctccaaagtcaaaatgttgttaagcaagctggtaaataatcttactaggtttatattggaattacctttaacaaatgaagtatttcagca

SEQ ID NO: 698608 - DNA, 716 bp, Homo sapiens
ggaaatactatttaaattcttattaaaatttttaatggctctttttcactatctccttattcctacttgtataatttatawgttaaatggcctaaaaatatttttaaagaaataaaaatacttcattgaacccagaagataaataatggtaagtcaggacctaaaaagggttatattcaggagctaaaaaaaaaaaaaaaaaaaaaaaagaaggaaacagaaacattttctccttaggaatgattgtattgctgtattcattgtattgaacaatttgataccagactggggacagtattaaaaataaatctaagttaagacaaaatgtagactaaatcatcagtttagagacaaagttgaaaggtataaaaagactgaatatatgccaatggtcattgagctatgatttcatgcaaaatccccctcagacctgtctttgtagagacaactaagctcatgaacccaactttgcttacatagtctgagcaaagaaaactcagcttagggagcttaccagggaccattttatcaaactatttcataatactttttgaactttttgatagtatttgttgacaatgtaacaggattaaagctcatgaggttcatttcatataaaactgcataaagcatgttaattatctttctaaagtaaatgtacaacagtctttgtaatatggaattctaatgttaaaacatacattttattgtttctt

SEQ ID NO: 698609 - DNA, 716 bp, Homo sapiens
ggaaatactatttaaattcttattaaaatttttaatggctctttttcactatctccttattcctacttgtataatttatatgttaaatggcctaaaaatatttttaaagaaataaaaatacttcattgaacccagaagataaataatggtaagtcaggacctaaaaagggttatattcaggagctaaaaaaaaaaaaaaaaaaaaaaaagaaggaaacagaaacattttctccttaggaatgattgtattgctgtattcattgtattgaacaatttgataccagactggggacagtattaaaaataaatctaagttaagacaaaatgtagactaaatcatcagtttagagacaaagttgaaaggtataaaaagactgaatatatgccaatggtcattgagctatgatttcatgcaaaatccccctcagacctgtctttgtagagacaactaagctcatgaacccaactttgcttacayagtctgagcaaagaaaactcagcttagggagcttaccagggaccattttatcaaactatttcataatactttttgaactttttgatagtatttgttgacaatgtaacaggattaaagctcatgaggttcatttcatataaaactgcataaagcatgttaattatctttctaaagtaaatgtacaacagtctttgtaatatggaattctaatgttaaaacatacattttattgtttctt

SEQ ID NO: 698610 - DNA, 1896 bp, Homo sapiens
ctttcagaactggaagagacttgggagataaaataactcaaacctttccgtttctacatgaggtagggaggcccaaaaagatgaagctgagacctgaagctagattttctaattccttccttttaaagacgtgatactaaagaagctccaccaattgtataaaaagttatttttaaaaggtagtccattcagcagatgtttttagaagaatttgaagtactcaaaaatatttactacccatatccaaaacttatgaaaaaaacatagttttaaccttgctttaccaattatcataatctttattaataaattgatttggcaaaggcaatagcctttagcattaaccatatcaggcttttatttgtgcacatctagaagatgtgccatctaaaagactcaaccattaggaatatatatgtaaaatcatgtgtgttttacttgtttttaaatttttgaatattataaaaagagcaaattactaattttattatcccatattatttaattcttaaattcctttggatattattttttaaggactaaaaatttgtcttttaaaatttctttcctctattggagaatctcactcttttaacagaaaaccatcctctgcttggcatgttttctgtcacttatcttttgccaaagaaggtgcaaatgaagctccccaatataaactatttcttttttttttagttttgcatgaattgaaaagcttgaatgtcaagctcacttgtctcatttgtatacatggtacaagggattttagcttttatttttgtgtggaattaatgcctgaattcatgtacttagcacaaggagtttctagcagatgtatgtgctataagtttgcaattaggaagtactctttctattgctatgcatatatgagcaagttcataagaatccttctgtattccattcctgtttattcatttacttccacattatcagcacacactgctgggtagactgaaagaaccagagtgtaactaactgcagtgggagagtgccaattacccacagcttctccactgcctgacaaacactaggcactcaacaaagaaatactggaatggctaaatgaattattaaatttatcaaatacatactttgtttcaaaaatatctaaatatacatacacagatgatgtgttccttaaacttttatctaaacatagctctgagaaaagtataatacttgtgattttataattatccaaaatataaatttcacaggttgatatatctactacccatggttaacaagaatttactggccgggcgctgtggctcgtgcgtgtaatcccagcactttgggaggccgagacgggcggatcacgaggtcaggagatcaacaccatcctggctaacacagtgaaaccctgtttctactaaaaatacaaaaaattaatcgggcatggtggcgggcgcctgtagtcccagctactcgggaggctgaggcaggagaatggcatgaaccagggaggcggagcttgcagtgagctgagatcgcgccactgccctccagcctgggcaacagagcgagaytccgtctcaaaaaaaaaaaaaaaatttactaagtacttctcatctccccccttccctgaaaactaattcctttctactttggtcataaatttaatttattcctatgaaacagccttaaagttcccatcacatctccaaattctcttcattaaaatctctctctttctctctctctcatattcatctatccatccgtccaatgacatttccattaagtaatgttcttctgaataggggctaatagtaaaggcagcattctctgccgaggcaattcatagggtgttaatttgttgctaaaagattcagttgtgtgtataaagcctcctatccagattgttgttcatga

SEQ ID NO: 698611 - DNA, 1225 bp, Homo sapiens
tatgtagttaactgtgtctgacaacattctctctcctagtattcattcgtcccattatttaaaaatatctttacacaaatgaaaccattttatcatttcttctatatgtatgataaatgtctgaaaaggaaaaaatatcagttataatagaattcaatgtcttgaagagaagctactgaattttctaactttaacatatttttatactcacattattttttaatagaacacaaaattaagccatagttattagatatttttgaaaatttttactgtgctttgtgaaatttcatataatgcccaaattaaatcagtctcatgaataaattgttaattaactaattagagattttgtgaataaattgatgtcagagttctactatgatatgaaggatatcaattataaatttgaagcattaattaccatttatgaaatctccagaacattagggctcacaaggaaaaaaaaagataactctagaacatgaaaaaatgagatatgtatcagaaagataaatatttgttaytgttgttatttatagtgatgttgattcacactgtattattaccctgtataataaattgttcttctgtttctagtgtacaatttgcaattcccatcagaaatggtcaaaattaatttcatccagaatacaacatttgtaaaatttcatcagtaatagatctttgaccatgaggctgagcagcaagtagagtcaaagactgggatttaaaaaataaaatggtgccacattaacccaaggaatagcactgacttggagattaaaagcagtgctcgaggtggtgggggaaagccaggaacttcaggttggagctgatgggaaacaggaaccaagagcggcacccagttaatgcacaagtaggaggcaatcttgctaaggtaggactgggactaactctggaaaaaggagtaatttcccctgggaaattaacttaaagctgaagaacaaacctagtgagatgagattgccagacctgaaatccaagcgtttgagcagtggtaacagaggttcattaagcagttaagcgaagaatcaccacaatcagatttttatttgtaaaaaaacatatctcctgctgccttgcatttaagcaattggtatctcttcatttagtgatgaaggcagaagttgtaatggtgacagattcatccgcgtcacctgcatggtcatccaacacactgtcttccacttgttgaacaata

SEQ ID NO: 698612 - DNA, 1145 bp, Homo sapiens
ctttgtgtattggtgacactataaattcatagtccctagctttctaggtgctgattgttgctgagtaaaaattctgtttatcccatatgttatctttctcattcctacttaggagttatgtcaccatccatcttctcaagctctctccatcaatatattccaatcctttttcagaggattaacatttctcttctctgaccaaggaaatagaggtcatcggagacatgcaccagtttctgccttgtgtcaacatccacttgtatttccatatattgatactgcctttcttcctttcacagtgtaaggatcttcccccctccaccctgaaacaagactcttttccagtcatattatctgtcttctctctttcttctctttttcatccctgctaaactcctcctttagcatctcttttcccgtccaaaatccttccctggtctagtgtcagcctctacctgctgctgtaactccctttggaaaaaggctgtctgtgttccttaccaccaattcattgcttttttgtttttgtttgtatgtttgtttttgagtcggagtctcgctgtgtcgccaggctggagtgcagtggcatgatctcggcttactgcaacctccgactccctggttcaagcgattctcctgcttcagcctcccaagtagctggattacaggcatgcgccaccatgcctggctaatttttgtgtttttagtagagatggggtttcaccatgttggccaggatggtctcgatctcctcacctcatgatccgcccactttggcctcccaaagtgctgggattayaggcgtgagccactgtgtccagcctcattcattgtttatttcactatagtctgtagctggaaatgctttcaccaagtcattgatgaccagtgatttgtcagatccatggacacttgttttaggccctggcctatctcctgtatccagtagggccccatattgagcacacaataatattagttaaatgaataacatttttcacttatcttctcttatttatatgactttcccttctctggggtcttttactggctcttacctgcgtcttaaacttttgtgttctaaaggttccaagaaaccactgtctctcattctagcatggctaacccttctctggatagatacc

SEQ ID NO: 698613 - DNA, 648 bp, Homo sapiens
ttttgaccttttaataattgccattctgactggcatgagatggtatctcattgacggatagtatttctatgtgataagcatcacattgcttgttaagagtgatcatatggatatatgtaacacttcaagttggtggagactaccatttctagggagaagaagcagaaaataaagtaaagagcattgtataaagaatcacatgtgctgcgatgaggattttggatattactcacaagtccagtggttttcaacctgtgctcccatgagcaattaggtgtctctcagggggaacatcactttaaagcagctcaaaatagactaagcacttggtccttgtcagttctggtcctctgagaatcaaatttcaagacaagtttagacataaaggatgttcttggggagctatgaaggatgaagggaaggcagcaggagcagscaggtggagatatttagaccacaatgctggtttgtgaaaagagagaggaaagaagaattgaataggaagagccaaactgcaaaactgcaagaaagtcttacctcacccatgaagtgtctcttagccaaagttgccaaagagagagactgcattttcacgaatgggacagcactagtatgcacgctgtgcttactcactggctgtaactagac

SEQ ID NO: 698614 - DNA, 1925 bp, Homo sapiens
cagcagcttgaaatattaattattatcccagtcacaagttggctgggactgttctgcttcattatgcacacctacagaatcactggaataaattggttccatcattccagtgatggaatgatgaatgggcatcagtttcccagtagaaactctagacagagggagggtaagaacaccagaggggagggtagagcacatagaacctcttatgactgggtttggtgctgtattcctgtcattctgcccacattgcattggccaaagcaagtcatgcggccaaggccaacatcaatgtgttaggaaagcatattgcctctaaaggagggaatataaaaccacttggtaaatggatacagcaaggagcaaagaattgaaaacagaaatgcagtctaccacagttaggcggttcaaaggattgaacaagaaagacaaggtttttgctccttatagaaatcagtctagtagggagattaaaactataagtagagtggtgtgggcttatagcacatattagatttgagaattataaggactctgtagaaacctaaagctacttttgaagatgagttctaaaagagacaataaaaataaagaaagaaaagatccaaggacagaatcacggatttaagagatggtaaagaattaggatctcctgaaagagatggtaaggaaagggccagatagataaaaataaaaccataaacatgaaagaaataaytgaaatcaagaaagaagtgattttccaaaagtcgagtaatataccaaaatcctccaaacagttcaagaagattgtgggctgtcaagggtccacctgatgtggctattaagaagttgttagtgatgtcgatgataacatcaatggagtgatgggactagaaactagactgaagttggttgagaaaaatagaaacagtgaatatggtctcctaagttcataaacttagttacagagggaatgaaagtgaccagaaagttgaaaaggcttaaatagattagtatagaggaagggatataaggtaaaacataagatcctctatgaacaaaccattttttttccctcaatttttatatcctgtttgttctccccttcaaactgcttaatcacttagagttcctcaaatacgccatacagttatacttggacaagctattttctgtgtttttccctgcttgaagggacttttcgcagtaaggtatgttcttgttttcctacatatctttacaggaacaagtacaaatatttatgaatacctactatgcactaaccactgtgttagagacataaaaacaattgtcttaatgaaccatcacataaactctgtattgtaggcataattatccccattttagaggtaaaaaactggacttggaaagatataatgacttgtccagatacacatctcgtacctggtgggttagaaatttgaatgtattactctctccaaagtttgtgttctagtctcaatttcattaaacatataccactttgtaaaagatctcctgtctgagggtgtgatccctcctataagcagtggggcagatggaggaggttttgcattaaaattgattagtgttgatcttgccatcctttgaaacacagacatatctcgcatatgtcaactacagcacttattacactgttttgtaacattaaaaagtatatgaagtactcttgccggcaataaagaggcatataagtattgaagtaggggtgagaaagcaaaagcacttgtgttaatggggagggtgcattcgaaaggaagagactagaagcagagagataactaataatttataaatccaaatgagataaatgagggcctacctaaagctgtcatagagagcccggaaacaagaggaaataatcgaaggaggtttaagaaacagaatcactaggacttggccagttggctgggaggagagtg

SEQ ID NO: 698615 - DNA, 589 bp, Homo sapiens
ctatagaaattaatacaaaatatatatttaaaataaaatgagttagtttagtcttccaaaaatttttgtagtttagagattatttaaattatttgagttagcatttgtacttgctttgttctatggtgaaagctttgctaccaattacattgtaggtttatttgtttcaattcatcaatacccaatggtgtttaccaagatatgattaagacaaggttttacaatatcttattttcatcttacatatcactgggctatttaattgaaaattttattgaaataattatagattcacaagcagttgtaggaaataaaacagaaagagcctggcccatatcgcccagtttttcctcatggttacatttgcaaattatagtataatatcacaataatgttattaactttgatagaycttatatcttttaaatatttcccttgttttatttctattcctttgtgagtgtagaacccctgagttttatggattttataatttcattttaattgaacattatttaggaattatataaagtatttatgtttgtaaaaacccaaagatatatcacagaataattccatagaatcctaa

SEQ ID NO: 698616 - DNA, 1432 bp, Homo sapiens
agcaatttcagtcttaagtatatacccaagggaaataaaaatatatacccacacaaaaaattatgcaaggatgttataacggtattattttaatagtcaaaaatggaaacagcccaaatgtccatcagttaatgaatgaacaaaatgtccatatagtggaatatttagccataaaaaggaatgaagtactgatatatgctacaacatcaatgaacattaaaatcattatgctaagagaaagaagccaaacacaaaaagccacatactgcatgattctatttatataaaatatgcataggtagtgatagcagattggtggttgcaaagggctggaggaagtggggaaaggggaataactgcttagttgtatggattcattttgggggtgatcaaaatattctggaattagtgctggtggttacacaacattgggaatgtactcgaaaccactgaattatacactttaatatagataaagtggagaattttacgttatacaaattttgcctcaataaaaaattcaaagatttaggtaattcttatagtcatatagccaagacagtagactttatggggaatcttaccaaatatggagaggatggagcatcagcaccatcgtatgtcaattatctaggacagggcttggtaatctgyagcctacaggtgaattctggccagtagcctgtttttataaggcctgtaagctaaaaatggtttttatattttttaaagtggttaaaagcaacaaaaacaaagaaggttttgtgatggagaacttttgagggcaacaaagactaaaatatttactatctggcactttactgaaaaagattattgacccttatctatggtgatgataaacaataagctcttacatttatagcacacatttcagtttacaaggcacatccatttttctctcagctgacttccagaacaaccttgtgaagtagatgaggtgttattcctctccacagagggggaaacttggtgaggttaagccactcatatccttgctctatcacttgatagaactcagatggtctgaatgtgattcagtgttttgaccctatagcccactgactctctcaacactttggaagaactactaaaggctctgtgaaaatgcaatacgatttcaacttaacagatcaacccaaagttgagaaaaaggccaagagagctttggctaactatctctggaattgctccttcagttttatatctcctctgacaatggtcatatatttttctaaatgaaatgccacccatattgaagggctcaggaactgtcaagccaaaatctttcaagtgccgtagagttggacagtttgctatacttcaaacacatcgggtcaaacaatataataaaaattgactcctttgtgatatgtccctttataggagctgtgatattcactatttcccctaa

SEQ ID NO: 698617 - DNA, 549 bp, Homo sapiens
cggagtaaataatgataattggcaggcataaaataatgcagattcttccataaagaggttttgtgttcataaagtatcttttgtacattaataatagttggatggaagcaaaatggtgattcaatagttattgactttattaaatgtcattggcaatgaggatgctttaaaacaaaaactacayaatagacctatatagaaagacatttgaattaggtagttgtaaaaatatgttttctatatttctctatattccaagttctttttataaaaagaatcagataaaaatacagtgtgatctatagaacttgaaatacatggttttcaatttgaaatgttttaatgaggaaaagtgaattttgctatgttctttttaagaacaatatggtagaaattatatttctctacctttcttatacatttggaaatagaaacctgtgatcctgacttttaccaaacatttcttctgaaaaatttttctgccttgtttgagttgtggtattaggttggtgcaaaagtgattgccggttttgccattactttcaatgg

SEQ ID NO: 698618 - DNA, 858 bp, Homo sapiens
tggcctccccgcttgccttaaaaaattggctgagtttaaaaactggaatcrtctccattgcttgctactaaggctagactagaaggttctgtttacctgtgtccatttcatagacgcacatgtgcctttgcagctttgcctcaaagggactgtttgtccacatttcacccattttctaacgctagcaaatgagactgttagtattttaaaggctggttcatcttgggccccttgaccttgaccaagagctttgcttttggtattggacactaggtggcggtttaagacctcctgatgggacccattagatgggatctaactatcatatattattattattattatttggtttattaaagagtagttggtttttcatctcataccagttcccctggtcttttatttttttctaacataagtgctgacattttctttcttttttttttttttttctttttgagatgaagtttcgctcttgttgcccaggctagagtacaatggcccgatctcagctcatcgcaacctctgcatcctgggtgcaagcgattctcctgcctcagcctcccgagtagctgggattataggcgtgggccaccaggcccggctaattttgtatttttagtagagacagggtttctccatgttggtcaggctggtctcaaactcctcaccttaggcgatccgcccgcctcggcctcccaaagcgctgggattacaggcgtgagccaccacgcccagcccaatgctgacatttccttaaagagttctttcataacaagcgtcagttattatttggttccaggctttgcagaaatgagtgtttactttcagctgcacaagtgatgactagagggaaaa

SEQ ID NO: 698619 - DNA, 3438 bp, Homo sapiens
aaggaaaagttgaaaaatcatagactcacagcccatgccaaaatctggatgaaagctgaaaatttcagcctctctggctgtcttatctctacaggcagcgattgggccattccacatatggcctgttctttcattttcctgaaacatgacctctgaaaggttccttgcaatttgagaagatctagtataaccccttgttttcgatgaagaacaatgaggatgaccttcccaaggtcacacatttctggacaagcagctgtgcagaaactatacctggtgctattttcatcaggatggttctaatagtccagggtgagatgaccaagaatctagagtttggaaatcatcaggttgttaaaagaaggcttctcagctttgttctgcattccggaaggcatcttgttaaaagaacaagttttcggccaggcgtggtggcttacgcctgtaatcccagcctttgggaggcraggtgggcggatcatgaggtcaggagatccagaccatcctggctaacacggtgaaaccccatctctactaaaaatacaaaaaaattagctgggcgtggtggcgggcgcctgtagtctcagctacttgggaggctgaggcaggagaatggcatgaacccgggaggcggagcttgcagtgagccaagatcacgacactgcactccagcctgggcgacagagcgagactccgtctcaaaaagtaaataaagaaagaataaaagtttttgtattgatattcaaatatctcgcctccaattgtgatgattacacaaaaaagccaccaattggttcctccctacatgcccatcctttgcaaagttatttggctgtatatttccctacccctcaaattttgtgtttggccacatgtcttgctttggctaatgtgacattagaaaatgtgacacaagaaaagacctgaaaagtgcctgtgcagagttcaagaccagcctgggtaacacagggagaccctggctctacaacaaatacaaaaattagccaggcctggtagtgcgtgcctgtggtctcagctactggggaggctgaggtgggaggattgcttgagcccgggggtgaaggctgcagtgactgtgatcatgccattgtactctagcctgggtgccagagcaagatcctgtttcagaaaaaaggctgggtgcaatcgcttatacctataataccagcactttcggaggctgaggtgagaggatcacctgaggtcaggagttcgagaccagcctggctaacatgccgaaaccctgtccctactaaaaatacaaaaattagctgggcatggtggcagattcctgtaatcccagctactgaagaggctgaggcagaagaattgcttgaacctgggaggcggaggttgcagtgagccgaggtcgcatcattgtactccagtctgggtgacaagagcgaaactccgtctccaaaaaaaaaaagtgcctgtgcagtggggcctgccttctcttgctgttcttgggaacctagtatgtacggccatgtgaatatgtccaggctagcctgctagatgactacagacctgtggctatgctgcccctatcatccacaggtgaccgacagccagttgccagacatgtcagtgagaacatcctagaccatccaaccccagttgaactagctcagaagagaagtgtccagccaactctcagaaaatttttatttttttgagatggagatttgctcttgttgcccaagctggagtgcaatggtgcgatctcggctcaccacaacctccacctcccaggttcaagcgattctcccacctcagcctcctgagtagctgagattacaggtgttcaccaccatgcctggcttttttgtatttttagtagagatgggatttgtcactgcacttaagcctgggtgacagaatgaatgtttttgtatttttagtagagatggggtttctccatgttggtcaggttggtcttgaactcctgacctcaggtgatctgcatgcctcggcctcccaaagtgctgggattacaggcgtgagctaccgtgcccagccaactctcagaatcttaagaaagaaataacatctgttgttttcagccactatgttgggggtgagtggtttgttacacagcagaagctaacgaatacacaaatattcaggaagtttttaaaaagggttacataactgaaaaataaattcgcatgtcaagatcattagaaatcatagtaacgggatttcttgagtcattttcaggacaccaggagactataaattgcttattgctgcatcaagatttgtcctgtgttgaccctctgaggatagagattagtcacatgtacatggaaagaaacaagaaccctgatcaaagaagagtgagaccaactcacagagagcctcagttctaacctctttcaagcctgcagaaggctagtgaccaagagtagatcccctgaaggctcctgtggtttcttggttccagtgtcttctgatgaacttagaatgatgcttttcccaatgcctgcaaggcgacatcacaagctattaactaactgcaataaaaattggcttcggccgggagcggtggctcatgcctgtaagcccagcactttgggaggccgaggcgggtggatcacaaggtcaggagatcgagaccatcctggctaacacggtgaaaccccatctccactaaaaatacaaaaaaaaaaaaaacaactctccggacgtggtggtgggcgcctgtagtcccagctactccagaggctgaggcaggagaatggcgtgagccggtaggcggacttgcagtgagccgagatcgcgccactgcactccaccctgggcaacagagcgagactccgtctcaaaaaaaaaaaaaaaaaaaaatggcttcatccagtgggagaatgaaaattctgggccaggcacagtggctcacacctgtaatcccagcactttgggaggccgaggcagatagatcactttgacccaggagtttgagaccagcctggacaacagggtgagaccacgtctctacaaaaaaatacaaaaattagcaaggcatggtggtgtgcaactgtgatccctgtccctgtgcgcatgtatctgcttgggaggctgaggtgggcggatcactgggaggagagggttacagtcagctgagatcacaccattgcactcaagcctggatgacagagctaatccctgtctcaaaaaaaaaaaaaaaaaaaaaggaaacttctccactgaaatcacatacgatggcaacacttaggtaaagaaggtcccctaactgcctggaattgcttgggtcattgtgggtagcgttggatgttggccccatcgtcctggcccatggctggtagccattagcaggtgcataggaagcatgtgccattgcaggcccaattaagcaaacttgcaaaaattgagaattagtctcagatcaaatta

SEQ ID NO: 698620 - DNA, 2451 bp, Homo sapiens
ggggatccatgcatgccaggaaaccagcaggaagcaggctgcctcactccggggcctgcagagtaacccaagagcagcgccagctgtgtgtgtatgtatggaccgtgctcaccgcagagatgctcccagaaggccagtgggagcgcatttaactgaagacaggcagccctgcttcccctgagggaacaaagaacctcagagaatctcatcagctgcgaagagctgggctctgctgctggaccacatggctctgaactccagctcctctgctccccagctgagcaggcttggtagggttgcttaagctctctgagcctcagttttccccttggtgagtgacgatgatagtggtacctaactcagaggggtgcgtgaatatttgatgagctcatccatgagcaagtttcagccttacgctggcacatagtgagtgccccataagtgttagctattactgttttcatttttttttttttttttttttgagatggcgtctcgctctgtcacccaggctggagtggagtggcaggatctcggctcaccataacctccgcctcctgggttcaagcgattctcctgcctcagcctcctgaatagctggtattacaggcgtgcaccatcacacctggctaatttttgtatttttagtagagatggggttttgcctgttggccaggctggtctcgaactcctgacctcaagtgatctgtccgcctcatcctcccgaagtgctgggattgcaggcatgagccaccgtacccagaagctattgttgctttcactgtgttgaatggtggccctcaaaagacatgtccacaacctaacccctggaacctgtgaatgtggccttatttggataagaggactttgcagatgtaatcaatttaagaatctcaagatgagagcaccctggatgatccagatgagccctaagtccagtgaccagtactctgtgagagacacatgaaaagagggagggggaaggccaggtaaagaggaggtagagattgcagtgatgcagccctaagccaagggacgcctggagccaccagaagctggaggggccaaaaagtctccttttctagagctttcggaggaagtgctgacatctgattacagactctggcttccagactgtaagagaataagtctctgttgtttaaagctgccacgtttgtggtagtttgttctgacagcccgargaaacaaatacaccactgttgtttctgcgacgattgcctggcacatgtgtgggcctgagcccaggccagggctgcctctgcctgctctgccttcttgtcttccttcctactataaagcgatcagtccccaaggttgtacccactgcaggtgaagacagagccatggagaattgcaccagaccatgggtaagaaaggttccagaatggggccggacacagtggctcaggcctgtaatcccaggactttgggaggctgaggcaggcagatcacctgatgtcaggagtttgagaccagccaggctaacatggtgaaaccccttctctactaaaaatacaaaaattagccgggtgcggtggcgcacgcctgcagtcccagctacttgggaggctgaggcaagagagtcgcttcaacccgggaggcggaggttgcagtgagccaagatagggccactgcactccagcctgtgcaacagagcgagactcagtctcaaaaaaaaaaaaaaaaaaaaaagtaaaggtctcagaatgggtcaccacaagggactggggtcctttgaggtctgcacagggaagccaattttagagattcattctgttcagcaaatatatgttgggacccctctcatgtgtcaggccctctgcttgcctttggaggtgagaagataaaacaggaataagtctctgtcttcaggtggctcatgagggtggtgaacagttgtgtgaacaagagttaccagggaagacaggggggctgcaggtcaagtgaagtggagatgtgggagggagggacagcaagtgggtctgtctgagagaatcagcaaaggcttcccagaggaggcaacctctaaccagggttttgaaggatgaataggagttcactgagaggccaagggaagaaaaggcattccagagcagagcacaaacagcataagccagggcacagaaacagcctggtgggcacagaaacagcctggtgtgtacagaaaaagcctggtgtgcacaggacaggaggggacagtggtgagtgctggctgatgacaggatgccactagggagtggcagcaatgccaggggaggcttgggtgggactggatcaccgaggggcttgttggccatgcgaggagtcctgtgggtgatggtggcaccagggaactcaacctgggcctccccaaggtatcatttggggccctgccatgctgctcctctactgggtgtgggtagctcgagggcctccgagcaaggggctgga

SEQ ID NO: 698621 - DNA, 2451 bp, Homo sapiens
ggggatccatgcatgccaggaaaccagcaggaagcaggctgcctcactccggggcctgcagagtaacccaagagcagcgccagctgtgtgtgtatgtatggaccgtgctcaccgcagagatgctcccagaaggccagtgggagcgcatttaactgaagacaggcagccctgcttcccctgagggaacaaagaacctcagagaatctcatcagctgcgaagagctgggctctgctgctggaccacatggctctgaactccagctcctctgctccccagctgagcaggcttggtagggttgcttaagctctctgagcctcagttttccccttggtgagtgacgatgatagtggtacctaactcagaggggtgcgtgaatatttgatgagctcatccatgagcaagtttcagccttacgctggcacatagtgagtgccccataagtgttagctattactgttttcatttttttttttttttttttttgagatggcgtctcgctctgtcacccaggctggagtggagtggcaggatctcggctcaccataacctccgcctcctgggttcaagcgattctcctgcctcagcctcctgaatagctggtattacaggcgtgcaccatcacacctggctaatttttgtatttttagtagagatggggttttgcctgttggccaggctggtctcgaactcctgacctcaagtgatctgtccgcctcatcctcccgaagtgctgggattgcaggcatgagccaccgtacccagaagctattgttgctttcactgtgttgaatggtggccctcaaaagacatgtccacaacctaacccctggaacctgtgaatgtggccttatttggataagaggactttgcagatgtaatcaatttaagaatctcaagatgagagcaccctggatgatccagatgagccctaagtccagtgaccagtactctgtgagagacacatgaaaagagggagggggaaggccaggtaaagaggaggtagagattgcagtgatgcagccctaagccaagggacgcctggagccaccagaagctggaggggccaaaaagtctccttttctagagctttcggaggaagtgctgacatctgattacagactctggcttccagactgtaagagaataagtctctgttgtttaaagctgccacgtttgtggtagtttgttctgacagcccgaagaaacaaatacaccactgttgtttctgcgacgattgcctggcacatgtgtgggcctgagcccaggccagggctgcctctgcctgctctgccttcttgtcttccttcctactataaagcgatcagtccccaaggttgtacccactgcaggtgaagacagagccatggagaattgcaccagaccatgggtaagaaaggttccagaatggggccggacacagtggctcaggcctgtaatcccaggactttgggaggctgaggcaggcagatcacctgatgtcaggagtttgagaccagccaggctaacatggtgaaaccccttctctactaaaaatacaaaaattagccgggtgyggtggcgcacgcctgcagtcccagctacttgggaggctgaggcaagagagtcgcttcaacccgggaggcggaggttgcagtgagccaagatagggccactgcactccagcctgtgcaacagagcgagactcagtctcaaaaaaaaaaaaaaaaaaaaaagtaaaggtctcagaatgggtcaccacaagggactggggtcctttgaggtctgcacagggaagccaattttagagattcattctgttcagcaaatatatgttgggacccctctcatgtgtcaggccctctgcttgcctttggaggtgagaagataaaacaggaataagtctctgtcttcaggtggctcatgagggtggtgaacagttgtgtgaacaagagttaccagggaagacaggggggctgcaggtcaagtgaagtggagatgtgggagggagggacagcaagtgggtctgtctgagagaatcagcaaaggcttcccagaggaggcaacctctaaccagggttttgaaggatgaataggagttcactgagaggccaagggaagaaaaggcattccagagcagagcacaaacagcataagccagggcacagaaacagcctggtgggcacagaaacagcctggtgtgtacagaaaaagcctggtgtgcacaggacaggaggggacagtggtgagtgctggctgatgacaggatgccactagggagtggcagcaatgccaggggaggcttgggtgggactggatcaccgaggggcttgttggccatgcgaggagtcctgtgggtgatggtggcaccagggaactcaacctgggcctccccaaggtatcatttggggccctgccatgctgctcctctactgggtgtgggtagctcgagggcctccgagcaaggggctgga

SEQ ID NO: 698622 - DNA, 1452 bp, Homo sapiens
ttgttcgtcaaagcacacaaaatgctaacagaagaagaaataaacatatttccaaaagaaaatcagaaaaagctgagactgaatgacaagtggctaatggcttttgtgaggtgtaagtaataaaaataaggaggaaaaagttgggcaggaccaaagaggggtactaaaagaggcaaagtcatatattctacaactttattaaattcctatattttctccctcctcctccccccaatcaaatctaccaagcactgttagcagctagcagtagttctcaatcatggctgcacattaaaataatctggggagctttctttttaatttttttcttttgagacagggtctctctctgttgcctaggctggggtacagcggcacaatcacgactcactgcagcctcaacctcctgcactcaagtgatcctcccacctcagcctcccaaatagctgggactacaggtgtgcaccaccrtacagggctaatttttaaattttttttcatagagatagggtcttaccatgttgcccaggctggtctcaaactcctgcactcaaacaatcctcctgtctcagcctcccaatgtgctgggattacaggcataagccaccatgcctggccacctggagaacctttaaaatcctcacacccagaccatatccaggacaactgaaatcaggctgaggttgagacccaggcatcagtattatttcaaagttccctggctgagcaattctgatgtgttgccaagactgaaagctacagacaacaaactgacataattaagcaactcactgcaacaagagaaaaagaagaatggtagttggcgccatgtctggaatactttggtaaatgtaaggactcctgaacacaaaagcacagaattctgatcctaagcaacaaataaagcaagctaagctacaggcacaataagctgagatgggctaaaatgtttgtctttgatgggaagaccctccacatttctagaaatgatctattttatttaggaacaattttacaaaagatgaagggttggactttccccagaagaatcctttgttcctagacccaaactcataggtaaaaacaagcattatattactgataacaaagatgatgagagtaataagtgcaaagtccctcaagtaattccgtctatgacctaaaaaccatagatggctctagagattccgttttaaatatacatctagacgaagaacatggtagatgtatatggacggatatgaaaataactcatttctattcattgttttgcaagattgctttttcattaaagataaaaaaattttaaatcatatgtattaatatatgcactcatatgcagagaaaaagacttgaggatatacaccaagttcccttgggaataggaacaggaagggagaactttcatttttaccttttacatacatatctgtattgctttaattgtattct

SEQ ID NO: 698623 - DNA, 1452 bp, Homo sapiens
ttgttcgtcaaagcacacaaaatgctaacagaagaagaaataaacatatttccaaaagaaaatcagaaaaagctgagactgaatgacaagtggctaatggcttttgtgaggtgtaagtaataaaaataaggaggaaaaagttgggcaggaccaaagaggggtactaaaagaggcaaagtcatatattctacaactttattaaattcctatattttctccctcctcctccccccaatcaaatctaccaagcactgttagcagctagcagtagttctcaatcatggctgcacattaaaataatctggggagctttctttttaatttttttcttttgagacagggtctctctctgttgcctaggctggggtacagcggcacaatcacgactcactgcagcctcaacctcctgcactcaagtgatcctcccacctcagcctcccaaatagctgggactacaggtgtgcaccaccgtacagggctaatttttwaattttttttcatagagatagggtcttaccatgttgcccaggctggtctcaaactcctgcactcaaacaatcctcctgtctcagcctcccaatgtgctgggattacaggcataagccaccatgcctggccacctggagaacctttaaaatcctcacacccagaccatatccaggacaactgaaatcaggctgaggttgagacccaggcatcagtattatttcaaagttccctggctgagcaattctgatgtgttgccaagactgaaagctacagacaacaaactgacataattaagcaactcactgcaacaagagaaaaagaagaatggtagttggcgccatgtctggaatactttggtaaatgtaaggactcctgaacacaaaagcacagaattctgatcctaagcaacaaataaagcaagctaagctacaggcacaataagctgagatgggctaaaatgtttgtctttgatgggaagaccctccacatttctagaaatgatctattttatttaggaacaattttacaaaagatgaagggttggactttccccagaagaatcctttgttcctagacccaaactcataggtaaaaacaagcattatattactgataacaaagatgatgagagtaataagtgcaaagtccctcaagtaattccgtctatgacctaaaaaccatagatggctctagagattccgttttaaatatacatctagacgaagaacatggtagatgtatatggacggatatgaaaataactcatttctattcattgttttgcaagattgctttttcattaaagataaaaaaattttaaatcatatgtattaatatatgcactcatatgcagagaaaaagacttgaggatatacaccaagttcccttgggaataggaacaggaagggagaactttcatttttaccttttacatacatatctgtattgctttaattgtattct

SEQ ID NO: 698624 - DNA, 2412 bp, Homo sapiens
gacccgggcagccgcggccagcaccgcgcgggcacttactgcgacggacagtcccgcggggtgctgagtttctctggttcctccgagcgcacgctggtcgctccgcactctcggtagctgccgccgggaaggaggtccgagcgcgctctttcgcctgctcagtgccttgcggtatttatcccagcctccttgagcctccagacccacgtgacattctccccacgcgactttctgctcaatatttaattagccgcctcctctcctttcgcttgcgtgattgagagtttccgagacggtaactcgtcgatgcccataacatctggacccaattgggttctaaatgacgcaattttaggaaaatcgaggtctcgccatccaatccggagcggcctgcttccgtctgcagatctgacgccccctcccctctccttcgaaactgggtttcatgacacctgatattactcatcaaatttgagcaaagtgactcattccttggacttcggtaacttttccgtccctcgagacgtcaggataagttgcacttttcaggatggccaaataactgtaggcattcagacatttcgtcggaaatcaggctaaaaaaagaggactacacttgaggggagatgcggggaagcattattttcccttctatttctagcttaatagtatttaagtgtttctgagacacagcatcgttctataaccagaacatccctcttctaaatcaacgcgaatactggcttttccttagcataacaaaaggatgtttagtcccatagtattttagaagatggaagcagatttattttacattttggagaaaggggaatttaaacatgacattgtgtgtcagacttaggatttcttttgtttcaagccgggtaactcctcttccttgccacatccaggagcaggggttgaacaggacgttttttgcttctctcctacactttcttgctgaagactaggaaaccagcaacatagtgtgtaggatcctcacccttgtcactaaagggctctataaatcatgtttctcctttctatgaaagtaagtgtagtgaagatgctaatgggacagtcattaacagcacaaaatattagacaaatagcatttgtacagaaaccacacctttccatgagcccttggttgcctggcagacacatttctttgatctccaaatgaattaaaagatgtgacatctttggtggagtagttttctcccctttacatatgaagtattatatttttcaattaattatgattttttagtatattgcataaaagaaataaatttttgcaactcaaaccagaagtatttttttctctatgttgttcttaaataatcctgaatttggaaattctcatgcatctctgatttcttttggccttagcctcacaatgtgagcattttattttccgttttcagaacttttatatggaaaattataagcatatccaaaagtagagagaaacatccacttccaagtttcatctacaacccttccagtttcctctgcactgagattattttgaaaaaaatcccagacagttaatcatttcaactgtaaatatttcagcatgtctgtataaaggtaggaattaaaaaaaataaaaacatatccacgccattatcccacctaaaacaacataaaataattccttacattaaatatccagttagcattmaaatatttctcattgcttcctaattccggcccacacagtttactacttgaaatcagaattataatgaagtccatacattacaattggttttgttagttcaggctgctgtaagaaagtaccatggtctgggtgacgtaaacaacagaaatttatttctcacagtttcgaaggttggaagtctgagatcgtggtgtcagcatggtctggttgtgtttaaggccctcttccaggttacagactgtcatattgtctccttgttatatcctcacatggcaggaaagaatgagagagctcttcaaagtcccttttatcggggcactgatctcattcataagagctgcaccatcatgatctaattatcttccaaagaccccacttcctaataccataaccttaggggttacgatttcaacacatgcattttggagggacacgaacattccttctactgcatgtttcttaaatctccctgaatctgtaattcgctctctctttctctctctattgtagtttattgataagacaggtcaggagagtgtaccgcattctggactttgctgattgccttttaacttgtttctctgtttcgattatttcctgttaattggtagttgtatctagaagtttgatcctctgtacatttttttctttttccttttctttttctttttttttttttttgatgagactacttcacatgtgttgtgttgttctggtaggaa

SEQ ID NO: 698625 - DNA, 925 bp, Homo sapiens
tgtcctgcaaattatcagccaaatagcttgccagccacactgctgtgactacattacaccctctaatgattcyctgtggttctcctgatcaagcatgcattcacgtctgttgtgttttagagacattccgccatctgcccccacttgacacaccttgtctagcaagtccattttctatcctctatttgcaaccagaaaaggtgcaaaagaccccatggactggaagaggatgactctgtgcctttatcaactcttaaggactaggctaaaaaccaacttcaatttgtaaattttcttgcttaaaacaatgattactgcctctctttctgtactcctactgcttgggatttctttcagattcataaaaataaaaagaaagtatagttataccacatattccacagacagttattacaagatcacagtgtgcaaacaagtctactgggtaatggggaaattatgaaatagcttaaatataactatatttgactttggaatcttgccaggatgagtaagaccaaatgacttacacattctatatttatcacacgaaaacaagcaccagtaaacacagtgtaaaattttgacccactgatggagattgtggattgatgaagtgactagagatggcacagttcataaaggaaaacatttctaaggcagtgaaatctgaacaatatttggagagaactgaagctaagtgcttggaaatgaggaagagcaatataaatgtaggagactggtctatgtgggaaggctttgaagcagaatctaatccaaagaattaatcatcaccattaaacttttccaaaacttcccactctatcctctatgaaccccatgtaaaaacacaaaaactttgaaccgtaaagactagcctaaggcctgcagctgagtaaatcacagtctgaccctttaatcttca

SEQ ID NO: 698626 - DNA, 925 bp, Homo sapiens
tgtcctgcaaattatcagccaaatagcttgccagccacactgctgtgactacattacaccctctaatgattctctgtggttctcctgatcaagcatgcattcacgtctgttgtgttttagagacattccgccatctgcccccacttgacacaccttgtctagcaagtccattttctatcctctatttgcaaccagaaaaggtgcaaaagaccccatggactggaagaggatgactctgtgcctttatcaactcttaaggactaggctaaaaaccaacttcaatttgtaaattttcttgcttaaaacaatgattactgcctctctttctgtactcctactgcttgggatttctttcagattcataaaaataaaaagaaagtatagttataccacatattccacagacagttattacaagatcacagtgtgcaaacaagtctactgggtaatggggaaattatgaaatagcttaaatataactatatttgactttggaatcttgccaggatgagtaagaccaaatgacttacacattctatatttatcacacgaaaacaagcaccagtaaacacagtgtaaaattttgacccactgatggagattgtggattgatgaagtgactagagatggcacagttcataaaggaaaacatttctaaggcagtgaaatctgaacaatatttggagagaactgaagctaagtgcttggaaatgaggaagagcaatataaatgtaggagactggtctatgtgggaaggctttgaagcagaatctaatccaaagaattaatcatcaccattaaacttttccaaaacttcccactctatcctctatgaaccccatgtaaaaacacaaaaactttgaaccgtaaagactagcctaaggcctrcagctgagtaaatcacagtctgaccctttaatcttca

SEQ ID NO: 698627 - DNA, 1010 bp, Homo sapiens
tataagccatttcttatggaaaaggaaagatattttaggggaaaattcaagagctcagaatgaaagaatcaagaaaacagtggactaggaaacgattcccagagaacaaaagtagagcctaatcaaggaacttactctgttcctgttttatggtgagcagctggatacatatatttattgcagcactatttacaatagcaaagacatggaaccaacccaaatgtccatcaaagatagattggataaagaaaatgtgggacacatacaccatgggatactgcagccataaaaaggagtgagatcatgttgtttgcagggacatggatgaagctggaagctatcatccttggcaaataaacacaggaagataaaaccaaataccacaagttctcactcataagtgggaggtgaacaatgagaacacagggacataggaaacaatacacaccagggcctgtcgggtgtggggagsagggagagcatcagcacaaacagctaatccatgcaggacttaaaacctaggtgacaggttgacaagtgcagcaaaccaccatggcacatgtatacttatgtaacaaacctacaggttctgcacttgtatcttgggacttaaagtgatttaaaaaactgttatagggcagaaatggctgaatgcttcctgtttttctcatttttgaatgggagagtgcttttccactctctttcacaatattgtatgttgtatatttgaagggaattagtggaagataccttgttcttttcattcacagacctctgattcaagagtagctacattcatatttgaaacagatgcaaatcatgagatagtaaactttaagcctgataatataattgcatgagaatttttgtggtcttggatggggagggtgtatattttgcatgtgagaggattgaaaataattgtaaccagagagtagaccatagtaaattatttgccataattctttgcaatatattccatcaaaaggcaaagtctattttcctactca

SEQ ID NO: 698628 - DNA, 1245 bp, Homo sapiens
tctggatgtggtagctcatgcctgtaatgtcagtctttgggaagccaaggtgtaggagatcacatgagtccaggagttcgagaccaacctgggcaacatagtgggaccctgtctctacaaaaaattaaaaaattacctgagcatagtggggcagggctgtagtcccagctagttgggaggctgatgcaagaggatcacttcaacctgggaagtcaaggctgcaatgaaccatggtcacaccactgtactccggcttgggtgactgacagagtgagaccttgtgtcaaaaaacaacaataacaacaaagaaaggaaaccgaactaatgtacaatgatttttagatcgcagccatctcttgtgttaaatgtaaactcgaactgttattaagagtttattgattatccctagttcacagcaagtaagatttggagcaatgaggctcttacattccaagtaaaattccttcttgtagttagtttaaccagtattggttttccgtcactattttctttttactgaaattaatttgaaagtctaatataacaattgtagtggtaaaaagggatgttcttttcatggtgaagtttgggttttcttggtgctatttttcttattgtatttaaaaaatcacattctatttgctgatgtgatgcttataattctcactgggaagatcctaaaaatatgtatgtatatggtagataataatgctaatgcctatctacccttattatgtttctagcaggactttagaaatctaagaaataagtagctagccagttagtaaagataaagcagttgggttttagaaatatctattaaaggtactttaaagtagttttaattttatttttaacattttaagctaactattaaatataatagtgtggtataatagagcatrtacttctttaattttaataaactaagaaacaagattgagtaataaatgaaacattgtactgtgaaattagtggggatcctttcatttttcataaaaagaaaaaagcaatgatacaggagagccttgttagtaaaaaacttactgggagaataatttgatgaaatgtgaagactctcagcagtgcagtttctagtccaaggaatttgaataagtgttaggaaatatgaatttgtttctgcttcatctaactagatttggtacaatggggtgtgcagttagggagaaaaagtctctggtacttaataaggcaataattcatgctgaatggatatgagcagtc

SEQ ID NO: 698629 - DNA, 621 bp, Homo sapiens
tgcacaaggtactcaatattcacttgtaaaataaatgaatgcttgatggatggctgagccaaccaatgcaatatagtcagcaacaagggatgccaaaaataaaatactatttttaaaaaggaattagttttatgcacaagacagtggttgcttttatacagtagtggttgttcaggtttgatgacggaatttttattgctgtcatgatttgagaagtagagctctgaagaaatgcagtgcctagtggaaaaaatgagtcgatatgctcagaaagctaaatacatatgaatgagtcactgatggtgaggggctgacattgtgctaggaaggtcttcaatgactttgtcctttgtggtctaattctaataacagattagttctcaattcagttagaaacatgatgtaaggtgagtagtagtactactgactgtttgttagaatgttgaactaaagcaagttgggtcagagttctcattttctttttcaaaggagttttggaaagtagaattggagaaaaacagaggttcttatttacctataggttttgttttaattttawtttttttttctttatttttgagacagtttttgctctgttgcccaggctggcgtgcaatggca

SEQ ID NO: 698630 - DNA, 702 bp, Homo sapiens
cccctgtcctctctgtgtgccttgggacaaggactctgtgaacctctgtgttcatgcttgtccagtgggatgggtggtgagcattcaggaagacccgctacatgcatggggcctggcccaaggctcatgtggatcttgcagttgatcctgatggcacgagcctcccagcctgtctccactgrtcgctgctgcagtcctgcctctactccgctactcaagtcacctatctcaatcccagactggagagggtgtcccttctttgtccccagcctttgtttctctatatgcccttgctctgcagagcctgccttggccacagctccacctgtgccccctcacacgtacagctcataccttacagagtcccacccagacccagcacccacctcaccacctttaggaagccttgatcccagcacagttgattgatggctcttgcagtggagttccccagctagggtcccctgcccatgtggcccagccctgcctaacacacagcgtcctcctcccctaggcaacagagacatccagatgatcagctgtggggctgacaagagcatctactttcgcagtgcccagcaggtagggtggcatggcctccttgggggctggggtggggggttgtcggggcattctctgaaggtcctgccggccctgccagggttcggatggactacactttgtccgtacccaccacgtagc

SEQ ID NO: 698631 - DNA, 702 bp, Homo sapiens
cccctgtcctctctgtgtgccttgggacaaggactctgtgaacctctgtgttcatgcttgtccagtgggatgggtggtgagcattcaggaagacccgctacatgcatggggcctggcccaaggctcatgtggatcttgcagttgatcctgatggcacgagcctcccagcctgtctccactggtcgctgctrcagtcctgcctctactccgctactcaagtcacctatctcaatcccagactggagagggtgtcccttctttgtccccagcctttgtttctctatatgcccttgctctgcagagcctgccttggccacagctccacctgtgccccctcacacgtacagctcataccttacagagtcccacccagacccagcacccacctcaccacctttaggaagccttgatcccagcacagttgattgatggctcttgcagtggagttccccagctagggtcccctgcccatgtggcccagccctgcctaacacacagcgtcctcctcccctaggcaacagagacatccagatgatcagctgtggggctgacaagagcatctactttcgcagtgcccagcaggtagggtggcatggcctccttgggggctggggtggggggttgtcggggcattctctgaaggtcctgccggccctgccagggttcggatggactacactttgtccgtacccaccacgtagc

SEQ ID NO: 698632 - DNA, 664 bp, Homo sapiens
gcgccccatctgctgaatgtcacacatgatggatgcttctactctaccgtggaaaacctcagctgccacaatctgctgtctggcaccacccccatttctctggtgacatctccccagggttgcagtaaacgtgggctctgggatctcctcaccctatcccaccaggatgccactgcctaagcagtctccctcttccaggctattgtaacctctgccttggaacccatcagaccacaccatatccttaaaatcttcccaggctggtctgagtgcagtgtktacaactaattgatcacaaccagttatagatgtctttgtttcttcttcactcccactgtttcacttgactagcctttaaaataaaaagaaaagaaaaaagaaaaaaaggaaaaaaaatcttccagggtagacagtggtgacggtggcacaaccttgtgattacgctagaagccactgagctgcacactttaaaaggataaattgtgtggcatatgaattctcaattctcaataataagaatgctgtcccgaaagcctctttctactaagagaattgccttgtccccaacgcacatctcttagtcgttgggacatctaggcagaggtcatcaaacctagccactgcgtagaaccacctggagagtttttaatatccatgttcccag

SEQ ID NO: 698633 - DNA, 636 bp, Homo sapiens
agatttaaaaacttttttgcaacaagtgacattattaaaagagtggaaagaaaatgcacagaatgggaggagctatttgccaatcatatatctgatgaagaattaatattcaaaatacataaaaaactacaactcatccattaaaaaaacaacgccattcaaaaatgggtaatggacatgaagagacattcacgccgctgtccatcacccacacaacaggtagagtaaacctttcaaacgggaattagagcacatcatcaccaccacatcccaaagccactctagcttcttcccctcttagtgcaatgaaaccccaatgtctcaccatttcctacaagcccctcaacacagggcccctctgtcaactctgggctcatcccactcctctcmgcccagctcacttgtctccactcacaccagcctcttgtcactgctctgccctatttctgccacctacccatgctctgactcccacatgtacctgctccccagggattcacatgactcactcctcacacgattcaggtctcttctcagataaccagtggtcaagttctcagaaacgtcttgctcaatgaccttgtctaaactatgtccctgctattcccaccatcaccaatcttctggcctaggcat

SEQ ID NO: 698634 - DNA, 1142 bp, Homo sapiens
tctcctgcctcagcctcctgagtagctgggattataggcatgcaccaccatgctcagctaattttctatttttagtagagacgggttggtctctactattttagttggtcaggctggtctcgaactcctgacctcaggtgatccgcccacctcagcctcccaaagtgctgggattacaggtatgagccaccaygcccagataagtttctaatttatcatgaaaacatacatcatatacttgggtcacacttaaaaaacgtaattgatggggaggcaacatatgggagagatgaatttccagcagcagagctggaagggatgtcggtgacccagtcggcagccaagtggtctagcaccccatgccacacagttggtcagagactgactgaaatgagaactcaggcttcctgactcccaaccacccagtgctgagtcccgatgcttcccagatccctacagatcatcccccagcacagcctgggctaaccaactctaataaaaattgcaggaacagtgatacctgcactctaccaccagtatcagccatttctctggaataagtgctagccttgcctcatgcagaattaattctgtgtttgattttaatgtttaatgaactctaaactaaaaccatcttggaaaaagaagtacagggagaggaaaaaggagcctggtttgtaaaactcaattatggtacactttgctaaaacattcccaaattgcttgcctgcttaaaaatactgccaattatataaacaattaaccaatagagcacttgcatttaaatacctatttctgtgctgaagttttggcaggttttctcatctgaaacttttctgctgttgcatcaggcccacgttttcatagactctagcactgtcttctctcattctggagagaaaagaaaaagaaagacatttacaaaaatgtagaccacgctgtttaagcttacatgatatctataaaacacatactacattctttgggcaccagatatggtacagacacagttcctgtgcctaggacctgacattcccagggagagaagagatagccatacagcaatataattacagaggcagaagtgaaataacgctgggcatggtggctcacgcctgtaatcccagaactttgggaggccc

SEQ ID NO: 698635 - DNA, 585 bp, Homo sapiens
taatatgtgaacattcactgaactgctgcttaagatatatttatctgctatactccaattaatgaaggactttattttgaaagtatgcatatatatgcacatagaattagatatgcttttctgacatgtatgttcmtaaatgtgtggatatgtgggcctggagagagagacagagagagagagaagatatcagagagattttcccagagttattcacccaagtgtctattgagaatgatgagaataaaattaaaactagaattctcatgattttcagtttttctatagatcatgatacattttgaacatagcgaaattgttctaagaaaaatatgtgtaaaatttattttaaaaattatattaatttgcttgaaataattaagaacctttagtttaagctggcttcctctcctttaaagaattatcagtggatttcatggaacctccagaacattacacggcaaagaaaaatcatttcacaacaacaaaatcacagcagcaatgaacaccagtgtgccccgactgaccccagtgctttaagcgtatcacacatgatctcaccctctgagaaagattatctgagag

SEQ ID NO: 698636 - DNA, 585 bp, Homo sapiens
taatatgtgaacattcactgaactgctgcttaagatatatttatctgctatactccaattaatgaaggactttattttgaaagtatgcatatatatgcacatagaattagatatgcttttctgacatgtatgttcataaatgtgtggatatgtgggcctggagagagagacagagagagagagaagatatcagagagattttcccagagttattcacccaagtgtctattgagaatgatgagaataaaattaaaactagaattctcatgattttcagtttttctatagatcatgatacattttgaacatagcgaaattgttctaagaaaartatgtgtaaaatttattttaaaaattatattaatttgcttgaaataattaagaacctttagtttaagctggcttcctctcctttaaagaattatcagtggatttcatggaacctccagaacattacacggcaaagaaaaatcatttcacaacaacaaaatcacagcagcaatgaacaccagtgtgccccgactgaccccagtgctttaagcgtatcacacatgatctcaccctctgagaaagattatctgagag

SEQ ID NO: 698637 - DNA, 1262 bp, Homo sapiens
taaataataagaatactaatttaaaaaatcatgttctgggccaggcatggtggctcacacctgtaatcccagcactttgggaggacgaggtgggtggatcatgaggtcaggaattcgagaccagcctggccaaaatggtgaaaacccatctctactaaaaatgtaaaaattagcctggagtggtggtgggtgcctgtagtcccagctactcaggaggctgaggcaggagaatcgcttgaaaccggaaggcggaggttgcagtgagccgagattgtgccactgcactccagcctgggcaacaagagcaaaactctgtctcaaaaaaaaaaacaacaacaaaaaaatcatgttctgacacattcttttatgtttttcatgaggatgtatgtaygtgtatatatatacacacacacacatagtcaaattatagtcaaattacatagattgtgttgcaccttaatttgatttctttcattttcttttcttgttatttctactactggatgttcttaacttatgatatttagtcttcatcttcacatacagctagattttagatagcatgggcttgagataatgaaaactttgcttggtgaagactactttcaaatttctgttagacattactatggcaaggagtaatcaggatttaaggttagtttgttaaagatttcatggaggtattgacgagtgaatatttagtaaattcttgcctaacattggttaacaatgagctaaggttttgtagagacaatgattcagagaaaaagctaccaagttactggaagtggtagaaactgtgagtagaactgagaattcatagaaggcagtagaagttacagagggccactgaacttgaccattcctggcctagccctacctactagtagcccactcttgcatccaccataactacatgctccatgagtgaaagacttatgatataaagggaagacctgctgtatccttaggcaactgtcacctcagttgtagaaaacttctggaagagaacttactatgaaagaaatagggacatcagtgttttctggaaaacagtcaattccccaccctccatgctcccagaattcaaccaagtatcatcatagaacaaggctaactctcacttactcaagtagacagggcttaaaagctttaagctttgtaattttgctataaatgtaggatggaagggtaaatttaaaaatttaattaaaattaatgagacattcacaaaagtgctgctttgtttttctttagttgtc

SEQ ID NO: 698638 - DNA, 1710 bp, Homo sapiens
agttagaattactgccttatgaaacatgtgattcaatgtggggctccgcttgacaagatcaagcattctaaactaaaatgtacaaccagtggaaatatcttcctgctcctcgactactgatactttacagccatggttctccaactttaccatgcatccgaagcactggaaagacttgctaagatggagccacagattgtggggtcccactcccagagtttctgagccagataatcagagtctgggaatttgcactgccacaagctcctgggtgctgctgatgctgccagtctgaagcccacactttgagaaccctcgctttcccataatgcttcaagaagtcttaggcactaagttgatgcacctgtgaaggggttagatttccctcctcccttcccaccaccgccaagataagtagttgctgagtgcaacattacagcacttcttaaactctaataggcacacagatcacctgtagatcttgataaaatacagatccttattcagcaggtcagtggtggcgatgggtgtggggtgtgggggtggcctgagatctgtaatcagcccccaggtgaagccaatgtggctgactctccgcctaaactctgagctgcaggcattacaaattataccaagtccattagtattaaaagaaagtgactttcttaggtctcaaagctttgagtagtttttgatttgattcaggcatttgattcaggtctgagctctgaaactactaatatactttcttttttcctcatgagtcatcttgagaatatacttttattctttgtttaacatttttacaacatagaaacaagttaacatttttaactttcacccatataaaacttccaacatgaatgggcccagctgactcattgtcactgcccagagatctctgagctctattcaaacactgcagataattgtaaacctggagacaaggttgggagggtggggctgtttatccttgttgattgagaaacctactctttgtcctgtgctggtgttttgttacatagttacagcacttagcctttcattgaaatcctgcctcagaacaccattatctaatgcattattgatctcgattctcccaaaggcctgtgttatctcttttttatttcttaagctataaagagattgtggtgatggggaagtgaaagagaaaacacctcccaaacctacctgatccagctgatccgggacatatcccttttttttttttttttttgagatggagtctctccctgttgcccaggctggagtgcagtggcttgatcttcgctcacagcaacctccacctcaagcaattctcctacctcagccttccaagtagttgggaatacaggcacgtgctaccacatttggctaatttttgtatttttagtagagatggggtttcaccatgttggtcaggctgatctcgaactcctgacctcgtgatccgcccgcctcagcctccgaaagtgctgggattacaggcgtgagccaccrtacctggcccagcacatatcctttatatcataatgttgtgaacacatatatacatacatatgtgtatatatacacccaccacatatataatatatacccacacatacatacacacacataaagagaaaatgcctcccaaaacctacctaatccagtgtgactcttacacctgcaggtggatagtaagtggacatttaggggaggcaggac

SEQ ID NO: 698639 - DNA, 624 bp, Homo sapiens
gctgagcagaataagagtgaagtacactatacttaaaatggaaatagattaaaaacaacattactgaaacccttctcaaggcaaaatgtgtctccttttgataataagctgcatatactatcaggtcctctctttctttatatggtgaacatatatttttaatgaaatgtctctcatttttttaataacagatttattgagatataattcacacaccatgaaattcacccttacaaaacgtacaattcagtggtcttcagtatgcttacaatgttttgcaaccatcaccactatctagttttagaacacttcatcaccccaaaaggaaatcttgtacctattagtagtcaccgccttttcccttcctcccagcccctaacaaccactaatctacttcctgtctctacggatttgcctactctggacatttcatataaataggttaatacgatgtgtccttttatacacaaatgttcatagcagcattactcataaaagccccaaagcgaaacacctcaagtgtccatcaaccgatgaatggataaacaaaatrtaatatatccacacaatagaatcttattcgtcaataaaaaggaatgaagtactgatacatgctataacaga

SEQ ID NO: 698640 - DNA, 624 bp, Homo sapiens
gctgagcagaataagagtgaagtacactatacttaaaatggaaatagattaaaaacaacattactgaaacccttctcaaggcaaaatgtgtctccttttgataataagctgcatatactatcaggtcctctctttctttatatggtgaacatatatttttaatgaaatgtctctcatttttttaataacagatttattgagatataattcacacaccatgaaattcacccttacaaaacgtacaattcagtggtcttcagtatgcttacaatgttttgcaaccatcaccactatctagttttagaacacttcatcaccccaaaaggaaatcttgtacctattagtagtcaccgccttttcccttcctcccagcccctaacaaccactaatctacttcctgtctctacggatttgcctactctggacatttcatataaataggttaatacgatgtgtccttttatacacaaatgttcatagcagcattactcataaaagccccaaagcgaaacacctcaagtgtccatcaaccgatgaatggataaacaaaatgtaatatatccacacaatagaatcttattcrtcaataaaaaggaatgaagtactgatacatgctataacaga

SEQ ID NO: 698641 - DNA, 338 bp, Homo sapiens
gtcaagagatcgagaccatcctggccaacatggtgaaaccccatctctactaaaaatacaaaaattagctgggcatggtggcacacgcctgtagtcccagctactcgggaggctgaggcaggagaatcacttgaacccaggaggtggaggttgcagtgagccaagatcacgccactaacactccagcctggcaacagagtgaractccatctcaaaaaaaaaaaaaaaaaggaaaactcatcttgccattacccgcatctaaaatcttataatgaaaaggcatagcaacggcaaatgcactgtgtgttacttgaatgaaccttagtttaaacaaatca

SEQ ID NO: 698642 - DNA, 527 bp, Homo sapiens
tgcccctaaccttcctcctagcaccaatgccagccatccagtggggactgaaacctcagaaagcaggtgtgagtctgtctgcccccaggccccacatcccagagggacaaactctcagctaggtctatcctctgtctccaccccagatcagggtcacccctccatcaccctttttccctaggctgcctmagctattcaggcacccgaaggccaggaagtccctccccgagtctaccctcttgctctttttttttttttttttttttttttgagacagtctcgctctgtcgcccaggctggaatgcagtggtgcaattttggctcactgcaaaatacgcctcccaagtagttggcattacaggcacgcaccaccatacctggctaatctttgtatttttgtagagtcggggttttgtcacattggacaggctggtctcaaactcctggcttcaagtgatcagcccacctcagcctcccaaagtgctgggattacaggcgtgagccactgcgcccagtctcttgctgct

SEQ ID NO: 698643 - DNA, 1259 bp, Homo sapiens
agtgcatgatttttgtattttacaaaattatcatattacaaatatgtacatcctttatcagagattttttgagaagcattgatatagaccagtaattttcaaaccttttaaaaggtgtaaagcatttcaacactttcatcaaaccaaaccttatgtggaagctcaatgtgtaaaattcatgaaagcgcccttctctttagaacttctctgggcctgaagacccctaaactcctacagtggccgcctcagtgccaccatggaccctctagggcttttcagagcaaggtctgaaatccactggcttatagagatcatcatactttttttttttttactactaatagaattagggcttaatttatatcccatgacagataaaggatttttcctaatttgtaaatttatcttatcaattgttataaaaggcgcatgcacacacacacaacattgaaaatcaacgactggaatgttgagtgtctacctttataacgttttcccctggaattgtttatcagattttcatttgtcttcgatgtctatgaggtcttcctacccgtggaatggcttttcccactggcaaccacaggcctctgcctcagtttcactttttattcttttggtttgtagagatgactctgagccttccaaagtgaattttgtttatacagtgccacttgtattttaggtaaatccatcctaaatacatttttcaaatttggttaaaatttctcataaggtaattcacagaaagatcatattttaacattgatactatagatctgattatttccctcagttgcttgaaattctccaaattattcttaccataaagaccaaaaactattctaaacttgtctctgtcttcctakataaccagatatctcacctatttttccctgtttcctgctctctccagccacattgtctttttcggtttgttaattttttgtaagtgcctagttttttcttatttcaggattcttgcacattttcttcttctcctacctcaactgactaactgcctcctttttatttaaagaaattttagcttaaacatcatcttggggaattttatcctatctccttcactagcttagtagtgttctgtactttttctgtatttttcttcatgtcatcacaattgaaataaaataatttttatgtgtaattcttcatttgtatgttcttcctatagacatctccatgcgtgtaggaacagtgtctatcttatcagtatattccctctgtctagtagagtg

SEQ ID NO: 698644 - DNA, 546 bp, Homo sapiens
tgccttagcctgtagagtaactgtgactacaggcatacataaccacacacagcttatttttgaaattttttgtagagaagaggtctcactaggtttctcaggctagtctcaaactcccgggctcaagcaatcctcccgcctcagccttccaaagtgctaggattacaggcatgcaccaccatgcctggtttaattttcttactgtactcttctttatcaattgtagagttttcaagttccctcaactacatgtcaaagtcttttgggaaatcagtaattccatttctaggaatatattctaaggaaatgatttctaatatggacaaatatttgtgcagaaatattcatcaaaacagtattactgtggccaaaaaagttataytgcatccacggccgggcatggtggctcacacctgtaatcccagcactttgggaggccaaggcaggtggatcacctgaggtcagttcaagaccagcctgaccaacgtggtgaaaccctgcctctactaaaaatataaaaattggctgggtgtggtggtgggcacc

SEQ ID NO: 698645 - DNA, 546 bp, Homo sapiens
tgccttagcctgtagagtaactgtgactacaggcatacataaccacacacagcttatttttgaaattttttgtagagaagaggtctcactaggtttctcaggctagtctcaaactcccgggctcaagcaatcctcccgcctcagccttccaaagtgctaggattacaggcatgcaccaccatgcctggtttaattttcttactgtactcttctttatcaattgtagagttttcaagttccctcaactacatgtcaaagtcttttgggaaatcagtaattccatttctaggaatatattctaaggaaatgatttctaatatggacaaatatttgtgcagaaatattcatcaaaacagtattactgtggccaaaaaagttatactgcatccacggccgggcatrgtggctcacacctgtaatcccagcactttgggaggccaaggcaggtggatcacctgaggtcagttcaagaccagcctgaccaacgtggtgaaaccctgcctctactaaaaatataaaaattggctgggtgtggtggtgggcacc

SEQ ID NO: 698646 - DNA, 663 bp, Homo sapiens
attttctcagagtcttttctgattatttgctggaccctacatttataattccatttatgccgatttcagagtaaaatttctattggggtacaatttagtctttttcttctaggattgcaattttcattstgttggcctagggcttctcaaccttggcattattgacatttgaagctagataattcttccttgtggggtggtgtgagagctgtcttatgcactgcaggaagtttggcagcatctctggcctctaccaaatagatcttagtggcactctcttgcccaattgtgacaagcaaaaatgtctccagagtttgacaaatgttttctcgggttgcggtgggggccccaggaatttcaacaatagaaaaccattgctttagctcacccttacacatattcataagagaggattttgtattttatagaaagattttattaactccaaaaaggagtcagacttgaaaaccttcaaaaaccttcaaatgatgagcattctcagataaaatatttcagaaatgttgaaacaataaatgctatttgaataacacatactttagtggtcataggtgaaatagtattaggacatatatcaagtcctttgataaaaagatattttatgaagtaatagtgccttttaacaaattcataatatgttataat

SEQ ID NO: 698647 - DNA, 663 bp, Homo sapiens
attttctcagagtcttttctgattatttgctggaccctacatttataattccatttatgccgatttcagagtaaaatttctattggggtacaatttagtctttttcttctaggattgcaattttcattgtgttggcctagggcttctcaaccttggcattattgacatttgaagctagataattcttccttgtggggtggtgtgagagctgtcttatgyactgcaggaagtttggcagcatctctggcctctaccaaatagatcttagtggcactctcttgcccaattgtgacaagcaaaaatgtctccagagtttgacaaatgttttctcgggttgcggtgggggccccaggaatttcaacaatagaaaaccattgctttagctcacccttacacatattcataagagaggattttgtattttatagaaagattttattaactccaaaaaggagtcagacttgaaaaccttcaaaaaccttcaaatgatgagcattctcagataaaatatttcagaaatgttgaaacaataaatgctatttgaataacacatactttagtggtcataggtgaaatagtattaggacatatatcaagtcctttgataaaaagatattttatgaagtaatagtgccttttaacaaattcataatatgttataat

SEQ ID NO: 698648 - DNA, 663 bp, Homo sapiens
attttctcagagtcttttctgattatttgctggaccctacatttataattccatttatgccgatttcagagtaaaatttctattggggtacaatttagtctttttcttctaggattgcaattttcattgtgttggcctagggcttctcaaccttggcattattgacatttgaagctagataattcttccttgtggggtggtgtgagagctgtcttatgcactgcaggaagtttggcagcatctctggcctctaccaaatagatcttagtggcactctcttgccyaattgtgacaagcaaaaatgtctccagagtttgacaaatgttttctcgggttgcggtgggggccccaggaatttcaacaatagaaaaccattgctttagctcacccttacacatattcataagagaggattttgtattttatagaaagattttattaactccaaaaaggagtcagacttgaaaaccttcaaaaaccttcaaatgatgagcattctcagataaaatatttcagaaatgttgaaacaataaatgctatttgaataacacatactttagtggtcataggtgaaatagtattaggacatatatcaagtcctttgataaaaagatattttatgaagtaatagtgccttttaacaaattcataatatgttataat

SEQ ID NO: 698649 - DNA, 1779 bp, Homo sapiens
tttgatgacattttaattaacaagtgcttcattttaactaataaatttcaagttgcttattttcttatacaactatgaacatgttttaaattgaaaaatactatgtgcagtattgtagcaaacataaaaacaattaagagattcaggggatgtgaatctagacttgctgaagtttaattacactgtattttcataaaggaatcccattcactttaattttgtttctaaattatgaygtccttttcttttcagagcacattgtaaataacagcatagaacatcagttggaatagagaaaactgcaatttcttcctatctcttgtcatttaaaaataacaaaaatgacaacttgtctgaagaaaagtttttaaatttgactaatgttcctttgtgtgaaatataatatacttagcagttcaaagtggaaaaaactaatccaagagaggatcgtcatcatagaactcaaaagaatgattgatttgatagttttctattttatgttcaatataaaattccattttatttgattcatcaggaatcccatatatcctttaaatatgacagatgattatctgagaataaaaatgtctatgaccaaaagtccaaaactcgaacaaattcactaatctctaagttgataaaggccagtcctagtttacagagctacatatggttattgcatgctttctgtaaatgaaagaactataatctcttccacaagcgtatggaggtttctattttccctttagtcactgatgtagccaagaatcatactacagaaaactacggaaactattaaatttttttcagaattaaaatctgaagttattttgtaggtccaaattaatctactcataaaggtacaaacttataacttaagttccagttttttaaattttgtatttcctctggaagaataaaagacaggtcttttgatatggataaatagggatgaatcctagtttttggaatctgaaacttacacgttaactctctttaaaaaaaagaatacaaaattaccatacaaaattttgtataaccagaatatttatttataaagagaggttacaacaaatgccaaatttatagaagctgacaaatatcacaaacattatagaatccaagaaaattatatacttttaataataagctgcttgacacatctctgtaatatttttcttttcccatttcaagaacaccagtggatgcctgaaagtgtaaagactaccaaaccctgtatgtattatgttttttcctatacataaatatctgtgatactttttcccaacatttttgggtgcctatcattggattgcctcttcatatgaaaataattttgtaatatcaggcctcaaaagaggccagtgtaagtgaaggaccctcaatcttaaacttcattagctccatggtaaatctgcctctatttgtatcagttattcaatcaatgtgtggctgttcataagatataaaataagaacaacaccctgttgcaaaatattcatcactatatatctatatcaatatctgtatccatatctataaacatagatgtgtataaaaaagattatgtgaattataaattttggactgtatttcagggtgcgatatatcctcagagagattcaaattgtgcggtgggagtgagaggtaatatttattttatgcaaataaattgaggttaccaatcccttttacctgcctacttcaattaaatagtgaaagggatagtgacttatacaatgctggggttgtacttatcattatataactcactaccta

SEQ ID NO: 698650 - DNA, 1047 bp, Homo sapiens
tgccaaactatatgccatcaaaacaccttgtcaaggaaagccacaggttctcttaaatctctctcaagaacattattctctattagtataaaattagaaggttttattgtcgttgttagtaactgttaattttgtgattaaaattggttccaaattgtggctggtaagtcccatacattacatatggatgttaaaggtgatcgtgttgaagtttcaaaagttaagtgaagagaatggtagagaaagcttttattgttttagtgaatgcatatatcatcataatcagaatgttcatggaaataatcagccttaaaggaaataagaggaagaaacttagtatcatgctattggacactggagataaggtgatccatgtcataaagtgacaaaaatcctggatgaattgtgttctgttgggtggaaaataaaacttttaagcaatgcacttgaatatttaactgtgagggtttccaagcaaagtgtagaaaatgtagtctggtatcttcttgatacttattggagaaaacgagagcaaagagatgaagttcctaatgcaaaaaggaaccagcacttgatggtttgggaaattctcaacctatccagacagtataytttggaaataagtccaagtatgtggtcatctgttaaagagattagttatacatttaatggattcagtcaaccatctcagcagaggcagggaatggagacggggttatccagatggaatctgtgaagaatgctattatgcaatggtctgagtcccctggaagtacatagaagaccaaaaaagtctttaaaaatgttatatcttcagaaacactttcagcttgggccaaaagggacagagatgagacaaaataagggaaggctgtcaaccttctcagagtctataggcagaaatgggctgatagaattactcagctatgcacatgcactacccgtcatgaaagagaaagaatgactcctgagacacagccgtgggtgtaggaacagagaccagataggcaagaccagaggcagaggttgagtaggacaagaggcagg

SEQ ID NO: 698651 - DNA, 1047 bp, Homo sapiens
tgccaaactatatgccatcaaaacaccttgtcaaggaaagccacaggttctcttaaatctctctcaagaacattattctctattagtataaaattagaaggttttattgtcgttgttagtaactgttaattttgtgattaaaattggttccaaattgtggctggtaagtcccatacattacatatggatgttaaaggtgatcgtgttgaagtttcaaaagttaagtgaagagaatggtagagaaagcttttattgttttagtgaatgcatatatcatcataatcagaatgttcatggaaataatcagccttaaaggaaataagaggaagaaacttagtatcatgctattggacactggagataaggtgatccatgtcataaagtgacaaaaatcctggatgaattgtgttctgttgggtggaaaataaaacttttaagcaatgcacttgaatatttaactgtgagggtttccaagcaaagtgtagaaaatgtagtctggtatcttcttgatacttattggagaaaacgagagcaaagagatgaagttcctaatgcaaaaaggaaccagcacttgatggtttgggaaattctcaacctatccagacagtatactttggaaataagwccaagtatgtggtcatctgttaaagagattagttatacatttaatggattcagtcaaccatctcagcagaggcagggaatggagacggggttatccagatggaatctgtgaagaatgctattatgcaatggtctgagtcccctggaagtacatagaagaccaaaaaagtctttaaaaatgttatatcttcagaaacactttcagcttgggccaaaagggacagagatgagacaaaataagggaaggctgtcaaccttctcagagtctataggcagaaatgggctgatagaattactcagctatgcacatgcactacccgtcatgaaagagaaagaatgactcctgagacacagccgtgggtgtaggaacagagaccagataggcaagaccagaggcagaggttgagtaggacaagaggcagg

SEQ ID NO: 698652 - DNA, 611 bp, Homo sapiens
cagtgtcctttgagacttttgtcaccataggactgttcttactgattttgtggtttattctcttgaaagataaaaagcaacaacaaaaaacaggcctaaaacttaacatgattcaaggttgctattgccccctggtgtgtggaataagtaagtacaaattttctctggagttaggattcctaatccattttcctctgaattcccaaagatttaatttagccaaatatgagccatcatttataaatcataaaaatacataaatatggctggtcttctgtaataacattaataaagttttaaactttcctcaatggtaatcttgtacaattttttgttaraattttttctttattttcttgagatacccctgtaggatgatcacaattttgacatttattctcaaatctatgctatattcacaatacttgcataatcagaagtcaaaataaaaatttaagtcattaaatattttagttattggaattttttcatttatgatcaagaacaatataggaaagctcatcattattatttctggacaatgtatgaccagaaaatccactttatatactataatatgacaaaaagaagagttaaatggatttaaaaaa

SEQ ID NO: 698653 - DNA, 611 bp, Homo sapiens
cagtgtcctttgagacttttgtcaccataggactgttcttactgattttgtggtttattctcttgaaagataaaaagcaacaacaaaaaacaggcctaaaacttaacatgattcaaggttgctattgccccctggtgtgtggaataagtaagtacaaattttctctggagttaggattcctaatccattttcctctgaattcccaaagatttaatttagccaaatatgagccatcatttataaatcataaaaatacataaatatggctggtcttctgtaataacattaataaagttttaaactttcctcaatggtaatcttgtacaattttttgttaaaattttttctttattttcttgagatacccctgtaggatgatcacaattttgacatttattctcaaatctatgctatattcacaatacttgcataatcagaagtcaaaataaaaatttaagtcattaaatattttagttattggaattttttcatttatgatcaagaacaatataggaaagctcatcattattatttctggacaatgtatgaccagaaaatccactttatatactataataygacaaaaagaagagttaaatggatttaaaaaa

SEQ ID NO: 698654 - DNA, 746 bp, Homo sapiens
tatgtggtcatgggagttgagagagcgacaccgtgagcccaggcttgttccctgggctccaggcgggaaccggcggggcggacaggctcctcggcagcatcgacacggctccctcgtcccctctgcagatggtgaggccccaggagggagcagtgacagctgatcagtctgtggggtggggtgtgtgggtgcgtggggtgttgttctctgcactcgctaggagtcaatttcattttcatcttagaggtratgggttgttgctgtgtgtggggggattccatgatgagctggctctaggatcaagggacctggggtgttcaggttctcagccctgccctggaaggggagacagcagcacctattgggactggggggccatgtgtgagtttctggtggctgctgtaatatattaaagtactacacctgggctgcttagaacaagaatgtcttctctcatggttctagagcctggaagtctaaaatccaggtgtcggcagggccgagcttcctctggaggctctggggaggaatctttcctgcctcttccagctttcagtggctccagccgttccttggcttgtggctgcatcgccccaatcccggccgtccccctctgcatctgtgtctcatcttctgtctcttaaaagggcagcagtcacccgatgtagggtcctcccggctaatctaggatgatttcttcatcccaagatccttcccttaattatgtctgaaaagactgttttttc

SEQ ID NO: 698655 - DNA, 746 bp, Homo sapiens
tatgtggtcatgggagttgagagagcgacaccgtgagcccaggcttgttccctgggctccaggcgggaaccggcggggcggacaggctcctcggcagcatcgacacggctccctcgtcccctctgcagatggtgaggccccaggagggagcagtgacagctgatcagtctgtggggtggggtgtgtgggtgcgtggggtgttgttctctgcactcgctaggagtcaatttcattttcatcttagaggtgaygggttgttgctgtgtgtggggggattccatgatgagctggctctaggatcaagggacctggggtgttcaggttctcagccctgccctggaaggggagacagcagcacctattgggactggggggccatgtgtgagtttctggtggctgctgtaatatattaaagtactacacctgggctgcttagaacaagaatgtcttctctcatggttctagagcctggaagtctaaaatccaggtgtcggcagggccgagcttcctctggaggctctggggaggaatctttcctgcctcttccagctttcagtggctccagccgttccttggcttgtggctgcatcgccccaatcccggccgtccccctctgcatctgtgtctcatcttctgtctcttaaaagggcagcagtcacccgatgtagggtcctcccggctaatctaggatgatttcttcatcccaagatccttcccttaattatgtctgaaaagactgttttttc

SEQ ID NO: 698656 - DNA, 659 bp, Homo sapiens
tttatttattttatttttttgaaatggcatctcactccgttgcccaggctggagggcagtggcgtgatctcagctcactgcaatctccacctcccaggttcaagtgatcctcctgcctcagccttctgagtagttgggattacaggtgcccaccaccacgcccagctaatttttgtatttttagtagagatggggcttcaccatgttggccaggctggcatcaagctcctgacmtcaggcgattcacccgcctcagcctcccaaagtgctgggattacaggtgtggccaccatgccgagcccatccttcaattttttaaaaaatagctgttgctgaagattaagttagtactaatacaaaaaaaaaccccaggaaaatctagagcaaagtcaataatttgaggaaattgttagattgaaacatgaactggaccagagtcaactttagtgtgagactgtaggagatggagctaagaattgagtgagaatatagacggagttaaggagccacagtgggtaagactccctagccaggcgtgtgggcccccagcccccggtctcttcccacccgtgcctgacgtggaattctgacttgcttgtggcccacattcccaaaaccttcctcctctgcctgagcccctcacttctcagtgtactgtg

SEQ ID NO: 698657 - DNA, 659 bp, Homo sapiens
tttatttattttatttttttgaaatggcatctcactccgttgcccaggctggagggcagtggcgtgatctcagctcactgcaatctccacctcccaggttcaagtgatcctcctgcctcagccttctgagtagttgggattacaggtgcccaccaccacgcccagctaatttttgtatttttagtagagatggggcttcaccatgttggccaggctggcatcaagctcctgacatcaggcgattcacccgcctcagcctcccaaagtgctgggattacaggtgtggccaccatgccgagcccatccttcaatttttwaaaaaatagctgttgctgaagattaagttagtactaatacaaaaaaaaaccccaggaaaatctagagcaaagtcaataatttgaggaaattgttagattgaaacatgaactggaccagagtcaactttagtgtgagactgtaggagatggagctaagaattgagtgagaatatagacggagttaaggagccacagtgggtaagactccctagccaggcgtgtgggcccccagcccccggtctcttcccacccgtgcctgacgtggaattctgacttgcttgtggcccacattcccaaaaccttcctcctctgcctgagcccctcacttctcagtgtactgtg

SEQ ID NO: 698658 - DNA, 659 bp, Homo sapiens
tttatttattttatttttttgaaatggcatctcactccgttgcccaggctggagggcagtggcgtgatctcagctcactgcaatctccacctcccaggttcaagtgatcctcctgcctcagccttctgagtagttgggattacaggtgcccaccaccacgcccagctaatttttgtatttttagtagagatggggcttcaccatgttggccaggctggcatcaagctcctgacatcaggcgattcacccgcctcagcctcccaaagtgctgggattacaggtgtggccaccatgccgagcccatccttcaattttttaaaaaatagctgttgctgaagattaagttagtactaatacaaaaaaaaaccccaggaaaatctagagcaaagtcaataatttgaggaaattgttagattgaaacatgaactggaccagagtcaactttagtgtgagactgtaggagatggagctaagaattgagtgagaatatagacggagttaaggagccacagtgggtaagactccctagccaggcrtgtgggcccccagcccccggtctcttcccacccgtgcctgacgtggaattctgacttgcttgtggcccacattcccaaaaccttcctcctctgcctgagcccctcacttctcagtgtactgtg

SEQ ID NO: 698659 - DNA, 600 bp, Homo sapiens
agatgaataagagttgaccattttatattccatggggctaattagtaagaagtctgtcttatctttcctttttttttttttttgaggtggagttccgctctcgtcgcccaggctggagtgtaatggcacgatcttggctcactgcaacctccacctcccgagttcaagtgattctcctgcctcagcctcctgagtagctgggattacaggcacgcaccaccatgcccagctaatttttgtgctttttgtagagacggggtttcaccatgttagcaaggctggtctcgaactcctggcctcaggtgatccacccttctcggcctcccaaagtgctgggattacaggcatgaaccaccacacctggcctcttatctctcctgataagactatttcagtatatgttttattttatttatatgaatttaaggggtacaagtgcaattttattacatggatgtattgcataatgatgaggtctgggcttttggggtatccatcacccaaccacccaaataatgtacattgaacccattaagtaaattctcatcatcyactccactcctgtctacttcccccttttgactctcattccacactcta

SEQ ID NO: 698660 - DNA, 579 bp, Homo sapiens
cctaaagctgcttcttttccagcctaacttaaactgcagaatggagataggttgcacagtattttttacttaattcyagatgctcttcaactaaggaaacaaaaaatctagttcacctggggagaggtggagaatagaccaaggagttggcattctgccttttgtgtcaaacacaagtgtaactggggtaataacagttgacttgaactttccaattctcaattaggggctgaagcagtaattgaaatgggctagtgtcccaaagccaggcgtcaaagttgcccagcctgaccctaactatgcaaatagcaaaaagggcaggcttggtcaaagtcaactaggatttaaaaatccatttggggtaaacagtggctttggtactatcacaaaccaccatacaaaccaacaaggtcacaaggcagacccaattgtgctgctggtatattgtaaaacaggttatttaatacaaccaaaaactacagaagctgaattgtcagcacctattctaaacttgatatttagccttccctcacttttgccacttcattagcctaagaaaaaaaaaacaaaacaaaaagc

SEQ ID NO: 698661 - DNA, 946 bp, Homo sapiens
tcaaaaatgcatttccatatgagagtaaattgtgacaaacataataaaacattgcgactaacaatgcyataaacaaaccctgattctgctcatgacgatgagagctttcagtaatcacacagtacatggtttaagtataattttctgatggcacaatagccccaagcaatttttttgtttgttgtttttaaggcatgagatattatttagaaagtacccattgtctgcaagtctaatgttataggaacaggaagcctaacaattcttctctttctttgaacacatttctcatttatcttactggggtttcaaaagagcccagaagaggcgaccctcccctgtgtaatcacatgactcggttttaaggtctgctgctttgggcaccaatttgtcactagctcctgcttaaatgccctgaataatttagatacctgcgggtgatgggagagacggtgaatactgaatcttcttcccaagcaaaaatacccaagttttaagttttagctgagagcagaagtataatttcttcttttagtgactatggggttggttgtgctatttgccttcccttatgttaacctaaattttgactctttgagagcatcctcaagtcaaatgagttttatcttctagcaaaaaagaaaaaaaaaaaaagaggttatttctctttctttaatatttagggagggcagactgctctcccttctcttgttacccattttttctctaggaagggttgatgatatcagtggtctatgtactccagttcccttctctgcttaatgtaaacctccctctcctgcttccattcattggatggaaacctctatgtcttggcatatacccggtcatcacttcacactacactttctattgaacctaccaaatgagacttaccattctaggttaaaaaaaaaaacttcttttccatttaaaatgattttta

SEQ ID NO: 698662 - DNA, 946 bp, Homo sapiens
tcaaaaatgcatttccatatgagagtaaattgtgacaaacataataaaacattgcgactaacaatgccataaacaaaccctgattctgctcatgacgatgagagctttcagtaatcacacagtacatggtttaagtataattttctgatggcacaatagccccaagcaatttttttgtttgttgtttttaaggcatgagatattatttagaaagtacccattgtctgcaagtctaatgttataggaacaggaagcctaacaattcttctctttctttgaacacatttctcatttatcttactggggtttcaaaagagcccagaagaggcgaccctcccctgtgtaatcacatgactcggttttaaggtctgctgctttgggcaccaatttgtcactagctcctgcttaaatgccctgaataatttagatacctgcgggtgatgggagagacggtgaatactgaatcttcttcccaagcaaaaatacccaagttttaagttttagctgagagcagaagtataatttcttcttttagtgactatggggttggttgtgctatttgccttcccttatgttaacctaaattttgactctttgagagcatcctcaagtcaaatgagttttatcttctagcaaaaaagaaaaaaaaaaaaagaggttatttctctttctttaatatttagggagggcagactgctctcccttctcttgttacccattttttctctaggaagggttgatgatatcagtggtctatgtactccagttcccttctctgcttaatgtaaacctccctctcctgcttccattcattggatggaaacctctatgtcttggcatatacccggtcatcacttcacactacactttctattgarcctaccaaatgagacttaccattctaggttaaaaaaaaaaacttcttttccatttaaaatgattttta

SEQ ID NO: 698663 - DNA, 1953 bp, Homo sapiens
tgggtagaggccagggacactgctcaacatcctctgatgcacagcacaggcccctgcaaaaaagaattattcaytccaactatgaatagcgctgaggttgagaaatgctgccttaaaagagagctctacctgggtcttacacttcttttgtcattttctccttctctgcatggaggcgaaacacagcaaagcataacaaacaaaactcctcaataaatcaaatcaaatcattaacttccctatggagccaacaaaatgctagctattaaatgtcccagttgttccacagaattagctgtgaatgctttctggcacatttattcctcctctgagtgagaggtgacagcatcatttaagaatatgtatttcttttcaggcatcgtatgcatgagaggaggaaacatgctgggaggaaaaatcttggggttctgatcaagtcacaaaagggcaaaaagcacacactccagcctgggtgaatgcacagagaactgtccacaaggaaagattaaataattactgttaaatagctcatcaaagctttgggggtaggggtaaaaaggtaagcttctttaaggagcgtcctgctgcaaacaagaaatgcaagcttctcctgaaagcttttggattgggatgagtagggaggggttaggatagaggtcagggcctggggagttagagctgcaggttggggagacagccggagagccacggtaagaacaggaggaggattttctggattcggggtggtggagtagctggagctgacataggcccctgccctttggatattaccgtggtcctgccagtgacctcccccaacagggccataccccaaggtttcaagtcctttgtaagagtcaggcaagttgatcccaaatgatacaacacagcaaagcagcattggctccccaggcatcatgaccagacccagaggagacacatggagaaacaggggttgccccagggcaggcaatgctgacgttagtagaaagctggaggtctggggctgcaggcaggcacagagctgggtggcttcagatgatactcgggcctgccagtgggaggctgtgggactctgagccccatctccatttctgtaaaatgaggaagttagattaaatcacagaacagatttttccctactctgaagtgtctggttttatcattcatatctaccgcatactgttcatcagctggtgcctacacttttaacctcaacttcctttcactagctttgctctgtcctcaagttaatggttaaatctgaaaaacatttttttaaatccaaaggtaattgttttgaaaaaataataatacagttttgagggggccttcgtctgggtttggcctcccccagaacccaagctggagataaggattgaatataagcacttttcttgtgagatgatccctggaaacaccggtagatatagggaagtgagacagggaagggacaggaagaaaatgaagtgtgttttgtgcagtcaggccatgctggagctcatctgctctgaggccacaaactcctttttacaggctgaaatgtccctgggcagagagtcacaagtgttcacggttagcagtctttggtgtatagaggtgagtgccacatgatatggatgactggttcatagcatctgctgcaaggcctgtaggcaggagtgagttgggagcccagtggctgtgttctcatgcacagtgtagcttggccttgagactgaaatgaaaggcaggttatctcagagctacaggctgctcttggggtcatggagatcgggactgagaaagctaaccccaaaagaaggcaaggaagagcaagagctcccaggggaatgaggccagagggtgtgaggcagcactctctatgtgcaggtggcaggtggacttagggtgagcaagagcagcagaagcttcacctctagacttccctgaagcagtgggagggtaaactcc

SEQ ID NO: 698664 - DNA, 602 bp, Homo sapiens
catccttttattttatcattcaaagcagcatagtgcttcttaggcacaacttcactgtggactgggctctgcaccttctctctacattttcaaaaaccccacaaaacggtttcatcttcccaagaaaatagcagtctctttctattaggtcggttckaaagtaatcgtggtttggtttttgccattacttttaatggcaaaaacagcaattacttttgcaccaacctaatagaaccatgggctcacactgctaatggcttttgaaagatcgagtttttccatctctgctaaaactatatacagagctagaaaatgaagattacatttacataaaagacagtttagaaggctcccagtcctggtgctggagttgctggtgttgagaagatatcaaatctcaaccattttttacccctatggattgcgcagaactgatgaacgtaattcagggttatcttcacacattctgatcttctccatgacaggcatctccagcactgaagcacctctgcctcaccgtcacttatggagcaccaaagcatttggataaagaccgttataggaaattgggggggaaatggctaagagagaacaattcgttt

SEQ ID NO: 698665 - DNA, 602 bp, Homo sapiens
catccttttattttatcattcaaagcagcatagtgcttcttaggcacaacttcactgtggactgggctctgcaccttctctctacattttcaaaaaccccacaaaacggtttcatcttcccaagaaaatagcagtctctttctattaggtcggttcgaaagtaatcgtggtttggtttttgccattacttttaatggcaaaaacagcaattacttttgcacyaacctaatagaaccatgggctcacactgctaatggcttttgaaagatcgagtttttccatctctgctaaaactatatacagagctagaaaatgaagattacatttacataaaagacagtttagaaggctcccagtcctggtgctggagttgctggtgttgagaagatatcaaatctcaaccattttttacccctatggattgcgcagaactgatgaacgtaattcagggttatcttcacacattctgatcttctccatgacaggcatctccagcactgaagcacctctgcctcaccgtcacttatggagcaccaaagcatttggataaagaccgttataggaaattgggggggaaatggctaagagagaacaattcgttt

SEQ ID NO: 698666 - DNA, 641 bp, Homo sapiens
atagccttttgtaatttgcaaggcataaggtgttccacaaaaagacaagtagcacaggggaacgtggcaggtgaatctcaggtgtgagggtatccaagcctttctgagattaaagtaagaacacctcatagagccagtctgagaactaagtaacaggacatagctgaaacacctgagtcaatgcctcacgcccacaattattcatcacaaatctcatagtcacccttctcaagtttactccactttccaaggcaaggatcaaaccaagtggtccgaccctacaccaaaactctatccactacacaactctggtttcccacatttatcactcagcaaaccaagaatccatcctgccacataaaaggcatttgggtaaaaggtcatgccaaagattactcatatgtttggtccctgaaattcccagagataataaatatccctaacatgtaatgaggctgtcaacattttagtaggcaactttcaccaatttaatgtgaactctattaagaagacttaaattgatttatccaagcctcaaaagacatctgtaattaatatcctcccatgtgagatactgaaaaatagtcaagataaagtarcctgtacatagtaatcagccactgttacatctcaactttgag

SEQ ID NO: 698667 - DNA, 894 bp, Homo sapiens
ccccagcccccatccaacccctcccacagggctgcaagcagggtctcttgagaggccttctggcttccaggccccatgtgtgctcccagccttctgggcaggatggactgaggctggtcctcagcgcaggcatggtggggcacacggcaagcagaacaagtgcctgggccctctctgtgcagtacccagaccccaaaagtacttggctctgaacctctgaaacatgccctggttcctgtacccaggacaagcagatatgaaacactggaaatgagtgccgggaggaatggccttccacgtgcagctggcatggcccatgtccaagccacttcagcggctctttctggccttggtgtagcacacctggtgaggtcgatactgtccagccacccctttcttttctggagggggaggagggatattctttgtgatgtaagggtttagagagcttttaaagcactaattggggccaggtgtggtggctcacacctgtaatcccagcactttgggatgcttgaggcccaggagttcaagaccagccctgggcaacatagtgagactccccccaccacctcccatttctgaaaaacaaacagagaaaagcactcattttattttctttcttttttttttttttttttgagacggagtctcgctccttcgcccaggctggagtgcagtggygcgatctcggctcactgccagctccgccacccaggttcatgccattctcctgcctcagccttccgagtagctgggactacaggcgcccgccaccatgcccggctaattttttgtatttttagtagagagggggtttcgccgtgttagccaggatggtctcgatctcctgatgtcgtgatccgcccgcctcagccgcccaaagtgctggga

SEQ ID NO: 698668 - DNA, 1877 bp, Homo sapiens
ctggattttagttacttgattgaatttttgaagtatataaagtattcgtgttttatctcccaatttaatcccccattaggttatctgtcccgttttccttttgctcagttatatcctatgggactcacagataaacagaagtattttaccccttcttttacttttcaagaggggaaaattgtcagaaggatagtcaagtactagaaatactcattttgtcttttgtttgttcacgttgcacttcacaccatatatactttttttggtgctccttcccatgacagacttaactgacccattaatagcagctctggggcaagcatgcctacccagtaacataaaggcttcctcagtgccggctgcgcttggggatatgctgttagttcatgacatgagagcagctaacggctgctgagagataaaaaggaaatagkcaatttagatgatgtgcctggtttcagtgttaaatgagcctgtgtgtttggctgttgatgtagcacgtacagatctctaaaaactgctgggatgcagccatgggaatccaaatcagtgttttctttgtgatgaaaactagatgcacaaatttttagaagtctcacttgacaacctctgaaatatttaactttggattttgttcctctatagcagagttttgaggcttgtagtttagtgcattgctttgctttaacacgtgttaatccagttggacttgcttccccaagaatatgcatatacaaactcacacatactttattagtttttcattatgatttctgtatatcatgcaatggatgtatcttgtcagagagactgtctttcttgtaattaagcttacagttattaaatgagaacgtttgggacaataatgcagtctgacagtattgaaagtagggccaggcacagcggctcacgcctgaaatcccggcactttgagagaccaaggaggacggatcacttgaggccaggagtttgagatcagcctggctaacatggtgaaaccctgtctctactaaaaaatacaaaaattagctgggcatggtggtgcacacctataatcccagctactcaggaggctgaggcataagaattgcttgaacccaggaggcaggggttgcagtcagccgagatcgcgccactgcactccagcctgggtgacagagtgatgactccatctcaaaaaaaaaaaaagcaaaaaactggtcacccagtctgcagaatgataaagtcagtaaaagttacctacgtatataggtttgaaaaggtctactgttctcagcttcatttacacatacaggtatggtaaatggtatgtgtaaatggtatgtctctattcctctgaatactgctttttatttcaagaacaccacagtgttagtttatagtgaaatactctgcaaagtttcaaacatgtttatttgaaagtctaattaaatgatagcagagagaaaatttcctgaagtgtaatcttcttttatactgtcagtatgtgcttgattgaattaaggaatttatatttggttttacttttcttaaaagttccaaaattatttttcccctaggaagatgagaatgtgcctactgctcctgatcctccaagtcaacatttacgtgggcatgggacaggcttttgctttgattccaggtagttttcttctttactttgtagaatttgggttatatcggccagtggttctcaaaggtggtccttgggaactcattagaaatgcacatgtgtagggcctggcctagctgaaccagaaacaccaggcgtaggcccagcaatatgtgttttaacatgtcctccgatttagggagttttgtcagaaaacatttttaacttgcagtatttaaaagaatatttactgttcctaaaatgt

SEQ ID NO: 698669 - DNA, 1877 bp, Homo sapiens
ctggattttagttacttgattgaatttttgaagtatataaagtattcgtgttttatctcccaatttaatcccccattaggttatctgtcccgttttccttttgctcagttatatcctatgggactcacagataaacagaagtattttaccccttcttttacttttcaagaggggaaaattgtcagaaggatagtcaagtactagaaatactcattttgtcttttgtttgttcacgttgcacttcacaccatatatactttttttggtgctccttcccatgacagacttaactgacccattaatagcagctctggggcaagcatgcctacccagtaacataaaggcttcctcagtgccggctgcgcttggggatatgctgttagttcatgacatgagagcagctaacggctgctgagagataaaaaggaaataggcaatttagatgatgtgcctggtttcagtgttaaatgagcctgtgtgtttggctgttgatgtagcacgtacagatctctaaaaactgctgggatgcagccatgggaatccaaatcagtgttttctttstgatgaaaactagatgcacaaatttttagaagtctcacttgacaacctctgaaatatttaactttggattttgttcctctatagcagagttttgaggcttgtagtttagtgcattgctttgctttaacacgtgttaatccagttggacttgcttccccaagaatatgcatatacaaactcacacatactttattagtttttcattatgatttctgtatatcatgcaatggatgtatcttgtcagagagactgtctttcttgtaattaagcttacagttattaaatgagaacgtttgggacaataatgcagtctgacagtattgaaagtagggccaggcacagcggctcacgcctgaaatcccggcactttgagagaccaaggaggacggatcacttgaggccaggagtttgagatcagcctggctaacatggtgaaaccctgtctctactaaaaaatacaaaaattagctgggcatggtggtgcacacctataatcccagctactcaggaggctgaggcataagaattgcttgaacccaggaggcaggggttgcagtcagccgagatcgcgccactgcactccagcctgggtgacagagtgatgactccatctcaaaaaaaaaaaaagcaaaaaactggtcacccagtctgcagaatgataaagtcagtaaaagttacctacgtatataggtttgaaaaggtctactgttctcagcttcatttacacatacaggtatggtaaatggtatgtgtaaatggtatgtctctattcctctgaatactgctttttatttcaagaacaccacagtgttagtttatagtgaaatactctgcaaagtttcaaacatgtttatttgaaagtctaattaaatgatagcagagagaaaatttcctgaagtgtaatcttcttttatactgtcagtatgtgcttgattgaattaaggaatttatatttggttttacttttcttaaaagttccaaaattatttttcccctaggaagatgagaatgtgcctactgctcctgatcctccaagtcaacatttacgtgggcatgggacaggcttttgctttgattccaggtagttttcttctttactttgtagaatttgggttatatcggccagtggttctcaaaggtggtccttgggaactcattagaaatgcacatgtgtagggcctggcctagctgaaccagaaacaccaggcgtaggcccagcaatatgtgttttaacatgtcctccgatttagggagttttgtcagaaaacatttttaacttgcagtatttaaaagaatatttactgttcctaaaatgt

SEQ ID NO: 698670 - DNA, 1210 bp, Homo sapiens
tgggaggttggtgaggggtcccagaggtggaggcactggagctgtgctggagaaaggagtggaattaaaatgagagatactgagggagagaggaagggacaggggacccgaatatgcaacccaaaaatgcctctttgccctaaggactctttagccgaaggcagttcagcagcagcagatgcaggaaggaggctccctgctctccctctgtgtgcctcaaaacaggacacaaatttacaaagtcagaagaaagcccactcccacttcttctggggagatcaaaggttaaccaatgaagaggacttcagactcttattggcctggagatggtactggaggaatctacattaacaagctaatacactaacaggactttgtctgccttttttttttttttcttttttccttccacaagttgctgcttccagagactcaaagcccttttcctttgttacttctctaaaaatgtacttaactgttctttgttgaagatgctgtataagctatgagaactgcccattccctgggtgtcttgtctcctgtgtgtatatgaaatacacatgttgataaactgtttttctcttgttaatctctcttttgttagagagaatctgttgcaactagaacttatgatgactgaggaaaacattattttttcctctacaaagggcagggagcgtcctaggctaaggagttaacatgggaaggaaatgtggagacttggccttaccagtgggatccttctcccattccctgctctgcatgaggtctgggagttcggtacctcatcttctgtctgatccgtaaatgccaatgaaatggtgaggactgtrgatcctggtcagtgcccaggagacttggctggcagagactgctgccagcagcaagcagggaataagaaaagtctgacttgccttgagaacaaatgaggtggtagcacttctggattctgcccgagtccacagtacccagcttatcccaccctcttctctccagtacccaagccagcaatgatgctgtgaataagatgaaatactaatcgcactggagcacagccctgccttccagccagcaacttcggggcagaaagagtcagctgccagctttgggatgtaggagcagctcatctccagcgcctggtcacaggtgtggtcacaagcctgctatggccctgtgtatcatgacctggcattctggccagaaaaggaaa

SEQ ID NO: 698671 - DNA, 1137 bp, Homo sapiens
tttctaatattctaatatcagaaaaccaagcaacaacataaaacagagtgtgagctccctaaatggtgcagagcatgaaagaagaaagttttcaagagcctactgcatgcctgacaccttccctacatcctctcacttaatcttcagagcaattatacttggtcaacattgccatcagggcaaaggaataatccgaagtcaaacagctgaaaaaggctttaaactcaaagtcatgtctttgcacatcaactttggaaatgtctttttttggggctggggggttcataccatccctggggcacagaagtaattacgttgacttgatatttttgtttatagcctctaatagactaaagttcccatgtatattgactgactgattcataaagttggtggaaatgtcaatatagtctcaaataattgaaatctgattttattattgacctctaatttgacacaatgaggtatgaattttgtttctcttccccatttccatagagtgttcaactttcttacaaactaaatctgcttgtctttttcctgttatgaattcttatttgtgcaataattttattagacatccactaatttatttgccatgagttaaatacattactgtaacatctaagatttcttaaaataggagctagagttatttttactcaaataattcctccttagaagcatcatttgcaaaactctattttaggcacgccgtttgaacttaattttgatctgtgtatcactagtcttctatttatagacaagggattaacattcccatgttccctttgacctattattcttgacatctaattccttcactaagagctaatttgaatataaattaaagtatttaatttgagcccaaattatttaagtgagtgacgtggtctgtgttcagtaagagtctgagcattttyttaaggaattgaaagctgactttattaactcacaattatactttgtgtattaagaaatatcatattagacttgtgtgatatataagagctgagaaaagcaattcctctactggggcagctaagtaaaccttcgaagggttaccaagtatcttctgagtatgtatgaaaagatcaggtatcagaggaaagttatatagaagttatttaacaaagg

SEQ ID NO: 698672 - DNA, 1655 bp, Homo sapiens
tctgcccttcctcaaaaccttgaggggctcttctataatcacaagatcaagtttgaacctcggtgtctactgttcatgcctctacaacatgtgattccccctttagcaagcttacataacttccctgtttttttaactgactctttctgctctagctctccctgctccttcctgttccctacacatacttcgttcaggtccctcaatggtagtggtggttacatggtctctggtsttagactcaccgagtttctaatcccatacccaccaccgaccttggcaagttacttcccctttctgaggatgagcatcctcctctgaaataatttcatgtattgattgagagagtaaataaaataacatctgcaagcccactgtcattcctcggaccctctttaaaactagcatctacacagggtggggaacatcacacaccggggcctgtcgtggggtggagggaagggggagggatagcactaggagagatacctaatgtaaatgacgagtaaatggggtgcagcacaccaacatggcacatgtatacatatgtaacaaacctgcacattgtgcacatggaccctggaacttaaagtataattaaaaaaaaaaaaaccaaaaccaaaaaaaactagcatctacagtggtgcctgacacctggttccctggcttatgtttctccatgtctctgctttcctaaggctgaaccattcaaggcctaacctgaaccctgtctcttttgtgagcatttgtttctttctttcttttttcttttttgttttgttttgagacggagtctcactctgtcccccaggctggagtgcagtggcgcagtctcagcccactgtaacctccgcctcctgggttcaagctattctcctgcctcagcctcctgagtagctgggattacaggtgcatgccaccatgcacagctaattttttttttttgtattttagtagagatggggtttcaccatgttggtcaggatggtctcgaactcctgacctcaagtgatctgcccgcctcagcctcccaaagtgttaggactacaggcatgaaccaccacacccggccttatgagcatttctgacccaattgatcccacccttctataaattgtttcacccatgtattggcatttaattatgtcccagtgagaccccatagggaggctggaagggtgttggctgtgtgaaaactgaaggtgaattgagtgagctcctttcttactaccccctgagtgttagagctaccatctcttttttttttcagctattgccagcagcagttcctcctgcgccagctgcaccagaccctgggcaggcaagtgaataccttagggtttgttcctgtcagggtcactcctgcctctgggttttggtgaaactggcgttttcttttgcatcttatcaggtggcccctctgaggaggttattgatgatatccctttatggaaagcctaaggtaataactctaaggaagttgagcacagtattttctaacttaaacagcttggtggcaggagatgtgtacactttcctatttcataaaatttacaacagattcagaagagattaaggacaaaggaccaaatggggaggacaggtttgtttaagggaggtcatgtactttcaatctggagtctatcaattgttca

SEQ ID NO: 698673 - DNA, 1655 bp, Homo sapiens
tctgcccttcctcaaaaccttgaggggctcttctataatcacaagatcaagtttgaacctcggtgtctactgttcatgcctctacaacatgtgattccccctttagcaagcttacataacttccctgtttttttaactgactctttctgctctagctctccctgctccttcctgttccctacacatacttcgttcaggtccctcaatggtagtggtggttacatggtctctggtgttagactcaccgagtttctaatcccatacccaccaccgaccttggcaagttacttcccctttctgaggatgagcatcctcctctgaaataatttcatgtattgattgagagagtaaataaaataacatctgcaagcccactgtcattcctcggaccctctttaaaactagcatctacacagggtggggaacatcacacaccggggcctgtcgtggggtggagggaagggggagggatagcactaggagagatacctaatgtaaatgacgagtaaatggggtgcagcacaccaacatggcacatgtatacatatgtaacaaacctgcacattgtgcacatggaccctggaacttaaagtataattaaaaaaaaaaaaaccaaaaccaaaaaaaactagcatctacagtggtgcctgacacctggttccctggcttatgtttctccatgtctctgctttcctaaggctgaaccattcaaggcctaacctgaaccctgtctcttttgtgagcatttgtttctttctttcttttttcttttttgttttgttttgagacggagtctcactctgtcccccaggctggagtgcagtggcgcagtctcagcccactgtaacctccgcctcctgggttcaagctattctcctgcctcagcctcctgagtagctgggattacaggtgcatgccaccatgcacagctaattttttttttttgtattttagtagagatggggtttcaccatgttggtcaggatggtctcgaactcctgacctcaagtgatctgcccgcctcagcctcccaaagtgttaggactacaggcatgaaccaccacacccggccttatgagcatttctgacccaattgatcccacccttctataaattgtttcacccatgtattggcatttaattatgtcccagtgagaccccatagggaggctggaagggtgttggctgtgtgaraactgaaggtgaattgagtgagctcctttcttactaccccctgagtgttagagctaccatctcttttttttttcagctattgccagcagcagttcctcctgcgccagctgcaccagaccctgggcaggcaagtgaataccttagggtttgttcctgtcagggtcactcctgcctctgggttttggtgaaactggcgttttcttttgcatcttatcaggtggcccctctgaggaggttattgatgatatccctttatggaaagcctaaggtaataactctaaggaagttgagcacagtattttctaacttaaacagcttggtggcaggagatgtgtacactttcctatttcataaaatttacaacagattcagaagagattaaggacaaaggaccaaatggggaggacaggtttgtttaagggaggtcatgtactttcaatctggagtctatcaattgttca

SEQ ID NO: 698674 - DNA, 1775 bp, Homo sapiens
ctgctgtctgcaggcctgactgttagcaaaggtcagagccagctgggggagtatggagaaccttgggggataggcacctattgctgatttcctttgcagctatctccacaccaaaccccctgggctctgcatagactcaggctctgtctctgccgatgctccacgcagatctccctgtcaacttacttgtccataggggtcataagctctgcagccaagacacgggagatctgtggcaagagtaggttgcactgcagttatttcaytcaccactatccttaggagtggctcagggtcaggaatgagttctggtgttcatcagttgcacacagggttcccaacttcctccttcttcagctcctgtgtctgcattgtctcttcattcactctcagcacattctgtcagaaggatctctatttggagtatactggtctgcttgggagtctgatggctctagatggaagaagctcttcctagctgtgtctagtcagccatctttattctttgtcttttgctctgtacagctagtcacctccaagacaataccaggaggatgttgcaaatcctctatttaaattttgtgactattaattatgtcaaaaaatttatgtagtaaggtaatgtattgtttcaaatagagtttaagttaactagagggatacatgagtaaggaaatcattttttccgcttcttttagctcattttcattagccaatctaattctacactcttaacactctcttagaaaaaaaaaaaagttctacttatgtagcttcaatggattgggaagtaacaagtggtaccaaaagttcattatatcctaattttccaccctgggtctcaaagcaatattgtcttatagtttaggttttttcccatgtgctggacatgatatgtgatggaaagaatgcttggtaattaaccttggatcataacttggcagctgctaggtctcccatctttaatagccattcacaagaagttgaattgggtcccaagctgtcatccaaataagcagaatgtgtcctaaggcagatcaaatctaattacagggctctagagctattccctttccattctccttaaaaagaggccactcatactgctccagctccccttacgcattttgcagcagtatcaggtggttcccagtaattcactgactcgtaaaccaaactgatagaagttctgactcttactagtccaattgaggtcctctggtaattgtcttctggtagaaagttgtggattttgcattattattgtgagacctccaattcatagacaaggaccacatgctctccttccatattctcctaaattagaaaacttcaatgagtgtgttatatatctccatcccaacaaatatttatcttccttggctttctagcatcctttacatttctccgtttccctaggcccctagcaattatgaaatccattaactataattataaagctccattaaaaatttgatatacacagcagttaatattcaccatctgtaatcttccaaatgaatatttgtttatttcagtacttcagctgctacatctaaaaatgaaggtaaataatttgacaagggcctcaaaagccctgaatattttatttcaactgagcagtatgtgacttcttaaaatatctcaggctctttctttcataatgcccctattgatttctttttttagaagactagaaagggaaaggatttaggttacaaaattcatacttatttttagtaaagtatttaaaaaccaaaaggtatcattagaga

SEQ ID NO: 698675 - DNA, 1608 bp, Homo sapiens
ttaatttaaagtgtattacatttgatattagtacagccccttcagctcttttttggttactattttaattgtatctttgtatccctttactttcaatctgtttctgtatttaaaatgtttatcttgtagatagcacattggtggatcatattttgttcttcaatcctttcagccagtctgcttttctttctttctttytgagacagagttttccttttgtcacccaggctggagcgctatggtgcgatctcagctcactgcaacctctgcctcctgggttcaagcgattctccagcctcagcctcctgagtagctgggattacaggtgcgtgccaccaggcctgactaatttttgtatttttagtagagacaggggtttcttcatgtcggtcaggctggtcttgaactcctcacctcaggtgatccaccgcctcagcctcccaaagtgcaggcattacacgcgtaaaccactgcgcccggccaaagtggtggattttttttctcagaaaatctattccattctttttccagaaaccaaatttgtacaagttaactaaaataaatatttatactctaatttttttgttctgaggtctgagtttttagaattttatctttacatgtttagaaaaattagaaaatatagatagaacataaccaagaaaataataacaactttccttctgttcaaagttcattactattagccgagtgcagtgactcacacctgtaatcctagcactttgggagactgaggcgggcggatcacttgagcccaggagttcgagaccagcctgggcaacatggcaaaatcccgtctacaaaaactacaaaaattagccaggtgtggttccatgtgcctgcagtcccagctagtggcaaggctgaggtggagaaccacctgaacccggtaagtcaaggctgcagtggtgcagcctctgtcccccaggctggagtgcagtggtgcaatgtcggctcactgcaacctccgcctcccgggttcaagcgattctcctgcctcggcctcccgagtagctgggattacagtcacgtgccaccacacctggctaatctttgtattttcagtagagaaggggtctcatcatgttggccaggctggttttgaactcctgacctcagatgatccacctgctctggcctcccaaagtgctgggattacaggcctgagccaccacgcccggccgttatttttctttcttagaggcaggatctcactctgtcgcccaggctggagtgcagtggcacgatctaagctcactgtagcattgatctcccaggctcaggcgattctcctgtctcagcctcccgagcagctgggatcacaggtgtgtgccaccacacctggctaattgttaaatttttttatttttattttttagagatggggtcttgctatgttgcccagtctggcaacatgggatcctccaactcctggcttcgagggatcctcccgcttcggcctcccaaagcgctgagaattacatacgtgagccaccacgcccggcctatattgttttatagttcttcaattttgttttgtggtcgccggaggtgtttccttcttcgattccctgcacagtgcttcca

SEQ ID NO: 698676 - DNA, 1608 bp, Homo sapiens
ttaatttaaagtgtattacatttgatattagtacagccccttcagctcttttttggttactattttaattgtatctttgtatccctttactttcaatctgtttctgtatttaaaatgtttatcttgtagatagcacattggtggatcatattttgttcttcaatcctttcagccagtctgcttttctttctttctttttgagacagagttttccttttgtcacccaggctggagcgctatggtgcgatctcagctcactgcaacctctgcctcctgggttcaagmgattctccagcctcagcctcctgagtagctgggattacaggtgcgtgccaccaggcctgactaatttttgtatttttagtagagacaggggtttcttcatgtcggtcaggctggtcttgaactcctcacctcaggtgatccaccgcctcagcctcccaaagtgcaggcattacacgcgtaaaccactgcgcccggccaaagtggtggattttttttctcagaaaatctattccattctttttccagaaaccaaatttgtacaagttaactaaaataaatatttatactctaatttttttgttctgaggtctgagtttttagaattttatctttacatgtttagaaaaattagaaaatatagatagaacataaccaagaaaataataacaactttccttctgttcaaagttcattactattagccgagtgcagtgactcacacctgtaatcctagcactttgggagactgaggcgggcggatcacttgagcccaggagttcgagaccagcctgggcaacatggcaaaatcccgtctacaaaaactacaaaaattagccaggtgtggttccatgtgcctgcagtcccagctagtggcaaggctgaggtggagaaccacctgaacccggtaagtcaaggctgcagtggtgcagcctctgtcccccaggctggagtgcagtggtgcaatgtcggctcactgcaacctccgcctcccgggttcaagcgattctcctgcctcggcctcccgagtagctgggattacagtcacgtgccaccacacctggctaatctttgtattttcagtagagaaggggtctcatcatgttggccaggctggttttgaactcctgacctcagatgatccacctgctctggcctcccaaagtgctgggattacaggcctgagccaccacgcccggccgttatttttctttcttagaggcaggatctcactctgtcgcccaggctggagtgcagtggcacgatctaagctcactgtagcattgatctcccaggctcaggcgattctcctgtctcagcctcccgagcagctgggatcacaggtgtgtgccaccacacctggctaattgttaaatttttttatttttattttttagagatggggtcttgctatgttgcccagtctggcaacatgggatcctccaactcctggcttcgagggatcctcccgcttcggcctcccaaagcgctgagaattacatacgtgagccaccacgcccggcctatattgttttatagttcttcaattttgttttgtggtcgccggaggtgtttccttcttcgattccctgcacagtgcttcca

SEQ ID NO: 698677 - DNA, 1608 bp, Homo sapiens
ttaatttaaagtgtattacatttgatattagtacagccccttcagctcttttttggttactattttaattgtatctttgtatccctttactttcaatctgtttctgtatttaaaatgtttatcttgtagatagcacattggtggatcatattttgttcttcaatcctttcagccagtctgcttttctttctttctttttgagacagagttttccttttgtcacccaggctggagcgctatggtgcgatctcagctcactgcaacctctgcctcctgggttcaagcgattctccagcctcagcctcctgagtagctgggattacaggtgcgtgccaccaggcctgactaatttttgtatttttagtagagacaggggtttcttcatgtcggtcaggctggtcttgaactcctcacctcaggtgatccaccgcctcagcctcccaaagtgcaggcattacacgcgtaaaccactgcgcccggccaaagtggtggattttttttctcagaaaatctattccattctttttccagaaaccaaatttgtacaagttaactaaaataaatatttatactctaatttttttgttctgaggtctgagtttttagaattttatctttacatgtttagaaaaattagaaaatataratagaacataaccaagaaaataataacaactttccttctgttcaaagttcattactattagccgagtgcagtgactcacacctgtaatcctagcactttgggagactgaggcgggcggatcacttgagcccaggagttcgagaccagcctgggcaacatggcaaaatcccgtctacaaaaactacaaaaattagccaggtgtggttccatgtgcctgcagtcccagctagtggcaaggctgaggtggagaaccacctgaacccggtaagtcaaggctgcagtggtgcagcctctgtcccccaggctggagtgcagtggtgcaatgtcggctcactgcaacctccgcctcccgggttcaagcgattctcctgcctcggcctcccgagtagctgggattacagtcacgtgccaccacacctggctaatctttgtattttcagtagagaaggggtctcatcatgttggccaggctggttttgaactcctgacctcagatgatccacctgctctggcctcccaaagtgctgggattacaggcctgagccaccacgcccggccgttatttttctttcttagaggcaggatctcactctgtcgcccaggctggagtgcagtggcacgatctaagctcactgtagcattgatctcccaggctcaggcgattctcctgtctcagcctcccgagcagctgggatcacaggtgtgtgccaccacacctggctaattgttaaatttttttatttttattttttagagatggggtcttgctatgttgcccagtctggcaacatgggatcctccaactcctggcttcgagggatcctcccgcttcggcctcccaaagcgctgagaattacatacgtgagccaccacgcccggcctatattgttttatagttcttcaattttgttttgtggtcgccggaggtgtttccttcttcgattccctgcacagtgcttcca

SEQ ID NO: 698678 - DNA, 644 bp, Homo sapiens
agtccagaatgtcacaggtccagggcagaggaccaacatgggcattttgtttatgagcaaggtgggtctcagaggtgatcggcgatcagagggygatgaagttctagatccattgagacaagctctagacagtagcatgcagtcccacaacttgtaccagcatccccagcgtctggcattccatgtttctgctcctgtggcctccacagtgcaacaagctagcggtttacttggacctctgcctcatctttcttcttttgcgcttcagcctgcgcattcgcttcttcctccacttggctctcatggcgcagaggtttccaagaaaatggcgctaacgccgagagccagataattttttatatttttagtagagatggggtttcaccatgttgcccaggctggtcttgaactcctgagctcgtgatccacctgccttggcctcccaaagtgctgggagtacaagcatgaaccgtgcccggctgttaataggatcttttaattgcttgaccctattaaaggtagttattttaaaagtgtgtttataaaccttgtccgaccccatagattccttagccgcctctctctgtccctcttggttgactcatgcctgtgagccgcccttcggctccagtctccgctgtgat

SEQ ID NO: 698679 - DNA, 593 bp, Homo sapiens
acccctctcttcaaggtgctcctgtcctggttcctgggaatgtcaaccttaaccttcaactccgcacgtcagtgtttcccactcttgctttagacaggaccccactaagatatccccaccctcaccaacccataccctgtgacctcccccacaggggacaccaagggagtccttgaagacatcaatgtgacccagcatttcacttgaccatggcataatggggccatagccagggccgacagcaagcaggtggcaagacagagtaattttwttttagcaataaatacatgtacaggtgtaaatttcctgacataatcctgctgaatgaaattcaacaatctgtgtcaaaaatattttaataatggggaaagtagctgctaaaaacgtgtagaattgctgactttttctttcagtcactgaaggagggccattcattttactcagtacactctgccatctaccatgtttgtataactttagataaaactgttttcgctctgcatatgaacagctgctgaaggagtaaagcaattccagataatgaagaccagcagcagcagtcaacttgtttcgtgtggctactacatgccggt

SEQ ID NO: 698680 - DNA, 1153 bp, Homo sapiens
gttactatcaaatcgcctattcaaaaataatgaatttgtttgccaaagcaaaactaattgcttctaaagcagatagttaacatagtggctattttgaaccagagacaaaataatgaatgttaattgaaatgaaaaacatgttaaccattgaaataatctgtcatgtaaaacgatgctataattcctctgttgttagggttatttgagtcattatactaagtcataaaattacacaggaagagcataatggcctgtgtcatttacaaaagcagctctgatgaaagagactcccacgagagagattttccatcgtggggtatgtgggctcacgtgtctccctcctgttccaaatgaagaagatcccagacgtgaaagcatgtccaaagagtccagttttcctaacaaggcaaagagaactgaagagagtgactcctgtgtgcctgagggtgtcccaagcactactgggcacgcaatggtgcaaaagacttgctgtttacagaagctgaaatttaaaaggacaaatatgtaataataacaataacagcagytaaacatttactgagctgccttataagcggccttattatgccactgctgctactactgctgttactactacccataatagctcacatgtgtccagctcctttaacataccaggcattgtttcaagccctttatttgatctgtccatctcctcctctcaacattcccaagaggaagaaaagtcaaggaagagcaagagaatctgttagggaggtggtgagttggggagatttcatgggaaagcagacgtggggcaatgggaaggacccatacccacaagataagccctcagcatcagggtggagggcatccattgattcaagctgggaggtcaaccacaggaataccagcacctttatgtgcttcaccccgtcttgcttggcccagataacgagagccagggtcaccacacatccaggtcaagacttgctcatatcaggagagacaagcaggccccagaagaagtagagagccatcatcccagggcatgctttccaaaccagccccaagccaggtttcttaagcaccttcaaaactcctaggaaaagtgcatatttaaaaagtcttagagcataatcaggcccaccagaaggatatgtgtctggta

SEQ ID NO: 698681 - DNA, 948 bp, Homo sapiens
cttagatattcctttcttgattattgtccagcaatgagcaaggtcttggaactggctaatttccttcttcttcctatcttcttgcttgcatttgtttgcaatttggtcttcagcatgtctttaaaaaatactgcatgtcacaattatttaaggaacctcagaacactgcaattagattttcataacaagcatatactttatgtcctttatttccaattcatgcagtatttaaaatgacaatatgaaaaaataaactatgaaaaattaaaataaatatattagtatattagacataaataaaaatttaaaaacacactgaatggggaaggtgggtagttggctggagctgtgtgtgggaatagggagcaaataagaaaacctgggaatctccattgggttcagcaactgcttggctgtgtggccttggacaagtcaattctcgctggtttcccagtctgtaaaacaggcaggatgtgatagctgaggttccttccttattaattttgaagtgtgtaagagctttcttaagcatcttaaataacatgtttaattttctctgtggttgtgaaatgatgcaaaagaaattagaaaaatgtagctgttaatgagactcatctgcgttttgtgattccttagaatttgtggtgtatattttagggttactcccatctcttttctttctatatccaaagggatttgtttactctttttttccccccattttcttctgtctcaaaaatccatgtggtcttcctgagtcctcactgtctyaataatcaaggggcttggccatttcagctgagaatagcagcagtggctctagtcagctttaattagcagggagcacacagagaggaacaataaggaaccagaattgaaaacaaatagtaaactagagacaatggagacaaagaaatggagacaaagcaaataagtagaaccagttca

SEQ ID NO: 698682 - DNA, 948 bp, Homo sapiens
cttagatattcctttcttgattattgtccagcaatgagcaaggtcttggaactggctaatttccttcttcttcctatcttcttgcttgcatttgtttgcaatttggtcttcagcatgtctttaaaaaatactgcatgtcacaattatttaaggaacctcagaacactgcaattagattttcataacaagcatatactttatgtcctttatttccaattcatgcagtatttaaaatgacaatatgaaaaaataaactatgaaaaattaaaataaatatattagtatattagacataaataaaaatttaaaaacacactgaatggggaaggtgggtagttggctggagctgtgtgtgggaatagggagcaaataagaaaacctgggaatctccattgggttcagcaactgcttggctgtgtggccttggacaagtcaattctcgctggtttcccagtctgtaaaacaggcaggatgtgatagctgaggttccttccttattaattttgaagtgtgtaagagctttcttaagcatcttaaataacatgtttaattttctctgtggttgtgaaatgatgcaaaagaaattagaaaaatgtagctgttaatgagactcatctgcgttttgtgattccttagaatttgtggtgtatattttagggttactcccatctcttttctttctatatccaaagggatttgtttactctttttttccccccattttcttctgtctcaaaaatccatgtggtcttcctgagtcctcactgtcttaataatcaaggggcttggccatttcagctgagaatagcagcagtggctctagtcagctttaattagcagggagcacrcagagaggaacaataaggaaccagaattgaaaacaaatagtaaactagagacaatggagacaaagaaatggagacaaagcaaataagtagaaccagttca

SEQ ID NO: 698683 - DNA, 948 bp, Homo sapiens
cttagatattcctttcttgattattgtccagcaatgagcaaggtcttggaactggctaatttccttcttcttcctatcttcttgcttgcatttgtttgcaatttggtcttcagcatgtctttaaaaaatactgcatgtcacaattatttaaggaacctcagaacactgcaattagattttcataacaagcatatactttatgtcctttatttccaattcatgcagtatttaaaatgacaatatgaaaaaataaactatgaaaaattaaaataaatatattagtatattagacataaataaaaatttaaaaacacactgaatggggaaggtgggtagttggctggagctgtgtgtgggaatagggagcaaataagaaaacctgggaatctccattgggttcagcaactgcttggctgtgtggccttggacaagtcaattctcgctggtttcccagtctgtaaaacaggcaggatgtgatagctgaggttccttccttattaattttgaagtgtgtaagagctttcttaagcatcttaaataacatgtttaattttctctgtggttgtgaaatgatgcaaaagaaattagaaaaatgtagctgttaatgagactcatctgcgttttgtgattccttagaatttgtggtgtatattttagggttactcccatctcttttctttctatatccaaagggatttgtttactctttttttccccccattttcttctgtctcaaaaatccatgtggtcttcctgagtcctcactgtcttaataatcaaggggcttggccatttcagctgagaatagcagcagtggctctagtcagctttaattagcagggagcacacagagaggaacaataaggaaccaraattgaaaacaaatagtaaactagagacaatggagacaaagaaatggagacaaagcaaataagtagaaccagttca

SEQ ID NO: 698684 - DNA, 571 bp, Homo sapiens
atttttagaatagaatatttagaatatgatcaatatccaccayaaatgaagatgagatattaaaagacattaaaatcttcagtggacatacattgttgtcaaaattaggttctgcagtcatttaagaacttttttgttagtactatcttgctaattcaaccttactaacagttgacctcaagatatgttgaggtggccgggcgcagtggctcatgcctgtaatcccagcactttgggaggctgaggcaggtggatcacgaggtcaggagattgagaccatcctggctaacacggtgaaaccctgtctctactaaaaatacaaaaaattagccaggtgtggtggcaggcacctgtagtcccagctactcgggaggctgaggcaggagaatagtatgaacctgggaggcagagcttgcagtgagccgagttcgtgccactgcactccagcctggatgacagggtgagactccgtctcaaaaaaaaaaaaaaaaagatatgttgaggctgctttaaggtttaaaaatgaataatatgtatatattccagttcacaagtaagtgaatattcttgg

SEQ ID NO: 698685 - DNA, 628 bp, Homo sapiens
aggaggagaatttgggatttgcttgtgcccatgggacgcaggctgggaataaaaatgttttcctgactcttccctgaaggccagatagactccacctaaatccctattgccaaggatactgggatccgcttaccagagacttttactgtcatggatttggagctttccttgccagtggctgagttacgaacagagcaagcatagagcccgctatgctttgtagtaatttgggggataaagagcttttgtcctgatagctgaaacttcccattaattgtccaagaatactgtgccggtgggttagagtccgcagaacaggacaagtagaggacttctcctgaacggtaataggtgaatgaagggtaaattctggggaggtctggaccatctggagcaaagagaataaagccacaggtgatgtcatctgagggaaggggatgttcctggtctcttaaagggacacagtgaccctctgagccaagacacaccctcaagtcccagcccaaccccctctatgttcactgagccgaatcctsaggtattcacctgtttctcccatcacaagctgtgggccccaagtctcccatgacaagagcgtccactccccttatactcttggttaaggctg

SEQ ID NO: 698686 - DNA, 1021 bp, Homo sapiens
ggaataataaagttgttttgttttgtttaagagagagggtctcactctgtcacccaggctggagtgcagtgctgtgatcacagctcactgcagcctccaactccagactcaagcaatcttcccacctcagcctatggaaaagccaggactacaggcacctggttagcttattttatttattgcagagatggggtctcgctatgttgcccaggctggtctcaaactcccaggctcaagcaatcctcttgcctgggcctcccaaagtgctggtattgtgggtgtgagccaccacgcctggctgaaataatgaagtgtttatatgtgtttccagtagaatgaagttagctgcagttaaagaagaaaaggttatgaagaaagctgactgataaatgtaagaagaataacatttttaaaatcatgcttttgttatcctaaatgaaataatttaacatgaaaagtatccccaatgatactttttttttttttttggagacagggtctcactctattgccaaggctgaagtacagtgacgcaatcacagttcactgcatcctagacttctcaagtgattctcccaacttagtatcttgagtagctggaactaaaggtgtacaccaccatacctggctaatttttggtcttttttttttctatacagtcaggatttcaccacgttgcccaggctggtcttgaattcctggcctcaagtgatctgcctacctcggcctcccaaagtactgggattataggtgtgagccaytgtgcctggccctcaataataacttttgagcagactgagccaagaggtggaaggtcataatgaactggatattcttacaatgccaaagtatcaacttacaaagtacttactgggtgccaagagggaaaacataacctcataataaagaaatctgtcattaccttaacctagtcaccaatcatggcatctctaataacagtgagacagacattatgcatcttttaagatgaataaagtacatggtatcacctattaagtat

SEQ ID NO: 698687 - DNA, 1579 bp, Homo sapiens
tgaagttggaattttgagtataacatttaatttattaataaaaagaaactgaataaaagttttatatttgtttaatcctgttggtggatacaagagtgactgacattttctatactcttctatcaactataatattttaaaaagacgtttaaaaagaaaataaatggtatgttaaaatactttcaggcactatctaccactgatcacccattcttaccttcctaaagaataggaaaaatattcaaaatacagatgtttcagcaactctagtaattcaaaacataaatgagacttttttttttttttgagatggggtctcactctgtcacccaggctagggtacagtggtgtgatcttggctcactgcaacctctgcctcccaagctcaagcaatcctcccatctcagcctcccaggcagctggtactacaggtgcacaccaccatgcccagccaattttttttatttttagtagaggcaaggttttgccatgttgcccaggctggtctcaaactcctgggctcaagtgacctgtccacctcagcctcctaaagtgctgggattacaaacatgggccactgcgtccagccataaatgacacattaattgaaaatataacattaagagagtttaaggctgctaaaaacaagcttactatttcagaaaagaattaattaagaatcatctcaagtccaggcacagtggctcatgcctgtaatcccagcactttgggaggctgagataggaagatcacttgagctcaggagttcaacaccaacctggacaacagagtgaaaccctgtctctacaaaaattaaaaaataaaaaatcaaaatagataaaaaactattcaggtgcagtggtatacacctgtagtttcagctatccaggaggctgagggaggaggatggcttgaacccaggaggtcaaggcggcagtgaactgtgattgtgtcattgtacttcagcctggacaacagagctagatagactctgtctcaggaaaaaaaaaaaaatcatctcaaaacctattctggctttttctttaaaatatataaaaacaaaaaatatgtaccccataatgtacaactattgtatgtcaattaaaaaattagccaggcacagcggtggctcacgcctgtgatcccagcactttggaaggccaaggcgggcggttcatgaggtcaggagatcgagaccatcctggctaacatggtgaaaccccatctctactaaaaaaatacaaaaaattagctgggcgtggtggcaggcacctgtagtcccagctacttgggagactgaggcaggagaatggcatgaacccaggaggcggagcttgcagtgagccgacaycacgccactgcactccagcctgggccacagagcgagactccatctcaaaaataaataaatgaataaataaaaaataaaatataagaacattttacatatccccttgctcccaccacagatgggaaaaactggagtttataaggctgccaggagagaggaaactaataaaaatggctctcatgccagctgattcattcacctattttcttaaattctgctcatttaatt

SEQ ID NO: 698688 - DNA, 672 bp, Homo sapiens
ccgaggcctccccagccatgtggatctgtgagtcagctaaacctcttgtctttacattacccagtctcaggtagtactttacagcagtgtggaagcggactaacacacagaatgtctgccagatgactagaacaaccagggtttgatgcattagcctgtgagttcccttaagacgagcactgtgcttttgtatccctcacgcctacaaaacactggaatcaaagaatatatggtgtgacaattaattctaatgcacaggattacaaaattgtagttgtaaatgagattatctagattcaaaccaaatctgtttaagtttgtagcctttacttttatactgttatagttgactcttaaaaacagaaaaaaaaaaaaaaaaaaaaaatcccagcctgtcctgaaaagcccagcctgcctataacacatctgtgtagagcacacaggggcagagccagatttcacaycagcaaccaacacaatacggaggttgtaaaattctggaggtgaaaagaagaaaacaatgctgagagaaaggccatcttgtgacaactgctgtgactaaacagattgtattaatgctttccagggttctatcggagtttacattaaatctcgtgcgggggcctgacaatcacagtggggcttcttcatgacttaaggtctgaacacact

SEQ ID NO: 698689 - DNA, 672 bp, Homo sapiens
ccgaggcctccccagccatgtggatctgtgagtcagctaaacctcttgtctttacattacccagtctcaggtagtactttacagcagtgtggaagcggactaacacacagaatgtctgccagatgactagaacaaccagggtttgatgcattagcctgtgagttcccttaagacgagcactgtgcttttgtatccctcacgcctacaaaacactggaatcaaagaatatatggtgtgacaattaattctaatgcacaggattacaaaattgtagttgtaaatgagattatctagattcaaaccaaatctgtttaagtttgtagcctttacttttatactgttatagttgactcttaaaaacagaaaaaaaaaaaaaaaaaaaaaatcccagcctgtcctgaaaagcccagcctgcctataacacatctgtgtagagcacacaggggcagagccagatttcacaccagcaaccaacacaatayggaggttgtaaaattctggaggtgaaaagaagaaaacaatgctgagagaaaggccatcttgtgacaactgctgtgactaaacagattgtattaatgctttccagggttctatcggagtttacattaaatctcgtgcgggggcctgacaatcacagtggggcttcttcatgacttaaggtctgaacacact

SEQ ID NO: 698690 - DNA, 672 bp, Homo sapiens
ccgaggcctccccagccatgtggatctgtgagtcagctaaacctcttgtctttacattacccagtctcaggtagtactttacagcagtgtggaagcggactaacacacagaatgtctgccagatgactagaacaaccagggtttgatgcattagcctgtgagttcccttaagacgagcactgtgcttttgtatccctcacgcctacaaaacactggaatcaaagaatatatggtgtgacaattaattctaatgcacaggattacaaaattgtagttgtaaatgagattatctagattcaaaccaaatctgtttaagtttgtagcctttacttttatactgttatagttgactcttaaaaacagaaaaaaaaaaaaaaaaaaaaaatcccagcctgtcctgaaaagcccagcctgcctataacacatctgtgtagagcacacaggggcagagccagatttcacaccagcaaccaacacaatacggaggttgtaaaattctggaggtgaaaagaagaaaacaatgctgagagaaaggccatcttgtgacaactgctgtgactaaacagattgtattaatgctttscagggttctatcggagtttacattaaatctcgtgcgggggcctgacaatcacagtggggcttcttcatgacttaaggtctgaacacact

SEQ ID NO: 698691 - DNA, 1413 bp, Homo sapiens
ttttttccagaattatgtttttgggatttagaacttttgagatttcaacattcaggattatggcacttgagattgtgtctttcacgacagtggcccaaacccctgttcccaatacacaacttagatgccctcgtgaaaacaagagttttccatattagcgtcatgctccatcttttttcatccaacctctcaaatatcagtgctatatcagatcaaacaagtattcactccagcccctgggatgtagtgactggtactctacccctgtttagaagtcattagctctttcatgccaattattactcacagatcctgatgaacttcaatctcagcttacttcttccctgaaccccaaagtactgttgtgacatgcatactctatgcaagcattcagaaagattaaataaattttcataaaacttatcttaaaatctataaagaaaatattaattgaataagcattgccagagacatgaagcgccattagagaaaataaagtaatagccattagttccccacaaatcttttataggatggaagatatctgtttggttaggtttaagcttagtatacccagtggcaaagagggtttgacaaactcagaagttcattggtaatttcttacttaagtagatctggtttccatattttaaagtggaaaacatgagcatgtcaaaatcaaatatgaaaaactcaaaggtattggctgtagttgatcatcttccaaaggtataaagacatgtttcctctgaattttcaaataaaaaaaatttctagtttaaattagttccttccaacctcacctcatctaacaaccttttcctcctaacaagtagctttagaataacaataattcaatattttcccatctagttattcattactatgctattacaagtaagagctgggttattgaaaacgttgtttgtatttcataacatagatacatgacagactggtttatgcatcattttttatctgtatgtcattagtcattttgtccattttgttttagggtggttaacgttgtgggggttctctacgtccttcacatcttaaattaaagcagtcttttgttcagtytgtataaatatgttatgcttgttggacaatgttcagaaaatatgagttaaaaaataagtttaaaatacatgtaatacaggagaaaacataggggaaaaggttcttgacataggtctgcacaataattttttggttatgataccaaaagcacaggcaacaaaggcaaaaacagacaaatgggactacatcaaactaaaaagcttctccacagcaaacaaaataatcaacagagtgaaaatctacctacagaatgggagcaaatatttgtaaaccatatatctgatgaagggttaatatccaaaaaatataggaattcatgcaactcactag

SEQ ID NO: 698692 - DNA, 1149 bp, Homo sapiens
cacctttataaataaagttctgtcaagctgtgagggaaatatactcatatccataggggaagtcagggagccagccttgtgaatctccagtgtaatctatttccacacaatggacattctcaccaccttcctcttgggacagtaaatagtcaataatcatccsagatggtttgaatctaaacttatcagtgacagataataaatcagagcattctgatgtgtgctacgctattatagttccaatgatttcacaccgatgggatattgaaactgctaagtagcataattagttacagataattccaagacattaatcatgcttgggataaatccttggaacaaatattgaaaatattctttatcatatatattaccaaatgcctgaaagggattaatttggtaccaagcttgtaagtatgcaggcatttaaggagcacggcactttttaatacccagaaatgatattccatttgacattttgtaaaatgaagtaccatcccaccatcacttttggcatttctcaagttttgttcaaacaagatatttcatttattcaagggaattttaatctggattttattcatttcaactatttattgaaataatgcaactgcccctttattaaagaatgcaatatccaccccaggaatcattatgaagcaaatgagttttgtttttgcattttttcctggtgcttatttcaaaatcttaactcattttcaggaaataggtcctgtaaggctcccctgggtcctgcaatcgaataccccattcaagtagactttctctggaatcgaactctgatcacttattttccatagtctctcttcaaacttactcctcctgtgtcccgtttactcagaatcaagatcttcaccagctactctcagtaaccaagccatacccaagtatgaataactgagaataacttaattaaagcttatcttccccagtattatagctgcattttaaactgtaaggcttgaaaatgagcagagatcttgggatgtggtatattggtctttggcgatcccataagccatgacatacaagcaaatagcttatgtctagaggtggtaaagaggtaaaaggccaactcagggtatgtgagctaccaatatgagttcttgcaagcattcaaaagcacta

SEQ ID NO: 698693 - DNA, 616 bp, Homo sapiens
tgtacttatttgctgagttccctgtatgtaacaaatctcctggccacactggctgtattctggcctctggtcccactggcctcaaccatgtgcatcatcttctctgccctggccctggttgagccctcagttgaggggatgagttatattacttttaaatcttgtctctggttctaaaaagaataaaaatatgaatgtttctatttcctattttatgtcttgatgatttctgtgaagctctgtttagattttttttttttctttgagacggagttttgctttgttgcccagactggagtacagtggtatgatctcagctcaccgcaacctccrccttccacgttcaagtgattcttctgcctcagcctcccgagtagctgggattacaggcgcctgccaccacacctggctaatttttgtattttagtagagacggggtttcaccctgttggccaggctggtcttgaactcctggcttcccaaactgctgggattacaggcatgagccactgtgcccagccctctatttagatttttaagatgacttttatgcacttttttttctagctattttgtacaatttccaatttttttttttttttttttgagacagggt

SEQ ID NO: 698694 - DNA, 3272 bp, Homo sapiens
tttaataatatgaaacagggtgctttaaacgcaaagacagaaaggactgacctaaaatctacctgagttcttctcagagcccagtatcaaagttaagatgtaccaagcatgtccaacccggggcccatgggactcatgtggcccaggatggctatgaatgtgacccaacacaaattcataaactttcttaaaccagtatgagatttttttttttttttttttagcttagcagctatcgttagtgttagtgtttctatgcatggcccaagccgatttttcttcttccaatgtggcccagggaagtcaaaagattggacacccctgggtaaccattacaactattgcaaaagtaaatgtgaacactcacttgataggtatgtattatctataatacgttaatgtctataaaaatcattatctacatattttacatactatatttttgtgttattttcaatttccatgggtacatagtaggtgtatgtatttatgggatacgtgaaatatttttatagaggcatacaatgcttaataatcacaccagggaaaatgatggatattcacccatcacctccagcttttatcctttctttgtattacaaacaatcaattatacttttagttattttaacatatacaataaattattgttgactacactcaccctgttatgctatcaaatactagatcttactcattctatgtttttgtacccacattaaccatctccaattcctttccccacccaatacccttcctagtatctggcaactatcattctattttctakgtctccatgagttcaattgttgtaatttttagtcataaagaatgagttcttgtcatttacaacaacattgtctatattattcccatagaatatctttctaatagaaatgaaagtgcatgagaattttaaggatgttgcacattcattacttttacttagattttgtcatattaaacattttcatgtgacttggagtaggggaataaaaatgttttcatttactcatattttgtttgctcattaaaaacatgcatttctctttatttgctgcttttgggggtaacactaggtgctttcagaggagaactttccctttccatcgctgagcttagccaacagtgtaccagaggccagggtatttcatcacgagttgctgctgattagcacaggtcttgacacatgagttttgagtattatcttagctctataatcacaaatgttattgagcaagaaattattcatctctatttagaaagagctttggtagttgactctatgacctctagagttgagtcaatataccaagcagatttattagaaatactgtaatatatattctaaaaaaggaagaagttcctcaataaaaattagcttgacatcaatgccaccaaaattctcccttttaccagagaaagagattttcaaagtttatatatcatcaaggaagaaaaataaatcttatgaatacatttatatgttttaaaaactaacaaagataattactttatcatgcttgttactctgtagaaatgaattttggtatcgttttaaacactatacttaagatgaatgcctctgatcacccagcctcaataaatataaaaaagaaagaaacacaaagacatgaataatttgttacaaattgagtaatgtacatttgagccccccaaatggtataaaaacacatttaaaagatacaccagagtctagaaaaatatatttgcaatgcataggattctcaaaaaatcaagacctagaatatatgaaaattcttatattcagcgagacaactccaaagagaaatgagaaaaagttacaaaaagacacttcaaagtaaactaaacctgtttgttcaataaagggcacaaagttccaatgagaaggaataagttccagtgatctattaccatattattgactttcatcatcatgctatttattatacactcaaaaattgctgagtagattgaaaacattctcattaaaaatgataagtatatgatgtgacaaatatattaacttcatttaatcatttcactatatatgcatatcaaaatatcacactgtataccatatatacaatgaaaaattaaaattaaaccagtatgagattaatataaatttgtgcaaccttaatggaaaacaatttagcaatatctaatataaatgaaagtacagataacaagcaatccagtaattctaactcctagtcatacattctagagaaactctttcaaaaggagcctgccaagtactggacaaatgaatgggtctaatccatgagtccactcagatttgtctgatctctgagtgtagttaccagacaaatcaacccagaccaaaggaattatgagaattaaaaatattgtttcaagtcattaaagtttggagtaatttgttttacataaggctagctggtattttttcccataaatgtctatgctgtatatgaatataaataatatagtaaaaagaaaaatgggatatgatttatgcaacaatattatagaataatatttccatatgaggcaagatatgcctttgtttttttttttctctttggatagagaaaaccaaaaaaataagtagagagagaagcttatttcccttataattacaagaaaggagctgagcctgttgtgtcctgagactgagttctcctgccccaaatgatctttggggaccttggtattttacggtcacaaagagaatttgctttgtcttcacccattgagaggggctgtttctgagagttgaagaggctgaagtgtccagatctaaaaggaaaagaaaattgtgcagtttaggttagtccaagaaacaggcactgaacaaaggacttgagtgccagagattcgtttgggaagtgcaggaaataccaatgaggaagaggggaaatgatgctgggacagaaagaagaaaatagaacatatattatccagcctgctcccacaggggtgactgcagctgaatcctgtgcagaaactacaaagtggtgcaaaacatccgactcacaataattaccacacctaccctcatcctctgagtggtgggggagctggggtacttacaccaactccgataagttgagccctattctagtggaagggtggtgttaattctctggaatttccaggctgctatgtaggagaaagttcttccctgcttccgggagaaaaaaaaatccctcatgcatggggttcactggagaacgtgaaaggtctgagagatatgggcagagcctttgtctgccccaaggatc

SEQ ID NO: 698695 - DNA, 1146 bp, Homo sapiens
gtagcaacctgctaggagcgggaggcggttgttcccaggaggaagcagcttctccgcccaggaggcaaagggcagcgggctcgaaactacaggacttggaaagtcttaggcggagactgcgggggtggggggtggtgaggaggggccttccagggagctgattggtcgacgcggacgggggcgggacttggccggcgccgtccctcccctagacctcagaggccctgcccgcagatgtggcgccaaatcccggatgcaggcctaggcgccagcccaggaatatagggagcaaattgttaagaacaaaacaaaacaaaacaaaagtgagaatacttctgaacaagtgacggccttgataaatagcgagagatgtttatataaaataatacaggactatttttaaggacgagtgaaatctatcggttctagctatagtttttaattaaaaaagcaagttgtattaaaatggagagtaggatctctctttccccctcccctcccctcccctcccctcccctcccctcccctcccctccagggggagggtctgcttctgccacccaggctggagtgcagtggtgccatcacagctcactgcagcttcaacctcccaggctcaagcgatccttccacctcagaggctgggaccacaagtgcgccgccaccacgcccagctaactttttgattttttgttagagrcagggttttactttgttgcccaggctggtctcgaacgccagggctcaagtgatcctcccgcctcggcctcccaaagtgctgggatcacaggcctgagccactgcatcagctttagcattacattcgtgtatgaagaagacatgctgcatgtgcttctataagaggcggggctaacggtggagaaattgtctattgattcttaccttcacaaccactgaattgtttttttttaaaccaatacattgtttttataagtttaataaaacagtaaggcgttgagaatgttactaaccaatcaacagatgacagatattgggcatgagggaggaaagaaagaaaggagtagcagggaaaaagcctggactttgaagccaccacatcctctgcttacaagttgggcagtgtattcattgctaaggctgctgtgataaattttcacacatttag

SEQ ID NO: 698696 - DNA, 1314 bp, Homo sapiens
gccccttttctaagtataaattccaactcaagagtttttacttcggcctttggtaaaaatataccctaccctattgttgcttcttttttaaaacaaatttattatcaaatatttaagacacataaaaagatataaagatttataatcatgaacacctagatggccaccattcagtttaagaactaaaatattatgatagcttaagcttgtcacattcccctttttccttcctgagcaggcagcgatcatcccaaattagatgcttctcattcctgtgcatttctttatacttttcctacatctgcatagaaccctaaacaatatattttttcataaaattgtaaaactttaagcagcaacatactacaatattcttttgtaatttttttttttttttttttttgagacagaccaggctggagtgcagtggcaggatctcagctcactgcaacctccacctcccatgttcaagcgattctcatgtctcagccaccttagtagctgggattacaggcgtgcacagccatgaccagctaatttttgtatttttagtggagacgtggtttctccatgttggccaggctggtctcgaattcctaacctgaagagatctgcctgcctaagcctcccaaaatgctgattacaggcgtgagccactgcgctcagcgtgtaatgtgttttttgtgcaacattatgttaatatacatagttctggttcattgatggacttacagtttgtctcctttttttcctgttaggttggtacaaaagtaattccggcttttaccattactttcaatggcaaaagccgcagttacttttgcaccaacctaatactatgaccaatacgaccctgaagatttttgttcatgtatctttgagtttatgagtgagcttttctttaagttttgtacatgcgaggagattttcaggcttttatggataataggcattatcagttcaccatctattaccaaattgctttctacagtggttgaattgatttgtatactctcacaaggagtgtataaaattacacttgcttcacatcatcctttatacttttaaaattttgtcaatctgatagatattttaattttcattaaaatgactactagtaaggtttgtgtgtgtgtgtgtgtgtgtgtgtgtttcctcttctgattgctcttctgtgaattgatgatggtgttttctgccctttttctattaagtcktatactcttttttaaaatttatacaagttcttcatatatcttggatatatgttgcaaaacttgtacatgttgcaaatggcttcttctagtctgtggc

SEQ ID NO: 698697 - DNA, 646 bp, Homo sapiens
ctcccgtgtagctgggactacaagtgccaccacgtccaactaattttataatatttatagagacggggtttcgccatgttgcccaggctggtctctgactcctgggcacaagcgatttgcccacctcggcctcccaaagtgctgtgatttcaagtacgaatcaccatgcccagcctccttttctatttagatatgttaaatacaaaaatacttaggattgttttacatttgcctactgtgttcagtacagtaagatgttgtacaggtttatagcataggaacaataagctataccatatagcttaggtgtgtaggtgactataccatattggtttgtgtaggtgcattctatgatgttcacacaaggatgaaagcacctaacaaagcatctctcagaatatatccctatcactaagtgacatgtgattgtacaataaatactgaaaaacaagaataatttccattataaccaggaatacraagatgcccactaacactgccatcatttacatttactctgaatgtatagtttatgatcattaaaaaggcaagaaaagacataaaactggaaaggaacagccattttcattattagcagataattgcatacttggacaacttaagggaataacttgaatattgttaa

SEQ ID NO: 698698 - DNA, 603 bp, Homo sapiens
tttttcattatctactcataaagaaggagccaaagggctgggcgcagtggctcacgcctgtaatcccagcactttaggaggtgaggcgggtagatctctggmggtcaggagttcgagaccagcctgcccaacatgttgaaaccccatctctactaaaaaatacaaaaatgtagccgggtgtgctgggcgtggtggctcacgtctgtaatcccagcactttgggaggccaaggcaggtggatcatgaggtcaggagatcgagaccatcctggctaacacggtgaaaccccatctttactaaaaatacaaaaaattagctgggcgtggtggtgggcacctgtagtcccagctacttgggaggctgaggcaggagaatggtgtgaacctgggaggtgacagttgcagtgagccgagatcacaccactgtactccagactgggcgacagagcaagactctgtctcagaaaaaaaaagaaaaatttagccaggcatggtggcgcccaactgtagtcccagctactcgggaggctaaggaagaagaattgcttgaactcaggaaatggaggttgcagtgagctgagatcgcaccactgcactccagcct

SEQ ID NO: 698699 - DNA, 510 bp, Homo sapiens
gtatttgtcttctctctcaccctgctgtcccctccttcaccaggatgaaaatgagcagsaaggcccaaactttaggatctaggatctggaacttctcctttattactttattggattgacttctctagatcaagctttttaaaaatctgcctctcaatccacttaagattagagtatttaaaacattgatttttttaaaaaataaaattttaaaaacttttttacagtttactttgttacagcaaaactttacacgcctgtaatcctagcactttgggaggccaaggcgggagtgtcacctgagcccaagagtttgagaccagcccaggcaacgtactgagaccctgtctctacaaaaaataaaaataaattacctggacatggtaacgtgtacatgtagtcccagctactgaggaagctgaggtgggagcatctcttgagcctgggaggtcaaggctgcagtgagccatgatggtgccactgtactccagcatggggacagagggagac

SEQ ID NO: 698700 - DNA, 1238 bp, Homo sapiens
ttatacttttaagttttagggtacatgtgcacaacgtgcaggtttgttacatatgtatacatgtgccatgttggtgtgctgcacccattaactcgtcatttagcattaggtatatctcctaatgccatccctcccccgtcccaaggggatttttttcaactatctagagcagggttcacaaactctttttctgtaaagggcgagatggtacaaattttaggctttctagaccatatagtctcttgcaacttactcagatctcacaagtagcaatggacaatacataaataaatgagtttgtgtttcaatagaatttatttacaaaaacaggcagtaggctgaatttggtccatggatcagtttggagttctcagataagtttaatagaggtgttaagttcaatgtctaatccagaagcaagtagtaatagatataaaattttcttcatggaagaaaagtgccaccgattgcaaatataaatgaaaaactggggaaatatatatatttgtgggagggggaggggtatgtgtagtcatatcacaaaaagaactcgttttgctaatacaaagagttcctaaaattcaacatgaaccaaaaaacaatcaaaagataacagaaaaggaaacttagacatgaaaatatttaatgtccgtaatgatagaaacacaaagtaaggctacaagtgatagcaattcccacctctcattggtaaattcaggggtctaatagccaccagtgacttggtacagcctctggggggatcartttataatagtgatgtctactacagtcttaaatggaaataattcagcactttcattgtggtatatttattgtacagatctataagagaatatttatttctaaaatagcaagaaattctgggccgggcatggtggctcacacctctaatcccagcactttgggaggccaaagcaggtggattgcttgagcccaggatttcgagaccagcctgggcaatatagtgagacccccatctctgcaagaaattttaaaaattagccggatgtggtggtgtgcacctgttgttctagcttctcaggaggctgaggaggaaggatcacctgagcctgggaggttgagattgtggtgagctgtgatggcatcactgtactccagcctgggtgacagagtgagaccctgtctcagggaaaaaagaaaagaaattctgaataatttaaatgcccatcagtagaagcctgattaaatatgaaata

SEQ ID NO: 698701 - DNA, 663 bp, Homo sapiens
ttctgtccgtaggttcacccacatgtcctttgggaagtgggaaccttgaatgctatagtgttctgttatttaaaataaactggattgaatcatatgtaagcaaaaagagtgttgattaaagttttgccctatataaatacaaaactggggtcggtagagttgtggattttaagggccttgggtacagtctgtggccgtgaaacaaggaaccagatgaacctccgctgggtgaaacgcagaaaggggacttgcgagctgcaagctctgcaaaactgagttttaacaataagaaaaagccagagtatttatactgaagatgctgccaagaagaagtcaccctggcaaactgcgggcaactgcttgaagcggggtgatgggtagmtggcggatctgtgtactcttctccctacttttgtgtatgtttaaaagcttccgtaataaaaagtcaaaacattgaaaaaagaaaaaaagtcccacttaaaaaaaaatgaggtcatcatatcctttccttcacgaggcttgaatttactatcctactttggagaaaacagatgattcatttgccactcagtggggaggagggatgcgggaggatttaccccatgaatgttttgaacacagaatgaagagaccaggggggtaggatgtgcatattttgactaa

SEQ ID NO: 698702 - DNA, 1584 bp, Homo sapiens
attaaaggtggtatgttttagaagtgatagaatttcacaggtcactttgatattactgaatcagtcaatgctctagagtgcaaaaggttattctattccaagagttcagattctttacaaagggattaatgctggtacattttagcaggatcatgcctgtgcttattgataatatatatatatatatttaaaaatattttattagatccaagcattaagggtaggaatctggaatgaaatgtttccttgggcctagagccagccctgcagaaacttctgaatgctttttgactcactgtgaaggcttgctagctctctctgtacgctttgaggggtgcacaagatgctggaaacaacgcatttaaggtctttgagtttagatatttcatttgaactcagggtatagatctgccctgctaagtaaggagatattagctatttagacaatgtatgcaaaaagaataatctgaaatgaaaagtactctttagaatgtttttttttttttttttttttgagacagagtttcgctcttgttgcccagactggagtgtaatggtgtggtctcagctcactgcaatctccgcctcctgggttcaagcgattcttctgcttcagcctcccgagtacatgggattataggcatgtgccaccatgcctggctaattttgtatttttagtagagacggggtttctccatgttggtcaggctggtcttgaactcctgacctcaggtgatccgcctgcctaggcctcccaaagtgctgggattacaggtgtgagccactgcgcccaccctagaaatcttttttttttttgggtaggtgatagaaggatgaaagtgagtcaatttatcttaatcaacttagagctcattattcaggtcagcagttagatcttgttttcctaatctgaacaggtattatctgcactagtctgatgtgtctgtatgcccgtctgtttctgtctgtcactcactgagattatctttaaaggccacctcaagttttggtgcttttcatgtaatgaccactcagctgttttggatacactagagctatgctgtcagtagtgtctataatgggctgctgggaaacaacaactttaaagatgtttgaagacaaatccatgaatcaaaacatgctttaaagccttcctcaaaagcatacagaaacacaacacaggagtgaattttcagaataattcctaaatgtcaaagaaatgcaaccattgcgtgaactgaagtttacattttaaacttcacaccctgaagatatgttgcttgtytctggccccagttacaaatcctttgagatagtctgatgcataaacaatgttaggaaataattgataaattactgtgtactcaaatgaacagtggactatcagtcaaattgtaacagttctaatatttaagtggtgctagatctcctcgcacactcacagatgccctgaaaggtcctacatttcatattttaaacattccttaatggagggagcaaaagaaagagttcacacacatttatttcctgggcataaacatacgtgtgtgtgtgtatgtgtgtgtgtgtgtgtgtgtgtgtata

SEQ ID NO: 698703 - DNA, 640 bp, Homo sapiens
tcccaagtagctgggattacaggtgcacaccaccatacccagctagctttttttattattattttttgrtagagacaggggtcttgctatgttgcccaggctagtctcaaactcctggcctcaagtgatcctctcacctcagcctctcaaaacttttctccaacagtgaaaagatttattcttaattttttttttttttttttgagatggagtcttgctctttcgcccaggttggagacatcgcacccggctagtctcacccttctactcactcctccaataaagaagaaggaggttatctggctcatgaaaagcagacatttatttggccatgttttactagaaggtagaattactatgtcttgaaagtaagggccaaacttaaaacttccccttttactgcctaggcacaggcatagcaggcactcaaccaaccgaacactcttgtcccccttatttccatcaggccccctgttgtggcaaggcccccctccgaccccgttcatgaggggaggccaccattcttctctgttggtaggatgggcaaatttaccagagccctgcatcagagcttactgggtgcttgccctgccaagaataaagtgggtattttggtctctatctggctatctgttctttg

SEQ ID NO: 698704 - DNA, 640 bp, Homo sapiens
tcccaagtagctgggattacaggtgcacaccaccatacccagctagctttttttattattattttttggtagagacaggggtcttgctatgttgcccaggctagtctcaaactcctggcctcaagtgatcctctcacctcrgcctctcaaaacttttctccaacagtgaaaagatttattcttaattttttttttttttttttgagatggagtcttgctctttcgcccaggttggagacatcgcacccggctagtctcacccttctactcactcctccaataaagaagaaggaggttatctggctcatgaaaagcagacatttatttggccatgttttactagaaggtagaattactatgtcttgaaagtaagggccaaacttaaaacttccccttttactgcctaggcacaggcatagcaggcactcaaccaaccgaacactcttgtcccccttatttccatcaggccccctgttgtggcaaggcccccctccgaccccgttcatgaggggaggccaccattcttctctgttggtaggatgggcaaatttaccagagccctgcatcagagcttactgggtgcttgccctgccaagaataaagtgggtattttggtctctatctggctatctgttctttg

SEQ ID NO: 698705 - DNA, 636 bp, Homo sapiens
taagccagcctcacgtactgaactttgttgccagtgagtctatgcgggtggtcaaggaaaagtctctctgtcagatgcaacacagtacacagggcttggagggaagaaaaggaatggaagtgtttttaaaatagttaagtgtacacatacataccaatacccagaaataactggaatgaactgaaaattaacaccaaaatataaatgtgattatcactcgaagtgaaattacagcttgtttttttttttttgcttatgcacacatgtattttggaatcagtaaagtatatactatttttatttattttatatataatatacacacatatacacatatatacacatatatatacatatacatatatacacatatatacacacacacacacacacacacacacacacacacayatatatatatatatttttttttttgagagacagtcacgctctgtcgcccaggctggagtgcagtggcacgatctcagggcttactgcaagctccgcctcccaggttcacaccattctcctgcctcggcctctcgagtagctgggacgacaggcacccgctaatttttttatattttttagtagagactgggtttcaccatgttagccaggatggtctcgatctcc

SEQ ID NO: 698706 - DNA, 1325 bp, Homo sapiens
gattccagatatattttgaagttagaactgacagaatttgctcaactactgctttggcctgctagcagtgacatcaattccaattccaggcccccaaggtgtaagttggtacacaatccttcttcctgccacccggtccttccaaaacatgtgtgtcaaacactctcagaggtcacccccatttccatggagacctgaggtttagaggactccctggggtcacagccatggctactggagtcaggaagctctgaagctctcaagaagcatgagggattttgatggtggctgcagctgtctttcaatttagtgacctgacggtggtctccgaaagtcacatcttctttccctttttagttttggggtgcctatttaggggtcccaggattgagttgccaacccaggaacaagttgccaacctaaaagggcatggaagaaccaagaaccattaagaagtactgaacttggagtctccaaaaaatcggtttgtgtcccagccctgtcaccatgggccttagtctctttaaagggggtccaattagatgagcttctttcaagctctaaaggtctgtgaaatttgggcaagaaaaatgtcttgttggccaggtgtggtggctcacgcctgaaatcccagcactttgggaggccgaggtgggcagatcacctgaggtcaggagttcgagaccagcctggccaacatggtgaaacccygtctctactaaaaatacaaaaactatggccgggcgcagtggctcatgcctgtaatcccagcactttgggaggccgaggcaggcagatcacctgaagtcaggagttcaagaccagcctggccaacatggcaaaacctcatctttactaaaaatacaaaaattagccaggcgtgatggtacatgcctgtaatcccagctacttgggaggctgaggcaggagaatcacttgaacctgggaagagtaggttgcagggagccaagatcgtgccattgcactccagcctgggcaatagagggagattccatctcaaaaaaaaaaaaaagttttgttatcggagatatttacatctgtggactttggctccatcagagtcctcattttttcaaatggagcctcctatacatcaagagagataggtgaattgcatttttctaaaatggcatgatgacagagaggatgccttccagctagactagcaggcctgggctaggaaagctcatcacgcttccgtcaacaggcctcacttctgagctggagatgctcatctcggaggccaaggagtgagtcaacagaatgaggagcgcgggaaggcgacaccagcagtttcgtttcct

SEQ ID NO: 698707 - DNA, 572 bp, Homo sapiens
gtcatctactttaaaaagtcatttgcagtttactggcagtgaaacgcgtatggcatatagtatcctatgttgatacagaatctgcattgagtttagattgaccgtacgtagcccgaaaagccaaaccaaataacagcggctaaacaaggtctacactgacttgtctttgaaaagaagcccggaggattttagggcagctccatattgtcatctgggacccaggctcctatttttcactccctcatcccagtacttggcttccatcctcattgtcaccctgtggtccagatggctgctggactgccagttatgaggtccaagtcacaggcctgaaggatgaggggaarcagaagcacagaaaaggtgccccatgtggctgagttggctcccattaatctcccggaagtccagcatggcgtatgtgcttgtgttaattggacagagtgtggtcgcctggccatcactcgctggagaggagacagggagatggaggcttttatgctgggtgtcattgaacccagctgagaatcaggatctgttatcaaggaagggcattgccgctaaggaattgg

SEQ ID NO: 698708 - DNA, 1224 bp, Homo sapiens
ggggttgcgtcatgttgcccatcttgaattcctgggctcgagagatccgcctgcctcagcctcccaatgtgctgggatcacaggtgtgagccaccttgcccagccatttcttttgtgtagtatggaatcttagtttaagccctcagtttaaatgtattatataattgaggtgctaggtgtacagaggtactagaactacagagcttttctcattaatgtatgttccttctgatgttgaatatttagaaaactgaatattgtgtttggagccaagggatattacacttgaaatatggtcatttggtgaacaggtatctcatttgtaggctatcattatttttggtgaacaggtatctcatatgtaggctatcattaattttggcagtttcacattaaaatacctgcctggaaatacctgcccagttttgccagtaatgggaattgcaggttaaccgttggtcttctatatgtggctctatgatgtggacaagacttatagctctttactttaactgagacaacaatgttggtgatccaagtctagaattccaggatagggttgccaaaattaacaccgtgggagtatggaggtagcaactgtgggattagtaatacaaatacaattttaattagctttatcagttgcacacttaatcttcattgctaccttgtgaagtaggcacggcaggctgtatattgttacttctactttacaagtaagtaaattgtgtttcatagctgtcaggacttacctgaggttgcactgctagtgagtagctgaaatagtacttgagtccagacatcaggttggatgctgtttccacttttgcagttyactgtcgtgaataagagctcaggcttgggtttgaattgtggttctaccacttacctgtctgtgatcttggggaagttctttaacttctctgagtctcaggtttaaaatggggctaacaataatacctcttagggctcttgtgagatttcagcaagtgcttataatattagataaccaatagtaagcactcagtatttgctaattgtggttgtttctactgttattaaagtgataacaacactacagttacacatcctctttcccctaaggatctgtgttaagagttgaaagacaataaatgtaagaagcaaaaatattcaaagatgatagaataagtagcaaggggagttgattttagcaggaagatggacaatgttcagaggggtatg

SEQ ID NO: 698709 - DNA, 1224 bp, Homo sapiens
ggggttgcgtcatgttgcccatcttgaattcctgggctcgagagatccgcctgcctcagcctcccaatgtgctgggatcacaggtgtgagccaccttgcccagccatttcttttgtgtagtatggaatcttagtttaagccctcagtttaaatgtattatataattgaggtgctaggtgtacagaggtactagaactacagagcttttctcattaatgtatgttccttctgatgttgaatatttagaaaactgaatattgtgtttggagccaagggatattacacttgaaatatggtcatttggtgaacaggtatctcatttgtaggctatcattatttttggtgaacaggtatctcatatgtaggctatcattaattttggcagtttcacattaaaatacctgcctggaaatacctgcccagttttgccagtaatgggaattgcaggttaaccgttggtcttctatatgtggctctatgatgtggacaagacttatagctctttactttaactgagacaacaatgttggtgatccaagtctagaattccaggatagggttgccaaaattaacaccgtgggagtatggaggtagcaactgtgggattagtaatacaaatacaattttaattagctttatcagttgcacacttaatcttcattgctaccttgtgaagtaggcacggcaggctgtatattgttacttctactttacaagtaagtaaattgtgtttcatagctgtcaggacttacctgaggttgcactgctagtgagtagctgaaatagtacttgagtccagacatcaggttggatgctgtttccacttttgcagttcactgtcgtgaataagagctcaggcttgggtttgaattgtggttctaccacttacctgtctgtgatcttggggaagttctttaacttctctgagtctcaggtttaaaatgrggctaacaataatacctcttagggctcttgtgagatttcagcaagtgcttataatattagataaccaatagtaagcactcagtatttgctaattgtggttgtttctactgttattaaagtgataacaacactacagttacacatcctctttcccctaaggatctgtgttaagagttgaaagacaataaatgtaagaagcaaaaatattcaaagatgatagaataagtagcaaggggagttgattttagcaggaagatggacaatgttcagaggggtatg

SEQ ID NO: 698710 - DNA, 635 bp, Homo sapiens
gtaaacaggaaccaatagcatgattcttttggggacagacatttgttctgacctgggttgctactcctttccctgcttgggcatgtacccattatgtccatccttgacaggaagggaaagcaaggagcaaagaagcttccattgggagctaagaaccatgcagaacttgtgggaagtgccccactatggcaaaacaactttgaatatggatgtgaaaaacataagaagccagaatgtagccatcacctgcctctagtctctcacgatatggctattctgttcatcaggacctcttgagctcccacaacatagcaattcctattgagaacagctgcttttaccatragactttgttttacccgcttctggaccataacctcacaccacacaagttaatggattttgatagagctgttaaaatccttatgtaggtttcagagaggagcaaactgaggggtgattctctctgcttcatcaagtctacaaatgtctgctatgtgggaatggataccagttcccagtaacccctctgaagtaaagaggatgggccaaagtgaagtaaaaagggatgagacaaatgcaaagaaatagttcctgaccaaaaataactgaccgccaaggaagatcaagagtcc

SEQ ID NO: 698711 - DNA, 580 bp, Homo sapiens
cagcctgggcaacagagccagactctgtcgcaaaaaataaatttaaaaaaaattttaaaaattagccacctgtagtgcatctgtattctcagctacttgggaggctggaggagactttgagcccaggagttcaaggttgcaatgggctataaacgcaccactgcactccagcctgagtgacaatgaaaccctgtctcaaaaataaaataaaataaatattagctagcaacaagccatctgcatcagaatgaccttgttatcaaggccagttccaggaccctatcccaaatgtaaggtatcagtcacctgctccgttcatggggcctgggaatctcattctgatgcacttgtaacttacaagaccctctgctttaaagaaatagagtctcaatgctccttctttcatattttattcttgccatgttttatttcttgggagtctggagtgagaaactcttaagaatgtgtaacaggtatggacttgtgttcctgggcctagagygagatggggaggggtaggtggggctgggaagaggtgcgccaatacaaatattgtcccatcaggacctggcaattttgc

SEQ ID NO: 698712 - DNA, 1061 bp, Homo sapiens
tgtcctaacctcttcttatgaccccagtyatattagattaggtctcaccctaatgacctcattttagcctcattactttttaaaagactctatctccaagtacagtcacattctgaggtactggggattaggacttcaacatgtgaattggggacctggggacctattcagcccatcacacttggatcagcaaggaaccccttgagaataatcctggatatagaagagagatcttcaatttctaattcaaaattaacaatcacatgtgttttacacctgacttctaataatggttatttaaaattgttactctaatttttcatcctcttagaaaataaatgtattcatgctgaatgcaaggctttttaggaattgtggtctacaatgtgcaagaatgcaggccaaggactgtaaacacaaaaatataggaggcaatatgccctcagcattacactgcctagaaagtagatttcttatcttaaaaatcgtttcaaatcacacaatctatagaatgggagaagatattcacaaaccatgtgtctgacaaaggcctaatctaacaaatcaacaagtaaaaaacaaatgaccccattaaaaatgggcaaaggatgtgtctcaaaagaagacgtacaagtggccaacaaacatatgaagaaatgctcagcattattagtcattaaagaaatgcaaatcaaaaccacagttagatatcagctcacaccagtcagaatagctattattaaaaagccaaaaaacaacatgctggtaaggctgtggagaaaagggaatgcatatacactgttggtggaagtgtaaattagtccagtcactgtagaaagcagactggagatttctcaaataacttaaaacagagttaccgtttgaccatttgacccagctgtcccattactggctacataccctaaagaaaataaatcatcctaacaaaaagacacatgttcatcactgcaaagacatggaatcaacccaggtgcccatcaatggtagattagataaagaaaatgtggtacatatatgccatggaatcctacacatccgta

SEQ ID NO: 698713 - DNA, 1061 bp, Homo sapiens
tgtcctaacctcttcttatgaccccagtcatattagattaggtctcaccctaatgacctcattttagcctcattactttttaaaagactctatctccaagtacagtcacattctgaggtactggggattaggacttcaacatgtgaattggggacctggggacctattcagcccatcacacttggatcagcaaggaaccccttgagaataatcctggatatagaagasagatcttcaatttctaattcaaaattaacaatcacatgtgttttacacctgacttctaataatggttatttaaaattgttactctaatttttcatcctcttagaaaataaatgtattcatgctgaatgcaaggctttttaggaattgtggtctacaatgtgcaagaatgcaggccaaggactgtaaacacaaaaatataggaggcaatatgccctcagcattacactgcctagaaagtagatttcttatcttaaaaatcgtttcaaatcacacaatctatagaatgggagaagatattcacaaaccatgtgtctgacaaaggcctaatctaacaaatcaacaagtaaaaaacaaatgaccccattaaaaatgggcaaaggatgtgtctcaaaagaagacgtacaagtggccaacaaacatatgaagaaatgctcagcattattagtcattaaagaaatgcaaatcaaaaccacagttagatatcagctcacaccagtcagaatagctattattaaaaagccaaaaaacaacatgctggtaaggctgtggagaaaagggaatgcatatacactgttggtggaagtgtaaattagtccagtcactgtagaaagcagactggagatttctcaaataacttaaaacagagttaccgtttgaccatttgacccagctgtcccattactggctacataccctaaagaaaataaatcatcctaacaaaaagacacatgttcatcactgcaaagacatggaatcaacccaggtgcccatcaatggtagattagataaagaaaatgtggtacatatatgccatggaatcctacacatccgta

SEQ ID NO: 698714 - DNA, 594 bp, Homo sapiens
ccactgcgcttggcccttattctttctaagaaaacatactgccttacaccaaataggcactagtctctttccaggtcaaaaccgaaagtaaacaccattatttagagcagggattttaaaactcagtactattgacattttgggggcaaataatttttgactgcattgtaggatggctagcagcatctctggcctttacccactagatgtcagcagcagcccctcagtgtgacaaccaaaaaaagctccagacattgctacatgtgccctgggggacaaaattacccccagttgagaaataatgatttagaactaatggtcaacaaacaacaatgtgtgggaagaaaggagatatcaaaggaataaaaatgatgaagagaaaaaatgaacaggggttttyatttaaaaaaaaaaaccctctagtaaaatttctgcacttctttcttctctataaattcagaagtaaaactcttagccaagctgtagatgttctaaatatagctaaacatataaaatagctgagtaagagttttctttattggcaagacttgcaggtttgcagcaatggagatttcagcacatacctggaaagca

SEQ ID NO: 698715 - DNA, 732 bp, Homo sapiens
tatatatacacacatacattttatttatacgagtaaataaaaataaatgctgatttataagcatttataagtatatatacactatacatatatgtgtatatgtacatatatgtacatatacacatatatatgtatatacacttatgtgtatgtgtgtatatayacacgtgtatatatacacatctatatagacacgtgtatatatacacatctatatatacacaactatatatgtgtatatatacacatctatatatacacatatctatatatgcatatgtgtatatatacacacacatacattttatttatatgagtaaataaaaataaatgctgagatttataagccatgctgaataatttctttaggctgctggttttggtctctagtgtaagtaactatcatacagtagtgtatttatcaggggaaccagcccccaatatttcaacgtaggttcttttctattttccctaagtgttggccggtctgagaaataaagggaaagagtacaaaagagagaaatttaaaactggctgtccaggggagacatcacatgtcggcaggttccgtgatgccccctgagccacaaaaccagcaagtttttattatggatttcaaaaggggaggggtgtatgaatagggtatgggtcacagagatcacatgcttcaagggcaataaaatatcacaaggcaaatgggcagggcaaggtcacaatgccagggcgaaatta

SEQ ID NO: 698716 - DNA, 605 bp, Homo sapiens
agtaaaagcagagaaaaccgaataggctttataatgttagtataaattgatatcaaatctggataaggaaattatgagaaagatcagaaaatacctcccattaatatagatgtgaaattaatamataaaattttagcaaatttagtttggcaatatatacaactataaatacctcatgactaagtggtatttattccacagttggtttaatattagaaagtcaatgtagttcatcacattaaaaagataaagacaaaataccattatactcagagacacacaataaagcatttgataaaattaaggaactagaaatgaaatttagaaaactagaaataaattgaagccttcttaatatgttagaaaatatttataagaaatgatcttagcaaattgcagaacaggaaacccaaaacctcattctcagacagagacattgatttaactaccatgtctggtccacaaagtcttaatgagacctctagaaatcagttaagagttgtagtatcccagacaatttcaaagacacaaacatccataatgaaatggtcaaatctcagaaaaaaactaagaaggcatatgaagaaatggggcaatatgagcta

SEQ ID NO: 698717 - DNA, 605 bp, Homo sapiens
agtaaaagcagagaaaaccgaataggctttataatgttagtataaattgatatcaaatctggataaggaaattatgagaaagatcagaaaatacctcccattaatatagatgtgaaattaatacataaaattttagcaaatttagtttggcaatatatacaactataaatacctcatgactaagtggtatttattccacagttggtttaatattagaaagtcaatgtagttcatcacattaaaaagataaagacaaaataccattatactcagagacacacaataaagcatttgataaaattaaggaactagaaatgaaatttagaaaactagaaataaattgaagccttcttaatatgttagaaaatatttataagaaatgatcttagcaaattgcagaacaggaaacccaaaacctcattctcagacagagacrttgatttaactaccatgtctggtccacaaagtcttaatgagacctctagaaatcagttaagagttgtagtatcccagacaatttcaaagacacaaacatccataatgaaatggtcaaatctcagaaaaaaactaagaaggcatatgaagaaatggggcaatatgagcta

SEQ ID NO: 698718 - DNA, 940 bp, Homo sapiens
gctgtgctgtcctgcactatgcgagcctggttagaagagctcattagatagcacctttcaatccctccttgttcagaggcccagagagctcaggtgtctcttccaaggtcacacaatgaggtaaggataaatttggaactaaaactgagactccctgcccttctgatgcccactggcctcagtcccagtgggcacacttgctcgcctcctgcctgggtctctgacttcaggagggcggagggggcccgtgtcagagccttccgcgccccagcgcatcgctccctactccgcctctcgggatcctttaagaggcggggcttggctgccagctccgcggcccgggcaaaaggctgggactttactccgggtggcggcgaggacgagtctgtgctccatcagctgccgcacccgccgcctcccgcccccaaaccccatccccgcggttgagccacgatgagcggcagagtcggcgatctgagccccargcagaaggaggcattggccaaggtgagctgtagccctggcccgggctcccgcctcgggctgtggccctcgccctcctgcggcagcgagaagggacggggctgggtgggggccgagggtccgtggcgggcggcggagggaacagaggcggctgtcccagcctggcccgcgcccgcggatggctccttcctccctttgccaccctcgaggtcccaggaagtttggccaccccccgcccaagctctgagcagccgtggcggtgccacctggggacaagtggttgcttgtgagtccccggaggccgctgagggcacaaaggcaacattcatcctcgggactggcagccgggccctggggcaggggcaggggcaggggcccaagtttcctcccatttccgggaggctttcttcttgtagggtcagtggcacgatggaaagggctctggatagctccttgg

SEQ ID NO: 698719 - DNA, 2337 bp, Homo sapiens
tagccaggatggttttgatctcctgacctcgtgatccgcccacttcggactcccaaagtgctgggattacaggcgtgagccaccgtgcccggccaagccttctagctttcaagacagaaagggggaacctgaagatgatggtgtgtgtgtgtgtgcacacgcgcgtctgtgtgtgtggtgggggttagagggagggtggtcttggggaagtgagctttggcaggtgcggcctgtggaggcagccggggactggatgactgggaatctctcccgtggaggggacagcctgaagctcgcgggtgtgagctgagaataccagctcaggtgggaagggtggtggtggtgtccacatgggccagctgcgctggtggaggctgcagggcaccaggtcaccccctgcaggcagccccagctcagcccaaccctccaggtcagggccctcggggacagtggtgtgcttaaagctctgctgcccgaggaagtgggaagccggtaagaggcgtgcaccgtgcgctggcagtctcccgacactgacagaatgtcatgatccagccaacgaagaggtttaagaatgaagccaggtcacctttccactccccagtgctaagtaaggaggaatctgtcattactgagtacactgatacttacaaccaggcttcttccatttatccaattccctgcagtaagaatggcggcgacagtactttcttcaccaagctttatccacacgataaatacgctgacaatgacacgttttcattttctaacactgaagactatccagggttggccaaagtgtcagtgctctcacttacaatgccagagctgtgatttttgggggcaagattcttttaccttaaaaggcattatccaacctcaataaagcagcaggctaggcgaacatcaacagctactaacatcacaaaaagagatggacgtccacacgtgcctcctcactggtgaaatgctccagcaaaacacaacagtcaaacaagcaaaacagcaacagactctgagcagggcctgaggtctaactaccaatttacagaaatacaggagacacgggggaacgcagaaaggacaccaacagcaaaatccagatgggggacaccctccaggacaaatgactggttcttctacaaagagactgctaaggacaagaggcagaggggggacctgyagctagaaaaggcctcacgagccctatccaccaattataatgtatggagctgatttggatccagattcaaacaactacactgtaaaccatttttctttttttatgagacagggtctctgtcatccaggctggcatgcagtggtatgatcacagttcacagcagcctcgaacttctgggttcaggctatcctcccaccacagcctcctgaacagctgggactacagacatgtgccaccgtacctggctaattttttatattttttgtctacatagggttttgctatgttgccagtttggtctaaaactcctgggctcaagtgatcctcctgccttggcctcccaaagtgttggaattacacagacatgagccattgcacctggcttcaaagacattttgaatgaagtttcaaaagctagcattcctaaaccaaatcatgccaatgcagtctacaatgaggcaggtctacgttcccagactcctcaaggctcacgcgtaggtctggggcaggcacatcttagaagcacatccgtttcatatcatcaagacactccacacctgggcaccactcacagctgaactaaggccccggacacaaggtataggggcctggctccttcgccccaaagcaagacagctcctggagcgaggggtgcagacaccaccacccagcctcctccccttcacccacaggtctcacaccagggcgcactaacctcagccaacccagcccgggagtgatgtccagccgcgctgctccccaccacgccatcacctcaccttgtgttattctctgcatggcttctagtgtcagtgtttttgtttattttttattgtctgcttcctatcactagaacagaagttctgaagaggcaggcagagtccggccttgttctcctctagctggagagcccacaccagggcctctgtgcggtggcgggaatggatgaactggttccgggagcccaggacctccatgctgggcccccagaggcacgttagggttatctttcagggttatcgttaaccctaaacgccgtgcctagaaggtttagggttaaagataacatccacagtgcctgggagtaaagactttctgaagaaagatgaagttaccacttttaatgtaagcctctcttcagaaaataagaaaatgaa

SEQ ID NO: 698720 - DNA, 903 bp, Homo sapiens
tgtggatgctttcctccagatatgatttgtatttgcttctgccaagaggcaggcaaagctaagttgcagctgtcttagaaggtctctgcttaaggggaaatattcaggtttagcttttctaccttgaggtcagccgaaggcttagtcttgaaatcacatgtctgatgaagagaagcaccttcagcacaatcctccccttccttattgctcactgctctcagctatctgctctggtttcagccatttgttcttttttgtttgtgtttttgtctataggaagtttactctatttcctagggaactgagaaacacattttgaattatatatgcagtaatttatacagaayaatttggaggggaggtatatcaaaatttcctgggtatgtatcacctatgggagctgttctcaattctcatgactctgagaatcattctctcaaggatcataatgcccactaatctgtattgtaacctatctttgaaatatgcagggtaaaacaatgaaaaagtaggaaatgagagagatccttaaatgctattagcttcaagaaccttcactgtcactgacattttcccttacacatactttaaaaatgtggtcaacatttagtcatttgtatggaggggtgaggagtcaggacaggggataattatttgctttttatttttatttatttaattttattattatattgtaatctggaccagctacaagtatgtgtatataacctaggtaaaactacacgtaggcttttggcacctgtggttgcctgtcagcttagtggagctcctaaccatctaaaatgtcagagtttattgttattttttatttaaaaattttttgaaattacttatttatttatttgtattatagtagctttagatggccaatatggtgaaacc

SEQ ID NO: 698721 - DNA, 903 bp, Homo sapiens
tgtggatgctttcctccagatatgatttgtatttgcttctgccaagaggcaggcaaagctaagttgcagctgtcttagaaggtctctgcttaaggggaaatattcaggtttagcttttctaccttgaggtcagccgaaggcttagtcttgaaatcacatgtctgatgaagagaagcaccttcagcacaatcctccccttccttattgctcactgctctcagctatctgctctggtttcagccatttgttcttttttgtttgtgtttttgtctataggaagtttactctatttcctagggaactgagaaacacattttgaattatatatgcagtaatttatacagaataatttggaggggaggtatatcaaaatttcctgggtatgtatcacctatgggagctgttctcaattctcatgactctgagaatcattctctcaaggatcataatgcccactaatctgtattgtaacctatctttgaaatatgcagggtaaaacaatgaaaaagtaggaaatgagagagatccttaaatgctattagcttcaagaaccttcactrtcactgacattttcccttacacatactttaaaaatgtggtcaacatttagtcatttgtatggaggggtgaggagtcaggacaggggataattatttgctttttatttttatttatttaattttattattatattgtaatctggaccagctacaagtatgtgtatataacctaggtaaaactacacgtaggcttttggcacctgtggttgcctgtcagcttagtggagctcctaaccatctaaaatgtcagagtttattgttattttttatttaaaaattttttgaaattacttatttatttatttgtattatagtagctttagatggccaatatggtgaaacc

SEQ ID NO: 698722 - DNA, 903 bp, Homo sapiens
tgtggatgctttcctccagatatgatttgtatttgcttctgccaagaggcaggcaaagctaagttgcagctgtcttagaaggtctctgcttaaggggaaatattcaggtttagcttttctaccttgaggtcagccgaaggcttagtcttgaaatcacatgtctgatgaagagaagcaccttcagcacaatcctccccttccttattgctcactgctctcagctatctgctctggtttcagccatttgttcttttttgtttgtgtttttgtctataggaagtttactctatttcctagggaactgagaaacacattttgaattatatatgcagtaatttatacagaataatttggaggggaggtatatcaaaatttcctgggtatgtatcacctatgggagctgttctcaattctcatgactctgagaatcattctctcaaggatcataatgcccactaatctgtattgtaacctatctttgaaatatgcagggtaaaacaatgaaaaagtaggaaatgagagagatccttaaatgctattagcttcaagaaccttcactgtcactgacattttcccttacacatactttaaaaatgtggtcaacatttagtcatttgtatggaggggtgaggagtcaggacaggggataattatttgctttttatttttatttatttaattttattattatattgtaatctggaccrgctacaagtatgtgtatataacctaggtaaaactacacgtaggcttttggcacctgtggttgcctgtcagcttagtggagctcctaaccatctaaaatgtcagagtttattgttattttttatttaaaaattttttgaaattacttatttatttatttgtattatagtagctttagatggccaatatggtgaaacc

SEQ ID NO: 698723 - DNA, 903 bp, Homo sapiens
tgtggatgctttcctccagatatgatttgtatttgcttctgccaagaggcaggcaaagctaagttgcagctgtcttagaaggtctctgcttaaggggaaatattcaggtttagcttttctaccttgaggtcagccgaaggcttagtcttgaaatcacatgtctgatgaagagaagcaccttcagcacaatcctccccttccttattgctcactgctctcagctatctgctctggtttcagccatttgttcttttttgtttgtgtttttgtctataggaagtttactctatttcctagggaactgagaaacacattttgaattatatatgcagtaatttatacagaataatttggaggggaggtatatcaaaatttcctgggtatgtatcacctatgggagctgttctcaattctcatgactctgagaatcattctctcaaggatcataatgcccactaatctgtattgtaacctatctttgaaatatgcagggtaaaacaatgaaaaagtaggaaatgagagagatccttaaatgctattagcttcaagaaccttcactgtcactgacattttcccttacacatactttaaaaatgtggtcaacatttagtcatttgtatggaggggtgaggagtcaggacaggggataattatttgctttttatttttatttatttaattttattattatattgtaatctggaccagctacaagtatgtgtatataacctaggtaaaactacacgtaggcttttggcacctgtggttgcctgtcagcttagtggagctcctaaccatctaaaatgtcagagtttatwgttattttttatttaaaaattttttgaaattacttatttatttatttgtattatagtagctttagatggccaatatggtgaaacc

SEQ ID NO: 698724 - DNA, 1937 bp, Homo sapiens
ggttgtgaagattaattgagatgatctgtgttatacattgaacacatttctggtatgcagtgaacacttaatggctgagatcaattattatcagtctttaacaatttcttgagtagcctgaagattgtatgaacctgacaagcattgcctcttcaaggttcacaatagtcccttaaaaccatgatcctctaaagctgattttgtagtcttgattatggcagtggaagtcaacatgttaattttatggatgatgtattctttatttatttaaatctggcattgatgtttatagttttgttgctttcatgcagttacttctccatcatataaaaaattagcttaattctctacatacatacattatttgtgataatatgttcaaagaagttagcatgaactttccctcaaactatccccattgcagaaagataatcagcacataattagagaggagtgaatttccttaccaatgtttgtagtggatgtgaaagttaaccaagaccaggagctacaacatgtctaggaggaattcatggtaaagtaaaaagaggcaacctggttagctcccacatttggactcaaggatctcagaagagtgaagcacctgaaggtttctgggagtttctgtgggagctgcagaatctttgcttctgtttctgattgaaaatgtatcagaatcctcagaaaaggaggtgttattctctgatgtgctcagcctggttgacagctgagggatcactggaggagctgggccatgaaacctcctgcatgctcatctccttggggaaggagagacaagacaattggttttttctatttctkttcttaaccccagcaggatgcacaattaacaaacaccgacagccacagagcacacctctgagacaacatctttcattatagtcccggaatgcttggatttcatgaatcccagcactgcccttgttccccaagcttcagatggttcaagtgaacctgtcaggaagcagaaccagtgtgacaatgaataagctcctggcaggaacctctgtagctcagcctctccctgatgtaatctgggttacttgtgttgcagcagaactgggaagaaaggaccctgaaaagttagctggttccaagtgaccctccaaggtatggagatgctttggggagctggtgagggaggcacagagcagactggggagtcaacggaggggccaaggtgtcccggtggggcttattagaacctgcctgaagggagggtctcctaagacacaaaccaccactgtagatcgtgtattagaattattctctaatctttattctgaaaggggaagagtgctggattcagagcccacctcaggggaagacaggaccctctccaagatggtttccctagaagctactacctctccctggagggtggagatatttgctggtcaaaggtattttcatgtttatttctacttctttcttctactggacataggaggattatgaattttatattaagcaattatgcaatttacaaactaatgagtttattacaatgtggtctttgacctgctggggttatggtataaacccaaggaaaatcttgcccaggtaatcagggtgtgagaacacgctcacctgtgttccagctgtatatgtccacagtgaattgctttggggacacacaaaaatgctcctgatcatatgaaaagtctagtgcctagtaggccatccataaacattagaatcttttctttatttttctttccacaccccggtgaagtgcaacagatataaatgacaagcctgtgaaaacaacaattttagaacttttttccatattcctcatcatatgaacatcagttagaaaaagtcattttaaggtagaaaacagaaaatgtgagctaaaacaagttaaatataaggtttttatgatgccaaacaaactaatttaggaaatgcat

SEQ ID NO: 698725 - DNA, 1338 bp, Homo sapiens
tcctttatattcatcatagatgttatgatgccctatctgttaactccaatatctggattatctatgagtttgtttttaataactgatttatttcttatcagtctgttttacttgcttttttgtatatttggtattttttttaaagtatgctgaatttatggataatatgatatagaactactcaagaattttgaattttttttctgggcagaatttgtaattacttgcagatcatcttgctgctctcaagayctagttttaagctgtgttatggtaattatattttattttcctcttagaacatatgcctcactcctgggatactgcatctctcctaagagaatttttagagtcccaactgagtttctcagttgtttgccaacatttccccatttggctggatctgaactccagtagctttccaggaagttttcagtccctgatgatctcttctgctttctgtatcccagcagtttctttctccaaggtctcccctcttcttagccaactgtcacatagctaaggagtcacagaaggaccaaaatggcatgtatacacccatttctaggttctttctctctcccatatggtacattgacccccaattcctaaccaatttagcagctttgaactctattcattgcttcttttggttcccaagaccattaacccctggttgggtcccattttcctgtaccaaggtcaggaagatgcctttctggaaaatcctggcaaatgtggtactaacctcatgtgcctcaccttccttaaagatctcatacctgacttgctacaacaatgttcttcaatgcctgctgatatggtttggctgtgtccttacgcagatcccatcttgaattgtagcttgcataattcccacatgtagccagcccacctgaaccatgctcagcagctggtgagaggtaattgaatcatgggggtgggtctttcccatgctgttgttgtgatagtgaataagtctcatgagatctgatggttttacaaaggggagctcccctgcacatgccctctctcttgtctaccatgtaagatgtgcctttgcttttcctttgccttctatcatgattgtgagttctccccagccatgtggaactgtgagttcactaaacctctttcttttataaattacccagtcttgggtatgtctttattagcagcatgagaacagactaatacacctgccaagaattttttctatattttggccagattgtatagttttttatggtgggagggtgaatctgacacaagctatttggtgtcaagtagccaagtcacatactaatttatttttaatgtaaagctatacaaccttct

SEQ ID NO: 698726 - DNA, 1338 bp, Homo sapiens
tcctttatattcatcatagatgttatgatgccctatctgttaactccaatatctggattatctatgagtttgtttttaataactgatttatttcttatcagtctgttttacttgcttttttgtatatttggtattttttttaaagtatgctgaatttatggataatatgatatagaactactcaagaattttgaattttttttctgggcagaatttgtaattacttgcagatcatcttgctgctctcaagatctagttttaagctgtgttatggtaattatattttattttcctcttagaacatatgcctcactcctgggatactgcatctctcctaagagaatttttagagtcccaactgagtttctcagttgtttgccaacatttccccatttggctggatctgaactcyagtagctttccaggaagttttcagtccctgatgatctcttctgctttctgtatcccagcagtttctttctccaaggtctcccctcttcttagccaactgtcacatagctaaggagtcacagaaggaccaaaatggcatgtatacacccatttctaggttctttctctctcccatatggtacattgacccccaattcctaaccaatttagcagctttgaactctattcattgcttcttttggttcccaagaccattaacccctggttgggtcccattttcctgtaccaaggtcaggaagatgcctttctggaaaatcctggcaaatgtggtactaacctcatgtgcctcaccttccttaaagatctcatacctgacttgctacaacaatgttcttcaatgcctgctgatatggtttggctgtgtccttacgcagatcccatcttgaattgtagcttgcataattcccacatgtagccagcccacctgaaccatgctcagcagctggtgagaggtaattgaatcatgggggtgggtctttcccatgctgttgttgtgatagtgaataagtctcatgagatctgatggttttacaaaggggagctcccctgcacatgccctctctcttgtctaccatgtaagatgtgcctttgcttttcctttgccttctatcatgattgtgagttctccccagccatgtggaactgtgagttcactaaacctctttcttttataaattacccagtcttgggtatgtctttattagcagcatgagaacagactaatacacctgccaagaattttttctatattttggccagattgtatagttttttatggtgggagggtgaatctgacacaagctatttggtgtcaagtagccaagtcacatactaatttatttttaatgtaaagctatacaaccttct

SEQ ID NO: 698727 - DNA, 1192 bp, Homo sapiens
agaataagaccagattaactcatacgaggaaaaataggaaaagaagctgacacaattaataagataagctagaaataataaaakaaatatattcactattttgttttacttctgttatgataattaggatagataaatcactattggcataaagaatttctttactactaaatatctggagggaattgatttattcattcaaatactctccagaatgttttgtagatagaaagtattcaatgacacttgttttgtactttttaaagtactatagtttcatatctgcatattaaatataggaaacattttcatatgtatcatttgatttaataaataacactctgggctagatttgaaatgcccagagtttggggctgcaacctgcctctcatcccccttataacctctgagtccataaggcataaaaatggcatattttgtcagatttagatttgttgaaacagagattacattttagtaaagtgaacctatacagtatgatcgataaccaacttaatgtaatctctcaatgtcacctccaataagaacatgcaatctacaagtgccagtgtaaaccagttcagggtaaagaattgaagatactaagctaatttccaacaccacaactctcattagagttggctgtcaattacagacattcacttgtttgaaacttgaggctattatgaaaattctttaaaagtacaatgtctcttaaagaacttcaataaactaagtttttaataagtgatacaattctttatatctttttcttctaaaatctctttgttcatatcttacagcacaaggagaaaaaattatataatctcacattacattccataactcaaattatttatatgtataaataggcaggcccttactattgtattttctttaatcaattagaaatatttatttagcaaactcctactatgtataagttctctgctttgtatataatgtatatttttacaacagtcataccactagaaacattttgttgttgttttatttcagataactaaaccgagtacatgttgttactgctgagttgctgttaagctggagttaatgactaatcaccagatttggatgggagaagggaaattcactgataatatgtcacaatgcttttgtcacaagaaatcctatacacttactctgagctactggaacctgcctttatggg

SEQ ID NO: 698728 - DNA, 1192 bp, Homo sapiens
agaataagaccagattaactcatacgaggaaaaataggaaaagaagctgacacaattaataagataagctagaaataataaaataaatatatwcactattttgttttacttctgttatgataattaggatagataaatcactattggcataaagaatttctttactactaaatatctggagggaattgatttattcattcaaatactctccagaatgttttgtagatagaaagtattcaatgacacttgttttgtactttttaaagtactatagtttcatatctgcatattaaatataggaaacattttcatatgtatcatttgatttaataaataacactctgggctagatttgaaatgcccagagtttggggctgcaacctgcctctcatcccccttataacctctgagtccataaggcataaaaatggcatattttgtcagatttagatttgttgaaacagagattacattttagtaaagtgaacctatacagtatgatcgataaccaacttaatgtaatctctcaatgtcacctccaataagaacatgcaatctacaagtgccagtgtaaaccagttcagggtaaagaattgaagatactaagctaatttccaacaccacaactctcattagagttggctgtcaattacagacattcacttgtttgaaacttgaggctattatgaaaattctttaaaagtacaatgtctcttaaagaacttcaataaactaagtttttaataagtgatacaattctttatatctttttcttctaaaatctctttgttcatatcttacagcacaaggagaaaaaattatataatctcacattacattccataactcaaattatttatatgtataaataggcaggcccttactattgtattttctttaatcaattagaaatatttatttagcaaactcctactatgtataagttctctgctttgtatataatgtatatttttacaacagtcataccactagaaacattttgttgttgttttatttcagataactaaaccgagtacatgttgttactgctgagttgctgttaagctggagttaatgactaatcaccagatttggatgggagaagggaaattcactgataatatgtcacaatgcttttgtcacaagaaatcctatacacttactctgagctactggaacctgcctttatggg

SEQ ID NO: 698729 - DNA, 1192 bp, Homo sapiens
agaataagaccagattaactcatacgaggaaaaataggaaaagaagctgacacaattaataagataagctagaaataataaaataaatatattcactattttgttttacttctgttatgataattaggatagataaatcactattggcataaagaatttctttactactaaatatctggagggaattgatttattcattcaaatactctccagaatgttttgtagatagaaagtattcaatgacacttgttttgtactttttaaagtactatagtttcatatctgcatattaaatataggaaacattttcatatgtatcatttgatttaataaataacactctgggctagatttgaaatgcccagagtttggggctgcaacctgcctctcatcccccttataacctctgagtccataaggcataaaaatggcatattttgtcagatttagatttgttgaaacagagattacattttagtaaagtgaacctatacagtatgatcgataaccaacttaatgtaatctctcaatgtcacctccaataagaacatgcaatctacaagtgccagtgtaaaccagttcagggtaaagaattgaagmtactaagctaatttccaacaccacaactctcattagagttggctgtcaattacagacattcacttgtttgaaacttgaggctattatgaaaattctttaaaagtacaatgtctcttaaagaacttcaataaactaagtttttaataagtgatacaattctttatatctttttcttctaaaatctctttgttcatatcttacagcacaaggagaaaaaattatataatctcacattacattccataactcaaattatttatatgtataaataggcaggcccttactattgtattttctttaatcaattagaaatatttatttagcaaactcctactatgtataagttctctgctttgtatataatgtatatttttacaacagtcataccactagaaacattttgttgttgttttatttcagataactaaaccgagtacatgttgttactgctgagttgctgttaagctggagttaatgactaatcaccagatttggatgggagaagggaaattcactgataatatgtcacaatgcttttgtcacaagaaatcctatacacttactctgagctactggaacctgcctttatggg

SEQ ID NO: 698730 - DNA, 1147 bp, Homo sapiens
cacatgtacatgataatttttaagttacaacggaggtggcgattaagctttgaaacacaaatttggcgggagctacatgataagaacccatgaacacaaagaaggaaagaacagacactgggatctacttgaagggggagggtgggaggagggagagggcagagaagatgactactggggaccgagcttaatacctgagtgatctaaggatgcgtacaacaaactccgatgacatgtttatctatgtaacaaaacttcacatgtacccccaaacctaaaatattaaaaaaaaaaaaacccacgaatytggaaatgtcttagctcatctgagttctaatgaaagatacctctaagtggtgcaattttgtacaactttttcctgaaagagtatttctgagttttctgagaaataatgtactaacggcactaggggaaaaaagcagcaccccagatatcactgtcacatctcccaaagagaaaacaattgcagcacttgcctcacgtaagcaaatggagtcagatctgtgatcttaactccagaaaaatcgagtctgatctccttgataacctttccaaacaggctggcctggacacacttcactatgtcatcacagcttagtattttattatggttttaaaaaattacaatattctttcagaacagttcctctctggttgttgtgcagtgagttcctcacaaatagaatccaactagccaccttggaacctagcaggtactaaatgactgacttgagatcaataattgtaaattttataatacatgattaaagagatataatagcattactttaaaaagacctgaagttctctaccgaatagaaatgcattttgtaataaacaaagataaaccaaaattgtaaatccaacattttaaatgtctacaaccaggattggatcatataactactacagagctcaagacggcgttttctgaaaaagtcggccaggcctgtatgcatgctgcctctaattaaagacaacggaaatcaccacagaaaaaacaaaatcaggacaatctgatttataatatacccaccggctagattagaaataacatttctaatatatatctattatatatatactaatttatataatttatattatagttataaattgtataata

SEQ ID NO: 698731 - DNA, 1147 bp, Homo sapiens
cacatgtacatgataatttttaagttacaacggaggtggcgattaagctttgaaacacaaatttggcgggagctacatgataagaacccatgaacacaaagaaggaaagaacagacactgggatctacttgaagggggagggtgggaggagggagagggcagagaagatgactactggggaccgagcttaatacctgagtgatctaaggatgcgtacaacaaactccgatgacatgtttatctatgtaacaaaacttcacatgtacccccaaacctaaaatattaaaaaaaaaaaaacccacgaatctggaaatgtcttagctcatctgagttctaatgaaagatacctctaagtggtgcaattttgtacaactttttcctgaaagagtatttctgagttttctgagaaataatgtactaacggcactaggggaaaaaagcagcaccccagatatcactgtcacatctcccaaagagaaaacaattgcagcacttgcctcacgtaagcaaatggagtcagatctgtgatcwtaactccagaaaaatcgagtctgatctccttgataacctttccaaacaggctggcctggacacacttcactatgtcatcacagcttagtattttattatggttttaaaaaattacaatattctttcagaacagttcctctctggttgttgtgcagtgagttcctcacaaatagaatccaactagccaccttggaacctagcaggtactaaatgactgacttgagatcaataattgtaaattttataatacatgattaaagagatataatagcattactttaaaaagacctgaagttctctaccgaatagaaatgcattttgtaataaacaaagataaaccaaaattgtaaatccaacattttaaatgtctacaaccaggattggatcatataactactacagagctcaagacggcgttttctgaaaaagtcggccaggcctgtatgcatgctgcctctaattaaagacaacggaaatcaccacagaaaaaacaaaatcaggacaatctgatttataatatacccaccggctagattagaaataacatttctaatatatatctattatatatatactaatttatataatttatattatagttataaattgtataata

SEQ ID NO: 698732 - DNA, 809 bp, Homo sapiens
tatcatagatcatcctaacgagagttttcttttgtgataaggaggatgataataatgtcttcttcctgtgatctgaaaccccagggagggagagtattccatctgcaccagctttgtagatgaacagaaggtggtgataaacatctcaagagaaggagttaggaaacgttttcatttktgttttgtgttctctttctctcctaagtttgaaagtttgaaaaaattaccttgaaaggtcaattcaatttgacagtcctcttttttttttttttttttttttttttttttttttttaaatggagtctcacttcgtcgcccaggctgggttgcagtggcgcgacctcggctcactgcaagctccgcctcctgggttcaagccattctcctgcctcagcctcccaagtagctgggactacaggtgcccaccaccatgcccggctaattttttttatttgttgtacttttagtagagacagggtttcaccgtgttagccagaatggtctcgatctgctgacctcgtgatctgccggcctcggcctcccaaagtgctgggattacagtcatgagctgccgcgcccggccttgacagtcctctttgacaaaaagcgaaaaataatattctgcaaattattgcaactttgtcactaaaatttcaaaagtattcacattaaggtacaccatacccagattttagtgtttacctagtgatttgcatctatgttttctttttcaagtttctttttttctgtttcaattcaattaaacaaatatctgttgacacctaacagcccctggggtgatacaaaca

SEQ ID NO: 698733 - DNA, 2538 bp, Homo sapiens
cattatgacaccacaggggtgtgagaaataaggaatattatatgctgggattcaccaaacatatatttaagctgatcaattagggacacttccacagaacacttgagaagtgtacattcagctaaagtgccattgtcattgtgtacctgctcaattgtcagtcaagtttaagagcgtgataaatatttgtagtataatggtataaatccctctgatgacttacatgaaaaacatgcaggagcattaatcacctgctttgacattgattcccaagcgtatgagttgctgctctgattttagatcacatttgtcctcatcacttggcatatccacattgatatagacactgttttattgtagtaatagacatatgaagaataacatcacatatgaaattggaagtgtttgttccgtgaagactatacttctgttttctacagtgtaattctgtcatgttcctgtcccaatacacaaagtagaaaacatcaaagcctatgctaattcaggcaggaggatacagcttgatgctaacactgcatgaaggtatggataactttatcatatttacataygagtgattatgtatcccttttggttttcagtgtcttctcagaaacaaccggccttgaaggtattacactcttcattcatattttgaattattaactgtatagtctatgaaatatactgtatgtattgattattttgtttgaaatcccattcaggatacaagtgacaagaaagattctgttttgaacatagccacagaaataaaagatgaacaaaaatctgggacaggtaattttgcaatacacatttaatgtcatgttctctcaagatagaggagaacttcccttccccgaataaatcagcagggggctcattgaagctgctctttctgattcagcgggcctgagattctgcatttgtaataagttctggagtgatggtgattctgctgatttttggccatgatctgagtagtaagattatagacttccctacattgaaattgggaagaagaaccactggagagcagttcaagacataacaggctgaggggacagcataattgtgctttaattctacagcatgtttccatcaagaggggaaggagaacaagatgaagtactagaaattataggcgccagatcacattgctaaaaccagagggaggaagtgatcgtaataagccataaacactatagaaggagaagtaacgagaccgctgatgtagtaatcattttcctcagggaagagggattgtgaggcaggaagaagggaaaagaagttatttatttaattttagggtttgtactgaggaaacctgagggaactcacgtcagatgcatttagaatgtttgcataaaggaagatttgattttggctgctccaggaactactggaaggaggatagagtgccagaattgtgataaaccacagtcacctgttacccctctttgttattattgggcatcagagatatatgttttgttgttatcagttagtcaaatgagataaatataaatatgcatacactggctttgttgttcagagagctaacttttggataaaatagcaatttaatgaaaatactttagagaataaaatgatccttcaaaccagacttattttagaaacaaaaataatgttaaattctttaattgactcctaaaatatttatttttaatgaatattggagtgatttccaaatgaacaaccttactcatatctaatgcttgtagcaactttattgcatgtaagtatatcaaatttgataattttttatacattttgattaggtttgtatattataccttgttcccatgagtgactgacaaaactttctgaaggttaaaccagaaaatacaaaagtgtaggctcattattataccacatgggtatgaaaaataatgaataccatataataggattcaccaaacagatatccaagctgaccaattcgggacacttccactgaggagctttgtacattcatctaaagtgttattgtcattgtgcacctgctcaattgtcaggcaagtcaaagagcatgatgaatatttgtagtataatggtttaaacccttctgatgtcttgtatgaaagacatgcgcaatcctggctcacttcaactttcaccttctgggttcaagtgattctcctgtctcagtctcctgagtagctgagtttacaggtgtgcaccaccaacctggtaatttttgtatttttactagagacaggctttcaccatgttggccaggttggtctcaaactcctgacctcaagggatccacccacctcggcctcacaaagtgctgggattacaggcatgacccaccgagccctgcctacatgatttttttaaatttttttagctttttaaaaataaagatagaatgtttctgtgttgcccaaggtggtctgaaatgcctggacttctcaagtgatacttctgcctgaaccttttgagtagctgagattataggaacaagtcactgtgctcttttatgtttttaatattttataagttcctatt

SEQ ID NO: 698734 - DNA, 2538 bp, Homo sapiens
cattatgacaccacaggggtgtgagaaataaggaatattatatgctgggattcaccaaacatatatttaagctgatcaattagggacacttccacagaacacttgagaagtgtacattcagctaaagtgccattgtcattgtgtacctgctcaattgtcagtcaagtttaagagcgtgataaatatttgtagtataatggtataaatccctctgatgacttacatgaaaaacatgcaggagcattaatcacctgctttgacattgattcccaagcgtatgagttgctgctctgattttagatcacatttgtcctcatcacttggcatatccacattgatatagacactgttttattgtagtaatagacatatgaagaataacatcacatatgaaattggaagtgtttgttccgtgaagactatacttctgttttctacagtgtaattctgtcatgttcctgtcccaatacacaaagtagaaaacatcaaagcctatgctaattcaggcaggaggatacagcttgatgctaacactgcatgaaggtatggataactttatcatatttacatatgagtgattatgtatcccttttggttttcagtgtcttctcagaaacaaccggccttgaaggtattacackcttcattcatattttgaattattaactgtatagtctatgaaatatactgtatgtattgattattttgtttgaaatcccattcaggatacaagtgacaagaaagattctgttttgaacatagccacagaaataaaagatgaacaaaaatctgggacaggtaattttgcaatacacatttaatgtcatgttctctcaagatagaggagaacttcccttccccgaataaatcagcagggggctcattgaagctgctctttctgattcagcgggcctgagattctgcatttgtaataagttctggagtgatggtgattctgctgatttttggccatgatctgagtagtaagattatagacttccctacattgaaattgggaagaagaaccactggagagcagttcaagacataacaggctgaggggacagcataattgtgctttaattctacagcatgtttccatcaagaggggaaggagaacaagatgaagtactagaaattataggcgccagatcacattgctaaaaccagagggaggaagtgatcgtaataagccataaacactatagaaggagaagtaacgagaccgctgatgtagtaatcattttcctcagggaagagggattgtgaggcaggaagaagggaaaagaagttatttatttaattttagggtttgtactgaggaaacctgagggaactcacgtcagatgcatttagaatgtttgcataaaggaagatttgattttggctgctccaggaactactggaaggaggatagagtgccagaattgtgataaaccacagtcacctgttacccctctttgttattattgggcatcagagatatatgttttgttgttatcagttagtcaaatgagataaatataaatatgcatacactggctttgttgttcagagagctaacttttggataaaatagcaatttaatgaaaatactttagagaataaaatgatccttcaaaccagacttattttagaaacaaaaataatgttaaattctttaattgactcctaaaatatttatttttaatgaatattggagtgatttccaaatgaacaaccttactcatatctaatgcttgtagcaactttattgcatgtaagtatatcaaatttgataattttttatacattttgattaggtttgtatattataccttgttcccatgagtgactgacaaaactttctgaaggttaaaccagaaaatacaaaagtgtaggctcattattataccacatgggtatgaaaaataatgaataccatataataggattcaccaaacagatatccaagctgaccaattcgggacacttccactgaggagctttgtacattcatctaaagtgttattgtcattgtgcacctgctcaattgtcaggcaagtcaaagagcatgatgaatatttgtagtataatggtttaaacccttctgatgtcttgtatgaaagacatgcgcaatcctggctcacttcaactttcaccttctgggttcaagtgattctcctgtctcagtctcctgagtagctgagtttacaggtgtgcaccaccaacctggtaatttttgtatttttactagagacaggctttcaccatgttggccaggttggtctcaaactcctgacctcaagggatccacccacctcggcctcacaaagtgctgggattacaggcatgacccaccgagccctgcctacatgatttttttaaatttttttagctttttaaaaataaagatagaatgtttctgtgttgcccaaggtggtctgaaatgcctggacttctcaagtgatacttctgcctgaaccttttgagtagctgagattataggaacaagtcactgtgctcttttatgtttttaatattttataagttcctatt

SEQ ID NO: 698735 - DNA, 3727 bp, Homo sapiens
tgcctgtcactatctgttacgggtttaagggtgagtctgcattggatatttcataggttgggagaggtggaggcagaaataggtaactgaaatgttttctaaaacggaagccatatcttaattataccaagaaatattatttaatataaggataactgaccttcctcagactttgttttaccatttttttgtggaggggacatgcatgtatagactgatggtttttgttttcttttaagaaacgaacgtgctcatttttgtcatatctttttgctctgtaggtgtcgctacctactggatagtgttgcacagcctgtgacaaaggataagtttgctttggaatctgaagtagagtactgtctcgtgaaattaattttctcattctgaatctcattttttgtattattttcttctaaaacttagcgattgtctacctatcattgttttatgttagtattaaaacttttattagagataaccattttaaagaaataggagggcttaattttaattttttttttcactttgcaaataagaaatagttgataaatacgttgagaggtgtgatctgaaaaaaaaaaaatacatagtgacagaaaaatgttgtttgggaacgctttcccacaagagaggagatacaaattttgatctaggcttatctcagtaagtgtttttactttgagttgtatatcatatgagtatgactaataatacctctgtttaactgaatgtttgttacatcagatgacttattatgggaatcatgaaatcaccctgttacacacagcatatagtttctttttatttcttgtacacctattttaacatcataccatatttttgcagagagctatttctttatttttattcttggttctatataattagactaaaataatattagaaattgtggaaatttaactagacatggtatcatgtgcctgtagtcccacctattcaagagatcaagccaggagaatttcttgatcccaggagtttaagaccaagcttggcaatatagcaagagcttatctctaattttaaaaagttgtggaatattagaaatttaaattctgttctcacacctgtattagagagggtttaccctgtgttttccaagtcttttttattaagagtatactgtaaactctttatctaatcgaagaatatgcattttgtttaaaataacaacctgtttgataagcagagactcttcatatttctgtggtcagactttaacttcacaagatttttgcattgtaattaaaaaaaaatccggtcggggtctttgtatctcattctaaatttcaaatttcagaggcttttgtgcttagttattgaaaaaataattgtaaagctcctgcattcgtatgagccacttgaagctagaaaaactatttgtatgtatcttgagtacccagaataaggtcttgcatgtaagaaacattttattagtttttaatgtgaatcagcaaacagggaaatgggctttttttaatggaatgttacaggtaacataatatgcataagatatctaataattaaatctattaaatgtcttgaatgttctgaatttatcttttcttctaatgttgagaatctataagttgaggtgagttatgctgagaaaatatgtctgaatttatcttttcttctaatgttgagaatctataagttgaggtgagttatgctgagaaaatatgtcatagaataaaatgaaaattggaagagatggaaaggaaataggaaaggtggatacagcgtgttttctaatatcttccaactggaagcttagattgggaatttagattaaattttcaaagccccaaccatgttctattaaatacatatttttcaggacatacattactcttttgaattctgaataaaaattctttctccaggtgttaagttcctggaattctattgtttttttttttcctctctctgtcactctctctctctctctctctctttgtagtaagaatgtttcagctttcaggtgaatgatcatggttaactcttgggatgtgttattttayagtaaacaatctaaactttttattacataagtatttacacaaaacaaattgtcgagtaaatgctaaccagcattattaggcatatattatgaacacaagcttttcttttaagctcatatttgattgactggtcatgtctctttttttgtttgtttctccctccttcccctttgtttaaaaatgatttacctcagtctaactttttccttgcagaccacatgtctttagtgtctattctttcatttcacctctgtttctgttgtcaggatacttagttacacctttctattcagtagctatgtgtggctttcattcgtgaatcattgctccataaagtggatggttgctttgttctgtcttttttggaaggagctgaagttatacaataatttgtttttagcttttgacacacagaatagaagcaacttatactgattctgatgctagcccatttaaatatattactactaaaaactacattctcacatttttttcccacaggaagtaattcacacaaatatatatcatgcataaatattttgaaaactaaagtgattaattgacttttgattagttttgttcagtaatactctaaattacgtatgagtaaatttttgtcccagtttgttgtggttaataaaagaaactaatggatatcatagtatttgtataataatcaaccggggttgaaaggagtaacattttgagaatatctgtatcaccaatcataatcatcatctcatgtgaatctgtagataagtaaatggcagacttgaggtttgaatctacatatgagtgacttcaaagtctatcctttttgtgttagatcatgtagtaatggtggcaattatcattattttaacttgctgaatgttgttcttaaacctattgtgtctttcttctagactatttcagaaccatactttacgaacagaaggactatttctcaacaatctgcagaaaagtgtaagctatttgaaacctgactattgtattatctactgattcttttttttttttctttcttatttttttgtagacagagtgttactcactgttgccctggctggagtgcagtggcatgatcttggctcactgcaacttccacctcctgggttcaagtgattctcctgcctcagcctcctgagtagctgggattacaggtgtgcaccaccacacctggctatttttgtatttttggtagagatggaatttcaccatgttggccaggctggtcttgaacacctgacctcttgtatgatctgcctgcatgggcccacaaaagtgctgggattaaagttgtgagcccccacacccggttcttatttattgattcttaattacacgcatttcatctactcttgactttttttttactgtagtagatgctgcatgtggcattgaaaaaacaaaatatggaacctttttttgaagaccaaaatgttgataaggtaaatgaagatgtggttaaaagccaacatagaataatcagagtcgagtcctgttcaccaactcactcttatctgttaatgatctctagttttacaatggtaaattgttttatttggaaaatatttttcccatgctttattcacttgccatctccctgtctttataacgatgacaaggatcctataagggaatggaagttctccaggtaataatagaaaagaagtgtaacaaca

SEQ ID NO: 698736 - DNA, 3727 bp, Homo sapiens
tgcctgtcactatctgttacgggtttaagggtgagtctgcattggatatttcataggttgggagaggtggaggcagaaataggtaactgaaatgttttctaaaacggaagccatatcttaattataccaagaaatattatttaatataaggataactgaccttcctcagactttgttttaccatttttttgtggaggggacatgcatgtatagactgatggtttttgttttcttttaagaaacgaacgtgctcatttttgtcatatctttttgctctgtaggtgtcgctacctactggatagtgttgcacagcctgtgacaaaggataagtttgctttggaatctgaagtagagtactgtctcgtgaaattaattttctcattctgaatctcattttttgtattattttcttctaaaacttagcgattgtctacctatcattgttttatgttagtattaaaacttttattagagataaccattttaaagaaataggagggcttaattttaattttttttttcactttgcaaataagaaatagttgataaatacgttgagaggtgtgatctgaaaaaaaaaaaatacatagtgacagaaaaatgttgtttgggaacgctttcccacaagagaggagatacaaattttgatctaggcttatctcagtaagtgtttttactttgagttgtatatcatatgagtatgactaataatacctctgtttaactgaatgtttgttacatcagatgacttattatgggaatcatgaaatcaccctgttacacacagcatatagtttctttttatttcttgtacacctattttaacatcataccatatttttgcagagagctatttctttatttttattcttggttctatataattagactaaaataatattagaaattgtggaaatttaactagacatggtatcatgtgcctgtagtcccacctattcaagagatcaagccaggagaatttcttgatcccaggagtttaagaccaagcttggcaatatagcaagagcttatctctaattttaaaaagttgtggaatattagaaatttaaattctgttctcacacctgtattagagagggtttaccctgtgttttccaagtcttttttattaagagtatactgtaaactctttatctaatcgaagaatatgcattttgtttaaaataacaacctgtttgataagcagagactcttcatatttctgtggtcagactttaacttcacaagatttttgcattgtaattaaaaaaaaatccggtcggggtctttgtatctcattctaaatttcaaatttcagaggcttttgtgcttagttattgaaaaaataattgtaaagctcctgcattcgtatgagccacttgaagctagaaaaactatttgtatgtatcttgagtacccagaataaggtcttgcatgtaagaaacattttattagtttttaatgtgaatcagcaaacagggaaatgggctttttttaatggaatgttacaggtaacataatatgcataagatatctaataattaaatctattaaatgtcttgaatgttctgaatttatcttttcttctaatgttgagaatctataagttgaggtgagttatgctgagaaaatatgtctgaatttatcttttcttctaatgttgagaatctataagttgaggtgagttatgctgagaaaatatgtcatagaataaaatgaaaattggaagagatggaaaggaaataggaaaggtggatacagcgtgttttctaatatcttccaactggaagcttagattgggaatttagattaaattttcaaagccccaaccatgttctattaaatacatatttttcaggacatacattactcttttgaattctgaataaaaattctttctccaggtgttaagttcctggaattctattgtttttttttttcctctctctgtcactctctctctctctctctctctttgtagtaagaatgtttcagctttcaggtgaatgatcatggttaactcttgggatgtgttattttatagtaaacaatctaaactttttattacrtaagtatttacacaaaacaaattgtcgagtaaatgctaaccagcattattaggcatatattatgaacacaagcttttcttttaagctcatatttgattgactggtcatgtctctttttttgtttgtttctccctccttcccctttgtttaaaaatgatttacctcagtctaactttttccttgcagaccacatgtctttagtgtctattctttcatttcacctctgtttctgttgtcaggatacttagttacacctttctattcagtagctatgtgtggctttcattcgtgaatcattgctccataaagtggatggttgctttgttctgtcttttttggaaggagctgaagttatacaataatttgtttttagcttttgacacacagaatagaagcaacttatactgattctgatgctagcccatttaaatatattactactaaaaactacattctcacatttttttcccacaggaagtaattcacacaaatatatatcatgcataaatattttgaaaactaaagtgattaattgacttttgattagttttgttcagtaatactctaaattacgtatgagtaaatttttgtcccagtttgttgtggttaataaaagaaactaatggatatcatagtatttgtataataatcaaccggggttgaaaggagtaacattttgagaatatctgtatcaccaatcataatcatcatctcatgtgaatctgtagataagtaaatggcagacttgaggtttgaatctacatatgagtgacttcaaagtctatcctttttgtgttagatcatgtagtaatggtggcaattatcattattttaacttgctgaatgttgttcttaaacctattgtgtctttcttctagactatttcagaaccatactttacgaacagaaggactatttctcaacaatctgcagaaaagtgtaagctatttgaaacctgactattgtattatctactgattcttttttttttttctttcttatttttttgtagacagagtgttactcactgttgccctggctggagtgcagtggcatgatcttggctcactgcaacttccacctcctgggttcaagtgattctcctgcctcagcctcctgagtagctgggattacaggtgtgcaccaccacacctggctatttttgtatttttggtagagatggaatttcaccatgttggccaggctggtcttgaacacctgacctcttgtatgatctgcctgcatgggcccacaaaagtgctgggattaaagttgtgagcccccacacccggttcttatttattgattcttaattacacgcatttcatctactcttgactttttttttactgtagtagatgctgcatgtggcattgaaaaaacaaaatatggaacctttttttgaagaccaaaatgttgataaggtaaatgaagatgtggttaaaagccaacatagaataatcagagtcgagtcctgttcaccaactcactcttatctgttaatgatctctagttttacaatggtaaattgttttatttggaaaatatttttcccatgctttattcacttgccatctccctgtctttataacgatgacaaggatcctataagggaatggaagttctccaggtaataatagaaaagaagtgtaacaaca

SEQ ID NO: 698737 - DNA, 1931 bp, Homo sapiens
aaacctattgaaataaaaaataaattttaaaaaaaggaagtaaaccacttaaaaaagaataaacatgtattttcttaaatgaaatcctgacccacagaaactgtataagagaaaatatactagacaatatatgtatatttcctgagatgttcatttgttatacaaaaatagcaaactaatatagagcttctgtgggtcctgatttgagaaatgctttagctgggtggttctgtcttggtcaatatgttgattaagcctgcagtcatccgaaggcttgactgaggctagggcatccaatttcaagatggctcacttaacatggctagcaagtcaatgctgtctgttagcaggagacctctgtaatgtaatgcattaagctccgtagggttgcttgaatgtccttgcagtatggtarctactttcacccagggtgagcaaggtggaagctgccatatgttttataatctagcctaggaaatttgaactagctttttgataacacaggtcagccatatttaatatgagagagaactgcacaaggcatggatagcagaagtgaaaatcaccgggggccattttggaggctggctgccacagagattagcaactggaatactgctttcaaagaaacagctttggctttttatgttttctctattatgtctttggttttttattcattgatttcagcttttatccttattatttccatcattttaatttcattcagcttaatttgctgggatttttgagatggatgcttagatcattggagtttttttctttttcttttttttgagacagggtcttactgtgtcactcaggctatagtgcagtgatgaatcgtagctcatagcagccttaaattactgagctcaagtgatccaatcctccctcctcagccttccaagtagctgggactacaggtgtgtgtcaccatgccaaattaatttttttttttttttttttttttttttttttttttttgctgtgacaggtctcactatgttgcctgggctggtattgaagttctggcctcaagcaaacctcctgccttggccttccaaaatgttgggattatacatgtgagccaccacacctatcatatcagtttttcagtactttttttgttttgttttcaaatacatgtgtttacgtttatagattccccccaccccagatttagtcaaatcccacaagttttctacttttgtaaaattttattgaagtataatatacctgaaactgtgccatcttaaatgtacaggtggatgaattatcacaatgtaaataaacctctgtaactagcaccaagataaaaaaaaaactactagttatttaaacctaggtttgataatattaccaatgactttaaagttaatgtctgataattctaatacctgaagtacttgtgggtttgtttcttttttctgttttttattttgctcacagttttcagtcacttgatcatatatcctggcattcctggtaacatatacatacttctcattgttaaaaattgtacagctctagcataaagagtcctacaatgggtacttatcccccatctataactttttttacactttgttttgtttttactctttctagactttattattttactttttggataagtaatatagttacaagtttctaagataaaaaattacgaaagagtgttagtgaaaagtctcattcttgcaatgccagcaccctcttcctgtcctacaggtaaccaccatgattaatttctggtatatcattccagagatagtttaatcctcatatatacaagcaaattatgtatactgcattcctgtgtctgttctgtactttgcttttttcacctaacattatattttggtgagttttctgtttagtacataatacattttctcatattttaaacaactgtattctgttgtatg

SEQ ID NO: 698738 - DNA, 2126 bp, Homo sapiens
aaaattagccaggcgtagtggtgtgagcctgtggtcccagctactcgggaggctgaggagggaggctcacttgagcccaggaggtggagggtagtaagccaagattgtgctactgcactccagccggggtgacagagtgagaccccatctcaaaaaaaaaaaaaaaaaataaagactatcattttccccttatgaatggatttaattatatcctacagtttttaatatgtagaattgatgatgaatttgccttattttatcttcaagctatgggctatttaaaagtatacttttagaaagtttctaaaattgttaccagaaattatgatctctccactttctttgaaattttttacttgttttaacactcgtctatatggttaatttttgaacttgtccgtctatatggttaatttttgaacttgtccacagtttcttgaagggaagtctatttctgcagttaaatctcatgttctgtatgtgtgcattgagtctattttttcataattttaaatcttcatcctccctaattatttttatactttatttactgagagatatattaaatatcctactagaagcatggatttgtctgtctcctcatctgtcaacttttgctttttgaggctgtacttgggtgcatatgattcaaaaaatatatatctttttttaatttgaacttttatcaaaatgaaatgttttccttcatttatgtatgctttcaacattatgtatgatatagctatagtaactggttagactttgcactgtgtatctttcgtgtgtgtgtgtgtgtgtgtgtgtgtgtgtgtttttccactgtgctgcccaggctatagtgcaggggctgttcacagacgtgtctgtggctccctgctgccttaaactcctgggctcaaatgatcctcctacctcagtctttagagtgatgtgtgccaccactgccaaataattgtttttatttctttagagatagaatttggctatattgcccaggctggtcttgagttcttggtctcaagtgatcctctcacctctgcttcctgagtcactgggattacaggcatgtgccgccaagtccggctcctctgatacatattttaataccttttaaaatcattctatatctttgtattttaaatatgacttataaatagcatggaatgggattttaacaatttatccatctttaactggattacttagtccatttgcatgtatttgtattctgacatacttagattctgtatagatggtgagtggtgtgtatgtacatgcatgtgtgtttgtgtcattttgtcactttctatttatcctacttatgtttcttttttcctttcttgccttcttttcaattggtgggattttttttcttctctagtcattttaagttagtctttgtttatattcttttagtaactgtcatgctaatttaaatgtgcatatttaagttatgaaagttgaaaatttatcctcctcctgggtgataggataacttaggaatactttcattgcattaaactcctcttgagttatgctacaacagtatattttcaactttttgttttgacataattgcagattcacaggtgcttttaagaaataatataaagaaatccaatatagtcttcactcagtttctcccaatggtaacgtcttgcataactaccttgttcagatttcaccagttttatgtgcacttttaggtttttttgtgtatttagttctatgaaattttatcgtgtacatagattagatacctaaccaccatcaccatcgtcaagatacagaacagttccatcagaaggatggatcccttgtgctacccattttatagtcacaaacacgttcctcactycctgacccctggcaaccactaatgggtttttcatctctgtgactttatttcaagaacacatgtaaatgaaaccacacactgtctaatattttgagattgagtttttttattcagcataattatcttgtgacccatcaaagttgttttcatatattttatcatttttctttttatatttcatgggacattacttctattgttttatacatttcacatttgtttagttttatccatatattcacctgtctttttcctgctcttcatttct

SEQ ID NO: 698739 - DNA, 2126 bp, Homo sapiens
aaaattagccaggcgtagtggtgtgagcctgtggtcccagctactcgggaggctgaggagggaggctcacttgagcccaggaggtggagggtagtaagccaagattgtgctactgcactccagccggggtgacagagtgagaccccatctcaaaaaaaaaaaaaaaaaataaagactatcattttccccttatgaatggatttaattatatcctacagtttttaatatgtagaattgatgatgaatttgccttattttatcttcaagctatgggctatttaaaagtatacttttagaaagtttctaaaattgttaccagaaattatgatctctccactttctttgaaattttttacttgttttaacactcgtctatatggttaatttttgaacttgtccgtctatatggttaatttttgaacttgtccacagtttcttgaagggaagtctatttctgcagttaaatctcatgttctgtatgtgtgcattgagtctattttttcataattttaaatcttcatcctccctaattatttttatactttatttactgagagatatattaaatatcctactagaagcatggatttgtctgtctcctcatctgtcaacttttgctttttgaggctgtacttgggtgcatatgattcaaaaaatatatatctttttttaatttgaacttttatcaaaatgaaatgttttccttcatttatgtatgctttcaacattatgtatgatatagctatagtaactggttagactttgcactgtgtatctttcgtgtgtgtgtgtgtgtgtgtgtgtgtgtgtgtttttccactgtgctgcccaggctatagtgcaggggctgttcacagacgtgtctgtggctccctgctgccttaaactcctgggctcaaatgatcctcctacctcagtctttagagtgatgtgtgccaccactgccaaataattgtttttatttctttagagatagaatttggctatattgcccaggctggtcttgagttcttggtctcaagtgatcctctcacctctgcttcctgagtcactgggattacaggcatgtgccgccaagtccggctcctctgatacatattttaataccttttaaaatcattctatatctttgtattttaaatatgacttataaatagcatggaatgggattttaacaatttatccatctttaactggattacttagtccatttgcatgtatttgtattctgacatacttagattctgtatagatggtgagtggtgtgtatgtacatgcatgtgtgtttgtgtcattttgtcactttctatttatcctacttatgtttcttttttcctttcttgccttcttttcaattggtgggattttttttcttctctagtcattttaagttagtctttgtttatattcttttagtaactgtcatgctaatttaaatgtgcatatttaagttatgaaagttgaaaatttatcctcctcctgggtgataggataacttaggaatactttcattgcattaaactcctcttgagttatgctacaacagtatattttcaactttttgttttgacataattgcagattcacaggtgcttttaagaaataatataaagaaatccaatatagtcttcactcagtttctcccaatggtaacgtcttgcataactaccttgttcagatttcaccagttttatgtgcacttttaggtttttttgtgtatttagttctatgaaattttatcgtgtacatagattagatacctaaccaccatcaccatcgtcaagatacagaacagttccatcagaaggatggatcccttgtgctacccattttatagtcacaaacacgttcctcactccctgacccctggcaaccactaatgkgtttttcatctctgtgactttatttcaagaacacatgtaaatgaaaccacacactgtctaatattttgagattgagtttttttattcagcataattatcttgtgacccatcaaagttgttttcatatattttatcatttttctttttatatttcatgggacattacttctattgttttatacatttcacatttgtttagttttatccatatattcacctgtctttttcctgctcttcatttct

SEQ ID NO: 698740 - DNA, 2126 bp, Homo sapiens
aaaattagccaggcgtagtggtgtgagcctgtggtcccagctactcgggaggctgaggagggaggctcacttgagcccaggaggtggagggtagtaagccaagattgtgctactgcactccagccggggtgacagagtgagaccccatctcaaaaaaaaaaaaaaaaaataaagactatcattttccccttatgaatggatttaattatatcctacagtttttaatatgtagaattgatgatgaatttgccttattttatcttcaagctatgggctatttaaaagtatacttttagaaagtttctaaaattgttaccagaaattatgatctctccactttctttgaaattttttacttgttttaacactcgtctatatggttaatttttgaacttgtccgtctatatggttaatttttgaacttgtccacagtttcttgaagggaagtctatttctgcagttaaatctcatgttctgtatgtgtgcattgagtctattttttcataattttaaatcttcatcctccctaattatttttatactttatttactgagagatatattaaatatcctactagaagcatggatttgtctgtctcctcatctgtcaacttttgctttttgaggctgtacttgggtgcatatgattcaaaaaatatatatctttttttaatttgaacttttatcaaaatgaaatgttttccttcatttatgtatgctttcaacattatgtatgatatagctatagtaactggttagactttgcactgtgtatctttcgtgtgtgtgtgtgtgtgtgtgtgtgtgtgtgtttttccactgtgctgcccaggctatagtgcaggggctgttcacagacgtgtctgtggctccctgctgccttaaactcctgggctcaaatgatcctcctacctcagtctttagagtgatgtgtgccaccactgccaaataattgtttttatttctttagagatagaatttggctatattgcccaggctggtcttgagttcttggtctcaagtgatcctctcacctctgcttcctgagtcactgggattacaggcatgtgccgccaagtccggctcctctgatacatattttaataccttttaaaatcattctatatctttgtattttaaatatgacttataaatagcatggaatgggattttaacaatttatccatctttaactggattacttagtccatttgcatgtatttgtattctgacatacttagattctgtatagatggtgagtggtgtgtatgtacatgcatgtgtgtttgtgtcattttgtcactttctatttatcctacttatgtttcttttttcctttcttgccttcttttcaattggtgggattttttttcttctctagtcattttaagttagtctttgtttatattcttttagtaactgtcatgctaatttaaatgtgcatatttaagttatgaaagttgaaaatttatcctcctcctgggtgataggataacttaggaatactttcattgcattaaactcctcttgagttatgctacaacagtatattttcaactttttgttttgacataattgcagattcacaggtgcttttaagaaataatataaagaaatccaatatagtcttcactcagtttctcccaatggtaacgtcttgcataactaccttgttcagatttcaccagttttatgtgcacttttaggtttttttgtgtatttagttctatgaaattttatcgtgtacatagattagatacctaaccaccatcaccatcgtcaagatacagaacagttccatcagaaggatggatcccttgtgctacccattttatagtcacaaacacgttcctcactccctgacccctggcaaccactaatgggtttttcatctctgtgactttatttcaagaacacatgtaaatgaaaccacacactgtctaatattttgagattgagtttttttattcagcataattatcttrtgacccatcaaagttgttttcatatattttatcatttttctttttatatttcatgggacattacttctattgttttatacatttcacatttgtttagttttatccatatattcacctgtctttttcctgctcttcatttct

SEQ ID NO: 698741 - DNA, 2126 bp, Homo sapiens
aaaattagccaggcgtagtggtgtgagcctgtggtcccagctactcgggaggctgaggagggaggctcacttgagcccaggaggtggagggtagtaagccaagattgtgctactgcactccagccggggtgacagagtgagaccccatctcaaaaaaaaaaaaaaaaaataaagactatcattttccccttatgaatggatttaattatatcctacagtttttaatatgtagaattgatgatgaatttgccttattttatcttcaagctatgggctatttaaaagtatacttttagaaagtttctaaaattgttaccagaaattatgatctctccactttctttgaaattttttacttgttttaacactcgtctatatggttaatttttgaacttgtccgtctatatggttaatttttgaacttgtccacagtttcttgaagggaagtctatttctgcagttaaatctcatgttctgtatgtgtgcattgagtctattttttcataattttaaatcttcatcctccctaattatttttatactttatttactgagagatatattaaatatcctactagaagcatggatttgtctgtctcctcatctgtcaacttttgctttttgaggctgtacttgggtgcatatgattcaaaaaatatatatctttttttaatttgaacttttatcaaaatgaaatgttttccttcatttatgtatgctttcaacattatgtatgatatagctatagtaactggttagactttgcactgtgtatctttcgtgtgtgtgtgtgtgtgtgtgtgtgtgtgtgtttttccactgtgctgcccaggctatagtgcaggggctgttcacagacgtgtctgtggctccctgctgccttaaactcctgggctcaaatgatcctcctacctcagtctttagagtgatgtgtgccaccactgccaaataattgtttttatttctttagagatagaatttggctatattgcccaggctggtcttgagttcttggtctcaagtgatcctctcacctctgcttcctgagtcactgggattacaggcatgtgccgccaagtccggctcctctgatacatattttaataccttttaaaatcattctatatctttgtattttaaatatgacttataaatagcatggaatgggattttaacaatttatccatctttaactggattacttagtccatttgcatgtatttgtattctgacatacttagattctgtatagatggtgagtggtgtgtatgtacatgcatgtgtgtttgtgtcattttgtcactttctatttatcctacttatgtttcttttttcctttcttgccttcttttcaattggtgggattttttttcttctctagtcattttaagttagtctttgtttatattcttttagtaactgtcatgctaatttaaatgtgcatatttaagttatgaaagttgaaaatttatcctcctcctgggtgataggataacttaggaatactttcattgcattaaactcctcttgagttatgctacaacagtatattttcaactttttgttttgacataattgcagattcacaggtgcttttaagaaataatataaagaaatccaatatagtcttcactcagtttctcccaatggtaacgtcttgcataactaccttgttcagatttcaccagttttatgtgcacttttaggtttttttgtgtatttagttctatgaaattttatcgtgtacatagattagatacctaaccaccatcaccatcgtcaagatacagaacagttccatcagaaggatggatcccttgtgctacccattttatagtcacaaacacgttcctcactccctgacccctggcaaccactaatgggtttttcatctctgtgactttatttcaagaacacatgtaaatgaaaccacacactgtctaatattttgagattgagtttttttattcagcataattatcttgtgayccatcaaagttgttttcatatattttatcatttttctttttatatttcatgggacattacttctattgttttatacatttcacatttgtttagttttatccatatattcacctgtctttttcctgctcttcatttct

SEQ ID NO: 698742 - DNA, 2126 bp, Homo sapiens
aaaattagccaggcgtagtggtgtgagcctgtggtcccagctactcgggaggctgaggagggaggctcacttgagcccaggaggtggagggtagtaagccaagattgtgctactgcactccagccggggtgacagagtgagaccccatctcaaaaaaaaaaaaaaaaaataaagactatcattttccccttatgaatggatttaattatatcctacagtttttaatatgtagaattgatgatgaatttgccttattttatcttcaagctatgggctatttaaaagtatacttttagaaagtttctaaaattgttaccagaaattatgatctctccactttctttgaaattttttacttgttttaacactcgtctatatggttaatttttgaacttgtccgtctatatggttaatttttgaacttgtccacagtttcttgaagggaagtctatttctgcagttaaatctcatgttctgtatgtgtgcattgagtctattttttcataattttaaatcttcatcctccctaattatttttatactttatttactgagagatatattaaatatcctactagaagcatggatttgtctgtctcctcatctgtcaacttttgctttttgaggctgtacttgggtgcatatgattcaaaaaatatatatctttttttaatttgaacttttatcaaaatgaaatgttttccttcatttatgtatgctttcaacattatgtatgatatagctatagtaactggttagactttgcactgtgtatctttcgtgtgtgtgtgtgtgtgtgtgtgtgtgtgtgtttttccactgtgctgcccaggctatagtgcaggggctgttcacagacgtgtctgtggctccctgctgccttaaactcctgggctcaaatgatcctcctacctcagtctttagagtgatgtgtgccaccactgccaaataattgtttttatttctttagagatagaatttggctatattgcccaggctggtcttgagttcttggtctcaagtgatcctctcacctctgcttcctgagtcactgggattacaggcatgtgccgccaagtccggctcctctgatacatattttaataccttttaaaatcattctatatctttgtattttaaatatgacttataaatagcatggaatgggattttaacaatttatccatctttaactggattacttagtccatttgcatgtatttgtattctgacatacttagattctgtatagatggtgagtggtgtgtatgtacatgcatgtgtgtttgtgtcattttgtcactttctatttatcctacttatgtttcttttttcctttcttgccttcttttcaattggtgggattttttttcttctctagtcattttaagttagtctttgtttatattcttttagtaactgtcatgctaatttaaatgtgcatatttaagttatgaaagttgaaaatttatcctcctcctgggtgataggataacttaggaatactttcattgcattaaactcctcttgagttatgctacaacagtatattttcaactttttgttttgacataattgcagattcacaggtgcttttaagaaataatataaagaaatccaatatagtcttcactcagtttctcccaatggtaacgtcttgcataactaccttgttcagatttcaccagttttatgtgcacttttaggtttttttgtgtatttagttctatgaaattttatcgtgtacatagattagatacctaaccaccatcaccatcgtcaagatacagaacagttccatcagaaggatggatcccttgtgctacccattttatagtcacaaacacgttcctcactccctgacccctggcaaccactaatgggtttttcatctctgtgactttatttcaagaacacatgtaaatgaaaccacacactgtctaatattttgagattgagtttttttattcagcataattatcttgtgacccatcaaagttgttttsatatattttatcatttttctttttatatttcatgggacattacttctattgttttatacatttcacatttgtttagttttatccatatattcacctgtctttttcctgctcttcatttct

SEQ ID NO: 698743 - DNA, 651 bp, Homo sapiens
tactatgcctggctaatttttaaattttttttgtagagacggagtctcgttatrttgcccaggttgttctcaaactcctggcctcactcaggtgatcctcccacctcgacctcccagagtggtgggattacaggcatgagccaccatacccagctcaatcaattattttcttcaaggtcttaagtttttattctgtattccagatgagattagaatatatctgccatttcaataaaagttccattggaattttgattcagagcacaatgatctatgcattaatctgaaggaaataaaagaaaaacccgtagtgttatttattttgctttctgagagcatgatatgttttttcacttaaatcaactcttagtttagttttcagtagtttaatttgtatcaattctgtatatttcttattaaggttattcctgtgtgctttatatttttgttgttactagaaatgaagtttccatatttctgactggttattgataagaaaaacagactgcaatgtttgtgttgcattcagctaccttgaatttcattttctttttttggagacagggtcttgctctgttgcccagtctggagtgcagtgatgcagtcttggctcacagcaacctctgcctcctgggctcaagcgagcctctc

SEQ ID NO: 698744 - DNA, 651 bp, Homo sapiens
tactatgcctggctaatttttaaattttttttgtagagacggagtctcgttatgttgcccaggttgttctcaaactcctggcctcactcaggtgatcctcccacctcgacctcccagagtggtgggattacaggcatgagccaccatacccagctcaatcaattattttcttcaaggtcttaagtttttattctgtattccagatgagattagaatatatctgccatttcaataaaagttccattggaattttgattcagagcacaatgatctatgcattaatctgaaggaaataaaagaaaaacccrtagtgttatttattttgctttctgagagcatgatatgttttttcacttaaatcaactcttagtttagttttcagtagtttaatttgtatcaattctgtatatttcttattaaggttattcctgtgtgctttatatttttgttgttactagaaatgaagtttccatatttctgactggttattgataagaaaaacagactgcaatgtttgtgttgcattcagctaccttgaatttcattttctttttttggagacagggtcttgctctgttgcccagtctggagtgcagtgatgcagtcttggctcacagcaacctctgcctcctgggctcaagcgagcctctc

SEQ ID NO: 698745 - DNA, 612 bp, Homo sapiens
gcagtggcgtgataactttatctcattttaattgttcctcttgttttgatttcatagaattgtctacaactttcagaaaatgttaaataagatgatcgtagttctcattcattcgacaagagtgacatgactcattttgtttctgcttttggtagaagcacctctcatgtatcacctttggctgggctgactttccccactccctggtgaaatttccaattctcttttatggggtctaaattctgatataaatattacattcatgccaggtgcccaacaaaattctctgtaagagttatgayagaatgacaaggtaatatacagaagaacaaaaatgaccgtttaaggaagaaatctgagaagaaaaatgactcctgctagagatgtacctactaaggcatggattccttccagtcattcattagagttcgtgcttgactctagctgagaatgaaagtaatgtggaactatcacttttaatggcaaaaacagcagtgacttttacaccaatctaatggttccatcccatcattaccttagattctaaactaataggagggaggctccaaatgtcaattgttaataaacttggaaccacactggccacagaag

SEQ ID NO: 698746 - DNA, 588 bp, Homo sapiens
tgtctacaacttgactataagaagtatatgtgccgggcagggtggctcacgcctgtaatcccagmactttcggaggccgaggcgggcggatcacaacgtcaggagatcaagaccatcctggctaacacggtgaaaccccgtctctactaaaaatacaaaaaaaaaattagctgggcgtggtggcgggcacctgtagtccagctactcgggaggctgaggcaggagaatggcatgaacccgggaggcggagcttacagtgagccgagatcgcatcactgcactccagcctgggtgacagagcgatactccatctcaaaaaaaaaaaaaaaaagagaagtgtatgttagaatctaggggggtatgggaagatttttattctgatacgcttctccccattcataatcactacttttgacaattccagatagggcgcatgtcacattgatgtaggagttaagaagaaactacttaggcagatagtgagggtacaggagtccttggtaaggtctccctttttaacgaaaagcagcccccaaatcatattctaacaaagagcagcctgcaaaatcgagctacagacatagacat

SEQ ID NO: 698747 - DNA, 588 bp, Homo sapiens
tgtctacaacttgactataagaagtatatgtgccgggcagggtggctcacgcctgtaatcccagaactttcggaggccgaggcgggyggatcacaacgtcaggagatcaagaccatcctggctaacacggtgaaaccccgtctctactaaaaatacaaaaaaaaaattagctgggcgtggtggcgggcacctgtagtccagctactcgggaggctgaggcaggagaatggcatgaacccgggaggcggagcttacagtgagccgagatcgcatcactgcactccagcctgggtgacagagcgatactccatctcaaaaaaaaaaaaaaaaagagaagtgtatgttagaatctaggggggtatgggaagatttttattctgatacgcttctccccattcataatcactacttttgacaattccagatagggcgcatgtcacattgatgtaggagttaagaagaaactacttaggcagatagtgagggtacaggagtccttggtaaggtctccctttttaacgaaaagcagcccccaaatcatattctaacaaagagcagcctgcaaaatcgagctacagacatagacat

SEQ ID NO: 698748 - DNA, 1343 bp, Homo sapiens
ctggaaggtaattaattcccccataaaatacaccactgtttggaatcatgcaagtctcagctgatcttgagacagccctgtcatgtcggtccaatctaaagcaggctctgaaccccagtcacttgtgaatgccttgctctgctttatttttttccagggaatcatcatcctaagaattgatcttatttattcacttgcttatagttagwaagcaccacaaaacagttactgctctgtttatagggatgagaatagtttcacttgcaacttcgcttttaagaagagaattctttctgtcttggttttaaacactaactcattagtctgtctatactgctgggctaaggcatttcttaaggacaaacttaggcacaaggccacactgcaagtatatatgtggtttctttagaatatcaaatcctaaggtgtgtcaatattgagagtctgctgaaattgttcaagggatttaactggtacatcaaaaatgggttttaggatgcccaaatatttatcttttagttttggagtctgttgtttgagatctaggatgtctcaggagggtgtcatgacaatcctcttgtgtttacccaagtatgcaaggtaaacaacaaatgaatcattttctgagttgccatgacatttaaggaatgttgagaagtactgcacagacacaactaaatccttgctgtgcccttcataaatacctatgcctttcctggtacagaagacatgctccagtgctctcctgacccttgtctcggtccattcgtgttgctgaaacagaatatcatggactagatagcttataaacaacagaaatagatttctcacttttctaaatctaagatcaaagagccagcaggtctggtgtctggtgagggtttgtttactggttcattgatggtgccttcttacttagtcctcacataaattcagcttgcaaacaagctgagggatcttgccacatttatgagggctctgtcttcatgacccaaatacttcccaaaggccccacctaccgatatcatctccttagtggataggattttaatgtatcaatttggtggcaacacacactttcagaccacagcactcctcaaattcctggacttttggtaaaccagatggaagttatcatcatatttaacaaaaattgcaataatggtacagtgcctgctacaatttatatagtctttgaatattgttgttggcattaacagtgaatttttataaataaaaataaataattttattggtttgaggttgatgaaaccaaacagaagagtcagtaaaccccatttgataaaggaaaacatacaggaaattttaaaacaagcaaaaca

SEQ ID NO: 698749 - DNA, 1343 bp, Homo sapiens
ctggaaggtaattaattcccccataaaatacaccactgtttggaatcatgcaagtctcagctgatcttgagacagccctgtcatgtcggtccaatctaaagcaggctctgaaccccagtcacttgtgaatgccttgctctgctttatttttttccagggaatcatcatcctaagaattgatcttatttattcacttgcttatagttagaaagcaccacaaaacagttactgctctgtttatagggatgagaatagtttcacttgcaacttygcttttaagaagagaattctttctgtcttggttttaaacactaactcattagtctgtctatactgctgggctaaggcatttcttaaggacaaacttaggcacaaggccacactgcaagtatatatgtggtttctttagaatatcaaatcctaaggtgtgtcaatattgagagtctgctgaaattgttcaagggatttaactggtacatcaaaaatgggttttaggatgcccaaatatttatcttttagttttggagtctgttgtttgagatctaggatgtctcaggagggtgtcatgacaatcctcttgtgtttacccaagtatgcaaggtaaacaacaaatgaatcattttctgagttgccatgacatttaaggaatgttgagaagtactgcacagacacaactaaatccttgctgtgcccttcataaatacctatgcctttcctggtacagaagacatgctccagtgctctcctgacccttgtctcggtccattcgtgttgctgaaacagaatatcatggactagatagcttataaacaacagaaatagatttctcacttttctaaatctaagatcaaagagccagcaggtctggtgtctggtgagggtttgtttactggttcattgatggtgccttcttacttagtcctcacataaattcagcttgcaaacaagctgagggatcttgccacatttatgagggctctgtcttcatgacccaaatacttcccaaaggccccacctaccgatatcatctccttagtggataggattttaatgtatcaatttggtggcaacacacactttcagaccacagcactcctcaaattcctggacttttggtaaaccagatggaagttatcatcatatttaacaaaaattgcaataatggtacagtgcctgctacaatttatatagtctttgaatattgttgttggcattaacagtgaatttttataaataaaaataaataattttattggtttgaggttgatgaaaccaaacagaagagtcagtaaaccccatttgataaaggaaaacatacaggaaattttaaaacaagcaaaaca

SEQ ID NO: 698750 - DNA, 812 bp, Homo sapiens
agaacacaaaattataggtcctaactatagtagtggtatatatgtacatggtaatgattaagtcaaacatggattatgaaagactcactttaaaagtacagtcttatggtgcttaaatttgcctttttgtttttaaaccactttatcaaagtgtaattgacaaaagctgttacttaatgtatacaacttaataagttttgagataaggataagcccaggaaaccatcaccaccaccatctgtgccacaaacattcattctctccaaaatttccttccctcatttttcattgttctctttgtgataaaaccacttacatcacagcaacctgtagcaaatttttaagtatataatacagtattgataagtataggcaatatattatatgatttaacattgcaaaaataaaactaattacaaatgaatctatttaaatataatttggcagtgctggataattgtggttacatttgcatgaatgtctcccagaatcaggtatgagcatcataacakagatttttgttgccatgggctttttttctttaagaacctttctgttctgtgtgtaaatgtttaatattctcacttctcacaagggctatttatggaatcttagcttatatattcctctctagcctctaaagcttacactttaaattaatctgttttttttttctttttttgtttcatctttattcactccatcctacccagaagcagaaaccccactattttgcacaaaacaaaaatgtcagcttatttttcctccgcctagacaggccatctttcttctgggaccttatgttcccttca

SEQ ID NO: 698751 - DNA, 1903 bp, Homo sapiens
tggaacagggagtgactgacaccaagggtccaggcaacagccagaaatgaaaggcacattcttgggctcataatggtcagatagtggaggggcttacatagggccacatatctgtcaaaggccatggctatgagcagcaccatctccacaccaccaatgacgtggatgaagaagatttgagcgatgcagcctccaaaggagatgactttgcgctttctgaacaggtcataaatcatcttgggagaagtgacagagcaggctcctaagtcaatgaaggagagactggccagtagaaagtacatgggggagtgtaagtgagggtcagtggtcacagaaaacacaatgaggatgtttccagtaatgcttgccacatagagcacagaggaaaacactaggaggaggagctggatctcccatgaatgagtgagtcccagaaacaaaaactcagataccactgagtgattctctccatccattggtccagccaactgggctgtggctaaaattatgagaactaagaaaatggggaggaaattgtgattatgaagataataatatgtactaaaatcaatattgcaatgtcactatgaataaatagtatacagttattctgttcctcacatattaaaaacaaaaaatcaacataatattatcacaacatgtgagctgcaacctgatttaaacccatcatcaatactttcagtgtaatgtctgatctaaaattaacagattaggtaagaacaagattcctgactatccatgaaattcatcaggtgtttaaatgacctgtgatattaactattcctcatttccaacatattccatttgtacttatacatattcttataatttccttcccttcccagtttgcacccacaattctctgacagaaagtagacataagaggaaaacatgattaacagatggattatcactgcagtaagaggtgcctgggacggacttagttgaggtaggctgtggattgagagaatatagagactggggtatgtgaaatcggaaagcccacaactgtagcagamtagagtaagtggactttcacaagaaatagaatcaccaccattatctaccacattttctcatgcttactgctatttaagtgcctcagtttctatacaatctttcacaattacgaagccctaaatggcttcccatcctgcaatgatttcataaggagcctatgccacctgtcatgtaaggctttttccatgcctaataaatatgttttggagggatttcaccagtgtttctgctaagatacatgcataaaatggccacagaggttgtgagaaatctctgcagtttctctttgtctatacacatgaaagtattgaagaccagcacttggattagttaagataatgttttaattcatcactgtctcctcctccccttggtaccagcttttatgttcattgcattccccacccctttaagtactcagtacctcctgcatggtaacctattctgatatttgatattatcatgcttaatttgactgaatccatttggatattttatctttaagaaatttgtagttttatacttttaatttatgataaaattagattaatatcaaacattaacaagtgacttttaggaaggtatatgagctttcttattgacttcaaactataaagtacaaactgtgacactagaaatttagtcctttaacacatattgtatttatatgtgaagtggagggtgagcagaaaacagtgttatatttctctgtgtccagatggatactcacctcaatcattttcctatagtagaaagtagttcctgaaaacacttaatagagattattttagaagttgctgaggtacaaataaaactgctatgctgacatcatacttttttgcaccaacaactccagttcttc

SEQ ID NO: 698752 - DNA, 1903 bp, Homo sapiens
tggaacagggagtgactgacaccaagggtccaggcaacagccagaaatgaaaggcacattcttgggctcataatggtcagatagtggaggggcttacatagggccacatatctgtcaaaggccatggctatgagcagcaccatctccacaccaccaatgacgtggatgaagaagatttgagcgatgcagcctccaaaggagatgactttgcgctttctgaacaggtcataaatcatcttgggagaagtgacagagcaggctcctaagtcaatgaaggagagactggccagtagaaagtacatgggggagtgtaagtgagggtcagtggtcacagaaaacacaatgaggatgtttccagtaatgcttgccacatagagcacagaggaaaacactaggaggaggagctggatctcccatgaatgagtgagtcccagaaacaaaaactcagataccactgagtgattctctccatccattggtccagccaactgggctgtggctaaaattatgagaactaagaaaatggggaggaaattgtgattatgaagataataatatgtactaaaatcaatattgcaatgtcactatgaataaatagtatacagttattctgttcctcacatattaaaaacaaaaaatcaacataatattatcacaacatgtgagctgcaacctgatttaaacccatcatcaatactttcagtgtaatgtctgatctaaaattaacagattaggtaagaacaagattcctgactatccatgaaattcatcaggtgtttaaatgacctgtgatattaactattcctcatttccaacatattccatttgtacttatacatattcttataatttccttcccttcccagtttgcacccacaattctctgacagaaagtagacataagaggaaaacatgattaacagatggattatcactgcagtaagaggtgcctgggacggacttagttgaggtaggctgtggattgagagaatatagagactggggtatgtgaaatcggaaagcccacaactgtagcagacyagagtaagtggactttcacaagaaatagaatcaccaccattatctaccacattttctcatgcttactgctatttaagtgcctcagtttctatacaatctttcacaattacgaagccctaaatggcttcccatcctgcaatgatttcataaggagcctatgccacctgtcatgtaaggctttttccatgcctaataaatatgttttggagggatttcaccagtgtttctgctaagatacatgcataaaatggccacagaggttgtgagaaatctctgcagtttctctttgtctatacacatgaaagtattgaagaccagcacttggattagttaagataatgttttaattcatcactgtctcctcctccccttggtaccagcttttatgttcattgcattccccacccctttaagtactcagtacctcctgcatggtaacctattctgatatttgatattatcatgcttaatttgactgaatccatttggatattttatctttaagaaatttgtagttttatacttttaatttatgataaaattagattaatatcaaacattaacaagtgacttttaggaaggtatatgagctttcttattgacttcaaactataaagtacaaactgtgacactagaaatttagtcctttaacacatattgtatttatatgtgaagtggagggtgagcagaaaacagtgttatatttctctgtgtccagatggatactcacctcaatcattttcctatagtagaaagtagttcctgaaaacacttaatagagattattttagaagttgctgaggtacaaataaaactgctatgctgacatcatacttttttgcaccaacaactccagttcttc

SEQ ID NO: 698753 - DNA, 643 bp, Homo sapiens
atgcaatttacctacacaacaaacttgcacagggaagccccgaaactaaaagtttaaaagtgttaaaaataaaaaattttaaaaatacttataattaagaattaacttttaatatccaactctattggagttatgtttaaaatacacgttatatttccctgctaaatggatatgctgattggcattaaaaatttaaaaacaccttaggccgtgcacggtggctcacgcctgtaatcccagcactttgggaggcccaggtgagcggatcatgagatcaggagtttgagaccagcctgaccaacatggtgaaaccccgtttctactaaaaatacaaaaaatagcccagcgtggtggcacgtgcctttaatcccagctagtcaggaggcggagrcaggagaaacatttggacctgggaggaggaagttgcagtgagctgagatcgcaccactacactccagcctgggtgacagcatgagaatccatctttaaaaaaaaaaaaattaaaacacctttgcataattaactttaaaccccattttcatcttgaaataagtgaaagtgtactgtataattattaatgactaacaaactctatttttctgcaccatcttcactgaagaattaatttttagctctgaaattt

SEQ ID NO: 698754 - DNA, 643 bp, Homo sapiens
atgcaatttacctacacaacaaacttgcacagggaagccccgaaactaaaagtttaaaagtgttaaaaataaaaaattttaaaaatacttataattaagaattaacttttaatatccaactctattggagttatgtttaaaatacacgttatatttccctgctaaatggatatgctgattggcattaaaaatttaaaaacaccttaggccgtgcacggtggctcacgcctgtaatcccagcactttgggaggcccaggtgagcggatcatgagatcaggagtttgagaccagcctgaccaacatggtgaaaccccgtttctactaaaaatacaaaaaatagcccagcgtggtggcacgtgcctttaatcccagctagtcaggaggcggagacaggagaaacatttggacctgggaggaggaagttgcagtgagctgagatcgcaccactrcactccagcctgggtgacagcatgagaatccatctttaaaaaaaaaaaaattaaaacacctttgcataattaactttaaaccccattttcatcttgaaataagtgaaagtgtactgtataattattaatgactaacaaactctatttttctgcaccatcttcactgaagaattaatttttagctctgaaattt

SEQ ID NO: 698755 - DNA, 643 bp, Homo sapiens
atgcaatttacctacacaacaaacttgcacagggaagccccgaaactaaaagtttaaaagtgttaaaaataaaaaattttaaaaatacttataattaagaattaacttttaatatccaactctattggagttatgtttaaaatacacgttatatttccctgctaaatggatatgctgattggcattaaaaatttaaaaacaccttaggccgtgcacggtggctcacgcctgtaatcccagcactttgggaggcccaggtgagcggatcatgagatcaggagtttgagaccagcctgaccaacatggtgaaaccccgtttctactaaaaatacaaaaaatagcccagcgtggtggcacgtgcctttaatcccagctagtcaggaggcggagacaggagaaacatttggacctgggaggaggaagttgcagtgagctgagatcgcaccactacactccagcctgggtgacagcatgagaatccatcttwaaaaaaaaaaaaattaaaacacctttgcataattaactttaaaccccattttcatcttgaaataagtgaaagtgtactgtataattattaatgactaacaaactctatttttctgcaccatcttcactgaagaattaatttttagctctgaaattt

SEQ ID NO: 698756 - DNA, 1169 bp, Homo sapiens
acattggggtttgggcttcaacttatggattttaggggatacagctcagtccacagcatccccagctcactgctctatgcatgtcctcttgcagtggtggcttccaaccctggccacaggtcaccttttgcttttttttagctgcttttcagaatttcctaggcttgaagagtaatggaattatttacttcccctccacctaaaccaagacctgtggtctagtgtgtgctggcctccagtggtcatccttgatcaaaagatccttgaagcatcctcctggaagaggccttagattgagtcttcagccacgtcagaagctggccttttccctctgcagaaacaggacttgcattctgtccagctgcatcctctgtccctcctcctcttcctccctgttcctctaggttctaccacttacctgcccccaggtccccttgttccatcccagcatttttactgcccaggaaccaaggctgaggaattctaggtagggtgccagggctggcctggaacctccaggagggacacctgcagggccagaccaggccacaaactgaggcaagacttacaaagagaagtttcaggaagcaggtgcctgacaggtccccacgatctgggtcctgtccgtgctccagggaatgccatgaatgcggagtgctgaagacaaatggccagggtgtgtgtgggggagggagggtgagaccatgagaatgagtcctccttgtcgaaccctgtaactcttcccgagtcatgccaccttcctttccactgatgtgccaatggctgcaattcagcctactccctgagctccagactcttgtttgcaaccaccttccagacattttcccccgggccccctgcacacacttcaagcayggcatgtcccacatggagcttgtcatcccagactcctttcttcttgcagtcattggtgccacaactgactgcacctgcacgcctgagcaggaggcagaataacctgccccaggctacgctgagtagagctgttcctcaaagtgttgtcctcagcccagcagcatccacgcctcttgcaaacttagtagaaatgtgaattcctgggccctacccagacctgcaaaatcagatctttgtgggggtgctccagagatctgtgccctaaccagttctggcatgctggcctttgagaa

SEQ ID NO: 698757 - DNA, 614 bp, Homo sapiens
cacacacacacacacacacacacacacaccattgcacatatctgtaaatatactaattataattgaattatatacttcaaatttaaatgagtaaattgtatggtatgtgaattatacctcaatacagcttttttttttaagagaggactgtatgaaaaaactagcccataaagatacatgcacacstatgtttattgcagcactacttacaaaagcaaagacatggaaccaacccaaatgcccattaatgatagactggataaagaaaatgtggtacatatacaccgtggaatactatgcagccacaaaaaggaatgagatcatgtcctttgcagggacatggatgaagctggaagccatcatcctcaacaaactaacacaggaacagaaaaccaaacactgcatgttctcactcataagtgggagctaaacaatgagagcacatggacacagggaggggaataacacacaccagggcctgtcagggaggggagagggactgaggggagggaaaacatcaggacaaatagttaatgcttggggggcttaaaatctagatgacaggttgatagatgtagcaaaccaccatggtacacgtatacctatgtagcaaa

SEQ ID NO: 698758 - DNA, 614 bp, Homo sapiens
cacacacacacacacacacacacacacaccattgcacatatctgtaaatatactaattataattgaattatatacttcaaatttaaatgagtaaattgtatggtatgtgaattatacctcaatacagcttttttttttaagagaggactgtatgaaaaaactagcccataaagatacatgcacacctatgtttattgcagcactacttacaaaagcaaagacatggaaccaacccaaatgcccattaatgatagactggataaagaaaatgtggtacatatacrccgtggaatactatgcagccacaaaaaggaatgagatcatgtcctttgcagggacatggatgaagctggaagccatcatcctcaacaaactaacacaggaacagaaaaccaaacactgcatgttctcactcataagtgggagctaaacaatgagagcacatggacacagggaggggaataacacacaccagggcctgtcagggaggggagagggactgaggggagggaaaacatcaggacaaatagttaatgcttggggggcttaaaatctagatgacaggttgatagatgtagcaaaccaccatggtacacgtatacctatgtagcaaa

SEQ ID NO: 698759 - DNA, 1478 bp, Homo sapiens
gaagaagtggggtgttagcatgcacaagctcaaagcagatacaattcctacattcttaaaagaaggcaggtggggcttccaaatccgctcaagattcaaaaggtttcaaacctttctaaaagtgttctatcatcataaacaaaagagaaaccactaaataaaatccacaggaatccaaacaaatgtcaaagcaggacactgtacaaatatttgcccctggaataaagtatggacacatttaagaatgtcatttacaacaatgtagggctaatcactagaaaattmttggtacaaaaattcttagattaagtaatagcattattaataatagttcttaccaggtaaagtgtcctcttcagagaatttctagagaaaaagacactaaagtgaacacagggggaaatgcattaagaccttactgcacaaagtgtgggccactgaccaactgcaagcataacacctgggagctggtcagaaacccaaaacctcaggtcccaaccaagaccaactaaattagaagctgcattttattatcagccccaggagattcccatgcatattaaagtttaagttgtggtattttcagacattgttaatatttaacttgtatcagaactgaaacgtgccagctccctttaagaaaataaataagcaaaatatattaacatcactattttattgttcagtcaacacaggccatccctctactcaccctcccttcctacacagatttcattattttccatctaagtaaggcaggaacagatgacggagacagactggctcctcaaacacctgttgagtgaatgacaggcggggtcccttgtcaaaagccacccagagcactccttgccattctcatcccacttgagtgctgaacaactgctcagaattacacagccattgttggcaacggcacatcaccagtctcaagccaccaggactaccttgacaacactcagaagctggctcccagacactgcacaggaaaggaaaaaaattatttgtaggtgacttacaggtaccatttacacatttagaattttcttccctcactaatatgagatttgagcctgaggcatctagagttcagcccagactcttccagctgccttcaggcaagtctccacagaccagaaatgcccctggagagatagtcctggaccccctgaccgaggaggcagagaaaaaaagggaagaaagaagcaaacggggccaataaatgcctactggccccccaatcctagtcacagctcagcattttctggcccctttaatttaacctctgccggccgtgagaggaacaaagcccattccacatgaaaacagaagaaatgtgtctcctgaacaaatcagaataaaccgtcatggaaagggttccagggtttgggatgggttaggactttgtggatcatgcccagccagtgaattctgtgaaatatgagaaaatatggtccatcacaccagttctgcacgtg

SEQ ID NO: 698760 - DNA, 619 bp, Homo sapiens
ctcaattctaggcactgcccaccgcgggcaccccgcctcaccctgcacccaggttccctccttccagcctccctccaccaggctggcacaccctcctacaatagaagcacagaaggctttgccataggctctgctttccgggtaagctggacacaaacaaacagaaaaattaaaagtaaatcatttacaaatgggagagaagaaacgatacacaaaaagtttttaaaaattaatatctacaaatgagatagacgtatctatgaaataagaatattatgccattaaaaaaagaatactcactttgaatgtcaataatgtgtcaatagtcaactgtaacaaatgtacaggattcccagtagtgggagaggctgtgcgtgtgtggggcagagggcatgtaggaaatctctggaccttccattcagttttgctgtaaacctgaaactgctctaaagtctgttttttaaaaagaatataaatatatatakagagagagatcctaagaaattcaaaatgaaaatagaaacaaaatccaacagaaaagttaaaaggtcaaattgaggacatatcccaaaacctaaaaacaacacaacagacacagactattagataaaaaatacag

SEQ ID NO: 698761 - DNA, 891 bp, Homo sapiens
tatttaaaaatcgtacttgggacaataataaccacctgtgggctggagccagcctgtgattaccatttgtcaacttctggcctagtgggtctcctatcaatctcttactattctgctcccaggtgctttccatctgttctgtttatttgacacttaaattccttcttwaattacttcttttgttagcatagttcccactcagatgtattttcctgccattgcatgtgatggaaaaaccctttgtacttactttccacatgaggcttgtgaggcactcccaggcttctcatgacacacatttccccagagcctagtctgcaagggaccttcttgggggcctcagtaaagttgtttatgggagatttggtgggcaggaggctcatctgaaatctcatcatttgtattgctcatccttaccctccccctgccatgatatactgagaacaaccccttccgtctttggtgccatgtcctccttttcccagtactgtcagcactctctgctccttttagaattaagtgcagggcttgcttcagaggagatggaactggaatagcttaagtgaaatacgatctgggacattagtgttctgacccttaaaacaagggtatgggcaaaaccccaggatatggctgtgacctttgggctaatagacccatttctccaagaagaggaaaggcctagctgctgtgttcctggaggtggtgagggtgggcatctgtgtagaaacttgggttggctcctgtgcctcccagttcttcttgagccttatttttttagccttaaaaattctttattgtgttgggaaactgagtagtaactacattttttacatctgtctattgttcaccatctatgcctgactgtcacacagaacagtagtcctttat

SEQ ID NO: 698762 - DNA, 652 bp, Homo sapiens
catagctcactgcagccttgaactcctgggctcaagtgatgcacctgcctcaggctcctaaaacatggattacaggcatgagccatagtgcttggccccagcactcttttttataagaacaatttgattttgacattattattactgcagttcactaatcattacattttcattgatggaaatagtgaagttttgcttcttgactgcttccttttctttttttcctggttttttaatatgccattctgttttctcttttagaaatcaaggagtatcttaaaatgtatccagttttatgctgatgagagctataacttaatggtaagtccagaaaatgatcacactacaggaaagtttatgatacattactctcttwtttttttttttttttttgagatggagtctcactctgtcgcacacgctgggtgcagtggcgcgatctcggctcactgcaagctctgcctcctgggttcacgccattctcctgcctcagcctcctgagtagctaggactacaggcacccgccaccacgaccagataattttttttgtattttttgtagagacagggcttcactgtattagccaggatggtcttgatctccttacctcgtgatccacctgcctcggcctcccaaagggctgggattaca

SEQ ID NO: 698763 - DNA, 652 bp, Homo sapiens
catagctcactgcagccttgaactcctgggctcaagtgatgcacctgcctcaggctcctaaaacatggattacaggcatgagccatagtgcttggccccagcactcttttttataagaacaatttgattttgacattattattactgcagttcactaatcattacattttcattgatggaaatagtgaagttttgcttcttgactgcttccttttctttttttcctggttttttaatatgccattctgttttctcttttagaaatcaaggagtatcttaaaatgtatccagttttatgctgatgagagctataacttaatggtaagtccagaaaatgatcacactacaggaaagtttatgatacattactctctttyttttttttttttttttgagatggagtctcactctgtcgcacacgctgggtgcagtggcgcgatctcggctcactgcaagctctgcctcctgggttcacgccattctcctgcctcagcctcctgagtagctaggactacaggcacccgccaccacgaccagataattttttttgtattttttgtagagacagggcttcactgtattagccaggatggtcttgatctccttacctcgtgatccacctgcctcggcctcccaaagggctgggattaca

SEQ ID NO: 698764 - DNA, 652 bp, Homo sapiens
catagctcactgcagccttgaactcctgggctcaagtgatgcacctgcctcaggctcctaaaacatggattacaggcatgagccatagtgcttggccccagcactcttttttataagaacaatttgattttgacattattattactgcagttcactaatcattacattttcattgatggaaatagtgaagttttgcttcttgactgcttccttttctttttttcctggttttttaatatgccattctgttttctcttttagaaatcaaggagtatcttaaaatgtatccagttttatgctgatgagagctataacttaatggtaagtccagaaaatgatcacactacaggaaagtttatgatacattactctctttttyttttttttttttttgagatggagtctcactctgtcgcacacgctgggtgcagtggcgcgatctcggctcactgcaagctctgcctcctgggttcacgccattctcctgcctcagcctcctgagtagctaggactacaggcacccgccaccacgaccagataattttttttgtattttttgtagagacagggcttcactgtattagccaggatggtcttgatctccttacctcgtgatccacctgcctcggcctcccaaagggctgggattaca

SEQ ID NO: 698765 - DNA, 652 bp, Homo sapiens
catagctcactgcagccttgaactcctgggctcaagtgatgcacctgcctcaggctcctaaaacatggattacaggcatgagccatagtgcttggccccagcactcttttttataagaacaatttgattttgacattattattactgcagttcactaatcattacattttcattgatggaaatagtgaagttttgcttcttgactgcttccttttctttttttcctggttttttaatatgccattctgttttctcttttagaaatcaaggagtatcttaaaatgtatccagttttatgctgatgagagctataacttaatggtaagtccagaaaatgatcacactacaggaaagtttatgatacattactctcttttttttttttttttttttgagatggagtctcactctgtcgcacacgctgggtgcagtggcgcgatctcggctcactgcaagctctgcctcctgggttcacgccattctcctgcctcagcctcctgagtagctaggactacagkcacccgccaccacgaccagataattttttttgtattttttgtagagacagggcttcactgtattagccaggatggtcttgatctccttacctcgtgatccacctgcctcggcctcccaaagggctgggattaca

SEQ ID NO: 698766 - DNA, 643 bp, Homo sapiens
tgccatacattttatttctcaatttatttaaacccctctattactgttgttttaaaaagtcagtattcttttagatttgctcacatatttacactctcctttattctttatttttttctgctccactgttattttkggaagcattttcattttctgtatgagcttctattgcctgaactgctgtaatagttttctaactgagctgtctccttataccctttgccccatactccccatagcttattttcagcataggagtcaggatgatttccataaaacctaaaatcatgtcactcctccgcctatttcactcacagtaaaaatttaagttcttctttggcctacaaggcccttcatgttttagaatccttttgtgtccctgaccttgtatgctttctcctttttatgcattgggcacaatctgttttacatctaacagtcatgctcctacttcaaggctgttgcactgcctggaatgctttcccttagcgaatctgcaaatctctccccttcatcttcttcttgttctgcttataaccattttagggaaatacatagactaaatgtattacctactttttagtaaaaaacaatcaaaagctgatatcagaatattcagagcactatatgttagtgtttttta

SEQ ID NO: 698767 - DNA, 1498 bp, Homo sapiens
tacagctacttgagaggctgaggcaggagcgtcgcttgaaactgggaggcggaggttgcagtcagcctggagatcatggcactgcactccagcctgggtgacagagattccgtctcaaaagaaaaaaaaaagaaatatataggatagactgaaagtaactcattagataattgctaaatctgtaacaagagataataagggcctaaactaaagtggtggcaatgtgacgagaaatgaggatatgtatgaaaatatctaatagtggtagaattgttaagacttagtaaccaataggaaattgtgatggagacaagaagaaaaaaaaatttaagagactttaatttttcacatctaatttaggtagagaattttgccattatcagaaacattaaaatcagaaagagagggtagattgaagagaagaggaaagatgtcagatttataatactaacaaacagcacagaagtacacagcatagttagaaaaacaaatagaatgctaggaaggtgttaaagattcagatttgaaaatcatgtttaaagaattaatagtcatatggactaccatattatccagcaatcccactgctgggtatatatgcaaaagaaaggaaatgagtatattgaagagatatttgcactgtcatgtttcctgcagcactattcacattagccaagatatgaaatcagcctgtgtccatcaacagatggatggataaaggaagtgtggtacgtatacacaatggaatattattcagctgtaaaaaatgaaaatgttatttttaacaacatggataaaacttcaggacattatgttaaatgaaataagccaggaacagaacaacaaatgtagcatattctcactcatatagagaagcttaaaaaaatggatttcatagaggtagtgaataaaatggttgttaccagaggccaggaaagccataatggaggaggagtggataaagaagggttggttaataaatacgaaatacagttagacagaaggaataagatccagtttccagtagcacaatagagcaactayagttaaccataatttattgtatattccaaagtaactagaagagtagatttggagtgttcccaacatgaagtaacgataaatgtttgaggcgatagatatcccaactacccatattttatcattacatattgtgtgcttgtatcaaaatatcacattaccttacaattatatgtagctattatgtacccataaaatttttttcaaagaagtaatagtcaattctttagaatgtaatgaaatactaaaggaaaggagagactctggtgaaaaaggaacaaataaatgcttgagagtgtttttgtttagggagaaaatggagccagccctatatagaagaggaggagttacagatgagagaagattcagattgtttgtgtcataaaacccagtgtgaacatggttacaagacagtaaaaaaaaaaaaaaacaggagaaataagaacagaatttacat

SEQ ID NO: 698768 - DNA, 1498 bp, Homo sapiens
tacagctacttgagaggctgaggcaggagcgtcgcttgaaactgggaggcggaggttgcagtcagcctggagatcatggcactgcactccagcctgggtgacagagattccgtctcaaaagaaaaaaaaaagaaatatataggatagactgaaagtaactcattagataattgctaaatctgtaacaagagataataagggcctaaactaaagtggtggcaatgtgacgagaaatgaggatatgtatgaaaatatctaatagtggtagaattgttaagacttagtaaccaataggaaattgtgatggagacaagaagaaaaaaaaatttaagagactttaatttttcacatctaatttaggtagagaattttgccattatcagaaacattaaaatcagaaagagagggtagattgaagagaagaggaaagatgtcagatttataatactaacaaacagcacagaagtacacagcatagttagaaaaacaaatagaatgctaggaaggtgttaaagattcagatttgaaaatcatgtttaaagaattaatagtcatatggactaccatattatccagcaatcccactgctgggtatatatgcaaaagaaaggaaatgagtatattgaagagatatttgcactgtcatgtttcctgcagcactattcacattagccaagatatgaaatcagcctgtgtccatcaacagatggatggataaaggaagtgtggtacgtatacacaatggaatattattcagctgtaaaaaatgaaaatgttatttttaacaacatggataaaacttcaggacattatgttaaatgaaataagccaggaacagaacaacaaatgtagcatattctcactcatatagagaagcttaaaaaaatggatttcatagaggtagtgaataaaatggttgttaccagaggccaggaaagccataatggaggaggagtggataaagaagggttggttaataaatacgaaatacagttagacagaaggaataagatccagtttccagtagcacaatagagcaactatagttaaccataatttattgtatattccaaagtaactagaagagtagatttggagtgttcccaacatgaagtaacgataaatgtttgaggcgatagatatcccaactacccatattttatcattacatattgtgtgcttgtatcaaaatatcacattaccttacaattatatgtagctattatgtacccataaaatttttttcaaagaagtaatagtcaattctttagaatgtaatgaaatactaaaggaaaggagagactctggtgaaaaaggaacaaataaatgcttgagagtgtttttgtttagggagaaaatggagccagccctatatagaagaggaggagttasagatgagagaagattcagattgtttgtgtcataaaacccagtgtgaacatggttacaagacagtaaaaaaaaaaaaaaacaggagaaataagaacagaatttacat

SEQ ID NO: 698769 - DNA, 1498 bp, Homo sapiens
tacagctacttgagaggctgaggcaggagcgtcgcttgaaactgggaggcggaggttgcagtcagcctggagatcatggcactgcactccagcctgggtgacagagattccgtctcaaaagaaaaaaaaaagaaatatataggatagactgaaagtaactcattagataattgctaaatctgtaacaagagataataagggcctaaactaaagtggtggcaatgtgacgagaaatgaggatatgtatgaaaatatctaatagtggtagaattgttaagacttagtaaccaataggaaattgtgatggagacaagaagaaaaaaaaatttaagagactttaatttttcacatctaatttaggtagagaattttgccattatcagaaacattaaaatcagaaagagagggtagattgaagagaagaggaaagatgtcagatttataatactaacaaacagcacagaagtacacagcatagttagaaaaacaaatagaatgctaggaaggtgttaaagattcagatttgaaaatcatgtttaaagaattaatagtcatatggactaccatattatccagcaatcccactgctgggtatatatgcaaaagaaaggaaatgagtatattgaagagatatttgcactgtcatgtttcctgcagcactattcacattagccaagatatgaaatcagcctgtgtccatcaacagatggatggataaaggaagtgtggtacgtatacacaatggaatattattcagctgtaaaaaatgaaaatgttatttttaacaacatggataaaacttcaggacattatgttaaatgaaataagccaggaacagaacaacaaatgtagcatattctcactcatatagagaagcttaaaaaaatggatttcatagaggtagtgaataaaatggttgttaccagaggccaggaaagccataatggaggaggagtggataaagaagggttggttaataaatacgaaatacagttagacagaaggaataagatccagtttccagtagcacaatagagcaactatagttaaccataatttattgtatattccaaagtaactagaagagtagatttggagtgttcccaacatgaagtaacgataaatgtttgaggcgatagatatcccaactacccatattttatcattacatattgtgtgcttgtatcaaaatatcacattaccttacaattatatgtagctattatgtacccataaaatttttttcaaagaagtaatagtcaattctttagaatgtaatgaaatactaaaggaaaggagagactctggtgaaaaaggaacaaataaatgcttgagagtgtttttgtttagggagaaaatggagccagccctatatagaagaggaggagttacagatgagagaagaytcagattgtttgtgtcataaaacccagtgtgaacatggttacaagacagtaaaaaaaaaaaaaaacaggagaaataagaacagaatttacat

SEQ ID NO: 698770 - DNA, 1394 bp, Homo sapiens
ccaagatgctatcctatagaagctcaaagttattttcctttgtattgtcacttctctaaaaatttactgttctttgttgaagatgctgtataagctggatttccaagctgcctctttcagaattattcattccctggtgcctcacatgtatatatgtaatatatgtattaataaatcttgtttgtttttctcttattattctgttttttgttagggggctgttccatctaagaacatatgggggttattcttcccctacactcttattcttccatatttgcatatatcaaaatctttgttcattgttgtggaattgatttttttctttcatgtatatcttccaagtttattaacaaacaataacaaagcttttctttcagctgatacttctgtccttaagaaatctaagacaaaagttaaagttagataaaggaagatttgctgtcatagtaagtgtggcagcatgatggggaaatcagagtttcttcctaagtaaaagtatggatgagcccctaaaatcccaaagaaaaagctgcagggcagctgggaggaacactgggagggcagggtaattgccaacaataaagcaggtgaatgtttttatgctaaccaaaaatagtgcttcccaaacttttccacaccttagaaacatctcgggagctttttaaatatcccaatgcccggtctcattcaataccaattatatgagaacatctggggtagaaggctggtattagtatctttttaaagtatactaggtgactccaaagtgcagcataatttgggaactgctattctgtaataagattctttaaaaatactgactgtattattttgactamactccatatattaatagtttatatttacactggctctttaattttccttatccaggctaaggaaaacttttgaggctgaagattatgatcaggcacattgcagtgaggtggcttcaatgaaccctgactgttgcttttgtttttccttccttatttgaatagccttaagctacttatttgaactgattgtcctaaacgcgaatgtttttgcatgatttcctccctgctcaaattgtctgatttggttctacctcttgtaatccttgcaaaagtgactaaagtccagggacatgcttgtggagtgacttcctccacttggtgtcattcaattaggtaaagattaccaacagcaactgcttctatcctttgcaatttactcacagtagctacctcatatgcttcatttacatgaagttattttgtttaccaacctctggcgtaggtccccaagtcttaatgcacactttaagtgtcctaaatagacaaaacaactgtttccttgaggtggcattagataacgtaatggtaaagctcttcaagagtgtttcttaa

SEQ ID NO: 698771 - DNA, 1394 bp, Homo sapiens
ccaagatgctatcctatagaagctcaaagttattttcctttgtattgtcacttctctaaaaatttactgttctttgttgaagatgctgtataagctggatttccaagctgcctctttcagaattattcattccctggtgcctcacatgtatatatgtaatatatgtattaataaatcttgtttgtttttctcttattattctgttttttgttagggggctgttccatctaagaacatatgggggttattcttcccctacactcttattcttccatatttgcatatatcaaaatctttgttcattgttgtggaattgatttttttctttcatgtatatcttccaagtttattaacaaacaataacaaagcttttctttcagctgatacttctgtccttaagaaatctaagacaaaagttaaagttagataaaggaagatttgctgtcatagtaagtgtggcagcatgatggggaaatcagagtttcttcctaagtaaaagtatggatgagcccctaaaatcccaaagaaaaagctgcagggcagctgggaggaacactgggagggcagggtaattgccaacaataaagcaggtgaatgtttttatgctaaccaaaaatagtgcttcccaaacttttccacaccttagaaacatctcgggagctttttaaatatcccaatgcccggtctcattcaataccaattatatgagaacatctggggtagaaggctggtattagtatctttttaaagtatactaggtgactccaaagtgcagcataatttgggaactgctattctgtaataagattctttaaaaatactgactgtattattttgactacactccatatattaatagtttatatttacrctggctctttaattttccttatccaggctaaggaaaacttttgaggctgaagattatgatcaggcacattgcagtgaggtggcttcaatgaaccctgactgttgcttttgtttttccttccttatttgaatagccttaagctacttatttgaactgattgtcctaaacgcgaatgtttttgcatgatttcctccctgctcaaattgtctgatttggttctacctcttgtaatccttgcaaaagtgactaaagtccagggacatgcttgtggagtgacttcctccacttggtgtcattcaattaggtaaagattaccaacagcaactgcttctatcctttgcaatttactcacagtagctacctcatatgcttcatttacatgaagttattttgtttaccaacctctggcgtaggtccccaagtcttaatgcacactttaagtgtcctaaatagacaaaacaactgtttccttgaggtggcattagataacgtaatggtaaagctcttcaagagtgtttcttaa

SEQ ID NO: 698772 - DNA, 1394 bp, Homo sapiens
ccaagatgctatcctatagaagctcaaagttattttcctttgtattgtcacttctctaaaaatttactgttctttgttgaagatgctgtataagctggatttccaagctgcctctttcagaattattcattccctggtgcctcacatgtatatatgtaatatatgtattaataaatcttgtttgtttttctcttattattctgttttttgttagggggctgttccatctaagaacatatgggggttattcttcccctacactcttattcttccatatttgcatatatcaaaatctttgttcattgttgtggaattgatttttttctttcatgtatatcttccaagtttattaacaaacaataacaaagcttttctttcagctgatacttctgtccttaagaaatctaagacaaaagttaaagttagataaaggaagatttgctgtcatagtaagtgtggcagcatgatggggaaatcagagtttcttcctaagtaaaagtatggatgagcccctaaaatcccaaagaaaaagctgcagggcagctgggaggaacactgggagggcagggtaattgccaacaataaagcaggtgaatgtttttatgctaaccaaaaatagtgcttcccaaacttttccacaccttagaaacatctcgggagctttttaaatatcccaatgcccggtctcattcaataccaattatatgagaacatctggggtagaaggctggtattagtatctttttaaagtatactaggtgactccaaagtgcagcataatttgggaactgctattctgtaataagattctttaaaaatactgactgtattattttgactacactccatatattaatagtttatatttacactggctctttaattttccttatccaggctaaggaaaacttttgaggctgaagattatgatcaggcacattgcagtgaggtggcttcaatgaaccctgactgttgcttttgtttttccttccttatttgaatagccttaagctacttatttgaactgattgtcctaaacgcgaatgtttttgcatgatttcctccctgctcaaattgtctgatttggttctacctcttgtaatccttgcaaaagtgactaaagtccagggacatgcttgtggagtgacttcctccacttggtgtcattcaattaggtaaagattaccaacagcaactgcttctatcctttgcaatttactcacagtagctacctcatatgcttcatttacatgaagttattttgtttaccaacctctggcgtaggtccccaagtcttaatgcacactttaagtgtcytaaatagacaaaacaactgtttccttgaggtggcattagataacgtaatggtaaagctcttcaagagtgtttcttaa

SEQ ID NO: 698773 - DNA, 626 bp, Homo sapiens
acaataataaataataatttacatctttaaacataattcagatgmcattctgtatctcctagtgttatgaaagtgatttttcaccctagtctgctgatatctggacttggattaccgtcactgatactgtgaaggacagagtagcatatgtgagagacatagtaccttcactgattgtcagggacttagctgaataaccttgaataagttactgaaaatctggggtcttagtttgtttataccatgaaagccttggaccagatcatccccaaggcccttccaattctttctaacagtctatagttctaagttaaaaaaaaaaaaaagtcatcaatgcccatataacagtaattttgtaagcaagcatttttgtcatagacacagtggcagcttaccaagagatcagtaaattgacgattcactgtataaccaaataaatctacttttggataagaatcacttgttccacttttggtcaaacacaggattaagtgtttcttactacattttttgactgaaaaagtggcagaaattttggttccaaacttccaaattatctcaatggaagttttagcagaaattatttatttaatcttaataattttaatagggaaaagtaattaata

SEQ ID NO: 698774 - DNA, 626 bp, Homo sapiens
acaataataaataataatttacatctttaaacataattcagatgccattctgtatctcctagtgttatgaaagtgatttttcaccctagtctgctgatatctggacttggattacygtcactgatactgtgaaggacagagtagcatatgtgagagacatagtaccttcactgattgtcagggacttagctgaataaccttgaataagttactgaaaatctggggtcttagtttgtttataccatgaaagccttggaccagatcatccccaaggcccttccaattctttctaacagtctatagttctaagttaaaaaaaaaaaaaagtcatcaatgcccatataacagtaattttgtaagcaagcatttttgtcatagacacagtggcagcttaccaagagatcagtaaattgacgattcactgtataaccaaataaatctacttttggataagaatcacttgttccacttttggtcaaacacaggattaagtgtttcttactacattttttgactgaaaaagtggcagaaattttggttccaaacttccaaattatctcaatggaagttttagcagaaattatttatttaatcttaataattttaatagggaaaagtaattaata

SEQ ID NO: 698775 - DNA, 626 bp, Homo sapiens
acaataataaataataatttacatctttaaacataattcagatgccattctgtatctcctagtgttatgaaagtgatttttcaccctagtctgctgatatctggacttggattaccgtcactgatactgtgaaggacagagtagcatatgtgagagamatagtaccttcactgattgtcagggacttagctgaataaccttgaataagttactgaaaatctggggtcttagtttgtttataccatgaaagccttggaccagatcatccccaaggcccttccaattctttctaacagtctatagttctaagttaaaaaaaaaaaaaagtcatcaatgcccatataacagtaattttgtaagcaagcatttttgtcatagacacagtggcagcttaccaagagatcagtaaattgacgattcactgtataaccaaataaatctacttttggataagaatcacttgttccacttttggtcaaacacaggattaagtgtttcttactacattttttgactgaaaaagtggcagaaattttggttccaaacttccaaattatctcaatggaagttttagcagaaattatttatttaatcttaataattttaatagggaaaagtaattaata

SEQ ID NO: 698776 - DNA, 626 bp, Homo sapiens
acaataataaataataatttacatctttaaacataattcagatgccattctgtatctcctagtgttatgaaagtgatttttcaccctagtctgctgatatctggacttggattaccgtcactgatactgtgaaggacagagtagcatatgtgagagacatagtaccttcactgattgtcagggacttagctgaataaccttgaatamgttactgaaaatctggggtcttagtttgtttataccatgaaagccttggaccagatcatccccaaggcccttccaattctttctaacagtctatagttctaagttaaaaaaaaaaaaaagtcatcaatgcccatataacagtaattttgtaagcaagcatttttgtcatagacacagtggcagcttaccaagagatcagtaaattgacgattcactgtataaccaaataaatctacttttggataagaatcacttgttccacttttggtcaaacacaggattaagtgtttcttactacattttttgactgaaaaagtggcagaaattttggttccaaacttccaaattatctcaatggaagttttagcagaaattatttatttaatcttaataattttaatagggaaaagtaattaata

SEQ ID NO: 698777 - DNA, 626 bp, Homo sapiens
acaataataaataataatttacatctttaaacataattcagatgccattctgtatctcctagtgttatgaaagtgatttttcaccctagtctgctgatatctggacttggattaccgtcactgatactgtgaaggacagagtagcatatgtgagagacatagtaccttcactgattgtcagggacttagctgaataaccttgaataagttactgaaaatctggggtcttagtttgtttataccatgaaagccttggaccagatcatccccaaggcccttccaattctttctaacastctatagttctaagttaaaaaaaaaaaaaagtcatcaatgcccatataacagtaattttgtaagcaagcatttttgtcatagacacagtggcagcttaccaagagatcagtaaattgacgattcactgtataaccaaataaatctacttttggataagaatcacttgttccacttttggtcaaacacaggattaagtgtttcttactacattttttgactgaaaaagtggcagaaattttggttccaaacttccaaattatctcaatggaagttttagcagaaattatttatttaatcttaataattttaatagggaaaagtaattaata

SEQ ID NO: 698778 - DNA, 626 bp, Homo sapiens
acaataataaataataatttacatctttaaacataattcagatgccattctgtatctcctagtgttatgaaagtgatttttcaccctagtctgctgatatctggacttggattaccgtcactgatactgtgaaggacagagtagcatatgtgagagacatagtaccttcactgattgtcagggacttagctgaataaccttgaataagttactgaaaatctggggtcttagtttgtttataccatgaaagccttggaccagatcatccccaaggcccttccaattctttctaacagtctatagttctaagttaaaaaaaaaaaaaagtcatcaatgcccatataacagtaattttgtaagcaagcatttttgtcatagacacagtggcagcttaccaagagatcagtaaattgacgattcactgtataaccaaataaatctacttttggataagaatcacttkttccacttttggtcaaacacaggattaagtgtttcttactacattttttgactgaaaaagtggcagaaattttggttccaaacttccaaattatctcaatggaagttttagcagaaattatttatttaatcttaataattttaatagggaaaagtaattaata

SEQ ID NO: 698779 - DNA, 1142 bp, Homo sapiens
agcttgatacctgcccagcctccatctaaaagcaaaacttgctctcaggtacagactgattttgtgcatgtggaaataaaaagaattgggattagccagtcacagacttcacaaaatgttccagtactgtagtaactgaattgctgccaggagcagctgtaaataagaaagaaattcgctgtccttcaactgcaatccttctggttttaaaaccacaacaaaaatcctctcctggatcaccacaacataaatgaagaatcttaaaaagaacatcctggccaagcgcagtggctcatgcctgtaatcccagcactttgggaggatgaggcaggcagatcacttgaggtcaggagttcgagaccagcctggccaacatggtgaaatcccatctctactgaaaatataaaaattagccaggcatggtggcgcatgcctgtaatcccagctactcaggaggctgaggcaggagaatcacttgaacctgggaggcagtgattgtggtgagttgagactacaccacagcactccagcctgggcgacagagcgaggctccatctcaaaaaaacaacaataaaaaaatcctattaggaatacaaaagcttaaattaaaaacaaacaaaataccgagactgaactacagtggccctaggatctattgtaaaacgcatgtttagtaaaggcaactagtgtaatctcagaccagtctgtcaagttctctgctacggtttactgtttccaaagatacaaagcactcactcaactcagtaaatattttttggatacctatgcaacaggtgctaarggaaatccaaagttccatgctaaaagattgctacctgcaaggatcttggtttagtagagaaggggaatcagtttccaaaaagactgagaaaggtgtcacttattcctgtgaggggctttagaagaattagtggcaatatgaaaaaatatatactttcacaaagcttgagtggaaaagaaagttgaaaaagggacattagctggaggaggatgtagaataaatacgttgttttaggatttattcaatacatttttatttaccacatttattaggtactgttttacatcctggtgattaagcagagaataaaatagacagagcccctctgttttaattaggg

SEQ ID NO: 698780 - DNA, 1291 bp, Homo sapiens
tggagctttctagtaggtgtccttcatagctcagaaacatacctcagaacaagccattcatgacttacctgtaatgggaaaataaatcattctatcagatcagcagttttgatgtttgagtgattttgatatgcttcacagagacaaatgctgccaaaataaacatcgaagtatagacatgagttctgttcagcaggttgaaaagtctgatttagaaaaactttctaagttttggttgaaattatgaacactctagaagcagaatttctggaagagccaagaacagactttgagcctatatcttcaaagctgaaactggatatctttcaataaaatatgtgcacttttaaaataaaatgactaattctgtgattcagacaatagttttaagttcagctgtgcttagatttctttcagattaatttaaaattayagatttttacttttagaattgcagagcccctatcccacactggagaatattttttattactgtctgttatatatgtgtctatgtgtgtgtgtatatttatgtgtgtatgtataaatatgtattttttaaaggagccttttccctcctttgattttaagataagcaatcttttggcataacattatcgtcttcctagaaaagccaagatgaagaatctatcttacaactttttctcttcagtagagaaaaacatgtaccatttcaggtgaacatacaaaattttcactttctaccttttgccttccaatgtcctgatttgtcttcaaaggtttttctccatattaatttgtcatcttatcctcatcacctgagaacattttactgcatacaaagtctatgcaagattatatgtaactagccatttagtataatctatgtcagtgtttctgtgctgtcaaattccgtcctgatttggaataccataccttgttctttccaaggtagactaggaagtgttggggaaatggggtcacttcagagaccattttagatgtaagtttttaaatgtaagtgttactggggctaagtcaggtactttatttaaaacatttttttttctcatttcatagctagatagttgtaagagaaatacaaagaatttacaagatgcttctctgtcatctgccatatgcagagggactgaactaggaattttgtagttgaagctgtgttcataaagagtaaatcttattttatagattttggagaaataaaacaagaattttaagagctttcgtattagcagttttgccttataaaaactaagatttgtcagattagtttgaggtgtaacctaaa

SEQ ID NO: 698781 - DNA, 1291 bp, Homo sapiens
tggagctttctagtaggtgtccttcatagctcagaaacatacctcagaacaagccattcatgacttacctgtaatgggaaaataaatcattctatcagatcagcagttttgatgtttgagtgattttgatatgcttcacagagacaaatgctgccaaaataaacatcgaagtatagacatgagttctgttcagcaggttgaaaagtctgatttagaaaaactttctaagttttggttgaaattatgaacactctagaagcagaatttctggaagagccaagaacagactttgagcctatatcttcaaagctgaaactggatatctttcaataaaatatgtgcacttttaaaataaaatgactaattctgtgattcagacaatagttttaagttcagctgtgcttagatttctttcagattaatttaaaattacagatttttacttttagaattgcagagcccctatcccacactggagaatattttttattactgtctgttatatatgtgtctatgtgtgtgtgtatatttatgtgtgtatgtataaatatgtaytttttaaaggagccttttccctcctttgattttaagataagcaatcttttggcataacattatcgtcttcctagaaaagccaagatgaagaatctatcttacaactttttctcttcagtagagaaaaacatgtaccatttcaggtgaacatacaaaattttcactttctaccttttgccttccaatgtcctgatttgtcttcaaaggtttttctccatattaatttgtcatcttatcctcatcacctgagaacattttactgcatacaaagtctatgcaagattatatgtaactagccatttagtataatctatgtcagtgtttctgtgctgtcaaattccgtcctgatttggaataccataccttgttctttccaaggtagactaggaagtgttggggaaatggggtcacttcagagaccattttagatgtaagtttttaaatgtaagtgttactggggctaagtcaggtactttatttaaaacatttttttttctcatttcatagctagatagttgtaagagaaatacaaagaatttacaagatgcttctctgtcatctgccatatgcagagggactgaactaggaattttgtagttgaagctgtgttcataaagagtaaatcttattttatagattttggagaaataaaacaagaattttaagagctttcgtattagcagttttgccttataaaaactaagatttgtcagattagtttgaggtgtaacctaaa

SEQ ID NO: 698782 - DNA, 1291 bp, Homo sapiens
tggagctttctagtaggtgtccttcatagctcagaaacatacctcagaacaagccattcatgacttacctgtaatgggaaaataaatcattctatcagatcagcagttttgatgtttgagtgattttgatatgcttcacagagacaaatgctgccaaaataaacatcgaagtatagacatgagttctgttcagcaggttgaaaagtctgatttagaaaaactttctaagttttggttgaaattatgaacactctagaagcagaatttctggaagagccaagaacagactttgagcctatatcttcaaagctgaaactggatatctttcaataaaatatgtgcacttttaaaataaaatgactaattctgtgattcagacaatagttttaagttcagctgtgcttagatttctttcagattaatttaaaattacagatttttacttttagaattgcagagcccctatcccacactggagaatattttttattactgtctgttatatatgtgtctatgtgtgtgtgtatatttatgtgtgtatgtataaatatgtattttttaaaggagccttttccctcctttgattttaagataagcaatcttttggcataacattatcgtcttcctagaaaagccaagatgaagaatctatcttacaactttttctcttcagtagagaaaaacatgtaccatttcaggtgaacatacaaaattttcactttctaccttttgccttccaatgtcctgatttgtcttcaaaggtttttctccatattaatttgtcatcttatcctcatcacctgagaacattttactgcatacaaagtctatgcaagattatatgtaactagccatttagtataatctatgtcagtgtttctgtgctgtcaaattccgtcctgatttggaataccataccttgttctttccaaggtagactaggaagtgttggggaaatrgggtcacttcagagaccattttagatgtaagtttttaaatgtaagtgttactggggctaagtcaggtactttatttaaaacatttttttttctcatttcatagctagatagttgtaagagaaatacaaagaatttacaagatgcttctctgtcatctgccatatgcagagggactgaactaggaattttgtagttgaagctgtgttcataaagagtaaatcttattttatagattttggagaaataaaacaagaattttaagagctttcgtattagcagttttgccttataaaaactaagatttgtcagattagtttgaggtgtaacctaaa

SEQ ID NO: 698783 - DNA, 1291 bp, Homo sapiens
tggagctttctagtaggtgtccttcatagctcagaaacatacctcagaacaagccattcatgacttacctgtaatgggaaaataaatcattctatcagatcagcagttttgatgtttgagtgattttgatatgcttcacagagacaaatgctgccaaaataaacatcgaagtatagacatgagttctgttcagcaggttgaaaagtctgatttagaaaaactttctaagttttggttgaaattatgaacactctagaagcagaatttctggaagagccaagaacagactttgagcctatatcttcaaagctgaaactggatatctttcaataaaatatgtgcacttttaaaataaaatgactaattctgtgattcagacaatagttttaagttcagctgtgcttagatttctttcagattaatttaaaattacagatttttacttttagaattgcagagcccctatcccacactggagaatattttttattactgtctgttatatatgtgtctatgtgtgtgtgtatatttatgtgtgtatgtataaatatgtattttttaaaggagccttttccctcctttgattttaagataagcaatcttttggcataacattatcgtcttcctagaaaagccaagatgaagaatctatcttacaactttttctcttcagtagagaaaaacatgtaccatttcaggtgaacatacaaaattttcactttctaccttttgccttccaatgtcctgatttgtcttcaaaggtttttctccatattaatttgtcatcttatcctcatcacctgagaacattttactgcatacaaagtctatgcaagattatatgtaactagccatttagtataatctatgtcagtgtttctgtgctgtcaaattccgtcctgatttggaataccataccttgttctttccaaggtagactaggaagtgttggggaaatggggtcacttcagagaccattttagatgtaagtttttaaatgtaagtgttactggggctaagtcaggkactttatttaaaacatttttttttctcatttcatagctagatagttgtaagagaaatacaaagaatttacaagatgcttctctgtcatctgccatatgcagagggactgaactaggaattttgtagttgaagctgtgttcataaagagtaaatcttattttatagattttggagaaataaaacaagaattttaagagctttcgtattagcagttttgccttataaaaactaagatttgtcagattagtttgaggtgtaacctaaa

SEQ ID NO: 698784 - DNA, 1291 bp, Homo sapiens
tggagctttctagtaggtgtccttcatagctcagaaacatacctcagaacaagccattcatgacttacctgtaatgggaaaataaatcattctatcagatcagcagttttgatgtttgagtgattttgatatgcttcacagagacaaatgctgccaaaataaacatcgaagtatagacatgagttctgttcagcaggttgaaaagtctgatttagaaaaactttctaagttttggttgaaattatgaacactctagaagcagaatttctggaagagccaagaacagactttgagcctatatcttcaaagctgaaactggatatctttcaataaaatatgtgcacttttaaaataaaatgactaattctgtgattcagacaatagttttaagttcagctgtgcttagatttctttcagattaatttaaaattacagatttttacttttagaattgcagagcccctatcccacactggagaatattttttattactgtctgttatatatgtgtctatgtgtgtgtgtatatttatgtgtgtatgtataaatatgtattttttaaaggagccttttccctcctttgattttaagataagcaatcttttggcataacattatcgtcttcctagaaaagccaagatgaagaatctatcttacaactttttctcttcagtagagaaaaacatgtaccatttcaggtgaacatacaaaattttcactttctaccttttgccttccaatgtcctgatttgtcttcaaaggtttttctccatattaatttgtcatcttatcctcatcacctgagaacattttactgcatacaaagtctatgcaagattatatgtaactagccatttagtataatctatgtcagtgtttctgtgctgtcaaattccgtcctgatttggaataccataccttgttctttccaaggtagactaggaagtgttggggaaatggggtcacttcagagaccattttagatgtaagtttttaaatgtaagtgttactggggctaagtcaggtactttatttaaaacatttttttttctcatttcatagctagatagttgtaagagaaatacaaagaatttacaagatgcttctctgtcatctgccrtatgcagagggactgaactaggaattttgtagttgaagctgtgttcataaagagtaaatcttattttatagattttggagaaataaaacaagaattttaagagctttcgtattagcagttttgccttataaaaactaagatttgtcagattagtttgaggtgtaacctaaa

SEQ ID NO: 698785 - DNA, 2467 bp, Homo sapiens
tattttgtggtactagggtattctgtatcccggcacacccattctggtaaagtagacaggtctggagggtataagtgcattttgttagagactcttattttctcaggggctgcttgccctccttccacaattaaagtaaaaggtccactctaacttgccagttctagctctgtatacagaagcctacatgagaaaagaggtaagagagttgtgacaaggagaatgggctgaatgttttgggttcaaaaatctgtgacttagcaagactgtaccgccacagaacccgagtctcaaacctcaccaagaaagccaagaaacttcttctaactccaaattcatctgctatttacgtccaggcataagcttaacagactgcctcttttaaactacccctcacatgagtctccccaccctctcttacctctatattgagacttttcccatcagttggtctgcttacgtattactctcccattcaaggcacccaaggcctatcgcattcctgaacagagcctttcctgacacacaacacgtacattgctccaggaaagttccgtacaatcaaattcatgcctatcaataagtaggaccatgtgtactgaatatccatacatgcttcctcatgktaatgagggtcattcatctggtagaaaaccagtctccactgatgacgtacaatttgctatttgtttgtttggttctttgcttgcaaaaattcctttctaacatatttctctgtgggtttcttttccaataaccgatccattcgacctctatccaaaaggacactgaccttgtaggaaaggaaaaactttcctccaccctctttggttctgtgactgggtctgtgaaataaactgacaacaggcagacaaacagggaataaaaagtatataattttatttggtgttaaaagttttacacagaaaggggtgggaggaggacttcataagaatggctgtgcttggaagcttttatactatttggaaaaaagacaaaaatgctaaagagaagtgacatggcaaaggaaatggactttgaacttctaggggtggcagactgtatgaaggcaaatatgcaaatgtcgggagaaactgatgggagatgatggctggctcctagggctggtttgtgtaagccctttctggtgtcctctcatctccagtaatgaggctgttactccttttctgggaaattctccttaccggaagtagagctgggaggaacacgttcacaaggaaaattttatgtttcaggcagacgggaaaaggcagagagctcatcttgtgtctttttcttaactgttttcagctcaatgtaatctgtatgccagagtggtgtgttttggggtaacataatctgatctcttacagccctttatgtcatgaactttgccagagatacggaaaacattggggaggaaagggaagaaagaagggcaaagaaatgggggtaaaaaaaaaaagaggaacagagaatttaatacaaccagatgtatgaaaacaaaatttaaactgctccccccccaaatttgtgctctgtcttttctattttaagcgctaattctaaaatcagtttaaaaatacagcatatatatatatatatatatatatatgcacactacaatatgggaacacaaattgccactcaaaaaaatagacagggtattgggcttatggtcaagatacctggatattgcttttgattctctaagtgcacatatatgagcatccaaagataggtccacacacacgtatatacacacaagcatctatgtgtgtgtgtgtgaatgtgtgtgtttatgtggaaaagtcatttactacttgttctttggtttgcacaggagtgaaactgaaacaatcaagtacgtccatcccaatagttcctgtctttctttgaagagtcagtgatatggagacatgggataaatgggattgtaaatgtaaatgatacactcctagcttaaaggctttatgcaatttacataaatctgcatgctgagttcaaaaagcacaaatctgtagtattaaagttaattagggcaaactactatttaatatgaatccaatattcaagaataacacagataaaatacatacacaacagttttaaaaatcaattgttttaatcatgctctgattaggacagctaaaataagcttcacacagatatggcatggccagtggggtgcacgattcccacacaaggagaccactgcaggatcacagagcaaagatgaagagcatcccctgggagctgggagaacagggggctggggattcctgcttagtgtgccagtgagggaggtgggctgacagggccttcctaaagttttggttactccaaaaattggctggaaaaactcaaaacacactggccagtcccatggttagagggaaagactgtcccagcaagctctctgacatatttcttagcacttcagagagtgctcagcacatccacttgg

SEQ ID NO: 698786 - DNA, 2467 bp, Homo sapiens
tattttgtggtactagggtattctgtatcccggcacacccattctggtaaagtagacaggtctggagggtataagtgcattttgttagagactcttattttctcaggggctgcttgccctccttccacaattaaagtaaaaggtccactctaacttgccagttctagctctgtatacagaagcctacatgagaaaagaggtaagagagttgtgacaaggagaatgggctgaatgttttgggttcaaaaatctgtgacttagcaagactgtaccgccacagaacccgagtctcaaacctcaccaagaaagccaagaaacttcttctaactccaaattcatctgctatttacgtccaggcataagcttaacagactgcctcttttaaactacccctcacatgagtctccccaccctctcttacctctatattgagacttttcccatcagttggtctgcttacgtattactctcccattcaaggcacccaaggcctatcgcattcctgaacagagcctttcctgacacacaacacgtacattgctccaggaaagttccgtacaatcaaattcatgcctatcaataagtaggaccatgtgtactgaatatccatacatgcttcctcatgttratgagggtcattcatctggtagaaaaccagtctccactgatgacgtacaatttgctatttgtttgtttggttctttgcttgcaaaaattcctttctaacatatttctctgtgggtttcttttccaataaccgatccattcgacctctatccaaaaggacactgaccttgtaggaaaggaaaaactttcctccaccctctttggttctgtgactgggtctgtgaaataaactgacaacaggcagacaaacagggaataaaaagtatataattttatttggtgttaaaagttttacacagaaaggggtgggaggaggacttcataagaatggctgtgcttggaagcttttatactatttggaaaaaagacaaaaatgctaaagagaagtgacatggcaaaggaaatggactttgaacttctaggggtggcagactgtatgaaggcaaatatgcaaatgtcgggagaaactgatgggagatgatggctggctcctagggctggtttgtgtaagccctttctggtgtcctctcatctccagtaatgaggctgttactccttttctgggaaattctccttaccggaagtagagctgggaggaacacgttcacaaggaaaattttatgtttcaggcagacgggaaaaggcagagagctcatcttgtgtctttttcttaactgttttcagctcaatgtaatctgtatgccagagtggtgtgttttggggtaacataatctgatctcttacagccctttatgtcatgaactttgccagagatacggaaaacattggggaggaaagggaagaaagaagggcaaagaaatgggggtaaaaaaaaaaagaggaacagagaatttaatacaaccagatgtatgaaaacaaaatttaaactgctccccccccaaatttgtgctctgtcttttctattttaagcgctaattctaaaatcagtttaaaaatacagcatatatatatatatatatatatatatgcacactacaatatgggaacacaaattgccactcaaaaaaatagacagggtattgggcttatggtcaagatacctggatattgcttttgattctctaagtgcacatatatgagcatccaaagataggtccacacacacgtatatacacacaagcatctatgtgtgtgtgtgtgaatgtgtgtgtttatgtggaaaagtcatttactacttgttctttggtttgcacaggagtgaaactgaaacaatcaagtacgtccatcccaatagttcctgtctttctttgaagagtcagtgatatggagacatgggataaatgggattgtaaatgtaaatgatacactcctagcttaaaggctttatgcaatttacataaatctgcatgctgagttcaaaaagcacaaatctgtagtattaaagttaattagggcaaactactatttaatatgaatccaatattcaagaataacacagataaaatacatacacaacagttttaaaaatcaattgttttaatcatgctctgattaggacagctaaaataagcttcacacagatatggcatggccagtggggtgcacgattcccacacaaggagaccactgcaggatcacagagcaaagatgaagagcatcccctgggagctgggagaacagggggctggggattcctgcttagtgtgccagtgagggaggtgggctgacagggccttcctaaagttttggttactccaaaaattggctggaaaaactcaaaacacactggccagtcccatggttagagggaaagactgtcccagcaagctctctgacatatttcttagcacttcagagagtgctcagcacatccacttgg

SEQ ID NO: 698787 - DNA, 2467 bp, Homo sapiens
tattttgtggtactagggtattctgtatcccggcacacccattctggtaaagtagacaggtctggagggtataagtgcattttgttagagactcttattttctcaggggctgcttgccctccttccacaattaaagtaaaaggtccactctaacttgccagttctagctctgtatacagaagcctacatgagaaaagaggtaagagagttgtgacaaggagaatgggctgaatgttttgggttcaaaaatctgtgacttagcaagactgtaccgccacagaacccgagtctcaaacctcaccaagaaagccaagaaacttcttctaactccaaattcatctgctatttacgtccaggcataagcttaacagactgcctcttttaaactacccctcacatgagtctccccaccctctcttacctctatattgagacttttcccatcagttggtctgcttacgtattactctcccattcaaggcacccaaggcctatcgcattcctgaacagagcctttcctgacacacaacacgtacattgctccaggaaagttccgtacaatcaaattcatgcctatcaataagtaggaccatgtgtactgaatatccatacatgcttcctcatgttaatgagggtcattcatctggtagaaaaccagtctccactgatgacgtacaatttgctatttgtttgtttggttctttgcttgcaaaaattcctttctaacatatttctctgtgggtttcttttccaataaccgatccattcgacctctatccaaaaggacactgaccttgtaggaaaggaaaaactttcctccaccctctttggttctgtgactgggtctgtgaaataaactgacaacaggcagacaaacagggaataaaaagtatataattttatttggtgttaaaagttttacacagaaaggggtgggaggaggacttcataagaatggctgtgcttggaagcttttatactatttggaaaaaagacaaaaatgctaaagagaagtgacatggcaaaggaaatggactttgaacttctaggggtggcagactgtatgaaggcaaatatgcaaatgtcgggagaaactgatgggagatgatggctggctcctagggctggtttgtgtaagccctttctggtgtcctctcatctccagtaatgaggctgttactccttttctgggaaattctccttaccggaagtagagctgggaggaacacgttcacaaggaaaattttatgtttcaggcagacgggaaaaggcagagagctcatcttgtgtctttttcttaactgttttcagctcaatgtaatctgtatgccagagtggtgtgttttggggtaacataatctgatctcttacagccctttatgtcatgaactttgccagagatacggaaaacattggggaggaaagggaagaaagaagggcaaagaaatgggggtaaaaaaaaaaagaggaacagagaatttaatacaaccagatgtatgaaaacaaaatttaaactgctccccccccaaatttgtgctctgtcttttctattttaagcgctaattctaaaatcagtttaaaaatacagcatatatatatatatatatatatatatgcacactacaatatgggaacacaaattgccactcaaaaaaatagacagggtattgggcttatggtcaagatacctggatattgcttttgattctctaagtgcacatatatgagcatccaaagataggtccacacacacgtatatacacacaagcatctatgtgtgtgtgtgtgaatgtgtgtgtttatgtggaaaagtcatttactacttgttctttggtttgcacaggagtgaaactgaaacaatcaagtacgtccatcccaatagttcctstctttctttgaagagtcagtgatatggagacatgggataaatgggattgtaaatgtaaatgatacactcctagcttaaaggctttatgcaatttacataaatctgcatgctgagttcaaaaagcacaaatctgtagtattaaagttaattagggcaaactactatttaatatgaatccaatattcaagaataacacagataaaatacatacacaacagttttaaaaatcaattgttttaatcatgctctgattaggacagctaaaataagcttcacacagatatggcatggccagtggggtgcacgattcccacacaaggagaccactgcaggatcacagagcaaagatgaagagcatcccctgggagctgggagaacagggggctggggattcctgcttagtgtgccagtgagggaggtgggctgacagggccttcctaaagttttggttactccaaaaattggctggaaaaactcaaaacacactggccagtcccatggttagagggaaagactgtcccagcaagctctctgacatatttcttagcacttcagagagtgctcagcacatccacttgg

SEQ ID NO: 698788 - DNA, 650 bp, Homo sapiens
agagcaatggaatgaaaccacttcctattaaggggttctgattacacattagatgagaagacacaaacaaacagaactctgattaaatcaacatggcaacaaggttgttttttaaactaaaagtaacatgcttctctatctgccatgtacataatcagtgagtgayacttttgccaacacctatttatgatgcaagtgaaaattgtgaaaatcagtcccttcaaaagagggaaacattgtttccttcctcacagcaagcctgctttcttatcagaagcatgtcatgcctataaagactgcaatgcacattcccaagactgtcagtcaaagagacctaccttattcatggtcaatttatcaggaagacaggcaattacagtttgattagtatgcaataaatggtgtttctttccaatctatctagcaaagtggttgagcaaaaattctttggtgtgatttacaccctaatggactacacagtagaaaggtgtttcatgtcaagggttgagtaaagagaagagttgggggagttggtagaacatttaatagaggaataaagcccaggaagtttggacacccttctgcaggaaggtctgctggtactgaggacactgtcaaaatctgctgtgatttctcccagctcccgatta

SEQ ID NO: 698789 - DNA, 632 bp, Homo sapiens
tagaggaatgtttcctttcttagggttttgtcttttgttcactcccattccctcttttgtcactgctgctgttaccattgtcagcagaggattgcctgaagtccagcgggtaggcaaatgaacaaaataatttttttttaattgagggttttttttacattctctctgagtgttttgcattccctttcctataagccagaactaaaaggcttctcctgggctttttctttccgtctgcttttcagggctcacttctttgtttgttgtgtgttgagttcagaccaggggatacaggagtaaaaaagttaatcatgttaccacttgtttgctggtatttgaattctgttcttcttcctcagtccatctgctgctatttacttttgaatcctcaaatagctgctccttgtattctgtccaggatttagagctgtgttcagtgggagagatggtgtagagttattgctccattgtacccgcaacctgaatgttccaactttaaagcaacattttcttactatttttgaaaaaagttttttgatcatttgcttgaagaraatcctgacatagttgttaagttgaagtgctctaaaagtttagatattttgtaagtacttattcatgggaatttgaat

SEQ ID NO: 698790 - DNA, 615 bp, Homo sapiens
atgggattggtgggttttattgtaagataatgggtcaggaacctagccatttgttgtaagcttcccagatggcaatatctgtagataaactttttaggggcatctattttttagggaagacttatccagtcttctggtgggatgggggtagtagataataaaacaggctgctctggtgtttggcaccaagggaactggggatgagatggggattttgtcatttaatgtgtagactttcatttaatccccggtttttgcctttttctactatctactgtatctggttgacttcttccagtgttctgttgggaggaattacttggttatctgggatgcaggaggcgtcctagggaactgacagcttcttttaagtgtttcttctgttacctactctgtcctgctttgttcagctctacaaatattgttcaatttttactcccaattgtaggttagcttttcatcycagaaaggtaacatttgatgagaagcgtaatgaagaaaccatgggcttggagttagattattaaaatgaccttgggaaaattatttaacttctgagttttttaaaacaattttccttccaccccccaagaaagcatttataagtccatattc

SEQ ID NO: 698791 - DNA, 615 bp, Homo sapiens
atgggattggtgggttttattgtaagataatgggtcaggaacctagccatttgttgtaagcttcccagatggcaatatctgtagataaactttttaggggcatctattttttagggaagacttatccagtcttctggtgggatgggggtagtagataataaaacaggctgctctggtgtttggcaccaagggaactggggatgagatggggattttgtcatttaatgtgtagactttcatttaatccccggtttttgcctttttctactatctactgtatctggttgacttcttccagtgttctgttgggaggaattacttggttatctgggatgcaggaggcgtcctagggaactgacagcttcttttaagtgtttcttctgttacctactctgtcctgctttgttcagctctacaaatattgttcaatttttactcccaattgtaggttagcttttcatcccagaaaggtaacatttgatgagaagcgtaatgaagaaaccatgggcttggagttagattattwaaatgaccttgggaaaattatttaacttctgagttttttaaaacaattttccttccaccccccaagaaagcatttataagtccatattc

SEQ ID NO: 698792 - DNA, 1424 bp, Homo sapiens
gatgatgaaaatgagcaccagttttctttaagaatggccagttcaggagcyggtacctatgatgaattgcacatcgttgaagcagaagcaatgaaatataaacgcagtccaaataaaagtaacactggcaactttgaaaatgtctgtacagccaacagtttcctttgtgggctttgaaataccaccacctatggtcttatggttgaagcatagttcagggccagtgcatattaatgggcagcacttaacagctgtggaggaagatgcacagtgagaagatgaagaggaggaggatgcaaagctcttaagtatatctggaaagcgagctgcctctagaggtggtagtgaggttccacagaaaaaaagtaaaaacttgctgctaatgaagataatgatgatgacaatgaagatgacgatgacaagggtgaggaagatgaagaaaaagctcagtgaagaaatctatataagatactccagccaaaattgcacaaaaatcaaaccagactgaaaaagactcaaaaccatcaacatcaagacccaaaaggtcaagaatccttcaaaaaacagaaaaaaaaccctcccaaaacgctaaaaggacctagttctgtagaaaacattaaagcaaaaatgcaagcaagtacacaaaaaggtggttctcttcccaaattggaaaccaatttcatcaattatgtgaagaactgcttcctaatgactgaccaagaggctattcaagatctctggcagtggagcaagaagtctccttaatagtttaaacagcttgttagaaaatttctgtcttatttcatttctctatcatttgatatccacctgtctttttgtaatgcagagtgagaaatttacataccatatctgataaatgttgtccaggttccattgccaagaatgtgttgtccaaaatgtctgttcagttttctaagatggaactccaccctttgcttggttttaagtatgtatggaatgttatgataggatatagtatagtagtggtcagacacggaaatggtggggatacaaaaatgtgtgtgtgaaataaactcattattaaaatgttttttgaagtaattttatatttatagaaagtttcaaacattgtacaaaattcccatgtactcttcacccagtttcccttaacgataactggttacataaaaccagtgtattcttaaacttttattttctacagttatgacagttatatagatatataattaatttttactaaaccttttaagtgagttttaaattttcactgatttttaattaactacccactttgttaaatttacatattaattcataatttaaatgaacatcttttaatagattttcttcatactcaattacaaatcatctgtaaatagtgaaagatttatttatttttctccaatactgatatctttttc

SEQ ID NO: 698793 - DNA, 1424 bp, Homo sapiens
gatgatgaaaatgagcaccagttttctttaagaatggccagttcaggagctggtacctatgatgaattgcacatcgttgaagcagaagcaatgaaatataaacgcagtccaaataaaagtaacactggcaactttgaaaatgtctgtacagccaacagtttcctttgtgggctttgaaataccaccacctatggtcttatggttgaagcatagttcagggccagtgcatattaatgggcagcacttaacagctgtggaggaagatgcacagtgagaagatgaagaggaggaggatgcaaagctcttaagtatatctggaaagcgagctgcctctagaggtggtagtgaggttccacagaaaaaaagtaaaaacttgctgctaatgaagataatgatgatgacaatgaagatgacgatgacaagggtgaggaagatgaagaaaaagcycagtgaagaaatctatataagatactccagccaaaattgcacaaaaatcaaaccagactgaaaaagactcaaaaccatcaacatcaagacccaaaaggtcaagaatccttcaaaaaacagaaaaaaaaccctcccaaaacgctaaaaggacctagttctgtagaaaacattaaagcaaaaatgcaagcaagtacacaaaaaggtggttctcttcccaaattggaaaccaatttcatcaattatgtgaagaactgcttcctaatgactgaccaagaggctattcaagatctctggcagtggagcaagaagtctccttaatagtttaaacagcttgttagaaaatttctgtcttatttcatttctctatcatttgatatccacctgtctttttgtaatgcagagtgagaaatttacataccatatctgataaatgttgtccaggttccattgccaagaatgtgttgtccaaaatgtctgttcagttttctaagatggaactccaccctttgcttggttttaagtatgtatggaatgttatgataggatatagtatagtagtggtcagacacggaaatggtggggatacaaaaatgtgtgtgtgaaataaactcattattaaaatgttttttgaagtaattttatatttatagaaagtttcaaacattgtacaaaattcccatgtactcttcacccagtttcccttaacgataactggttacataaaaccagtgtattcttaaacttttattttctacagttatgacagttatatagatatataattaatttttactaaaccttttaagtgagttttaaattttcactgatttttaattaactacccactttgttaaatttacatattaattcataatttaaatgaacatcttttaatagattttcttcatactcaattacaaatcatctgtaaatagtgaaagatttatttatttttctccaatactgatatctttttc

SEQ ID NO: 698794 - DNA, 1424 bp, Homo sapiens
gatgatgaaaatgagcaccagttttctttaagaatggccagttcaggagctggtacctatgatgaattgcacatcgttgaagcagaagcaatgaaatataaacgcagtccaaataaaagtaacactggcaactttgaaaatgtctgtacagccaacagtttcctttgtgggctttgaaataccaccacctatggtcttatggttgaagcatagttcagggccagtgcatattaatgggcagcacttaacagctgtggaggaagatgcacagtgagaagatgaagaggaggaggatgcaaagctcttaagtatatctggaaagcgagctgcctctagaggtggtagtgaggttccacagaaaaaaagtaaaaacttgctgctaatgaagataatgatgatgacaatgaagatgacgatgacaagggtgaggaagatgaagaaaaagctcagtgaagaaatctatayaagatactccagccaaaattgcacaaaaatcaaaccagactgaaaaagactcaaaaccatcaacatcaagacccaaaaggtcaagaatccttcaaaaaacagaaaaaaaaccctcccaaaacgctaaaaggacctagttctgtagaaaacattaaagcaaaaatgcaagcaagtacacaaaaaggtggttctcttcccaaattggaaaccaatttcatcaattatgtgaagaactgcttcctaatgactgaccaagaggctattcaagatctctggcagtggagcaagaagtctccttaatagtttaaacagcttgttagaaaatttctgtcttatttcatttctctatcatttgatatccacctgtctttttgtaatgcagagtgagaaatttacataccatatctgataaatgttgtccaggttccattgccaagaatgtgttgtccaaaatgtctgttcagttttctaagatggaactccaccctttgcttggttttaagtatgtatggaatgttatgataggatatagtatagtagtggtcagacacggaaatggtggggatacaaaaatgtgtgtgtgaaataaactcattattaaaatgttttttgaagtaattttatatttatagaaagtttcaaacattgtacaaaattcccatgtactcttcacccagtttcccttaacgataactggttacataaaaccagtgtattcttaaacttttattttctacagttatgacagttatatagatatataattaatttttactaaaccttttaagtgagttttaaattttcactgatttttaattaactacccactttgttaaatttacatattaattcataatttaaatgaacatcttttaatagattttcttcatactcaattacaaatcatctgtaaatagtgaaagatttatttatttttctccaatactgatatctttttc

SEQ ID NO: 698795 - DNA, 2836 bp, Homo sapiens
tgtcaatgaaagtgagaagaactctccattctttaatgtgttttatgtattatattttcatttcctttttccaaatgaattataatgtacaacacatttgtatttttctttaatttttcacttttaataatctttctttttcttaactttgttcttccatatactgatagacctgacacaacaaaatttacctttcaaaaattcaataatcccatattcattgttacccttaaagtatctgctaggaattctatattcttatttatgttcccaagaaagtttaatgcaaaaaatatagaaaagcatacattatttaaacctcccttcctttagtttatattgaaaaaattttaggttgtgcttatgcaactgaagaccaccaaccaaaagggacaagctggtatttagggcatcataataactaactcaaatttaccataagacatacatattaattagtaagttcaatagtcaatatagccaaaaataatcatttcagttagcacttactggaaattttagcaatctaaacactcacatggtcaggtttaatattgtccagcaatacctttattcctttctctttctcaagcctggtctttctaaacatatagagaaaaggcacaggtctcacactttaaatcaggtgacatcattgtcattctttctgcgttctggtctccaattaaattccctttccttcttaggcccaaggctttgactatcttttgcaatatgcagtagattattaatgttcaaactctgaccagttggtgattttcaaacagatgcctccaaggtagccaacagttgcagtattcactctcctttttctatctttttggaagtcattcataaatttaaaagggtggttttaatatttaattcagcattttgagatttttttttattattattttttttgagacggagtctcgcctctgtcgcccaggctggaatgcagtggtgccatctcggctcactgcaagctccacctctcgggttcatgccattctcctgactcaggctccggagtagctgggactacaggcgcctgccaacacgccccgctaattttttgtatttttagtagagacagggtttcacagtgttagccaggatggtcttgatctcatgacctcgtgatccacccgcctcggcctcccaaagtgctgcgattacaggcgtgagacaccgcgcccggccagcgagatactttcatataggaatatttaagaatatgtaatctctcatattgccatcaattttttttttttttttttttttttgagacggagtctcgctctgtcgcccaggctggagtgcagtggcgggatctcggctcatgccatcaattttaaagtcactaattgctctacaaaagcagtgtatttcatctccacgaaaagcacgtgtactaaaatggccagagttctcccagtcaaaaggtcatagaatggcagcaaggtacaaaacacactttgctttacagtaaacacagataaattaagaaaaacatgtaactccacacagttgaatctgttctgaaacataatcatttcttaaagaaagagatcataggggagatcactccatcctcattggaaatgttgggttaagagcaaaagattatgagtatagagacatttgaatgcatgtgttcaaagaaagccagtaaaatccctgatttccttccacataggaagaaaagtagttggcttttgcaatcaggtaacatttctttctggctaggtcaattatccatggagctacagatccacaacctattctgattgtctgcacatctggtgtaagcctttataatgcaaatattaatattattatgcttctgtaacatatttctataattaaaatcaaataagtgatttcagaatacaggtgactatgcaaaaaatgttatctaggggacaaagaagcaccccaacatcaacttataaaataaaaatagcatttatttcttgcactcccttactgccacaaaaaaacactcaacatcctgtttgacattattggtgtacagggatcacagaaagacactaacattttagaaaattttacacacgttgaattgtgcgtgatctgaaacagcagcactttgttgacactaatcattagataattacatcctttgagttactgtgctgtctaaaattaacaagacagccaggcacggtggttcaggcctgtaattccagcactttgggaggccgaggcgggcagatcacgaggtcaggagttcgagaccagcctagccaacatggtgaaaccccgtctctactaaaaatacaaaaattagctgggcgtgatggtgcacacctgtaatcccagctacttgggtggctgaggcaggggaatcacttcaacccgggtggcggaggttgcagtgagccgagatcgcgccactgcactccagcctgggcgacagagygagactctatctcagaaaaaaaaaaaaaaaaaaaaaaaaattaacaagagcaaagtacttgagcaatgcttaagttttctctctcatattttttcttcaaattaacaacatacatttttacttcaatatatatgaaaaataatcatatggaaacattacaggtttgtaaaataatgatgacaatagtaactatgtgttctatgtgcagaagaaaaggtacattttgttttataaaatactacaggcaaaggcatgcattacagttaaaaaaatgatatgaatgatagatttttaaaaagattttgtatatgtttatctaataagcaaaatcatattgcaaattcataaaagaaaggcaaaatgcatatgatagtcttaacactactg

SEQ ID NO: 698796 - DNA, 1747 bp, Homo sapiens
gttggtggcttggactagggtgatagtgctgagtagtaactttatgcagattactaccatacttaatcttcaactgcgattgcttccctctgtctctctcttttgattaataactccatttgcttgcagttgcatctcctcatgtctaaacactcaaagagccctttagtttcccagtccttggctgatcctttctccatccagtcttcctataactgtcgggacaatatcgtggctaccttccctcatccctatgcaagaactggtggtggattctgaacaaaccaaagtgattctgccttgtattcaaggaattctatcagacgaaccaactctacttgtacaagcatatggctttactagtctttaaacactacttatttcaacttctggcaacagcttggttattcatctaaaaagcatccattatgccttctatgtcaaacatgttgttaaacatgatgctttcgcccgtgttcactaagttaatctttacaaccaacccatgagattggttttattatcctcatttctctaatatgaaactaagagttagaggggtttccttgttcaagataaaaaactagtaagaagcagagctgggatttgaacctaagttctctgattccatgcccagtgtcctttcttgagcttttctcttgcaaactctcaattgtatcaatctgtgatactttctctttggctttctgttgacgcacagctacttctactctccaaccctttcaagaactttcttgaaatttgtctcatatggaagtctttgtcattttttctcatgctttgaacatagttgaattacagactgttttttttttttttttttttgagacacagtctcactctgtcacccaggctggagtgcaatggtgtgatctcagctcactgcaacctccacctccagggttcaagcaaatcttgtgcctcagtctcctgagcagctgggattacaggcatgtgccactatgcctggccaatttttttgtatttttagtagagacggggtttcatcatgttgctgaggctggtctcaaactcctgacctcgtgatccacccacctcggcctcccaaagtgctggaattacaggcatgagccaccgtgcccagcctacagactgttttgtatggtgacaatatcaattgcaattagttcgttggcctccagtaattctatttctctacaacctgtctcttcaaccagatatcaggattcccaagggcagaagcaagcaatatagtcttccttatttttttggtattagcttttagtactcagaaaaatgcagttttatttacccataattgttgcttgtctaataaatgggtaaataaaacaagaaccttgcattaaatccatgtatctggctgcagataattctccacatcctttgattttcttcttacattcacagaatctaagtcctaataagaaccatttcccttctttttggcaataaaaatcccaacatgttccctattgtggtatcttatttgataacctttctaattagcgttacattttaaatgcttttatartgcctcattacatatttgtccaatagtccatgacagttcagatatgtaattgctattatggattacctggtgaccatcattaagtaattagagagacttaaacatgtgtagtgctaattaggaaagttatcaactatgggcagttaagataatagggaacatcatgatgattttgtttcggaactgcagtaa

SEQ ID NO: 698797 - DNA, 1489 bp, Homo sapiens
taaagaaaagttatacaaatatgaacaaaaaattaaagtaaaaattcaggatgtctgaatcccaagaaaacagaagttggttaccatggttagaagtcaggctgactgtacataattctaactaacaattattagtcataattgacaatatttatttcaaagattgaatttttattaaacttgatatattatcactagcttgagtcctccccaactttcttacttttattactaaagttaccaaaagaagcatttaaaatatattttagtacacagtatcactagtcatcagagaaatgcaaatccaaaccacagtgagatataatctcaccccagttagaatggctattaataaagagacaaagaataacagatgttggtgaggatgtggagaaagtagataggcttttggtgggaatgtaaatgattacagcctgtatggaaaacagtatagagatttctcaaagaactgaaaatagaactaccactcgatgcagcaatcccattactaggtatctacccaaaagaaaagacatcaatatatcaaaaaggtacttgcacatgtatgttcatcatagcactattcacaaaagcaaatgtacagcatcaaacttaatgtcaatcaacgcatgaatggataaagaaaatgtggtatatatacacaatagaatagtgttcagccataaaaaagaatgaaaacatgcattttgtagcaaaagggatggaactgaaggtcattatcttgagtgaaacaagtcaggcacagaaagacaaatattgcatggtctcactcataagtggtgctaagaaatgtgttcacatggatgaggagactggaatctcgtctcttgctttcacttgctcactgctcaatagtagtgtgttgacttgttaccaggcttgaggtagctcccctgtaatgcctgctttgtgtctaatttcctttcttaattgagtgtatgatatttgatgaaaacattagactgaagtaagtccactagcctttgaactcatccatagatcccgacacatggttggaaatcaatacatatttttaaatgaatacactaataaataacaaagttttggggagttactttagaagttcacttatcttttattatctgatcatcatttgttagataattctcaaatttgaattttctgaagataataaagtgtataaaatgagctgactttagaaagcagacttattaggtatcagrtattttgtatagaggcattaaatgaattacaaaagagatatgttttcatactatcatgaagttttcattctagtgaaagagaagagagtaaaacaaaaatatgcagaagagagtaaagcaaaatatgcagataaagaaattaaaaattattaaggtcaataaaaacaacaaactagagactagaatagacaataataggatataatttctagcagagagtgatcgtgtaaagcatcactgctgagatgacatttaagctgata

SEQ ID NO: 698798 - DNA, 1225 bp, Homo sapiens
tgaatgacatttttaaaagttatcaataataaaacaacttttgaacaaccaatggaagatgaaaaaaaggcttacaattttctctatagaaatattattataaaatattacctaaaagacaataaaataatagaaaaatacagaaaattattgtagagtatgtcacataatatattttmttgtttttctgtattttattatgttgtgtcagcttcttgaaatttatgattatgatatattttctctgtctaaataaatattccataccgtatgtattttttgtttcttcttttgttttaacctaaagatgttcaccaaattgtgtaaatttaagcttcaaaaaaatggattcaccattgccattatatggagtacaaaaataaacactgaaagaaaaatttaattgtgcagtaattctaattgttttgcatttgatatctttcttcaattaaaattgtatcacacttgatttggattcaaatgttcccattgtcttttaaacctcagaaaattatcaaggtattttctgttatttgtacatcttgttccatgatcttaaaaatgttactggtgcaatagcaccttgaacatattacttctctccatttaagcatcttcttcttttaaataataaaagaaaaatatctttattattatagagtaaacaaaaataggagcttggcatacatcggttaaaaataacaaaattcacaaatacatgaaattaaatagtataaagattttgtcaatacctatttgcaattctctcatgatttccatagaaattcactaatcatgtcatttttaaacaacaaaaataatattcctaagcataaaatcaattcaaccttttctctgtctaggtgccttcacacatagaaagaatcttctcccaatgaattatgtgtatctcataagtgatgatttcaacaacttctgatgattttgataaagttgaagtttatatttctgtaaattagtcaccagacatttctcttgttccattcaaatgcctcattattattacatctgagatttcgtattatttgccttaggttgttgggctttgtaaatgaacaaccactttctgtgatctcataaataattccatttcctctactactattccttcaatcccctcagccaaactgtgttccttcaacacatctcaaaatatatcttagggagtctgtaaacatactcctctctatcacataaattacca

SEQ ID NO: 698799 - DNA, 1508 bp, Homo sapiens
gattattaagtctccctcacaagtaccttctattcatatactatacacataaagagagaaactactctgtagaacactgtaaattataccagctgagctttaaaaaccatacaaatgtagcctgtgaataagctgaattcccacctaccgtgggagcacaatactagatataagagctgttctggaattccaaagatgaacaagcataggaagaatacagaatgccagctataaaacaattgaacaaacacatttccccttttcccaaaacaatttacatgcagttattttgtggcatctatgactattaatacatagatactttacataattaagttagaatatacaaaattcaattatttatgtttctataactaaatgattgttccttgttgtaaaactactttcctgaaaacccataatcatatcagtttaaatctaacaataacatttattgatctttactataatttcaaacttcctacagaattaattttagcctacaatataaatgacagccatattcgaagtaaagcacatgtatgtaaagaagcaaacttggtaagaggaggcaataaactgaaagatatcctgaaaaataatgttttacaattagtaacatacataccactaagtatttaagaagagaagtttcatttttataaaagaaaatccacagtattttttggagagtaatagtggccagaatgggtgataatagaatatggggtttcttttagtgctgtggatagaagcaaaaggtgaagatagactggtatatggaactatagcctcttcatattgctccaaaccaagagtgagagatataaaaaataaggtatatttatatgaaaagatacatagatttgaacgaaagaggaaaccataactccaaatgagcagaaacagaataatgcaaaatataatgaatatgaattgctagagttgccagctaagttaacatttgggtgaatgtgtgaagtgtcactgcagaatctgacaagcaaatcaatattttgttaacaatgtcaaccagggtagtagagctgtcaactcccaagcaggggkgttgggtgagacacagggaaagagacacagagctggctgactggctgacatatttaggagtacagggaagccctctaagccagaggatagcttctgccacatcagaggtagtgatgagagctaaataacaaaatgggaagagctaaatataaaaattagtaggctcaagaattctttcaaattatggtgtgcattctgtagttatttgttatttatttgttatttttcaaagcagaattcctaccctctgtccatttcttgtgataacaacatctttactttcttttgaaaatccacctttcctctctcagttcctgagtctagggaagtgggaactggggaactgctactgctgcccttttgagaaaaggagaaatattttctgaggaaggcatcacagaaaaacttagatgagataagagactctaagaaccaacacg

SEQ ID NO: 698800 - DNA, 605 bp, Homo sapiens
tgaatgtatttcgacatggcttttctttttctcttcccctacccaccccccgacccccatctcttcattttttttctgtgtgtcaattgcctgcccatgacatttgctcagtgttctgttgggacagacacacactaagggcaggacaatggcatcagcctaccctgggtacaggccatatgggggtatatwgcctgtagacaatttaaaaccagtaatgaaacctgttaaaggtcaacctacaccagctttctaaacaatgtaaatgataaaatactccacccagtcctctcttttcttttcttaatggtctatacattctttatatattatagtcattaaacctttgtctgacattcatgatatctgccctttcattttgtggatagcttttaaattgctttgagtaagtgattcattcacatgtttaaaattcaaaaagtacgaaagggtcatcagggaaaagtatccctctcatcccagctacctaattctcctcttttcggacaccatagtgattaacttcctatacatcctgccaaaaaagaatttatgcataaatatttctcctcttttaatcaagtaggagcatactataataattt

SEQ ID NO: 698801 - DNA, 632 bp, Homo sapiens
ctgagtggatatttcatctgtcagtgcaatttgctttctggagtggttcttggttatacttgagtataaatatactgccacaggatgaagatgaycatataatttggaaacagaagaagagaaagaaattgcttccgaaataccttcatagaatcttaaaatcagtagagccacaaagtcacctaagcttaatatttcttccaaatgtcccgaggaactaacatatgtttcagaagactctttcagcatcatgaaaatatatttagaaagactctaatttttgcctctaatatgttgactggtttgacaagtatgattaaaattcttcaaaattcaaatttcataggtaggtttcttttttctcgccctccctccctccttccctccctctctctctctctctgtctcccttccttccttccctccctccctcctccttctttccttccttccctccctcccttccttccttctcctagaaatatcccttaaatcgatttattttacaaagtttttgccccaagatagtctagcagttaggaacagggactctagactcatgtggccagggttgaaatctcaactgtcatttacccactctgggacctgggcaggttacttaatctgtctca

SEQ ID NO: 698802 - DNA, 1352 bp, Homo sapiens
tacagtacctcacagagtgccatgcacatggtgttcaatatataatattcaacgaatctaagtatcattatcctgccccagtgagggacagggtttaactgtaggtttctgagcaatttctggccatgatgagtatttgtaggcacagggattcccactccaggaagaaagtaaaatgagaggtcatgtgtttattctttggtctttttgacctttgaatcctgtctaccatgagtttaacatggacataccaaatcatgattttatcttattttggctgactaattcttgcatagctatatcaatatacatgtccaatccctcgatattagctaaactcaagacctttgcccattcttattgtcaatccatcatccaaaccrgttcattgatcaaactgtgacatattctccatgtctggaagtatatggaaatttttaaagttccatgattcagaaaatagagacaacaggtcaacagaaatatgtttatttctacagaaaatttagcttgcctagatcatttctgtaattttttaaatcctaaattttccatttttgttagtgctactctttcaaagtacctataagcatatcttttattaagtattttattaaaatactaaataatttcaatccaagattattctctctgtatttctgattataatattttctgagattttatatttagcattaaaaaattggggttctacttaaattacattcctcaaatataattatatttaattttctatgtgtttctctgtatgtaaaggggagaatgctaaagttagaccttagttaatatgagcaaattgctttcagtaaagacgttttctgaagtaataaataaacaactgcgaggggatgttatgtattttttttctttttagtaaattttagtaaattagatttcctgtgccaccatttatagtccccctagtaaagttccttttaacctaattcactagagtgaattattgggcattgattgagtgaatagttatcaggagtcacaatctggcaggtggtgagaaaaatttttatgagaaaatgtttgtaaaaattatatgagaaatatcttctcttaagtatgtctccaaggttggttatgagtttcattatgccattgaaaagagaaccaaagtttccatagaaccacagaattcagcaatcaagtgaagctagttttagattgtgaagcacatgcattaaactcagccaatgcttcatttcactgaagtcacttttagaagcaattgttgcatgattttggaaggaaaatttcatggttggtcattgaaaagagaagagaacaaactgactgatctgttttttagaggttcctca

SEQ ID NO: 698803 - DNA, 1352 bp, Homo sapiens
tacagtacctcacagagtgccatgcacatggtgttcaatatataatattcaacgaatctaagtatcattatcctgccccagtgagggacagggtttaactgtaggtttctgagcaatttctggccatgatgagtatttgtaggcacagggattcccactccaggaagaaagtaaaatgagaggtcatgtgtttattctttggtctttttgacctttgaatcctgtctaccatgagtttaacatggacataccaaatcatgattttatcttattttggctgactaattcttgcatagctatatcaatatacatgtccaatccctcgatattagctaaactcaagacctttgcccattcttattgtcaatccatcatccaaaccggttcattgatcaaactgtgacatattctccatgtctggaagtatatggaaatttttaaagttccatgattcagaaaatagagacaacaggtcaacagaaatatgtttatttctacagaaaatttagcttgcctagatcatttctgtaattttttaaatcctaaattttccatttttgttagtgctactctttcaaagtacctataagcatatcttttattaagtattttattaaaatactaaataatttcaatccaagattattctctctgtatttctgattataatattttctgagattttatatttagcattaaaaaattggggttctacttaaattacattcctcaaatataattatatttaattttctatgtgtttctctgtatgtaaaggggagaatgctaaagttagaccttagttaatatgagcaaattgctttcagtaaagacgttttctgaagtaataaataaacaactgcgaggggatgttatgtattttttttctttttagtaaattttagtaaattagatttcctgtgccaccatttatagtccccctagtaaagttccttttaacctaattcactagagtgaattattgggcattgattgagtgaatagttatcaggagtcacaatctggcaggtggtgagaaaaatttttrtgagaaaatgtttgtaaaaattatatgagaaatatcttctcttaagtatgtctccaaggttggttatgagtttcattatgccattgaaaagagaaccaaagtttccatagaaccacagaattcagcaatcaagtgaagctagttttagattgtgaagcacatgcattaaactcagccaatgcttcatttcactgaagtcacttttagaagcaattgttgcatgattttggaaggaaaatttcatggttggtcattgaaaagagaagagaacaaactgactgatctgttttttagaggttcctca

SEQ ID NO: 698804 - DNA, 1352 bp, Homo sapiens
tacagtacctcacagagtgccatgcacatggtgttcaatatataatattcaacgaatctaagtatcattatcctgccccagtgagggacagggtttaactgtaggtttctgagcaatttctggccatgatgagtatttgtaggcacagggattcccactccaggaagaaagtaaaatgagaggtcatgtgtttattctttggtctttttgacctttgaatcctgtctaccatgagtttaacatggacataccaaatcatgattttatcttattttggctgactaattcttgcatagctatatcaatatacatgtccaatccctcgatattagctaaactcaagacctttgcccattcttattgtcaatccatcatccaaaccggttcattgatcaaactgtgacatattctccatgtctggaagtatatggaaatttttaaagttccatgattcagaaaatagagacaacaggtcaacagaaatatgtttatttctacagaaaatttagcttgcctagatcatttctgtaattttttaaatcctaaattttccatttttgttagtgctactctttcaaagtacctataagcatatcttttattaagtattttattaaaatactaaataatttcaatccaagattattctctctgtatttctgattataatattttctgagattttatatttagcattaaaaaattggggttctacttaaattacattcctcaaatataattatatttaattttctatgtgtttctctgtatgtaaaggggagaatgctaaagttagaccttagttaatatgagcaaattgctttcagtaaagacgttttctgaagtaataaataaacaactgcgaggggatgttatgtattttttttctttttagtaaattttagtaaattagatttcctgtgccaccatttatagtccccctagtaaagttccttttaacctaattcactagagtgaattattgggcattgattgagtgaatagttatcaggagtcacaatctggcaggtggtgagaaaaatttttatgagaaaatgtttgtaaaaattatatgagaaatatcttctcttaagtatgtctccaaggttggttatgagtttcattatgccatygaaaagagaaccaaagtttccatagaaccacagaattcagcaatcaagtgaagctagttttagattgtgaagcacatgcattaaactcagccaatgcttcatttcactgaagtcacttttagaagcaattgttgcatgattttggaaggaaaatttcatggttggtcattgaaaagagaagagaacaaactgactgatctgttttttagaggttcctca

SEQ ID NO: 698805 - DNA, 575 bp, Homo sapiens
aggtcagcatagtaagtttctcaaaggggtaagaaagaatattgataaaaagaaacagggataaatatttatgaaaaacaaatggagaagattaagtatgaaactacatagcagattaaaaactaaataaaaagrcattgaaaggtggaatagatacagcaaaagaataaataagttgctgtcgaattggattaatgaattatgagtcaacaagaagggagaaagaaggaagattttaaataaaatttaaaaggtatgaaggataaaagtagaaatgtcagcattcatataataggaatctcaaaaggaagagaaaaacatacatgggaggaagaaaatagttttcaaactaattatagaacatttgccataacttaagtgacatgaaagaactcaggctgaaaggacttagagtatgaaacagtattcctaaggaagggggaaaaagtcaatatccagctgtattaaaatgaaatttagaaacatcaaaattagaaaaaagttagcaaagttatagaataaagcaataacatactatgttttaactgatagatatatagggaaatttatatcca

SEQ ID NO: 698806 - DNA, 575 bp, Homo sapiens
aggtcagcatagtaagtttctcaaaggggtaagaaagaatattgataaaaagaaacagggataaatatttatgaaaaacaaatggagaagattaagtatgaaactacatagcagattaaaaactaaataaaaagacattgaaaggtggaatagatacagcaaaagaataaataagttgctgtcgaattggattaatgaattatgagtcaacaagaagggagaaagaaggaagattttaaataaaatttaaaaggtatgaaggataaaagtagaaatgtcagcattcatataataggaatctcaaaaggaagagaaaaacatacatgggaggaagaaaatagttttcaaactaattatagaacatttgccataacttaagtgacatgaaagaactcaggctgaaaggacttagagtatgaaacagtattcctaaggaagggggaaaaagtcaatatccagctgtattaaaatgaaatttagaaacatcaaaattagaaaaaagttarcaaagttatagaataaagcaataacatactatgttttaactgatagatatatagggaaatttatatcca

SEQ ID NO: 698807 - DNA, 575 bp, Homo sapiens
aggtcagcatagtaagtttctcaaaggggtaagaaagaatattgataaaaagaaacagggataaatatttatgaaaaacaaatggagaagattaagtatgaaactacatagcagattaaaaactaaataaaaagacattgaaaggtggaatagatacagcaaaagaataaataagttgctgtcgaattggattaatgaattatgagtcaacaagaagggagaaagaaggaagattttaaataaaatttaaaaggtatgaaggataaaagtagaaatgtcagcattcatataataggaatctcaaaaggaagagaaaaacatacatgggaggaagaaaatagttttcaaactaattatagaacatttgccataacttaagtgacatgaaagaactcaggctgaaaggacttagagtatgaaacagtattcctaaggaagggggaaaaagtcaatatccagctgtattaaaatgaaatttagaaacatcaaaattagaaaaaagttagcaaagttatagaataaagcaataacatactatgttttaactgatagatrtatagggaaatttatatcca

SEQ ID NO: 698808 - DNA, 610 bp, Homo sapiens
tcttagacatctttccgtattcaggaaagacctaatctcaccatcaaaatagtaaatccagtggggaattggatccaactaaaaattcaataaagccaagacagagtatacaactctaggyaatactcactcagcagcccaatctagtggtctgaggaagaagcatgttatttcctagggtaattttatctacattaatttactctctgctgtccttttagacacagtatttgtcattttgcagggtaattgcagagcatataaagatgccggataagtcacccacattcagagaagaaagagttagtggaagcagacttacagataacatagatgttggaattagctgaaaagatctttaaaagaactatgataaatatattagataatttaaagttaaaagtggtatggttatttggaaacatagtcctccaattccttgacactctttgttgagaggtgatatttattttacctccccttaaatatagataggcttttatctgcaatctaatatgactttcatctgtgatcctgtatgtcttctgggcctttatttaaagatatcatgcagctttttttcttgtcttattgggatgtttcctctgag

SEQ ID NO: 698809 - DNA, 1642 bp, Homo sapiens
tggtggtggtattagttgaggacattgatggcagtaagtgaaagcagcagtggattcaggccttttttccactgacccaagttgtagacatttaatttgttattggattaacaacactgcaaaacattggcagattatcaaagaatgtgcctgccttggtagagcatgaagttattcctgtctttatgcgtatcaggrcagtagaaacaaagaacacattttagtttgctattcctgatataggaagctctaattttgagtttcccagatgtatatctagggcacagtcaacaacatcacgtaatgcagtttcagatggctgtgtcaggggcttaggggctcatcttggtgtgaggctctagagtaaacctattgaatcctgagtttcaatgggtttaacagagtatgttctgatttatctcaagacagagaaattacacagtattttagaaaggcattaaattttaatattatatattcatgatgtaaaaaatgagataaatttgcagaatttgctaattcactaataaatccataggaataaaatatgttgccttagtcttcttacctttcaaaagtatgactactcctcttttgaaatgctacttgagatgcttgtcatctttaggtgggaacatatgtctatttcattttatttagtggaagttttccactggctactaattaactgataatttatgctaggcattccagttcaatttcctgacaaatccaatcagaaatcaaaacgtgacttacaaatttaaataaggaggaaacactgaccaaaacagaaattagtgttcatgatcatcagtgtgacttgcagctttatattatcaacaagaatagggcaatgaaacttccattgtgctacaattgttgtcatcacaacttcaatgagataataataaaggataataaaaggattttcataaattgcttacttgttttctgagaaggttttactactggatttgaagcttttgaaagtacattactgtaacatacgaacattgggttgtactagctgattaatttaaaagaggatagttaatgggtatatcagtcaaggtccaaataagaaaatagacaccttttcaggtctttcaaagaggcgagatttactacagagggcaattactggaaattgctgtctattttattttaaaagagagaacagctgaggcataaaaaaagcagaaggtgaagcaacctacagcttagcagcagcaggacagcaccatatatgagggctggagagatgagataaagggatggtgttatcagagaccagaaggtaggtcctcctatgggaattacaattgtgggggcagttgggaagctgcatgatggaagtttggaccagcaggatacatgatccctgccagagatgtcaccagaagtagaaagagaaggatagaaatacattgaatttttttaccctgctctcaccctccaaattttgccatggctactaatggtcatgtctagttgaaagtcagaagacaagggagacaaataaatgtcattacctgtgatattcagaagagcaagagaagtggtaagggtggagaacactttcacaatgagtattcattgatataaaataagaataccttgatatattcaaaaggataat

SEQ ID NO: 698810 - DNA, 1642 bp, Homo sapiens
tggtggtggtattagttgaggacattgatggcagtaagtgaaagcagcagtggattcaggccttttttccactgacccaagttgtagacatttaatttgttattggattaacaacactgcaaaacattggcagattatcaaagaatgtgcctgccttggtagagcatgaagttattcctgtctttatgcgtatcagggcagtagaaacaaagaacacattttagtttgctattcctgatataggaagctctaattttgagtttcccagatgtatatctagggcacagtcaacaacatcacgtaatgcagtttcagatggctgtgtcaggggcttaggggctcatcttggtgtgaggctctagagtaaacctattgaatcctgagtttcaatgggtttaacagagtatgttctgatttatctcaagacagagaaattacacagtattttagaaaggcattaaattttaatattatatattcatratgtaaaaaatgagataaatttgcagaatttgctaattcactaataaatccataggaataaaatatgttgccttagtcttcttacctttcaaaagtatgactactcctcttttgaaatgctacttgagatgcttgtcatctttaggtgggaacatatgtctatttcattttatttagtggaagttttccactggctactaattaactgataatttatgctaggcattccagttcaatttcctgacaaatccaatcagaaatcaaaacgtgacttacaaatttaaataaggaggaaacactgaccaaaacagaaattagtgttcatgatcatcagtgtgacttgcagctttatattatcaacaagaatagggcaatgaaacttccattgtgctacaattgttgtcatcacaacttcaatgagataataataaaggataataaaaggattttcataaattgcttacttgttttctgagaaggttttactactggatttgaagcttttgaaagtacattactgtaacatacgaacattgggttgtactagctgattaatttaaaagaggatagttaatgggtatatcagtcaaggtccaaataagaaaatagacaccttttcaggtctttcaaagaggcgagatttactacagagggcaattactggaaattgctgtctattttattttaaaagagagaacagctgaggcataaaaaaagcagaaggtgaagcaacctacagcttagcagcagcaggacagcaccatatatgagggctggagagatgagataaagggatggtgttatcagagaccagaaggtaggtcctcctatgggaattacaattgtgggggcagttgggaagctgcatgatggaagtttggaccagcaggatacatgatccctgccagagatgtcaccagaagtagaaagagaaggatagaaatacattgaatttttttaccctgctctcaccctccaaattttgccatggctactaatggtcatgtctagttgaaagtcagaagacaagggagacaaataaatgtcattacctgtgatattcagaagagcaagagaagtggtaagggtggagaacactttcacaatgagtattcattgatataaaataagaataccttgatatattcaaaaggataat

SEQ ID NO: 698811 - DNA, 1365 bp, Homo sapiens
tagtacattaatcccactaatctttcccattcatctgtcttgtgcagttttcccaagaaaagagggcatcaaggattctggaggggctttatccagttggggtaaacttgatgtctgaagaaaatgcatccaggttgcacaggggtgggccatgttggatgctggggctcatccccagacacatactctcttcaggatggaggcacttcttcttccagctgctggatgttgcctgctggtggctcatggcygagtccttctccagagaaggcccttagttaagagaacaggctcatccaaggctattacttccctcccttgggacagcctactttcaactcactggatgtgaaggtacgaagcccagcccccttacttcaatttgggacatttatgaagagccatcctggctccagagccttctgtggaaccatatgaggccttgctgcaattccactgcagttcaccttcctctgcccagcccttctgttctcactgccttacagctgctgctcttgagcgccttcccccagtaaatcccctgctcactaatactgacccttggaacctgtttcccagagaacccatcaatgacaccaccacttattgtgcaagcttgtctatctaagctctttttatatatgcatctctataaacccactcaataattcttgaagtctttactattcatatccacattgtacagatgataaatcagaaatcatttactgaagttcacagaaatagtaaacagcagttagctttcaacccagatctgacttgagagcctggagtattaacaggtacctttgaacctttctaattttgtggtcctaagagtgtcatatttatttagcataaatattttgtcaacttcctggatgctctcctaaatgatagtatagatgtagcaggtatacaggttagctttgctgcagtaacaaacaacctgagtctcaatggctgataaaatcaaatacagtcagaccaccgtttccatgggttctgaatccacagattcaaccagccacaggttgaaaatattcagggaacgaaaatggatggttttgtctgtactgaacacgtacagacatttttcttgtcattattccctaaataatacagtataacaactatttatttacatagtatttacattgcattaggtattataagtaatctagaaatgatttgaagtatacagctgtacataggttatatacaaatactacaccatatggtagatatgagcacatttggcaccaacataacccattgggggcatttcttgatattgatacatttcttagtgtagtatgtgtgtataaccaatgtatggctgtatactttaaattattttatgta

SEQ ID NO: 698812 - DNA, 1365 bp, Homo sapiens
tagtacattaatcccactaatctttcccattcatctgtcttgtgcagttttcccaagaaaagagggcatcaaggattctggaggggctttatccagttggggtaaacttgatgtctgaagaaaatgcatccaggttgcacaggggtgggccatgttggatgctggggctcatccccagacacatactctcttcaggatggaggcacttcttcttccagctgctggatgttgcctgctggtggctcatggctgagtccttctccagagaaggcccttagttaagagaacaggctcatccaaggctattacttccctcccttgggacagcctactttcaactcactggatgtgaaggtacraagcccagcccccttacttcaatttgggacatttatgaagagccatcctggctccagagccttctgtggaaccatatgaggccttgctgcaattccactgcagttcaccttcctctgcccagcccttctgttctcactgccttacagctgctgctcttgagcgccttcccccagtaaatcccctgctcactaatactgacccttggaacctgtttcccagagaacccatcaatgacaccaccacttattgtgcaagcttgtctatctaagctctttttatatatgcatctctataaacccactcaataattcttgaagtctttactattcatatccacattgtacagatgataaatcagaaatcatttactgaagttcacagaaatagtaaacagcagttagctttcaacccagatctgacttgagagcctggagtattaacaggtacctttgaacctttctaattttgtggtcctaagagtgtcatatttatttagcataaatattttgtcaacttcctggatgctctcctaaatgatagtatagatgtagcaggtatacaggttagctttgctgcagtaacaaacaacctgagtctcaatggctgataaaatcaaatacagtcagaccaccgtttccatgggttctgaatccacagattcaaccagccacaggttgaaaatattcagggaacgaaaatggatggttttgtctgtactgaacacgtacagacatttttcttgtcattattccctaaataatacagtataacaactatttatttacatagtatttacattgcattaggtattataagtaatctagaaatgatttgaagtatacagctgtacataggttatatacaaatactacaccatatggtagatatgagcacatttggcaccaacataacccattgggggcatttcttgatattgatacatttcttagtgtagtatgtgtgtataaccaatgtatggctgtatactttaaattattttatgta

SEQ ID NO: 698813 - DNA, 1365 bp, Homo sapiens
tagtacattaatcccactaatctttcccattcatctgtcttgtgcagttttcccaagaaaagagggcatcaaggattctggaggggctttatccagttggggtaaacttgatgtctgaagaaaatgcatccaggttgcacaggggtgggccatgttggatgctggggctcatccccagacacatactctcttcaggatggaggcacttcttcttccagctgctggatgttgcctgctggtggctcatggctgagtccttctccagagaaggcccttagttaagagaacaggctcatccaaggctattacttccctcccttgggacagcctactttcaactcactggatgtgaaggtacgaagcccagcccccttacttcaatttgggacatttatgaagagccatcctggctccagagccttctgtggaaccatatgaggccttgctgcaattccactgcagttcaccttcctctgcccagcccttctgttctcactgccttacagctgctgctcttgagcgccttcccccagtaaatcccctgctcactaatactgacccttggaacctgtttcccagagaacccatcaatgacaccaccacttattgtgcaagcttgtctatctaagctctttttatatatgcatctctataaacccactcaataattcttgaagtctttactattcatatccacattgtacagatgataaatcagaaatcatttactgaagttcacagaaatagtaaacagcagttagctttcaacccagatctgacttgagagcctggagtattaacaggtacctttgaacctttctaattttgtggtcctaagagtgtcatatttatttagcataaatattttgtcaacttcctggatgctctcctaaatgatagtatagatgtagcaggtatacaggttagctttgctgcagtaacaaacaacctgagtctcaatggctgataaaatcaaatacagtcagaccaccgtttccatgggttctgaatccacrgattcaaccagccacaggttgaaaatattcagggaacgaaaatggatggttttgtctgtactgaacacgtacagacatttttcttgtcattattccctaaataatacagtataacaactatttatttacatagtatttacattgcattaggtattataagtaatctagaaatgatttgaagtatacagctgtacataggttatatacaaatactacaccatatggtagatatgagcacatttggcaccaacataacccattgggggcatttcttgatattgatacatttcttagtgtagtatgtgtgtataaccaatgtatggctgtatactttaaattattttatgta

SEQ ID NO: 698814 - DNA, 579 bp, Homo sapiens
ctgactttgttttggctgtttttttagttctgtatgtattttagcaatctcatctcacctaactgagatgtgtttcaattatattccttttatggaaaaggactctgaaaaaccctaaagtattctagggagaaactgtcttccatttcagttttgaatcagtattgttacactcaaaccaccctctttttaaaaaaaaaaaaaaaaactgtaagccccgccccctttttagtaaaccgatgtaaatttgtgatgtgcatattcttctttcttttagaagagcagtcaaattaaaggatttgacatgttttgctgttgctcaaaggaaataggagttggtgtgcttgtgaccaaggggttacacttccagyttttaaaattctcctttacatgtgctcagtgttttgttttgtgttttggtttctgttttttattttaattcccacattgggcacaagaatcagaatatggatagctagtttaagaaacttttgtgggtgcactgtagcatagatgacagaatattgatgttccccccatctccaattcagttcagggcattccacagttaaacagaaa

SEQ ID NO: 698815 - DNA, 632 bp, Homo sapiens
atagattttcttttgggtgccaagtataggactagatgttgataatgtaaatataaataagatgtggctcctgacctcatgtgttcacgaccaaataggaaagttctgagaaatacaaaagcaaagggtggtaagtgttttgatgaacttgaatatgatgtaactgagactccaaagaaggaattcaacttggggagacattatgaaacccttcttggaggatctgaatcttgacatgagcatttgcctggctgggtgggagtggggacattccatagaggagatgcaagaaatcaaaagaaatgagtcttgggagaaggacaagggggacaaggagaaagtttagtgaggccagcaggtgactttacatgctgggacatcttgtaggtatttgggagacactgaaggattttaagcaaagaagtgacactctgacttaygtttttaaaaaatcaggtggcagggttaaaggagtgtgtgttgggtcattcttgtgttgctataaaggaatacctgagactgggtaatttattttttcaaaacagaggtttaattggctcacggctctgcaggctgtataagcatagcaccagcatctgcttggctgccggggatgcctcagggagctttca

SEQ ID NO: 698816 - DNA, 632 bp, Homo sapiens
atagattttcttttgggtgccaagtataggactagatgttgataatgtaaatataaataagatgtggctcctgacctcatgtgttcacgaccaaataggaaagttctgagaaatacaaaagcaaagggtggtaagtgttttgatgaacttgaatatgatgtaactgagactccaaagaaggaattcaacttggggagacattatgaaacccttcttggaggatctgaatcttgacatgagcatttgcctggctgggtgggagtggggacattccatagaggagatgcaagaaatcaaaagaaatgagtcttgggagaaggacaagggggacaaggagaaagtttagtgaggccagcaggtgactttacatgctgggacatcttgtaggtatttgggagacactgaaggattttaagcaaagaagtgacactctgacttacgtttttaaaaaatcaggtggcagggttaaaggagtgtgtgttgggtcattcttgtgttgctataaaggaatacctgagactgggtaatttattttttyaaaacagaggtttaattggctcacggctctgcaggctgtataagcatagcaccagcatctgcttggctgccggggatgcctcagggagctttca

SEQ ID NO: 698817 - DNA, 632 bp, Homo sapiens
atagattttcttttgggtgccaagtataggactagatgttgataatgtaaatataaataagatgtggctcctgacctcatgtgttcacgaccaaataggaaagttctgagaaatacaaaagcaaagggtggtaagtgttttgatgaacttgaatatgatgtaactgagactccaaagaaggaattcaacttggggagacattatgaaacccttcttggaggatctgaatcttgacatgagcatttgcctggctgggtgggagtggggacattccatagaggagatgcaagaaatcaaaagaaatgagtcttgggagaaggacaagggggacaaggagaaagtttagtgaggccagcaggtgactttacatgctgggacatcttgtaggtatttgggagacactgaaggattttaagcaaagaagtgacactctgacttacgtttttaaaaaatcaggtggcagggttaaaggagtgtgtgttgggtcattcttgtgttgctataaaggaatacctgagactgggtaatttattttttcaaaamagaggtttaattggctcacggctctgcaggctgtataagcatagcaccagcatctgcttggctgccggggatgcctcagggagctttca

SEQ ID NO: 698818 - DNA, 2097 bp, Homo sapiens
taagcctctccagaaagtccatttcaaagacatttatctatagactcagtgaggaagaatgagaagatttcgtagaaatgtcataaccagaagatggtcttccaaaaagtttcgaactgtaaccatgtttcagaaattgtaacttgacaagaacttgattcttcgaagactagatattttttttttctgtctactcataaaccacataggaactctttcgttcttcctgggtgtcatctggaaggaactgaaagaagcaagaaaccgtcatctgtgtttcttgcgggaaagcacattaaagcagcgggaagaaggggagtgggcgcacagcctccctggctgggccctagtgaccgacttctcccgagtcagctttgctcccaaggccaggggggctgccgtcccccagaggctgctgaggagagccctcggagatgcagtgcagaagcctctccctgacgctgctgatttgggggtaggcatggaaatgtagagagtaccgctcagagaagaatctgccctttgcagagcggatctcagccsaccatggaggccctgtgaactcggtggaaggtgggatcatctcggcgtctgactgactgattctgcttctgcttctaagataaagtggatcaccgagaagacagcccctttacgtctggttctgactgcaggaaggcctggttggtgaagtagaaaatgttggaatcttgagtgagcagctgagttgttttgaagtttggacaattgagaaagaaaacactaagcagtgtcagacacggattccagaaaagcccacgtcacaggcttaaagaacagatgtgtgtgggcacatgatgggaagccacaacggaaaagctagttaactggaggctctcccacagggttctgagaacacggttgttaatcattccaaaaggaggaggaggattgaagagacctgtgtgagaacacagagcttgtctgtgctttagaggagaagcatgcgtaagacagggaagatgggacaaccaggagtgaaaagggaaaaggagaggtcaggagacgttttaaaattaaaccagagcaaaaggagcaacgcgcccgggatgtgcaggagagcccaaacgttgaaattcaggggaagtgccagaattggtgtccaggaagacccagcatgttatgataatagatgaaaacttgaaatggggcagaaaactcggtgcgggctggagttgcccagagcactgttgtgaacctttctttaccactcagcccaccgctggaatcgtgtgcaggcttcaggcgccctatttccaacaggaggttggtcacacaatgacctgtgtgtagaggggagccccatgggccagtcctgcacaccgttccatacagaaatgcttagcaggctcactgaggctctgcaggggctctcggcccttcctgccagggagtgcctcccccacccgctctagtgtcagactctgctctagggtggggctcaagaatttacatctctcatgatttataaattgggcctattttaagcagtttgacttgtgtttaaaagcagctgatacctttttttttttttttttttcctttaagtgattccttaaggtgctagaattgttggccagagggagaaaaagagcttggtgtttaggattgcagaatcagttgtaatcctgtaacattttagttatctttatacatgcatgcacacacacaaccacagccatgcacagacatgtacacacatgcacagactcttcctcaaaagaggaagaacttttcatggggaaaagaggcgggttctgaacaacatggaagcttttcgctgccaggtggcatggttgttgattcgatcttacggttctggatgggattgctgggtacacatgtgtgaagctgccagctgaagtgtattcttttaacttgcatttgctacttatttagtagcccagtgagatttcctcagaagttgtctgaagatgtctctgaaaaatgaaaagccaatcagggtgagagctggtgtgccaggctttcccctctccctgccagtacgttatgtgggggctgggggtgaagaaggaggtccttacataggtcagtatg

SEQ ID NO: 698819 - DNA, 3023 bp, Homo sapiens
tgttgtacaccttaaatatatacaaatttttatctttcaatcatgtctcagtaaagttggaaaaaaagaattttattatgatctatacatttatctgcaaactttatgcattatcacaatttaatccttataccaacccaatgaggtaggcatacctctatcctattacccatgaagaagaaaaggcagagatgggaacctctctcaaagactccagttagtacatttcagaaattttttttactgactctacctcacaaatagatggagagacagaaaaaaaaataccactttctatctctattgcctctacctcaattgttcccaaattggaacaactatcagaatcaccggaggatttgctaaagcacagatcactgggttctgtgcccagagttttaaattcagtaagtctgggggcgggacctgagaatttgtaattttaacacgttccctggttgtgctgatgttgctagtcaagggctcacactttaagaaccattttttttttttctgttccaggttagcaccatctctcttttggaatatttcaataatttcctgcttcccagccattttctaaagtacaatcagaatgatctatctaattttacttagaaatatttattgggtgccagatactctactaaatatagaggatgtaataacaagcaaaaccgacaaggatcctgatgtcacaataacctgaagcagccagtttgcctggaatactttcttcccttggctgaacattatgtaatgatgttcatgatctcctttccaagggtgtaaaacacagaagtaaataattaaagttctattcctgtgatcagctcataaaatggttgagccagctctgtgctctttgattttgctctatgaagttgtttaataacaacttaagttggaataatttaaactccagcttgttctccaaattaagataaggtcaaaacggcctgatatatgttggatgagcaagaatacgggagaaaattagataagattctttaggttcattcttccaattttgtaaaactctacacaactattccttcatctgtggaagaggagagggcagcaggagtggcttggcaatgtctagtaaatcctgctgtcctcctgtgaaggtctgtcttttatttctctgcccctacctttaggaccaatcccagcaagagtgaaggccacgtgttctgggcatggttaatacagaaaaatcttcaccactgccagtcatgattatctttgcctctcctcccttttactcttaagggcttgaagtctactttttcgggtaggtagaagagccaaaatattgctcatctgaaattttggttgtgagattccttgtcatttatagaataaattcttgttctaatcaaagaagctagagttaaaatagaaggccctgtctttcttcacagcatcttgaattctgtgctcaaaacatggccctgttcctcaggctgatgtaacagctcatgttcttcaggatggcaagtcagagtatagaggccaagctgcagaggttggttgcttttatgagcatttgacttctgtcaaaagtaaacagtaaggctttaaactggggaaaggaaagaacagggtatgcatttctgagccatctttttttggttgctgcgtgaaggactggaggtaaccagaggcaagaagactaatgagaaggctgttgcagggatctccagggatcctgaagagagaaaatatgttgacctagattggaaatatggatgggaggatgagaaagtatatggattcctgagatatttgacggtgtcaggcatagtttttggaacttcatccaggaggagacagggaggaatcaagaatggcactgagatttttggcttaggcaagagagtggatgctgaagccattccttgagatagccaatactgggaaggaagtctggagctgaaaaagatgaactcagtatggataggctgaatttgaggtagctttgggacattaatgcaactggaatgactattatgtagttaaattatcacattactctaagtgttcaatccttatataaccactgctgaaataacaaattccaaatttctttttttgtgtgtgtttctttttctgtttttttgagacggagtttcgctcttgttgcaatggcgcgatctcggctcactgcaacctctgtctcccaggttcaagcgattctcctgccttagcctcccaagtagctgggattacaggagcctgccaccacacctggatcattttttttatttttggtagaaacggggtttcactatgttggccaggctagtctcaaactcctgacctcaggcgatctgcccgcctcggcctcccaaaatgctggggttaaaggcgtgagccactgcgcccggctgtgtgtttgtttcttagagatacggtctcactatattgcccaggctggtttccaactcatgagctcaagggaccctcctgtctcggcctcccacagtgctgggattacaggcatgcctggccacgcccagtcattttccaaatttcttaacaagacttacaatttaccttttccagctttacttctcccacctatccatacccacagttgcccagcccaaattcatttgggttcctcaaagggttaatgctttgtgtagtctcaaggaytatgggccagcagttctgtcaggaactattctattctcttttctgtgcattcagcaaagaattagaaaaattagctgggcgtgatggtgcgagactgtagtcttggctactcgggaggctgaggtgagaggatctcctgacatcaggagttggaggctgcagagccatgatcgcgccactgcactccagcctgggtaacagaggaagaccttgtctcaacaaaacaaaagatgttagtgagggcccaggtaggtgctaggtgctgggataacatggtgagcaaaaagaagactttatcccttcccttgcctcattatagtataatggcagatttaaatactaatctaataattacacaa

SEQ ID NO: 698820 - DNA, 2817 bp, Homo sapiens
tatctatacatactttaagttctgggatacatgtgcagaatgtgcaggtttgtgacataggtatacatgtgccatggtggtttgctgcacccatcaacccatcatctacattaggcatttcttctaatgctatccctcccctagctccccacaccctgacaggcccgtgatgttcccctccctgtgtccacgtgttctcattgttcaactcccacttgtgagtgagaacatggagtgtttggttttctgttcctgtgttagtctgctgagaatgaaggtttccaacttcatccatgtacctacaaaggacatgaactcatccttttttatggctgcatagtattccatgttgtatgtgtgccacattttctttatccagtctaccattgatgggcatatgggttggttccaactctttgctattgtgaacagtgctgcaataaacgtatgtgtgcatgtgtctttatagtagagtgcatacgaagtacttataatgcaaacatccacgctgctcaagctaatgtttagcagttctgaatatcctgaggtttctattccaaaagcagctacacaaaattaaagaatgattcatatacatctttttaaaaattctgggatgctcttttacaatgacttcatttccaggaaatatctacaatttccacaaatctgtatttccaatgaactcagggcagtttgataaagaaaaatatgcccagtttgaatctaaatactcaacttcattcaataaattacaggtctttctattccatctcggtgctgaaaaaaaaattacagatcttctttacttttccctcataatttcaaggttaatgtgttcagatgttttttcacatcattaaagatatacaattctttgagtcattgggagcctgatggatggggtctctcagggcatattcattttccaaaatcattgatctgagaacaaagttaagtaaacctcctctgactacattaaataaaataaacttctattttctgcttcaagttattgaagtattccttaagctagcactgatgaaagtatagtcctgaaaaaaattcagtcttgcttaccttatctaaccatgtgagaaaacagatataaacattcacaggagaaaattcgtgaatagaagatcaatggaagttggggtcgctcatattctttgttgatataaatgtagatgccagttcttttaattggtgtggctcacctgtggcatgtaaactaagtttttccaaggtattgtatatattatcagggagaaggggagcccactagaaattaccccaggatcaaataacacattgactgagatatacagtaaatatttttgatcctttcccattctcataggcaggatcagaaaatagaggccttggaccccctcatagtaagtaaaagacaaaggagaaattaaggactgctcgccaaggcccatagccacgagcaggatttaccctacccccatgcagcaaggtctggtcaaggagaagttgcaagggcacatatttgtcatgggcatgagcaacttacaaaaatactgcccctgagccataagccacaagccaaacctgctctgtgtgatttatgacttgtttgtttccacttaacagccaggtttgttaaaggacagttttgttcccagacgaatcatcagtgaatgaaggccgtggaagtgttgcaacttgaaaattgactcagacatgaatatgcaaattatattcagacacaaaatagataaaagcagcttataagcaagccaggatgggggctttagggaaattccagtagaaaatacagtcagagataaatttgaagatggatttttttttactttgtctggttttcctccttttatttaccctctttagcttaattaaataatcagtccagcctagatggactgatgagaactaggcctggatgagaatatttacattaatgaggcaaaccctccagtctccttctgttctttcttgtccaagagaagtgtttaatatttcaraagtatctgactgaatagtgcaatataaatcaggtaggatgacttctgagcttctggttcaagatggctgacagatcacatgtggcaacctctttcttcaccccaaattcttagaaaggataacttactctggaaaataagatgtaccctcagtggaccaaaaatcgggaaaaaaaatcactaaaacatagaacgtgtatagaattagactgaagaagaaaaccacaagcaacatgcacacaggagagggcaaataaaaaaggtgagataactctaccgggcataccctaccaggaaggagcagttactcacaggacgacggtatactggaatcactaacaggcttattatttaaggtcccgcagaaagagccaccaggtatatggaatcttcctctccttccaacttcccaccttcccacccttccttctcatacttgcagggttgtcagttgcccaaggcaattaggcaacagagctgtttgcccttagagatgagcaatgagtatgtgcatttggacagagaagcagtctaactatcaaagtaacatagctggcagtcattggcccttccctaggctcactacacacacaaagtataagtgcagcatcacggaatgcctctctctcctgcctctcaccctatcctatgtacacttgtgagtacataatgaatgaatagcaattaacaggaaaaaacaaatacaaagaatcacttgcaatcacaaatcattaaacatgtgagaaaagctagcaccattaaaaagaggcactctcaaactcaatgaatagatgaatctgac

SEQ ID NO: 698821 - DNA, 2234 bp, Homo sapiens
ttctatagtaaacaggatttttacaaaaattgccttttcatttttgcagtttttgctcacctttaggcctgaccagaactgtctttcttggaactttgaatgaggtgatgttttgttttctacagcactaattagaaacaaacgaaagagaagagaaaatgcaaagaactattagtctttcagaaccagagtttaagatcagactttcttttaaaccaaccaaactaagccttaatggaatataaatagagattgtttattttattttataaataaaatatatatttatttataaaatatatatttatatatttataaatatgtttataaaatatatatttatatatttataaatatgtttataaaatatatatttatatatttataaatatgtttataaaatatatatttatatatttataaatatgtttataaaatatatatttatatatttataaatatgtttataaaatatatatttataaacaaataactaatatatcacattcatacatctgaaccatgtgaatgcattatctaaaacattataaacaaagtttaccaaggcagaatttttacatgtagacatctcatgattcaaaatgaatcagaaagctttgaggttcctttcttccccctccataaagctcctccatcctgtcactactcactggattgctacagttcatgcatcattataactgatggcttcttagcaaagttatgatcatacatcaaatactcgttttataatttaaagtgactgcagaatttacaggtgcagtttctcgttcctcagcattgtgcttcctctgtgctaggccctgttgtgttctgagcattctcttcatctccctaatatcctgtgaggtaggcactaattttatccttattttatagatgagaaaacaagtgcataaaaatacctactaacagtggacgtgtgctctttaccactctatatcacctgctatgttcctaggatatatgtaaaaccaaaaccaaaaccaaccaaacaaaattcatctaagcgccaagataaagcacggctttatgtaagtcactgagaaatatttgttgaaatctcaatttgcatcctcatagagtatgtgtacacatgttttgaaaacactatagttggccgggcgcggtggctcacgcctgtaatcccagcactttgggaggccaaggcgggcggatcacaaggtcaggagatcgagaccatcctggctaacatggtgaaaccccatctctactaaatatacaaaaaattagccgggcgtggtggcgggcgcctgtagtcccagccatgggaggctgaggcaggagaatggcgtgaacctgggaggcggagcttgcagtgagccgagatcgcgccactgcactccagcctgggcgacagagtgagactcagtctcaaaagaaaaaaaaaaaagaaacacaaaaaacaaaacaaaaaataaaacactgtagtttcttttgcattgcattcttaaacaaatctgtattctatgatcagctatttccaacaatctagaaattaacagcgcttacctctttggatacagaggaataaaaacatcatcttctactgcctttttcattcttgaaacaatggatttaagtaaatcctattattacaaatttgaaaagcatcagtgatagaagatagaaatgtatttaccaaaaaaaaagtaattttaactgcagtacaaatttatccacactcacataaccagctgttaaaataactatcaattgggtacaaaaaaaaccttatttatccatgttgctacatatgggtatagttggatcaatttcattgctatatagtattttgttgcatgaatactattgatggaacacttaggtgatttctggtttggtggctattataaataatgctgccataaaaattcttgtacatgtcatttagtatgcatggtcatacatttctaatgggtatataaatagaaatggaatggctggagtacagttcatgtccatacgttcaactacgtacaaaaaaccaaacggtttctagaatagtggcrtcccatttacatcattcctgcagtataaaataaatcctgtttcactacatacttacgataattggcattttcttgttttttaatgtttgcaattatagtgggtatgcagtcatatttcattttgttgttttaattctcatttaattatcattgagtaatgtgctgttgggcatcttttca

SEQ ID NO: 698822 - DNA, 603 bp, Homo sapiens
gagttcaacagaggaaactgaatacaaagaactagttacaatggtgtagggagagctgaaaagccaagcaggagacaatgaggccagaattggcaacagcagaagcccattaacatccccaatgctaaagggacaaaaggaggaagatggtgttgtcagagctggaagcagtggccacttggcaggagcttgagccttggagacaggggttgtccagtaggagctggagccttagaggagatgccgtcattgtcagtggtgcctctcgaagcagagcaaaggggagagaaatactctgacctttcccttcctcccaccagcacctcccattggccaaacccagcaggaagccaacctgcaagtgatcctgggaaatgtagcttgcaagggtgagcctctgtgacgcagagcagagaagctgcggggatctgaaagcaaacatggtctttccaggacatgctctgtgctgggaactggggcggaaaaaatcaaactggacaatcacagcccaaagacacccataagctataccaatagttccagtgcagtgtggtaagggattagggatctatgtggtgctgggaagggcctgcgggrgggggg

SEQ ID NO: 698823 - DNA, 1454 bp, Homo sapiens
gtcaactatgcagttggatacctaggacaagaaaccagaggaaagatatgggttggagagagaagattatgattcttatatatttagattataactgaaaccaggcattggggtactacctaaagggaggacgtttagtgagaatagagagctaggagataaggccagaaatgtgacatttaacaaaagtaaaggataagcctgcagaggtgagagaaacagccagagaactaggaagaaaaccaggatgtgatgtcacagaagccaagagaagcatgttttaatgcagagaaaatagtcagcagtgtcagatgctgctgagaggccaaaaagattaagactgaaaatatctgtgagatttaggaatataaaattcctgatggtctaagcaaacgatgtgataatgggaacagtagctcagttaaactgtgctgaatgagaagtgtrgaaatggagactgccatcatagccaacttgcttggagaagtgcagagataatgtgatagatggagaggaatgaaggtgtgtagtgagggttactgaaaaattggacacacttgaatgtattaaatatttaaaagccaacagggaaggttcttgttgaaaggaggaagaaaggacacagacatcaatagtgttagattctaaacagggcaggaaggtgaagaatgatctaaagcacaatgaaaaaaataaatacccacctacccaccctctagttagttgtcttttccactataaggatgtttaactataactccatatatttaagtatatatgactgtgtgcccttttgcctttttatacttatatatttaaaaattacatccaagaaataaattcattttttctttagcctctacaatagaagagttcatatacctcttatgaatgactaacgtacaggtattcttaaatctttcagggaactgatggagtagagtatttattaattcctgttgataatggaacattgactgatttcttggaaaaggaagaagaggaggcttgaagctttcctttattcttgaatctcccatggaagggttgtaccccagctgccactcctctagttgaaagtgttgtgtttacatctgacattaaattatttttccagcatacaagatttaaatttgggaagggggggatgtcctcaattagaactttttgatcagcctggctggtaccgtctagtactatgcagcggtcctcaagttggagaaaatgtgcctttcattcattacctctctggagacttcttgctggaatgaacagtgtgctcagggactatttggaactggatgtttttgaattattttatacttagagatattctgaattttttgagggccttttaacactccccgagctgattgtttgcaagtgtgtttgttccagagtgtggaagtataaagacatgggcatcacgtaaattggttttgtttgctattctg

SEQ ID NO: 698824 - DNA, 1485 bp, Homo sapiens
taagtttgtagcttgcttcacttaatattttaccttatatcaaaaaaatttgtcattaaatctaattatttgaaaactcctagtttcattgcactactccatcatatgaatatgccatatcccctttttgttggacattgaggctgttttccagggatttttttttaactattaaaattgatgctgagaagaatttttttttatagaaaattttcaatgtagcccttgttagtttcctaagaaaaatttctaaaatcaggaatcttgggtcaaattatacaacttttaaaaatgcccttgatgacatcaccaaattgtttccagaaatgtggttccactttttgctgacatgagcaatgtgtggtgtgtgtgctcctctcaaaatgcagtcctgtcttaacattctgccagtatgatcgacataaatgtgatcttgttgctgtcttgttttgtattattttagttactaggctgactcttaggcacttgagcatgcttggaagccctcttcccagagccacacctgaaaggcaggttggtgcccacacacccctcatctgagtctcagtttctgatgagcatttggcttgaacagttctagatgcagcaagacaggctgccactctgacatgacaggccaccaaacacggagtggcaggccactaaacactggacttcccaggggtctatgcaaaaagatctcatgtttaggaactgtgctgttaggcggtaaaatgtgttccctctgctccccaggttcattcattggatccctaaccccaggacctcagaaagtgactttatttggacctactgtatttgtagaggtaatcaagttaaaattagttcattagattgggccttaatccactatgacaaatagttcttataaaaaggggaaatgtggacactgagacatgcgtggagggaagaagatatgagggacacagggaggaaatggccatctccaagccaaggggagaggcctggaacaaatgcttccttgcagccctcagaaggaaccaaccctttcctacttccagcctccagaactgtgagccaataaatctcggtggtttaagcccccggtctgcggtactttgttatggcagccctagcaaatgagtacatacacattccagaatctgaggaggcccrtcaatagctgttttctggaaggctgaagaacactgtattgctgcgtgcaaccccttctccctagccacactgtgcatccccattttgctgggcagctgacagcctgcccctggaagtgcagaacaaggccttggagctccgtgaagctcttggactgggagatcatgggtcgtcaggcctcagggaagtcatcagagccccacatgcaggaagttcttgggagacacaggaaaaaaacaaaaacaaacaaaacccacatagcttagagagtgcagcttctgagacctgaagaagaaagtgagttttgagcttcttttttcagtttaa

SEQ ID NO: 698825 - DNA, 1707 bp, Homo sapiens
aaaattattcaacctaatgtaagtaatattttatctcatagcagtgtcgctaatgggagtagtattgtccaacataggagggtcaggcacagacggaagatcaaaatctcactctcctgaggctccatctatggctctgctctctaaagaaggttacatttatagatctctcagaataaaacattacttttctgccaagaagaagttaaacaatctattaatgtggaaaaatgttgcttcaaacacagaagtctatttgtaatgtgtatcaaagtggattcatgaatgaatctatagcagtattttgccagagttgtaagaatgtcacttatagcttacaaagtcataacttaataaaaagaaaatatggacatgtgtgttaatgtttttaaaggcaagcttactgaggtataatttatgtaaaataaaatttaatgagttttgacaaatgaatgtagtcatgtaaccataatcaatatatacaacattttcatcaccccagaaaatgttctgtaaagcagttttcaaacggtggttgtgagtccttggacaaacagtgtgacccaacaagcactttaccaccagggctgactccctgatggggtgtgatttctagtcctgctgtttggctgcactctcagcaaaggtggcaacttgggatcatgttaatgtaagacactgtctgttctgatagactggtggggcctgtctacttctcagacttaatggagaattcctgcaattctatgtcccagtgagaaacagtgtttgaaactttttatcactcaagttctcaaactgtggattttacatttgtgcaggattggacatttattgatttaggtacatttacgaagtaatatttattgttagtttagaattacaaaatgaataatttgagagaaagcttataaatgtctgggaaacaaatgtggtgcccttccgggaatttacaacctaggcaacctggccttttaaagatacacataacagagaaagaagactacattgccttgctgtgttatttatgttttttaatataaaatatgtgaccatatattcaaattactatgcatgaatcaccatttttagaataagattttacaaatacagttacttagttgtcattattattttcactattaagtattaattattattctgtaatgtaactctgatttgcttttaggcttacgtggaaaagaatagtaagaatcctatcagacctgtggtctttgggtcaactttataaaagtaattagagctattaaataggcacacagttttatttggccattaaagctctagacagaaaaccccaaactgtttgcctctaggttgttagagaaaaaaacattaattagcattaccattgcttctctgaatcttccctcttccctgtagtggacagtgcaagtgggggtgccarttgctagactgtgaagcgattcccaaggtaattgatcatattgacagaaacttagctgcctgttgctctactaaaaccatctcagttagcattcccccttctggtattcaatcaccctcgcccttcctcaacctaaagactgaaacataaccaagagttaaaagagataacagccatttatttactctaactcctaagggaaaatagtattttcctaaagagtaatttctaaaataaaggcatatctgtttctaaaatatttttactttatgcagaag

SEQ ID NO: 698826 - DNA, 577 bp, Homo sapiens
caccatgcccggcaattttttttttaaacttttytgtagagatagggtctcactttgttgccccggctggtctcaaacatctgggctaagcaatcctcccaccttagcctcccagagtggtggattataggcgtgagccgctgtgtcaagcctgatttttttaaataaagcagtaaattttgcaatttgaccgtattctgatttcaggctaagaactgtttctttttcagaaaggagtaacccttggatcttgtcctaattcagtatgtcttgctaagagactagtaacagtagcttgtgtatacttgtgataaaatgagccctacctgaaagaaggtgagggaaatggcatggcagaattaccatgtggctccatccagttctctactgtcccctctcctagcgtttacctactggtatccactaaagcaggcttgctcacatcagacagaggaaccaggagaaaattgggtaccaacttaagtaaaacattttttaaaaatattcctgttattgccgggcgtggtggctcacgcctgtaatcctagcactttgggaggctgaggcgggcggatca

SEQ ID NO: 698827 - DNA, 577 bp, Homo sapiens
caccatgcccggcaattttttttttaaacttttttgtagagatagggtctcactttgttgccccggctggtctcaaacatctgggctaagcaatcctcccaccttagcctcccagagtggtggattataggcgtgagccgctgtgtcaagcctgatttttttaaataaagcagtaaattttgcaatttgaccgtattctgatttcaggctaagaactgtttctttttcagaaaggagtaacccttggatcttgtcctaattcagtatgtcttgctaagagactagtaacagtagcttgtgtatacktgtgataaaatgagccctacctgaaagaaggtgagggaaatggcatggcagaattaccatgtggctccatccagttctctactgtcccctctcctagcgtttacctactggtatccactaaagcaggcttgctcacatcagacagaggaaccaggagaaaattgggtaccaacttaagtaaaacattttttaaaaatattcctgttattgccgggcgtggtggctcacgcctgtaatcctagcactttgggaggctgaggcgggcggatca

SEQ ID NO: 698828 - DNA, 1302 bp, Homo sapiens
atgttaatatgcaaaacaggtcctaagctaaattttatgacaaaataaataaatgttccatttttttctttctttttctttagctcaactgagaagtcatttccttggagatcaacaggtatgttttttattatataaaagttatgtttgataaacacaaattacatagcctactctcttaacttactatctcttggtgaaataagccaagcaaagcctttaatagtgacaatattgcgctacattgctttggaatagtacttaatatgcttaagtttttagtataattgagtaaatttgtgtatgtcaactgtaatgaaaaagcattgaacagcagcatttttaatattaaccccatatctgaragtttccatttccatcataagaaaacacagggctgacttcaaaaaaagttattacgtaatcaagaaagctgctaattatacaagttgggtatttcactgtgtttatcatactcagagaaaagtcgcttgaagttttcatttttttaatgtatccacatgtagaatatctagtagcttctaacatagtgtggtagctttccatgtagtctctctatcttttctttttaacctaaattcaccacataggaaggatgaattacattaaggagactgtctgtcacttacataaatcgttgatgtcttcatactcagccttcactcaataaatgtttattgagtattcacataatgtaccgggtgctgtgcacattgctgggcagagtgatgggcataacacacacttgtccctgtccccttcccccatggagcttacatcgtaatcagtaatgtgaacaatgttgtaatgctggaataggcattgatgtgtaaatactttggcccttttcaaacaagacttgaattgaggaagacttagataaccaaatgcccagtatctgagtttatctaaacctagtgccaggattctggtgttccttatactgcatacaaggcacttggctgtcatacaaagaagttctttcccccagaaaaatagcgttaactcaaactgttgatgaggcagaaacgtgaaaagctacctaacaataaggcttctaaacaacagtttaacacaaggcaagtcacaccatgaaataatatgtggttaactgccaagtaagtattatgtgggaaatactgatataagtggacagcccacatctgagatggcagaggagatggtcctgcagccttgggcttgatgggcggctctggagagggcattgtcactgggcaaaagaagagacaacacaagtgtcacgggaagggaacatttaaa

SEQ ID NO: 698829 - DNA, 863 bp, Homo sapiens
caaatttcagcagcaggaatggtcaccttcaactggaatatgcaggctggggcccctgtgtgcagcctctgtgaccagcccagttccttacttccacacagctccctcctaggaagcatcttgccctcagaccacctgagcacccacttcccactgcgctgaaagctgagatggtggtgttccgagcacagctggacctgagtgagctcccccgtgccccatgaggattatrcatctgctgtgcaggaaatcccagagaacacaggggtgagcaaggcaggcctgtccaccacctgcagtgctctgtgccaggcagcagggagtgcagcaactggcctctcatgctttggggcaggaaggagaaagcctcaagccacacctatagaccaggagcctcactgcatggaggggtcactgcacaggtttcaggaactctgctcagatagtggcatcttagaaactctgggaatggctatataccaccacaacttgttttcctcagcatttatccagagaaaggtatttttctataactgaggatagtagttttatccctgtctcgtaattgttttcccactatttcagtttcacttagatttcgtaatttgttgacagccttcagccctgttagaaagcttgggcaattgattagcccagcagacagttttatggcactgattctccccaccacccccttgacttcctcatttctgttaacagtgccatattttcacacgtattcaaactcctggcttacctgtgacaccaccctcagtttgcatctggctccaaattctcactacaggcacttcccttcccttttggcctcctccctcctccatcctgtcctgtgaaataggctc

SEQ ID NO: 698830 - DNA, 945 bp, Homo sapiens
agggagcacagtttaaaaccattgcccaaaagcactttatatagaagcatggccaattttctaagaatccgtggagaaatagctccaactgtagaatttaagttcttttcataagcacccataatgcgtgctgccttctaacgggaccctagcttttgtgtaccccaagataattatataagcaaaggtctatcatgaacagaagaaaagaagaacagagcaagcttttggaagtaaagcaaggtctttacttgcctgattcagaactgtcttaagtctcccgcccgtcctgtgtcctgaaggctgtagttatggtggaataggagtagaaaaggggtaaaagtccttggggaacaagggaaaccaaatcagcaaggtccagaagtcaaagccaagtgaaagaggagasttgtgggcacaggtgcagagcagaacacaagaggaggccagagcacaagcatcaggttccagtccgaccattccctccacagcacatggacaggcctgggaaggggcagtcctcacgcagtttagagtcagaagattgtttcactctcttcacttctagcccttggcttctacatccccttcctccacaaaggaaggagctcctgtcttcctccccataccaccctcttttacagggggcacccagagaaggctgagcaggtggtgtccaggctggcttcttgggccgtgacagctggagcagcagtgctcagtcttgtctccgggccacgctcttgatcagtcatgttcacaagcctgacacgctcccatggacatgggcagattttgccacccctccctctgcaaggccacaaacgtttttgtgtgttggtagttgtgaaagcactgtacagactcgagcaacttgccaagggtatgtcaggagtgtaggactctgggggggacttgaatgcagagaaaaaccagctgcaccat

SEQ ID NO: 698831 - DNA, 1044 bp, Homo sapiens
tctcatttccttcagtttatagctctaggaaactacatctttcagtactccaactcagctgttcctttggccacaytgtgatttacagtttaatgatgctactgctctcttcatggctccattcctacttccccgtcttcacttctttctggttcttcaccatcattactcccaggcatacacattcaaatctttgctacctctccccagtactgatgtggtaaaacctaaacatcgtttaaaatttaatttgtcttttctctacatatcaaagatacctactctagcaatttacttggccagagaaaaccataaaacttacttaatgatctcagttaaatctcaagttggcccccagcactacggtgctatcttccttggttagcttattctttcacttccagagaagactgttttatgcctttcgctctccttcttgttagctaacaaactcttgtttttcacaacagatatgagcaatcttcccatcatgacatttaccagcctttcagtgatgggcagaataatggtcccccatagatgtctactttctaatccctgaaattgttaatatgttaggttacatggtaaagaggaattaaggttgctagtcagttgaccttgaaatggggacgttatcctagattattcacatgtgcccaaagtatataatcacaagggtccttattcatggaagagggaggcaaaggagagaaccaaagagatggaagtatgagaaggttatgatcttcccttgatggctttgaagatggaagaaggggttcatgagcccaaggaatgtggatagcctctaaaagctggaaaaaggaaggaaaccaattttcttctagagcctctagaaggaacacagccctgatggcaccttcattttagcccagtaagacacatttcagatttctggtccttagacctgtaagataataaatttgtgttgttttaagctaccaagtcagtagtaatttgtttttgcaaccagtgaaaatatactgattcaaatatttgcccattctctacccccttgca

SEQ ID NO: 698832 - DNA, 1005 bp, Homo sapiens
tatttttgaatagtagacttcttttctctctttggctactttatcaaaacttcaaaggagttcccacttcttttgatagtcacagcaacctgattcatggagaaaacaaaaaagattaagggagatgaagtggtggttatgggaaggggcacatgtgaataaacttattgagtaaccccacttcttaggacaaaatcatccaaaacacatattcttttccttatgtaccattctttactatgctaataaatacatacataaataaataaatgtgttgtcaactactttctctaatctgcgtcttgaatagtttttccaagactgatacatttgaactcatatctttcccaatactccatgtgtcacagaacctgtatttgtatcatggctggccagaggggatttgtagtctacagctgaagaatggagtaaagattacaggtaaattaaatgaggtcaagtaaagcccctatgttagaaaaaggcatactgtaataaatataagttattttgcagctgggtgcrgtggctcacgcctgtaatcctagcactttgggaggccaagacaggcagattgcctgagctcaggagttcgaaaccagcctgggcaacatggtgaaaccccgtctctactaaaaatacaaaaaaattagccaggcatggcagcgtgtgcctgtagtcccagctacttgggaggctgaggctggagaattgcttgaaccctggaggcggaggttgcagtgagccgagatcatgccactgcactccagcctgggtgacagagcaagactccgtctccaaaaaaaaaaaaatatatatatatatatatgtgtgtgtgtgtgtgtgtgtgtgtgtgtgtatacatatatatttatgtgtatatatatgttattttgcactcctgttgcccaccatttatcacgcatggcagatcagatctggccttacatagggtgcttggggattgtggtcgttggattaacagctgctggcagtagacagatg

SEQ ID NO: 698833 - DNA, 552 bp, Homo sapiens
aaaaaaaaaatcaggaaatggataccattctgatacaactactgccattcactctgtgggacctttgctatgtctcttaggttctctgtgcccaagtcccacatttgtaaaatggggactttgatcctcatttgtgccagaaactggatgagcaaaagttttaaaatttattagaaaactttttttyttccccaaaagtgctatattaaaacgttagacatatcgttaaatccattgtctgggactatttgcaccaaaaaatgctcaccccgaatatctgagtttttgataaattccagttgttcagcaagttctttcacagtgttgtctaggctttcggcttctgtctgtagagaatccagttctttggctgtgctgttgctttgggaagttgtgtcagataatttcacttctacttgagccatcatttctgtaacatctttaatcagtttcctgtaaagagaaagttaagcttacttacataaaataaacccaagggagaactttcacgtttcatattttctactagtactgtatccattactaatttca

SEQ ID NO: 698834 - DNA, 1479 bp, Homo sapiens
tgggttcaagtgattctcttgcttcagcctcccgagtagctgggactacaggcacccgttaccatgcccagctaagtttttatatttttagtagagatggagtttcgccatgttggccaggctggtctcgaactcctggcctcaagtggtctgcctgccttggcctcccaaaatgctgggattacaggcgtgagcacccggcccaaggcttcaatttccttaaagcaaaaggaggagaccattattttccttctagggctgttcttaaaactgaaagcagggtatacaaagggagacttcttagccttaagttcataggtagcagtctcagaagtgagttaaatattgactgttggtggaatttacaactggtccacaaaagtcagctggaacctgttggaaaatgttagtgctgccaacttttctatgactttatgtttactctgagcttatctttagaagtagcagttttccatttttatcccagtttgttttaacatagttttaaaataatctagctatccgagcttcctagaatgacatacaaggtccttcatgttttggctctggtctatctcacaagcttcttcactcctccttcacaattgcagcaggttcctaacacgctatgatatttaacagttccgtatctctgtacacatgatttcctttgtgttcttcttctccaatacctggtagattccaattcattcttaaaaatactcagcacagctgggtgcagtggctcatgcctgtaattttggcacgttgggagactgaagtggggagattgcttgaggccaggagttcaagaccagcctggccaatataaagaaaccctgtctctaaaacaaacaaacaaacaaaacacaactcagctgaccattgattcatttcttcattccttcaacaaacatgtatcagcctattatttgtcaggaactcagttcctaacacagttgtagaagataagaaaatgatgtaaagccttcatggaatccctagatasagttgatcatttccttcttgtaagtaccttgtatatatgtctattccatgtcatacattatttgtttatgtttctgttccctttaagactgagtttcccaagggcaaggcccaaatcttaaccatttttccctcttttgttaggtcctatgacatagtaagtatacaagaaagtttgttgaaataaactgaactatgagcaaaagatatataaatgacgtagacctaaactccaaagtttacatacacaggagaagtgcccaaaataattggtgcagataataaattggaagaagggatgtaaatgtgggttggagttaggaaggttttgtgaaggaactgtgagtcttgtgttagactttaaagaacagataggtttggcaggggtgatgacaaagcagtgggcaataagcaaatcatgtgaaaggttattgagagttccaaacactgaaacagaaggctttgttggcc

SEQ ID NO: 698835 - DNA, 1479 bp, Homo sapiens
tgggttcaagtgattctcttgcttcagcctcccgagtagctgggactacaggcacccgttaccatgcccagctaagtttttatatttttagtagagatggagtttcgccatgttggccaggctggtctcgaactcctggcctcaagtggtctgcctgccttggcctcccaaaatgctgggattacaggcgtgagcacccggcccaaggcttcaatttccttaaagcaaaaggaggagaccattattttccttctagggctgttcttaaaactgaaagcagggtatacaaagggagacttcttagccttaagttcataggtagcagtctcagaagtgagttaaatattgactgttggtggaatttacaactggtccacaaaagtcagctggaacctgttggaaaatgttagtgctgccaacttttctatgactttatgtttactctgagcttatctttagaagtagcagttttccatttttatcccagtttgttttaacatagttttaaaataatctagctatccgagcttcctagaatgacatacaaggtccttcatgttttggctctggtctatctcacaagcttcttcactcctccttcacaattgcagcaggttcctaacacgctatgatatttaacagttccgtatctctgtacacatgatttcctttgtgttcttcttctccaatacctggtagattccaattcattcttaaaaatactcagcacagctgggtgcagtggctcatgcctgtaattttggcacgttgggagactgaagtggggagattgcttgaggccaggagttcaagaccagcctggccaatataaagaaaccctgtctctaaaacaaacaaacaaacaaaacacaactcagctgaccattgattcatttcttcattccttcaacaaacatgtatcagcctattatttgtcaggaactcagttcctaacacagttgtagaagataagaaaatgatgtaaagccttcatggaatccctagatagagttgatcatttccttcttgtaagtaccttgtatatatgtctattccatgtcatacattatttgtttatgtttctgttccctttaagactgagtttcccaagggcaaggcccaaatcttaaccatttttccctcttttgttaggtcctatgacatagtaastatacaagaaagtttgttgaaataaactgaactatgagcaaaagatatataaatgacgtagacctaaactccaaagtttacatacacaggagaagtgcccaaaataattggtgcagataataaattggaagaagggatgtaaatgtgggttggagttaggaaggttttgtgaaggaactgtgagtcttgtgttagactttaaagaacagataggtttggcaggggtgatgacaaagcagtgggcaataagcaaatcatgtgaaaggttattgagagttccaaacactgaaacagaaggctttgttggcc

SEQ ID NO: 698836 - DNA, 1479 bp, Homo sapiens
tgggttcaagtgattctcttgcttcagcctcccgagtagctgggactacaggcacccgttaccatgcccagctaagtttttatatttttagtagagatggagtttcgccatgttggccaggctggtctcgaactcctggcctcaagtggtctgcctgccttggcctcccaaaatgctgggattacaggcgtgagcacccggcccaaggcttcaatttccttaaagcaaaaggaggagaccattattttccttctagggctgttcttaaaactgaaagcagggtatacaaagggagacttcttagccttaagttcataggtagcagtctcagaagtgagttaaatattgactgttggtggaatttacaactggtccacaaaagtcagctggaacctgttggaaaatgttagtgctgccaacttttctatgactttatgtttactctgagcttatctttagaagtagcagttttccatttttatcccagtttgttttaacatagttttaaaataatctagctatccgagcttcctagaatgacatacaaggtccttcatgttttggctctggtctatctcacaagcttcttcactcctccttcacaattgcagcaggttcctaacacgctatgatatttaacagttccgtatctctgtacacatgatttcctttgtgttcttcttctccaatacctggtagattccaattcattcttaaaaatactcagcacagctgggtgcagtggctcatgcctgtaattttggcacgttgggagactgaagtggggagattgcttgaggccaggagttcaagaccagcctggccaatataaagaaaccctgtctctaaaacaaacaaacaaacaaaacacaactcagctgaccattgattcatttcttcattccttcaacaaacatgtatcagcctattatttgtcaggaactcagttcctaacacagttgtagaagataagaaaatgatgtaaagccttcatggaatccctagatagagttgatcatttccttcttgtaagtaccttgtatatatgtctattccatgtcatacattatttgtttatgtttctgttccctttaagactgagtttcccaagggcaaggcccaaatcttaaccatttttccctcttttgttaggtcctatgacatagtaagtatacaagaaagtttgttgaaataaactgaactatgagcaaaagatatataaatgaygtagacctaaactccaaagtttacatacacaggagaagtgcccaaaataattggtgcagataataaattggaagaagggatgtaaatgtgggttggagttaggaaggttttgtgaaggaactgtgagtcttgtgttagactttaaagaacagataggtttggcaggggtgatgacaaagcagtgggcaataagcaaatcatgtgaaaggttattgagagttccaaacactgaaacagaaggctttgttggcc

SEQ ID NO: 698837 - DNA, 1479 bp, Homo sapiens
tgggttcaagtgattctcttgcttcagcctcccgagtagctgggactacaggcacccgttaccatgcccagctaagtttttatatttttagtagagatggagtttcgccatgttggccaggctggtctcgaactcctggcctcaagtggtctgcctgccttggcctcccaaaatgctgggattacaggcgtgagcacccggcccaaggcttcaatttccttaaagcaaaaggaggagaccattattttccttctagggctgttcttaaaactgaaagcagggtatacaaagggagacttcttagccttaagttcataggtagcagtctcagaagtgagttaaatattgactgttggtggaatttacaactggtccacaaaagtcagctggaacctgttggaaaatgttagtgctgccaacttttctatgactttatgtttactctgagcttatctttagaagtagcagttttccatttttatcccagtttgttttaacatagttttaaaataatctagctatccgagcttcctagaatgacatacaaggtccttcatgttttggctctggtctatctcacaagcttcttcactcctccttcacaattgcagcaggttcctaacacgctatgatatttaacagttccgtatctctgtacacatgatttcctttgtgttcttcttctccaatacctggtagattccaattcattcttaaaaatactcagcacagctgggtgcagtggctcatgcctgtaattttggcacgttgggagactgaagtggggagattgcttgaggccaggagttcaagaccagcctggccaatataaagaaaccctgtctctaaaacaaacaaacaaacaaaacacaactcagctgaccattgattcatttcttcattccttcaacaaacatgtatcagcctattatttgtcaggaactcagttcctaacacagttgtagaagataagaaaatgatgtaaagccttcatggaatccctagatagagttgatcatttccttcttgtaagtaccttgtatatatgtctattccatgtcatacattatttgtttatgtttctgttccctttaagactgagtttcccaagggcaaggcccaaatcttaaccatttttccctcttttgttaggtcctatgacatagtaagtatacaagaaagtttgttgaaataaactgaactatgagcaaaagatatataaatgacgtagacctaaactccaaagtttacatacacaggagaagtgcccaaaataattggtgcagataataaattggaagaagggatgtaaatgtgggttggagttaggaaggttttgtgaaggaactgtgagtcttgtgttagactttaaagaacagataggtttggcaggggtgatgacaaagcagtgggcaataagcaaatcatgtsaaaggttattgagagttccaaacactgaaacagaaggctttgttggcc

SEQ ID NO: 698838 - DNA, 1145 bp, Homo sapiens
tgttttacaggttattgataggatcaccagccctgtccttttaattgcctaacacagtcttaggtagcctacagcaggcacacattaaatgaccaataccggcttcaagtttctcctctctaacttggcaaaaaagattaaccattatggttcaagccatgtatgtaacactctagtccaggttttctcgtcttgaatatccatgcctttgtaagcataacacaattcatgcttcagtataacactggggtcgtctttacagaacacagatcatgttaccaaaagtgacttcaaactaaaataaaatgcctatttttatttctcaaacatggtgaaaacgaaaaatggtcctagtaacattttttatcaccgttttcttctttcacccctgctatgacattatgtttgcgctcccaagctacacccctcaaatcctcctcacacctcacaacaaaaacaaaaacaaaaccaaactccttccagcaatttctagtttatcttttctttttgatcttgcatcacaaaatctcagatattaatctgtccaatataacacattttggacagcctaggagaggaagagtttgagtaggtcagaccagaattcttttgagtagggaggaggaatttaaggaactgacagcaggtaactgatatcygcccaggctgtgtaggctgcatggtgctatagctttccctctctgtagattcagggctccaaatgtatcctttatgacagtgatgtcctctttgcagaactaacatttttctaacgctaacaagacaggatggggattttgaacttgttaagttacatctatttatagtggcagcttccatttgaggctccctggtacctcccatttgtgaggctctgtggtaccttcatgcactactatgacacttttcattcttcccaagcaataagtcactagagttattatttattcatttccaactcagtatcctagaagttatgtaagtgcaaataaacatggactaagaatcaggagcaatataattcataatttgtcaaaaaattcatagttgtgataaatgtaatatttttgttcagtttcactatcaagaataaggaaaaatgcctcttctaccactttttaactaatatatgtgaagtatataaa

SEQ ID NO: 698839 - DNA, 665 bp, Homo sapiens
ataatatacctggagtagcagggtttgttagtggtgatgctagtttgagaaccaggtttcctggaccctctgaccagcactctctcctccataccatgtggactcaccctggaaattgtgttctctgtggatgggaagcccyggtataacccactcctgaatccaggagcggccacacctgagcatggaacttctataacccttcagacgcagccctatccccaacttattaattcagattctctacaggaaagcaaagtgttagcaatatctaaatgatccccaggagattctggtatgcgcctagggtggagaacacctgtaatagtttctcatcctcacccccttaattgactcaggcttaacaggttaggagtcacagtctttgacttcctagaatttctggctctctttggccccttgatactctagatatcaagaacctaattctgagagttcagacttttggagaacagaaaacaaaaaggggatggtggagaataattaaagtacatgggtcttagtgacaggcatcatcagtgacacttcctacagacacatgagaaattacaagagaaaactatcaagaaaaaacttgatttggctatataaaaatggttttacttataggcatttgtctcaactgctaaccaagtttgcaataa

SEQ ID NO: 698840 - DNA, 1352 bp, Homo sapiens
ctgttacacatatgatgaacactgctttttagacttcattaggaatttaggactgcatcttgacaactgagcctattctactatatgtacaatacctagcccataataggtatacaatacacatttggtaaaactaattttcaaccaatgacatgtatttttcaactagtaacctagaaatgtttcacttaaaatctgagaactggttacactacaagttaccttggagattcatatatgaaaacgcaaacttagctatttgattgtattcactgggacttaagaatgcgcctgaataattgtgagttcgatttgttctggcaggctaatgaccatttccagtaaagtgaatagaggtcagaagtcgtataaaagaggtgttgtcagaacaccgttgagattacataggtgaacaactatttttaagcaactttatttgtgtagtgacaaagcatcccaatgcaggctgaaatgtttcatcacatctctggatctctctattttgtgcagacattgaaaaaattgttcatattatttccatgttatcagaatatttgattttttaaaaacataggccaagttcattcacttcattattcatttatcaaaatcagagtgaatcacattagtcgccttcacaactgataaagatcactgaagtcaaattgatttttgctataatcttcaatctacctatatttaattgagaatctaaaatgtacaaatcattgtgttgattctgcagkgatcctgctataagtaagactcagtccctgattttaggtatcctgtgataagcagaattaagacaaatacacaagagacaaagcacaaaaaataaatatcataaggggatgaacaaaatggtggagaaagagtagacaaagtttttgatcacctgccttcaaagaaaggctgtgaattttgttcacttagacagcttggagacaagaaattacccaaaagtaaggtgaggaggataggcaaaaagagtagaaagatgtgaatggacattgttgagaaatgtgataggaaaacaatcatagataaaggatttccaagcaacagagcatatccagatgaggtaggatgggataaactcttattgaaccaatcttcaccaattttgtttttcttttgcagagcaagctaggaattgtttcccttctactgggcacaatacacgcattgatttttgcctggaataagtggatagatataaaacaatttgtatggtatacacctccaacttttatgatagctgttttccttccaattgttgtcctgatatttaaaagcatactattcctgccatgcttgaggaagaagatactgaagattagacatggttg

SEQ ID NO: 698841 - DNA, 2295 bp, Homo sapiens
ttacccaggctgaagtacagtggtgtgatcttggcccagtgcagcctccacctcccggatttaagtgattctcctgcctcagactcctgagtagctggggttacaggcacacaccggcgacgcccagccgatttcagtatttttagtagagatgggattttgtcatgttgggcaggctagtcttgaactcctggcctcagctctttatattataaaatgattagaattaaaatttaaagattctctcctcacccacacaagccacttttccagtgctcaggagccaccctgggctagtgtcaaccctgctgggcagagcagacagaggacatctccatcactgcagcaagttctgtcatacagtgttgttctagaaaggaaggttattgaatggacatctagaaaagcattttaaatgactacttttttggttgttgtaagcaacaacttattttatacttacaaaacaagaacaaaccttatcctgttccaaatcctacagaatcgtaaacagggtcataattgtacatatcattctcggctaaaggtaaaaagtgaggtcttcccacatacacagcatttttctttcttttgaaagctttaagtgatttgcttcctgaggaccaacactattctgagactgtagtcacagtctgtgagcggcagcgccttgtatcaagatgtggttattccacaaaggcgacaagaatgtgaggacacacgctcaaggtgggtactgacaatgcccggctgccaagatggattaaatttatggcaatttacagctcaccccagggagactcagtctgcaaaagctcagagacagggaaagttgccataaggatgcaggtaatgaaagcattaagctatccactctattgagaaaaatggctccaggctgaattttccaggcacactgtctataccaaacaattatcccaatcatgctatggtgtttccctccgttttcccagtgctgatgtgcctttaggtgcagcgggtttgttgctgctatgtttgggcttcagggtatgatgctatctcccgtcagaaaccatgatctttactaggtgccagctacagcatgcctacacagacttctagaagcagcagggccagaacagaagcacttaagccccatactcaagaaacagaagcctggcgcaggtccagctctctgtccatgggaccacaatgagtctttcacagtgcatgccttgcttgtacaagggcaattgtctctgaggttatgttcataatggttaccacttaggtgttcactaacaggctcagtgttaagcactcaatgtgcagaatgccacagatmcatccaaaggctctgtgaggggaggtcactggatgtcctcgtttcacagtaatgtaaaccacttaggtgatacctcaagctggtgcaagtagtggctgaccttgaatccaggtgatgtgaccgccgctatgggtttctgtgggtcccttggcccaaggtcctgtcaattcacatatacacctgtccagcccacccagccttagcttccccatttacatttaatggtgaagagcacagacctctggagccagactacctgtattcaaatctgagctctgccattactacctgtgtgcctttagctaacccctgggtgcctgaggaccctggccttttgctggccctcttcttacagaagagaaagcagaccccagagccagtttctcttctgtaagggaagcctggaggctggttttacctctacaagaagagaatggtattgatgcctggcatcacctgagagctgtcagaaatgcagagtatcaggccccaccgtagtccaacagagtcagaacctgtattttaacaagatccctgcgttggtttgcacattagagtttgaaaagcaccatctgatggcagaaaatagtgccctgtgatgaattattttgtaaaacacacaagactcacgtaacggtctactttataaagccagacatatcacaggtctacatttcagtgcacttagagggctatgccattgcaggtgctccccagatgaacacagtcacgtaaagccagaggattgtgttgaaagacaaggaaatgaaactaaatcattgctcttaggactaaagtcaatgaggtaacattagcagcggtttcctgtaatccttgagggtggggaggaagcatcctgtaagtaaaacaaagtctgttggcacgtgtttccatgaagattcatgcctaattaagtaaaacccacgaaagccggaatcctgctctggggagactgggtggccactgtg

SEQ ID NO: 698842 - DNA, 2100 bp, Homo sapiens
tattagtaacagtgacatcattgtcatctcacctgttgatatgcccagtttagcaacttgtatctgtaggatcgcctcattgcgtaagacagagtataaattgcatgcagtacagcaaaaaacaaactgagaagcccaaactgctttcttgttaacatccacttatccaaccaatgtggaaacttcttatacttggttccattatgaacttggacaattgctgctatcacacctggtaggtaaaccaatgccaagagagtgatggaaaccattggcaagactttgttgatgaccaggattggaattttataaaaatattgttgatgggaagttgctaaagggtgaattacttccctcagaagagtgtaaagaaaagtcagagatgccataacagcagctattttaattggcaagtgccactgtggaaagagttcctgtgcgtgctgaagttctgaagggcagtcaaattcatcagcatgggctgtttgctgcaaatgcaaaagcacaggtctttttagcatgctggtctctcccgtgtcctcatgctacaaaggaaagaaaattaacatcttaaaattgaacaaaacaatgggatatctcttgaactaattacttattgctcaatcattgtgcttctcattgaataagggcattcagaatcttgcttttgaatactggttagttgaagatagcatagtctatgtggcactgaaagacttttgtctttaggacaaaagaaatacatgcttcagacaggtaagacagttaacttgaaaaatgaaattatttcattttatgcacattgttactcttataaagtatatgcttgtaatttattaattacttttccctattaaaattattaagattaaataaataatttctgctaaaacttccattgagataatttggaagtttggaaccaaaatttctkccactttttcagtcaaaaaatgtagtaagaaacacttaatcctgtgtttgaccaaaagtggaaaaagtgattcttatctaaaagtagatttatttggttatacagtgaatcgtcaatttactagatgatctcttggtaagctgccactgtgtctatgacaaaaatgcttgcttacaaaattactgttatatgggcattgatgacttttttttttttttaacttagaactatagagtgttagaaagaattggaagggccttggggatgatctggtccaaggctttcatggtataaacaaactaagaccccagattttcagtaacgtattcaaggttattcagctaagtccctgacaatcagtgaaggtactatttctctcacatatgctactctgtccttcacagtatcagtgacagtaatccaagtccagatatcagcagactagggtgaaaaatcactttcataacactaggagatacagaatgtcatcgaattatgtttaaagatgtaaattattatttattattgtcattattaatattttaccaaataatcgttgtcttctaaatttctcctaggcttcattttccaaatttcttcttggtttgtgatgtcttttctgctttccattaattctataaaatagtatggcttcagccacctgtaaaaataaaaataattactttcatgtctattctacttatgatgtgaatgtctgatgtaacaatataaaaaatttacttgcttaaagactagaatggcagataaagtacaataaaaattgaaatagtgactgatttatacatttaacttcatattataatctgtaagtttcaaaccaatgccctcttatcaacagtaactgctcttctttatccacttatttgttcaatgaataacccaggtgcctgtatggattacaaagggtcacatgttgccttttactttaggaagatttaacttcaggtttccatctggaggaaagccaactcctttcaatggcaaatatcattaggaatgcattatattgagagtaataatgtcatcaatggaggctggaggtagctgatataagatttatgtttaacagaattttggggttgacactggagtctgaaacagtattttcagagtaccatttttcttttggagtaagaggttggtcc

SEQ ID NO: 698843 - DNA, 2100 bp, Homo sapiens
tattagtaacagtgacatcattgtcatctcacctgttgatatgcccagtttagcaacttgtatctgtaggatcgcctcattgcgtaagacagagtataaattgcatgcagtacagcaaaaaacaaactgagaagcccaaactgctttcttgttaacatccacttatccaaccaatgtggaaacttcttatacttggttccattatgaacttggacaattgctgctatcacacctggtaggtaaaccaatgccaagagagtgatggaaaccattggcaagactttgttgatgaccaggattggaattttataaaaatattgttgatgggaagttgctaaagggtgaattacttccctcagaagagtgtaaagaaaagtcagagatgccataacagcagctattttaattggcaagtgccactgtggaaagagttcctgtgcgtgctgaagttctgaagggcagtcaaattcatcagcatgggctgtttgctgcaaatgcaaaagcacaggtctttttagcatgctggtctctcccgtgtcctcatgctacaaaggaaagaaaattaacatcttaaaattgaacaaaacaatgggatatctcttgaactaattacttattgctcaatcattgtgcttctcattgaataagggcattcagaatcttgcttttgaatactggttagttgaagatagcatagtctatgtggcactgaaagacttttgtctttaggacaaaagaaatacatgcttcagacaggtaagacagttaacttgaaaaatgaaattatttcattttatgcacattgttactcttataaagtatatgcttgtaatttattaattacttttccctattaaaattattaagattaaataaataatttctgctaaaacttccattgagataatttggaagtttggaaccaaaatttctgccactttttcagtcaaaaaatgtagtaagaaacacttaatcctgtgtttgaccaaaagtggaaaaagtgattcttatcyaaaagtagatttatttggttatacagtgaatcgtcaatttactagatgatctcttggtaagctgccactgtgtctatgacaaaaatgcttgcttacaaaattactgttatatgggcattgatgacttttttttttttttaacttagaactatagagtgttagaaagaattggaagggccttggggatgatctggtccaaggctttcatggtataaacaaactaagaccccagattttcagtaacgtattcaaggttattcagctaagtccctgacaatcagtgaaggtactatttctctcacatatgctactctgtccttcacagtatcagtgacagtaatccaagtccagatatcagcagactagggtgaaaaatcactttcataacactaggagatacagaatgtcatcgaattatgtttaaagatgtaaattattatttattattgtcattattaatattttaccaaataatcgttgtcttctaaatttctcctaggcttcattttccaaatttcttcttggtttgtgatgtcttttctgctttccattaattctataaaatagtatggcttcagccacctgtaaaaataaaaataattactttcatgtctattctacttatgatgtgaatgtctgatgtaacaatataaaaaatttacttgcttaaagactagaatggcagataaagtacaataaaaattgaaatagtgactgatttatacatttaacttcatattataatctgtaagtttcaaaccaatgccctcttatcaacagtaactgctcttctttatccacttatttgttcaatgaataacccaggtgcctgtatggattacaaagggtcacatgttgccttttactttaggaagatttaacttcaggtttccatctggaggaaagccaactcctttcaatggcaaatatcattaggaatgcattatattgagagtaataatgtcatcaatggaggctggaggtagctgatataagatttatgtttaacagaattttggggttgacactggagtctgaaacagtattttcagagtaccatttttcttttggagtaagaggttggtcc

SEQ ID NO: 698844 - DNA, 2100 bp, Homo sapiens
tattagtaacagtgacatcattgtcatctcacctgttgatatgcccagtttagcaacttgtatctgtaggatcgcctcattgcgtaagacagagtataaattgcatgcagtacagcaaaaaacaaactgagaagcccaaactgctttcttgttaacatccacttatccaaccaatgtggaaacttcttatacttggttccattatgaacttggacaattgctgctatcacacctggtaggtaaaccaatgccaagagagtgatggaaaccattggcaagactttgttgatgaccaggattggaattttataaaaatattgttgatgggaagttgctaaagggtgaattacttccctcagaagagtgtaaagaaaagtcagagatgccataacagcagctattttaattggcaagtgccactgtggaaagagttcctgtgcgtgctgaagttctgaagggcagtcaaattcatcagcatgggctgtttgctgcaaatgcaaaagcacaggtctttttagcatgctggtctctcccgtgtcctcatgctacaaaggaaagaaaattaacatcttaaaattgaacaaaacaatgggatatctcttgaactaattacttattgctcaatcattgtgcttctcattgaataagggcattcagaatcttgcttttgaatactggttagttgaagatagcatagtctatgtggcactgaaagacttttgtctttaggacaaaagaaatacatgcttcagacaggtaagacagttaacttgaaaaatgaaattatttcattttatgcacattgttactcttataaagtatatgcttgtaatttattaattacttttccctattaaaattattaagattaaataaataatttctgctaaaacttccattgagataatttggaagtttggaaccaaaatttctgccactttttcagtcaaaaaatgtagtaagaaacacttaatcctgtgtttgaccaaaagtggaaaaagtgattcttatctaaaagtagatttatttggttatacagtgaatcgtcaatttactagatgatctcttggtaagctgccactgtgtctatgacaaaaatgcttgcttacaaaattactgttatatgggcattgatgacttttttttttttttaacttagaactatagagtgttagaaagaattggaagggccttggggatgatctggtccaaggctttcatggtataaacaaactaagaccccagattttcagtaacrtattcaaggttattcagctaagtccctgacaatcagtgaaggtactatttctctcacatatgctactctgtccttcacagtatcagtgacagtaatccaagtccagatatcagcagactagggtgaaaaatcactttcataacactaggagatacagaatgtcatcgaattatgtttaaagatgtaaattattatttattattgtcattattaatattttaccaaataatcgttgtcttctaaatttctcctaggcttcattttccaaatttcttcttggtttgtgatgtcttttctgctttccattaattctataaaatagtatggcttcagccacctgtaaaaataaaaataattactttcatgtctattctacttatgatgtgaatgtctgatgtaacaatataaaaaatttacttgcttaaagactagaatggcagataaagtacaataaaaattgaaatagtgactgatttatacatttaacttcatattataatctgtaagtttcaaaccaatgccctcttatcaacagtaactgctcttctttatccacttatttgttcaatgaataacccaggtgcctgtatggattacaaagggtcacatgttgccttttactttaggaagatttaacttcaggtttccatctggaggaaagccaactcctttcaatggcaaatatcattaggaatgcattatattgagagtaataatgtcatcaatggaggctggaggtagctgatataagatttatgtttaacagaattttggggttgacactggagtctgaaacagtattttcagagtaccatttttcttttggagtaagaggttggtcc

SEQ ID NO: 698845 - DNA, 2100 bp, Homo sapiens
tattagtaacagtgacatcattgtcatctcacctgttgatatgcccagtttagcaacttgtatctgtaggatcgcctcattgcgtaagacagagtataaattgcatgcagtacagcaaaaaacaaactgagaagcccaaactgctttcttgttaacatccacttatccaaccaatgtggaaacttcttatacttggttccattatgaacttggacaattgctgctatcacacctggtaggtaaaccaatgccaagagagtgatggaaaccattggcaagactttgttgatgaccaggattggaattttataaaaatattgttgatgggaagttgctaaagggtgaattacttccctcagaagagtgtaaagaaaagtcagagatgccataacagcagctattttaattggcaagtgccactgtggaaagagttcctgtgcgtgctgaagttctgaagggcagtcaaattcatcagcatgggctgtttgctgcaaatgcaaaagcacaggtctttttagcatgctggtctctcccgtgtcctcatgctacaaaggaaagaaaattaacatcttaaaattgaacaaaacaatgggatatctcttgaactaattacttattgctcaatcattgtgcttctcattgaataagggcattcagaatcttgcttttgaatactggttagttgaagatagcatagtctatgtggcactgaaagacttttgtctttaggacaaaagaaatacatgcttcagacaggtaagacagttaacttgaaaaatgaaattatttcattttatgcacattgttactcttataaagtatatgcttgtaatttattaattacttttccctattaaaattattaagattaaataaataatttctgctaaaacttccattgagataatttggaagtttggaaccaaaatttctgccactttttcagtcaaaaaatgtagtaagaaacacttaatcctgtgtttgaccaaaagtggaaaaagtgattcttatctaaaagtagatttatttggttatacagtgaatcgtcaatttactagatgatctcttggtaagctgccactgtgtctatgacaaaaatgcttgcttacaaaattactgttatatgggcattgatgacttttttttttttttaacttagaactatagagtgttagaaagaattggaagggccttggggatgatctggtccaaggctttcatggtataaacaaactaagaccccagattttcagtaacgtattcaaggttattcagctaagtccctgacaatcagtgaaggtactatttctctcacatatgctactctgtccttcacagtatcagtgacagtaatccaagtccagatatcagcagactagggtgaaaaatcactttcataacactaggagatacagaatgtcatcgaattatgtttaaagatgtaaattattatttattattgtcattattaatattttaccaaataatcgttgtcttctaaatttctcctaggcttcattttccaaatttcttcttggtttgtgatgtcttttctgctttccattaattctataaaatagtatggcttcagccacctgtaaaaataaaaataattactttcatgtctattctacttatgatgtgaatgtctgatgtaacaatataaaaaatttacttgcttaaagactagaatggcagataaagtacaataaaaattgaaatagtgactgatttatacatttaacttcatattataatctgtaagtttcaaaccaatgccctcttatcaacagtaactgctcttctttatccacttatttgttcaatgaataacccaggtgcctgtatggattacaaagggtcacatgttgccttttactttaggaagatttaacttcaggtttccatctggaggaaagccaactcctttcaatggcaaatatcattaggaatgcattatattgagagtaataatgtcatcaatggaggctggaggtagctgatataagatttatgtttaacagaattttggggttgamactggagtctgaaacagtattttcagagtaccatttttcttttggagtaagaggttggtcc

SEQ ID NO: 698846 - DNA, 1107 bp, Homo sapiens
gaaatgatattttgtttttctaaagtcagttattcacagagataaatactgagtatacctcaaacttatatggttttaagtataaaatcacagatgagttatataatacccagtttccgtgcacatttgctgaaaacatctatctttctatgtattttctgttcacaatatttgtcagaacttcagtgtatttaagctgggtactatgttttttgccaaaacaaaccatatgaagacacaccctttggtaggaaccccgatatttggtatgcattaagcattattgttgttatgtttataatttaccatgtattttctggtaattaaagayggcattttatttaatatggctaaggttatagttgtaagaactagctaaaatatattcaaatccttttaaagctctgtgttagtctgttcttgcactgctataaagaaatacctgagactagtaatttataaggaaaagaggtttaattggcttatggttcttcgggctgtacaagaatcatggctagggacacctcagaaaattttcaatcatggcaaaaggtgaaggggaagcaggcaggtcttacttgactgagcaggaagaagaggcgaggggtgctacacgcttttaaacaactaggcattgtgacaactcactctcacgagaacagagccaaaagggaaatccacccccatgatccaattatttcccaccagaccccacctccaacactggggacttcagctggacatgagatttgggcagggacacagacccaaaccatgtcaagcttcctttgttcaagcagagaatacttagaggtaaacagattcagaggacctaaaatatattaagaaggatagaaattatatactatttattctttttgtgaatttcaaggaccaggtttttcttagagaggaactcctgtgatttaggttcactttaaattcttttcttttctttttttttttttttttgagacggagtctcgctctgtcacccaggctagagtgcagtggcacgatctcggctcactgcaacctccgcctcccaggttcaaggaattctcctgcctcagcctcccgagtagctgggactacaggcgcctgcca

SEQ ID NO: 698847 - DNA, 1955 bp, Homo sapiens
tatagtctcagctacttgggaggctgaggcaggaggattacttgaggtcaggagttccaggctgcagtgagctatgatcaggccactgcaatccaacatgggtaacagagcaagaccttgtctcaaaaaagaaaagaaaagaaaagaggctgggcgcagtggctcacacctgtaatcccagcactttgggagggtgaggtgggtggatcacttgaggtcaggagttcaagaccagcctgaccaagatggtgaaaccccatctctactgaaaaaatacaaaataagccaggcgtggtggcacatgcctgtaatcccagctactcgggaggctgaggcaggagaattgcttgaacccaggaagcaaaggtttgcagtaagccgagatcacaccattgcattctagcctgggcaacaagagcaaaactctgtctccaaataaaaaataaataaaagaaaagagaactgccagctcccgcccacccggggccctccctgcatcagaacttggccgtaggctttcagtacattctctcactaattgcccagaatggatctgcaatgtagaccatctcttttcatagagggagaaagcaggtcgtgggtgaggtacctcctacagcttttgcggctaatcagggccagaggtgggactttgcaactccagactggcacctgcccatctctgcagcccttgcctccccgtctgctccattgtggccacctggagccctggttgccggaccaaggccagtcccttggggccacgcccaactctgcaggtggaggccgcatccatcgtccctgggggagcgcggcagggcacagactccaggaaaggagtgcgcatcacagagtcaaggctcggacagatgggcagacccttgaccccgttgatacggatttggtcctaagtaaatgccttttaggaaagcactcctcaccagtgagtgatcaagggggaaaacgcgagcaatctcagtgccctgccatggagaaatgggttagtaaaaagaacggaccatccctaactgggatgttatgtcaccgttaaaatattaataatagttatggagaattcatagtaacatgagaaacgtacctaatataatatgaagtcaaaacatgcaccgtacaaaattatttacagtgcagtatgattgtacatcttcctacagcaaactcatgcattaccacaatgtggaaataaacacatatgggaattaaatattattaagttgacttttcttgttttttgagacagagtcttgctctgtcacccaggctggaatgcagtctcacaatctcagctcactgcaaccctccgctccaggttgaagtgattctcctgcttcagcctcctgagtagctgggattacaggtgtgtgccaccaagcctggctaatttttcagtagagataggttttctccatgttgctcaggctggtttcaaactcctgacttcaggttatctgcccgcctcacctcctgatgtgctaggattacagacataagtcactgtgtccagctcttgacttttcaaattaggtaaagggattagctatattaaaatatacaataactgattcttagagggaagggctgaagctagaatttacttcattcattttgtgtgtgtgtgtgtgtgtgtgtgtgtgtgtgtgtgtgtgttttgagacaaagtctctctgtcacctaggctgcagtgcagtgacacgatctcagctcactgcaacctccacctcctgggttcaagcaattctcctgcttcagcctcccaaatagctggggttacaggtgcccaacatcacacccagctaatttttatatttttagtagaacaggatttcaccatgttggccatgctggtcttgaactcctgaccacaagtgacctgcccaccttagcttcccaaactgctgggattacargcgtcattctttataacaaaaaattgt

SEQ ID NO: 698848 - DNA, 1122 bp, Homo sapiens
ataaaaaaagcaacagctaaagagaaaatcaagtaaatgatacgaatatgcaagccaaacagaaacaataaccaaagaaagataagacaatatgataaattttcttaagacagagtctcactctgtctcctaggctggagtgcagtggcgcaatctcggctcactgctacctccgcctcccgggttcaagcgattctcctgcctcagcctcctgagtagctgggattacaggcacacaccaccacgcccagctgatttttgtattttcagtagagacggggtttcaccacrttggtcaggctggtctcaaactcctgacctcgtgatccacccgcctccgcctcccaaagtgctgggattacaagcgtgagccaccgcgcccggccaatatgagaagttttctaacctaaaaggagggaaagagactgatgacagtgagaaatgcaaagtaaaggggaatgggaatgaatcagcttttctggagggcaatgaaggcctcacaataaaaataatatatatacatacatatacatatatatatatttttttttttttaaagggatgggatcttgctctttcacctaggctagactgcagtggcacaatcatagctcactgcatccttgaactcctgggctcaggggatccttctgcctcagcctcccgagtagctgggactacaggtgcatgccgacatgcatggctaattattttttaatttttttctagagaacgaggggggtctcactctgttgccctagctggtcttaaactcctggcatgaagtgattctcccaccttggcctcctaaagtgctgggactataagtgtaacccacagtgcctggccaaaaatagtaaatgttaattcatctttatccttatcattatgatttgtatgtgttcagaaatgcctccaggaaagtattataaaacatttaaattttcttcaggtgactttgtggttatttttaacatttaaatatttgatcaatattgaattaatttgaccaaagaagtattttctttttgtttccaaaaggctagcccattatgatcctattgtttactgaataatgtgtttgccttccaaaactccagcagatctgaatgccacctttac

SEQ ID NO: 698849 - DNA, 962 bp, Homo sapiens
taaataatttctatttaacaaaaaatggtcaactcacaacttagtggatacattaaaaagtaccacaaattaccgttaaacatttttcttttttttttttgagaccgagtctctcactctgtcgcccaggctggagtgcaatggcatgatctcggctcactgcaatctctgcctcctgggttcaagcgattctcgtgcctcagcctcccgagtagctgggactacacrtgcccgccaccatgcccagctaatttttgtatttttagtagagatgtggtttcaccatgttggccaggctggtctcgaactcatgacttcaggtgctccacttgccttggcctcccaaagtgctgggattacagatgtgagccactgtgcccagactctttttctttctttttttttttaatggatgggatcttatgaagtccaatctgaacttgaactcctggcctcaaacagtcctcttgccttagccttctgtgtagctaggactacaggcatgcaccactgtgcctaatttaaacatttctttaaatgttagctatagcaaaccttataaatcaagcctacttcaaattacacaaacacagatcctacatgaaagtcagtaaatctgtggggagactttttttttttatttttaaaacaagcaactggcgatgaatgtgtaactttatttatacacgaagttgttggactgtgtcctcatgcctgattttgtatgggctgttgcatttatccctggggaacaggtttagctgaagtcaccaacacagatgtactccacagtgagaaaacaagtgtgggaacatggctctgaagagtgctttccacagtgacatacgacaggataaagttagtgccttttaggctctgcaattttgaattctgtggatatcataaaaggacacttggccgtagtgctcctctgtcttagaaaatctttttgacactgataa

SEQ ID NO: 698850 - DNA, 1374 bp, Homo sapiens
agccactgtaaacaaatccgaaagatatacaccttcaaacagttctcagatgcatgctgtccctgggtggggctgttgaatcccactgtgggagctggaatgtcaatcagaattatcaaggatactatttattggcatgagtgtgttcttgtaagcacttacccttcctatctagttgctcgaaactgccagcaagttttgtttggggcaattaaaatgctatgtgaccccttagaaatttctgtcttgagggtgttcaaatttttaaagatacagaatattttgaggttttggaataaaaagcacttgttaatatataaaagaaactgtgggcatatttcctttcttccatgaaatacgcttagcctgcttatatcctttttaaaccaaggatatgaataaatctgcccaaatattttctttgggatgggaatcattctctaagtagatgatgttttaaaaaaataaaagagagaaaagaaaaaaaagatgaaaccgttaaaaaagaaaacttcttggtgttatataagaactcattctgtttatttgtaaactcacaaaatgtttctaagtttgcaaataaaaatttttctatacaaccatttttgaagccgaatccagcctgtctccttaaaatgacaaagccgaggaaacgaaaacaaatacctgtttaatggactcgaaattagtccacatttatacttttctttgagaaatatgttagactgaaaaatatggcaagtggttaatatttggttcttattaacaaagttttcaaacttttgctttgcctttaaaaaggagaatatttacattatgtgagacaatttaaaggtttaaaaaatgcacgtctgcctttcagtcacatgaagttaatcatacttcttcttgcataatttccccagccttgagtactacagagttgtatacaaaaatcacacattttcataaaccaatctatagttaggttgtaccacgtttaagtctcttataaactctacttgtttcaggactcattgttatgaggacacggaaagaaacttcatgaagtttcccttcccaggtctaatgcatgacctcactttatgctgttcagtttttattaaattctttgctagcttaatgctaaaagatatataagaaaactaataaaaagagtatagcatcttttaattgaaggaaaaaatgagtgctttgcattccaaaatgaagggtcatatattcttttccattgtctgggttttgtaaacatctctggacatgtcaaagtttatttctcattattttagtaattacttttattatatgtttgtaactatacagaatcctattktaattatgcaactgtgagtgtggttttatacgatgacaaaa

SEQ ID NO: 698851 - DNA, 606 bp, Homo sapiens
aattttctattgctacttaaagttttaaagttagagaaagccattaactttctsctaaaaatgatccagattttgttttataaacaagcaggtttgcagataaatcaaactgttaataataagaaaaagcaaaatacggctgggtacagtggctcacatttgtaatcccagcactcccagcactttgggagactgaggcaggcagatcactggaggtcaggagtttgagaccagcctagcaaacatggtgaaactctatctctactaaaaatacaaaaattagctgggcgtgatggcacatatctgtagtcccatctattcgggaggctgaggccccagaatcacttgaacacaggaggcggagaatgcaatgagctgagatcccaccactgcactccagcctgggtgacataacaagactctgtctcaaaaaaaaaaaaaaaaaaaagaaaaattcactaagttcttgtaaggttaaatgaatttccatcagatccatgctgacctcattcaggtttggaaatctcattcaggtttggaaatttttaattcttaaaaaacataatttatatgcaaattttataaacttgtattgcaatgacaccc

SEQ ID NO: 698852 - DNA, 606 bp, Homo sapiens
aattttctattgctacttaaagttttaaagttagagaaagccattaactttctcctaaaaatgatccagattttgttttataaacaagcaggtttgcagataaatcaaacygttaataataagaaaaagcaaaatacggctgggtacagtggctcacatttgtaatcccagcactcccagcactttgggagactgaggcaggcagatcactggaggtcaggagtttgagaccagcctagcaaacatggtgaaactctatctctactaaaaatacaaaaattagctgggcgtgatggcacatatctgtagtcccatctattcgggaggctgaggccccagaatcacttgaacacaggaggcggagaatgcaatgagctgagatcccaccactgcactccagcctgggtgacataacaagactctgtctcaaaaaaaaaaaaaaaaaaaagaaaaattcactaagttcttgtaaggttaaatgaatttccatcagatccatgctgacctcattcaggtttggaaatctcattcaggtttggaaatttttaattcttaaaaaacataatttatatgcaaattttataaacttgtattgcaatgacaccc

SEQ ID NO: 698853 - DNA, 651 bp, Homo sapiens
ttgggagtgaatttctgattttaaaaatgtaataatttctgctctctttctttaccccacgccacaccccatgctcttttgcccttctgccataggatgatgcagcaataaggcccttaccagatgccaacatcttgacattgggctgctcagtttccagaactgtgagaaatacaatgtccacttattataaattacccaggctcaggtaatatgttgtagtggcacaaaaaatcacaaggtatttggtgaagagataaaagcaggatgctggctcattcccagaaaaagcagtatcagtggctactcaaaggatgaggtcagtgtctgggtgaggaagaggaatgtgagaaaaaaaaacaaacaaacatgtcacgtagaattgaactaacaagatgatgctctgaaaaacatatcaggatattgcttgttattaatcaagaaaattattgtgcttgccattttacttatattacataattacatgtcccagtttgttgaaaacttttgtaaagtattgcattttctagacccttacacatatatacaagtacatgctctccagcacaaaggcatatatcctggtatgtgatacatrtataaacatatatatcagaaatatacatgtatgtgtgtgtgtgtatatatata

SEQ ID NO: 698854 - DNA, 1117 bp, Homo sapiens
gaacgtgaaagtggctgcttctatagttcagtacgtcaaagacccatattatggggtattgtaatctgagccccaatacactcaatagactctagaaaatattcattcattaagtacatttttaattagagagaactttaaaagttacttttaaatgctttcttgtatttacatcaatgtatctgcaattgtataaactattagatgagattatcaatcgtcttcaagttaaagtgctatttatcaaatactttcttttacaaaatgtcatttttcctgaaaattgaatccatttgttttgatagccggcttgttctcaccaaatccattaaattatttgctggatatagctaaataaaaaataatttaggactgctcaaatatcagactatctcaagggtgacatattattggagagaacagctgtcaactaaattacaccagatagttggatggtatattagtccagccgaatgtaccaagttgtaaagattagacctgtttgttaatactgtgacataccttagatgcagtttatggaaagtagttttatttaaaatgaacacttatgagagagggacattttacaaaaacttgtaaatattagcaaattcctggcaaataaatgctgggatacctcttctaataagatcctctattgtatgtattatagcagacaagaccccgcctgatcttatacctgtccataggtacaattyccccatttccggccttgatcacactttttatcctaatccagccacattggacacatcggatcccttgatgttaatcaaactctccaagcacacttctgcctcagtgtttttataaccactgttccctcaacttggagcacttcccctagctatttacgtgtatttttcctttagatttattcaggtttctgttaaatatcatcctttcagctataccttccctgactaccttattgaattaatatccctctgtactccccagttactcactatccctcaccctggtttatttttcttcacagcatttgccatataacatatttgatactcatttgtctatacatttattaagtgctttttcttactagaatgcaagctacagtagattgcagagttgt

SEQ ID NO: 698855 - DNA, 1117 bp, Homo sapiens
gaacgtgaaagtggctgcttctatagttcagtacgtcaaagacccatattatggggtattgtaatctgagccccaatacactcaatagactctagaaaatattcattcattaagtacatttttaattagagagaactttaaaagttacttttaaatgctttcttgtatttacatcaatgtatctgcaattgtataaactattagatgagattatcaatcgtcttcaagttaaagtgctatttatcaaatactttcttttacaaaatgtcatttttcctgaaaattgaatccatttgttttgatagccggcttgttctcaccaaatccattaaattatttgctggatatagctaaataaaaaataatttaggactgctcaaatatcagactatctcaagggtgacatattattggagagaacagctgtcaactaaattacaccagatagttggatggtatattagtccagccgaatgtaccaagttgtaaagattagacctgtttgttaatactgtgacataccttagatgcagtttatggaaagtagttttatttaaaatgaacacttatgagagagggacattttacaaaaacttgtaaatattagcaaattcctggcaaataaatgctgggatacctcttctaataagatcctctattgtatgtattatagcagacaagaccccgcctgatcttatacctgtccataggtacaattcccccatttccggccttgatcacactttktatcctaatccagccacattggacacatcggatcccttgatgttaatcaaactctccaagcacacttctgcctcagtgtttttataaccactgttccctcaacttggagcacttcccctagctatttacgtgtatttttcctttagatttattcaggtttctgttaaatatcatcctttcagctataccttccctgactaccttattgaattaatatccctctgtactccccagttactcactatccctcaccctggtttatttttcttcacagcatttgccatataacatatttgatactcatttgtctatacatttattaagtgctttttcttactagaatgcaagctacagtagattgcagagttgt

SEQ ID NO: 698856 - DNA, 780 bp, Homo sapiens
tttattattgcaggtagatgtccaaaaatatttaactttttatgagtacacttttatcttcaaattagctaattctgtattcataatacatcatctctttggtgttaatctgagaaggcacccagaaagaatttcattttgcttgaaaagtatttcaaataataataaccacatctcatgaatagtgctagatgacmatcaattatttgattaaatactcacaatagctacttgagttagatactgtgaaaattccccatttataggctttaggagtttagataacttgcccaattttaatatccagtatattatagggctgagatttaaatttatgcatgctgacttcaccccttaacacttacatgtcattgatataaaactggatttgatattgtttattatgctaaaaccaaaaaataaaagaaactgattgttgactttcaatctctgttttgtgagaaactgaacttgaaatcagttaggttgatctgtaggtagtcatggagaatgagagggaacagttggcagtggtcaagtacacaggctcctcaatgaggttgctctgttaattaatagatgtatgatgatggattacttatttaacttttccgtgcacccattttcttattttaaaataatttgaaaaagaaaatcagtcatgacttttaagattgctttgaggattacattattcaatacacataaagcacctaagatagtacctgatacaaaataaatagtcatatatcagccattatcactggatactgctttgaa

SEQ ID NO: 698857 - DNA, 780 bp, Homo sapiens
tttattattgcaggtagatgtccaaaaatatttaactttttatgagtacacttttatcttcaaattagctaattctgtattcataatacatcatctctttggtgttaatctgagaaggcacccagaaagaatttcattttgcttgaaaagtatttcaaataataataaccacatctcatgaatagtgctagatgacaatcaattatttgattaaatactcacaatagctacttgagttagatactgtgaaaattccccatttataggctttaggagtttagataacttgcccaattttaatatccagtatattatagggctgagatttaaatttatgcatgctgacttcaccccttaacacttacatgtcattgatataaaactggatttgatattgtttattatgctaaaaccaaaaaataaaagaaactgattgttgactttcaatcyctgttttgtgagaaactgaacttgaaatcagttaggttgatctgtaggtagtcatggagaatgagagggaacagttggcagtggtcaagtacacaggctcctcaatgaggttgctctgttaattaatagatgtatgatgatggattacttatttaacttttccgtgcacccattttcttattttaaaataatttgaaaaagaaaatcagtcatgacttttaagattgctttgaggattacattattcaatacacataaagcacctaagatagtacctgatacaaaataaatagtcatatatcagccattatcactggatactgctttgaa

SEQ ID NO: 698858 - DNA, 1275 bp, Homo sapiens
tcatggtttttgatgctgttgttttttggatagtcttcatatttcagctttttttgtttgcttttaataccccaactctcatttttagctcatcatgcctaaccagaactatgttataaattatttaaatgagtcttttgaaacttttgttggtaacagtgggagtaagtttgcttgaactgaaatttatagtaacaaaattggatggaatccctcctctactttttcagattagagatgcaataatggaatcgcagagggaatatgtgatttgcccaagagctcacagctggttatgggcagaacaaaggacagaatcattcagatttcctgactgctcgtcaagaacttttacctccgtggattctacctttggccccattttaacgtccaaagtagtttttaaaaattacttttgtgtaacttaattttgggtttcttttttaataactagaggacagttaacctgagatgaggctagtgcagaggtcagcatactgtggcctgtgctgcctgtttggtgaggttttattagaacagccacacctgtgtgtttacattttgtmtgtggatgccttcacactacaccgcgcgggtgaacagttgtgacagagatctgaaggcccgtacagcctaaggtatttagtatctggccctttacagaaaaagtttgccaacccccaggcaattataatctaaatatatttaaaatagatattttctatttaaaaccaatcttgacacagtcctttggggagcagcttattttacatggcaggataatcttatgacattttctccttgccatttttattgaaataagtggagattttatttactaaaaataaaactatttttcctaaatatgttagcagcagaaaagtatctcagtttcaatacattgtgatgggtttgcatgaaaattagtatctctttagttatctcaagtaaccagctttctaataaattgtaagagaagtatacctagaagataaagtatttgggaagagatatgtttaatcctcagctgcaattattcaggtgaggaggactgtcacctcatccctgcccccgctttttttctctaagccaataaaactgtaccctgtcccttttaaagcagcatattcaatactttcatcctatactttttaaagcttttgatttcgcaatagttacagacttacagggagttgaaaagacagtacagatacatctttacgtaactacaggaaattgatatttgcacaatgtatatcattttatgccatttta

SEQ ID NO: 698859 - DNA, 906 bp, Homo sapiens
ctcgagtgactcgtgtggcaaacatcctgtattaaaaacaagataacaaaaataaaaagttcccaacttccaaatgactatgttttataacatccaactctgaaagccacattcatactcccccaccaccaaaaaaaaaaaaaaacagaagaattattttacaagcagccgaaagagtgaggactcaagagtgctcaggcagtgaggatcaaccaagtctccccagagcccttccacgtcaaagcaggggttggggtgtgagtggtgggcaggaaatgggttcaggggtcagtggggggcagcaggggctccttttcaactagcttcagtttacctgccccttcagctgcctttcaaagagtgttaggtagcccccgacctcacaaaaaaacaaatattcaaaaaggcactgtagaggaatagatggagtttaggctaactgcacgaatrttacctcttagaactagtcttctagtaagaagtgaaaatttaaaaatgtgatgtgccattctctgcaataaactcaagttcaatcagtctactacattgccaaataagggcagatttacttgcttaactgttcgccaaaaggcaagggttgcatctgtattgaaaatcaaggaacttgttagccacaggaaggtggcacaaagcactggccaaggtctctgaggaaagcagtcttaactctgctctgatacacaaaggggtgactttggcctccaaaggcaaatagtttataaaccttttccaaagtactaaaccctttctagagtcaaagcacagtctgctaaacggatgcagcagctgctcaagctggcacaggctggaggatcctcctgtcagcctcccctcagccaggaccagaggaagcatcaccaggcggatcaacagaacagccaggga

SEQ ID NO: 698860 - DNA, 1692 bp, Homo sapiens
ttcagtaactgttgcatgttctcctctatggagttattccatttaatcttcagaggaacccagtgaggtggggttcttcatctcctttctacacatgagaaaactgaggtgtaaagaagttacagaatttgccagaagccacagagctgttaagcaaaaaagcaaagattccaaatgggagtgtgtgattcccagtttgcagacttaatcacgaggctgcatcgcctcctgccatgttggggaaagcagcggggtcagtatgagggaggcgggcagagtccttctctcagcgaatcacacaacttgttcaggtcagcctgaggagacaggggccacatctttgttgctagcttgtgtctatagctccctagagttctgtgtttctcttataaagttaagaacacacaacacccccttgagttaggagcaggaaagagttgacttttgttacccagtcttggagaagttgatggttctaggtccttttaatggtgtggaggcctgacatttgatatctggggaaaaggtgggrgaaaaaaaactccaaaatccaagcccaggctgcttacggcctgcttgcctgattgcttgtcaaacaggaacccttccttggctgtcttccctcctaaatgattttcaaactacagttttaaaaacagttcctttggggaattataaaagcaatgatgtttttgacggaaaattgttgtgtcaacagaaatgcatgaaaaataaaatcaccaatttcctcatcacccagagagaaccactgttaacattttaaccacttttccttctttttttctttatgcagaaatactattttgtaagcactcaactgcataaagtttcatagcatgcacttttaaaattaaacattgtattaccagcattttcccatgttttaaaatttttctaaaacttgaaaaacatgatttttaataactacctaatagtctaccctacaggttattataacatttaataatttctctattggtggacattcctttgtatcctatttcaagcaacatttcccccatgcaaatgtttagcctttatacagagattataatttgattctaccaatcaaactatttttatttcacaccaacttccttctaggcttttctgtatcagaagagttgggatgtaaattacgggagtgatctcagctcagaaacaaattccattgctgtaccgtagcagcaacgccctctgaggagaagccaacatgcccttttagtgagcttttgggtcactccagttaaaagcaaaccaacacagaagtttcccttgactgtcttcccccatcctgtagccctatgtttcacttccccttaatttcaatttctgcctctttacctcccatttacttctcagaatgttgtaatctattttccactcccataactgctgaaacagcccttgcaaaacacgaaatccattgtgctatgctttaatttctaattgcacaagtgatacacaacagcactttcttagttaaaatgataatcaacaatttaaagataaaggtaaacattaaattcattttttttttatttttttattttttctgagatggagtcacgctctgtcgcccagactggagtgcagtggcacaatcttggctcactgcaacctccacctcccgggttcaagtgattctcctgtcttggcctcccaagtagc

SEQ ID NO: 698861 - DNA, 1469 bp, Homo sapiens
tgtaaagtagatctgaagtgttttcctgaccctcactgggatggttatttcaagtacaaaacgttttcacaccgtgggtgataatcttccataaaaaatttcatatttgaatgaaaacagctcaagaaatacactaatgagcaaaaatatatggggaaagaggaacgtgtagttttgayttaactgaagaaaccaagaggaaactggtctccatatgaaaatgtgatcctggaaagtcaggtgtcaagattttcgagtaggaatctacatgacttgaatctcccttacttcctgaataaaagtgacatctttcagtatttatttaaaaaaatcatatgtcagtggagcttccaggtaaattatctttaaaaaatcatatttgagtggagcttccaggtaaattatcttcctcttttaagggagctccctgtatttctagcggctttaactgatatccctttcagtgagaaatcctcattagctacataagaggggactgggtgtttttttcaaaaagctggtattgggacatctacctctgtgatgtccctggtcagctatattgtctaggagttgaaacattttgtattaattttctatcatttactgggtgcctcttctgtgacagtgccactcaaaggtctattgatatattatcaggtgactgaattctatattctgaagtaggagatactgttattgctgttattacattttacacataagaaagctgaggctctgagaggtcaagatcacgcagctaacaaatgagccaagactcttgctttagagcttgtcctctattcttgcttttctttccaaaaaacactacaatttttgttttgttttgttttgttttgagacagggtctcgaggtgtcacccaggctggagtgcagtggcgcgatttcgactcaccgcaacctccgcctccgcgcttaagcgattctcctgcctcagcctcccaagtagctgggactacaagctcgggacaccacgtaaaaatgatcaagttctaacatgtatgcatacgaattacaatggaaataaaattagcaaagcgcttatgctaatgctcaatacaattgatttcctcacatttaatcctcacaaccactacaaccacctctaactcaagctctgagggactgacgtgcccggaggacacagctcttatctggtgagaacaggagcgttttagcgaaactccaaactcctaggtcccgccttccccaggaaggcttttcctggcactgtgcttccggaagtcccgccccaggagaaaaacagcttccggaaaaaattgcggccggcaaaccggaacagaactaggggcggggccgcttgagacgctctagtattcctctactctatggccactgtcaattgacaagtcccgagcggtaaagctcctttctattggatgagcagcctcgcgtaggcgggaagctcggtgcacggcgcgctgat

SEQ ID NO: 698862 - DNA, 1469 bp, Homo sapiens
tgtaaagtagatctgaagtgttttcctgaccctcactgggatggttatttcaagtacaaaacgttttcacaccgtgggtgataatcttccataaaaaatttcatatttgaatgaaaacagctcaagaaatacactaatgagcaaaaatatatggggaaagaggaacgtgtagttttgacttaactgaagaaaccaagaggaaactggtctccatatgaaaatgtgatcctggaaagtcaggtgtcaagattttcgagtaggaatctacatgacttgaatctcccttacttcctgaataaaagtgacatctttcagtatttatttaaaaaaatcatatgtcagtggagcttccaggtaaattatctttaaaaaatcatatttgagtggagcttccaggtaaattatcttcctcttttaagggagctccctgtatttctagcggctttaactgatatccctttcagtgagaaatcctcattagctacataagaggggactgggtgtttttttcaaaaagctggtattgggacatctacctctgtgatgtccctggtcagctatattgtctaggagttgaaacattttgtattaattttctatcatttactgggtgcctcttctgtgacagtgccactcaaaggtctattgatatattatcaggtgactgaattctatattctgaagtaggagatactgttattgctgttattacattttacacataagaaagctgaggctctgagaggtcaagatcacgcagctaacaaatgagccaagactcttgctttagagcttgtcctctattcttgcttttctttccaaaaaacactacaatttttgttttgttttgttttgttttgagacagggtctcgaggtgtcacccaggctggagtgcagtggcgcgatttcgactcaccgcaacctccgcctccgcgcttaagcgattctcctgcctcagcctcccaagtagctgggactacaagctcgggacaccacgtaaaaatgatcaagttctaacatgtatgcatacgaattacaatggaaataaaattagcaaagcgcttatgctaatgctcaatacaattgatttcctcacatttaatcctcacaaccactacaaccacctctaactcaagctctgagggactgacgtgyccggaggacacagctcttatctggtgagaacaggagcgttttagcgaaactccaaactcctaggtcccgccttccccaggaaggcttttcctggcactgtgcttccggaagtcccgccccaggagaaaaacagcttccggaaaaaattgcggccggcaaaccggaacagaactaggggcggggccgcttgagacgctctagtattcctctactctatggccactgtcaattgacaagtcccgagcggtaaagctcctttctattggatgagcagcctcgcgtaggcgggaagctcggtgcacggcgcgctgat

SEQ ID NO: 698863 - DNA, 1469 bp, Homo sapiens
tgtaaagtagatctgaagtgttttcctgaccctcactgggatggttatttcaagtacaaaacgttttcacaccgtgggtgataatcttccataaaaaatttcatatttgaatgaaaacagctcaagaaatacactaatgagcaaaaatatatggggaaagaggaacgtgtagttttgacttaactgaagaaaccaagaggaaactggtctccatatgaaaatgtgatcctggaaagtcaggtgtcaagattttcgagtaggaatctacatgacttgaatctcccttacttcctgaataaaagtgacatctttcagtatttatttaaaaaaatcatatgtcagtggagcttccaggtaaattatctttaaaaaatcatatttgagtggagcttccaggtaaattatcttcctcttttaagggagctccctgtatttctagcggctttaactgatatccctttcagtgagaaatcctcattagctacataagaggggactgggtgtttttttcaaaaagctggtattgggacatctacctctgtgatgtccctggtcagctatattgtctaggagttgaaacattttgtattaattttctatcatttactgggtgcctcttctgtgacagtgccactcaaaggtctattgatatattatcaggtgactgaattctatattctgaagtaggagatactgttattgctgttattacattttacacataagaaagctgaggctctgagaggtcaagatcacgcagctaacaaatgagccaagactcttgctttagagcttgtcctctattcttgcttttctttccaaaaaacactacaatttttgttttgttttgttttgttttgagacagggtctcgaggtgtcacccaggctggagtgcagtggcgcgatttcgactcaccgcaacctccgcctccgcgcttaagcgattctcctgcctcagcctcccaagtagctgggactacaagctcgggacaccacgtaaaaatgatcaagttctaacatgtatgcatacgaattacaatggaaataaaattagcaaagcgcttatgctaatgctcaatacaattgatttcctcacatttaatcctcacaaccactacaaccacctctaactcaagctctgagggactgacgtgcccggaggacacagctcttatctggtgrgaacaggagcgttttagcgaaactccaaactcctaggtcccgccttccccaggaaggcttttcctggcactgtgcttccggaagtcccgccccaggagaaaaacagcttccggaaaaaattgcggccggcaaaccggaacagaactaggggcggggccgcttgagacgctctagtattcctctactctatggccactgtcaattgacaagtcccgagcggtaaagctcctttctattggatgagcagcctcgcgtaggcgggaagctcggtgcacggcgcgctgat

SEQ ID NO: 698864 - DNA, 1469 bp, Homo sapiens
tgtaaagtagatctgaagtgttttcctgaccctcactgggatggttatttcaagtacaaaacgttttcacaccgtgggtgataatcttccataaaaaatttcatatttgaatgaaaacagctcaagaaatacactaatgagcaaaaatatatggggaaagaggaacgtgtagttttgacttaactgaagaaaccaagaggaaactggtctccatatgaaaatgtgatcctggaaagtcaggtgtcaagattttcgagtaggaatctacatgacttgaatctcccttacttcctgaataaaagtgacatctttcagtatttatttaaaaaaatcatatgtcagtggagcttccaggtaaattatctttaaaaaatcatatttgagtggagcttccaggtaaattatcttcctcttttaagggagctccctgtatttctagcggctttaactgatatccctttcagtgagaaatcctcattagctacataagaggggactgggtgtttttttcaaaaagctggtattgggacatctacctctgtgatgtccctggtcagctatattgtctaggagttgaaacattttgtattaattttctatcatttactgggtgcctcttctgtgacagtgccactcaaaggtctattgatatattatcaggtgactgaattctatattctgaagtaggagatactgttattgctgttattacattttacacataagaaagctgaggctctgagaggtcaagatcacgcagctaacaaatgagccaagactcttgctttagagcttgtcctctattcttgcttttctttccaaaaaacactacaatttttgttttgttttgttttgttttgagacagggtctcgaggtgtcacccaggctggagtgcagtggcgcgatttcgactcaccgcaacctccgcctccgcgcttaagcgattctcctgcctcagcctcccaagtagctgggactacaagctcgggacaccacgtaaaaatgatcaagttctaacatgtatgcatacgaattacaatggaaataaaattagcaaagcgcttatgctaatgctcaatacaattgatttcctcacatttaatcctcacaaccactacaaccacctctaactcaagctctgagggactgacgtgcccggaggacacagctcttatctggtgagaacaggagcgttttagcgaaactccaaactcctaggtcccgccttccccaggaaggcttttcctggcactgtgcttccggaagtcccgccccaggagaaaaacagcttccggaaaaaattgcggccggcaaaccggaacagaactaggggcggggccgcttgagacgctctagtattcctctactctatggccrctgtcaattgacaagtcccgagcggtaaagctcctttctattggatgagcagcctcgcgtaggcgggaagctcggtgcacggcgcgctgat

SEQ ID NO: 698865 - DNA, 1833 bp, Homo sapiens
tttataataattaagaaaaaataagtgattctcataaaaatgacttcatcttcagcccagctttctctaaacctccagctacccagcagtcacttgaaatttcatcacagcagtggaaaattgtttagccagaggcgcaacctgtaggacttaacccttgcaaggttgccggtcgagggtgcacatctgcctgggcagcccagagcaccttcagccacatgggttatggtgctgagaaaccctccttccctcacacagcaccttcctaccgggtacacctagtattgctctcctttctacctttgcagacctcagcttcctgctttgctccatccatagtcaagttccattatccatctatgctggctttgtggggagaggcagtgaaagtaacacgtggggaagggtctggcacaatgtagaactctggtggaaaaatcattttgagctctgctcaaaaactatcaatagaaaaattgaatgggtctttgtgtcttgggtctttgttatctttgttgtctgtctctttccatcttcctctttctcttttcacagtctgatgtagtttggatatttgtcccctccaaatctcatgttaaaatgtgattcccagtgttggaggtggggcctgatgggagatgtttgggtcagaggacggattcctcatgaacggtttggtaccgtcctcgtggtaatgagtgagttctcaccctattagttcccctgagatccaattgttaaaaagagcctggcacctcttcctctctctctttcctcctctcccactatgtgacgcctgctcccctttcacatgaatggaagcatgctgaggccttccccagaagcagatgctggcgctctgcttcctgtacagcctgcagaactgtgagccaaataaacctcttttctttatgcattacccattctcaggtattcctttatagcaacacaaaacagactaagacatactctctacctcccctctgctacccccatccttccgtaacatttcttctggtttctgactcccttcaacccatccctcctcctccttctttatatgactataatttattactaaattatttgtgactctgtcattcctattaaacatcattttatctttctttcaattacaaagcatgtaagacatttcatatttatgcctttgtctcaaactactcttctttgacatctgtgttctaaagtttctttttaatgtatggagctctcaatttgttcttcctagtcactgagtattaggaggaaagaaacgtttctgaatatactactgtgtgcacacacgcacrcgcatgcacacacacacacacacatcagagtgtctcggggcagtgcctttctggacattaggtaaagaaccatgaactctcaacctcaccaacctgtttttgtttttgtcattcacttaccaatttcatacatacctaaagatgattaagtaaagagagcaaatctaagagacttttgttccaactcgagaaaaaaactgatgttgcttttacattatgtgggaggccgaggaggtaaaatgaggatcaagctggattccacattgcaaactgaatctcctctgaagcctggcccgtgccgtgaggggagaattatcctttgctcatgtgatactgctgtgagcctgaattttgatttaaagaatgtgccatcattcagaaatgtcagtttgtttgtagctctctttacatggaagtctataaattaaggaagagttaaggaggaaaagggggatctggataggagcgaaaagggtgagttgtgatgtctaaaaggaacaagtgctgagtctttgatgatgta

SEQ ID NO: 698866 - DNA, 1833 bp, Homo sapiens
tttataataattaagaaaaaataagtgattctcataaaaatgacttcatcttcagcccagctttctctaaacctccagctacccagcagtcacttgaaatttcatcacagcagtggaaaattgtttagccagaggcgcaacctgtaggacttaacccttgcaaggttgccggtcgagggtgcacatctgcctgggcagcccagagcaccttcagccacatgggttatggtgctgagaaaccctccttccctcacacagcaccttcctaccgggtacacctagtattgctctcctttctacctttgcagacctcagcttcctgctttgctccatccatagtcaagttccattatccatctatgctggctttgtggggagaggcagtgaaagtaacacgtggggaagggtctggcacaatgtagaactctggtggaaaaatcattttgagctctgctcaaaaactatcaatagaaaaattgaatgggtctttgtgtcttgggtctttgttatctttgttgtctgtctctttccatcttcctctttctcttttcacagtctgatgtagtttggatatttgtcccctccaaatctcatgttaaaatgtgattcccagtgttggaggtggggcctgatgggagatgtttgggtcagaggacggattcctcatgaacggtttggtaccgtcctcgtggtaatgagtgagttctcaccctattagttcccctgagatccaattgttaaaaagagcctggcacctcttcctctctctctttcctcctctcccactatgtgacgcctgctcccctttcacatgaatggaagcatgctgaggccttccccagaagcagatgctggcgctctgcttcctgtacagcctgcagaactgtgagccaaataaacctcttttctttatgcattacccattctcaggtattcctttatagcaacacaaaacagactaagacatactctctacctcccctctgctacccccatccttccgtaacatttcttctggtttctgactcccttcaacccatccctcctcctccttctttatatgactataatttattactaaattatttgtgactctgtcattcctattaaacatcattttatctttctttcaattacaaagcatgtaagacatttcatatttatgcctttgtctcaaactactcttctttgacatctgtgttctaaagtttctttttaatgtatggagctctcaatttgttcttcctagtcactgagtattaggaggaaagaaacgtttctgaatatactactgtgtgcacacacgcacacgcrtgcacacacacacacacacatcagagtgtctcggggcagtgcctttctggacattaggtaaagaaccatgaactctcaacctcaccaacctgtttttgtttttgtcattcacttaccaatttcatacatacctaaagatgattaagtaaagagagcaaatctaagagacttttgttccaactcgagaaaaaaactgatgttgcttttacattatgtgggaggccgaggaggtaaaatgaggatcaagctggattccacattgcaaactgaatctcctctgaagcctggcccgtgccgtgaggggagaattatcctttgctcatgtgatactgctgtgagcctgaattttgatttaaagaatgtgccatcattcagaaatgtcagtttgtttgtagctctctttacatggaagtctataaattaaggaagagttaaggaggaaaagggggatctggataggagcgaaaagggtgagttgtgatgtctaaaaggaacaagtgctgagtctttgatgatgta

SEQ ID NO: 698867 - DNA, 1397 bp, Homo sapiens
tttctttcaagtaaaaatgatgtttatatttaaaaagtgagtagttaagctgacaactcagagaattgtaaagctgtatttttccctctctttaggtagtcagagtactttataagtgcctcccattttatcacatagattatttaaaaatacatctatgccaaatccagatttaataaaattaatgattcttattacttccttaaagatttaaatgaaattggctatctttaatgccactgacttgattcacacttaagatgccagtattgtttttgtsccatcaatacaaatgttaacacagaggggaaaggcaaacgctgtttgtgttatcataaagtatcgttttgatgtctcagacaactcaaagtggcttaggcaccatggaccccaatttgagaactgctgttttaatttgcaaagccattgcgcaaaattgcgttatttgttctttacatctggccattttatatatgatgatggagcactaagggatatttcaacacttagtgtatgttaggaacttaaaagtcttcgtgctatgaatggagtaaactagacatacctaaaatccgggtcccctggtgtatggtcctgtgttccttctattaaagatttaattttttctagatttggatgaacattgggaaccaacagcaatgtgaaggaggagcatctaaccctctaatctctgcactctgccacaactcaaccaatttgtatggcagggagtgatattagttaccttgacttgttacactacaaaactttgtgggggtgatttcaattcaattggattcaatctacgcagactgtgttctcaggaataaccatttctttactggaagctggcccagtcaccttcctgtatgacctcaggcaactctcctgagaaaggagctctttaaactttaagtgaagaaatataactcatcaaagaaaacaggagtgaaacaaccaaccaggaggcagatctccttattcccaggagatggctgttcacataaaaacaatgcttgccaagcctttggctgcttctggagtccaagggccacaaaataaatgatctactgctagttcagctcagtcaggactgtagaacattcagactgtggtagggtggattagtgtatccttcttctatgaacacatggaaaacttaagtttccagggaggtggttttggcaccttgaaggaaaggcaaattaactcagggaaaagctgatagtgactaacaattcctacaaaagactatttttatccagatctggtgaaaccatactggtcagtcaagagaaggactggcccaatgacccaattaccactccgtgggaaaactgaaaccagccctggaaaattgcatcaatattatgacctttaatgggcaccattttaaa

SEQ ID NO: 698868 - DNA, 1413 bp, Homo sapiens
atttatcagtcttattgatcttcttgagtcagcctttgttttcatggacttttctctattttctttcctctttctgttttattgatttatattctcatctttattttttcctatcttctcactttgagtttaatttgatcttctttttttgtttactcttacgtgtccctgtttggaaggcacacttgtgaagtttaggtcagagctttctattctccttggcttatatctgtggtctgtctaggaaaatgaaatttctatcaccttctggataaatcacactattatctatgcaggcaacaatagcacatattttctcaaagattacctttgccctcaagttaggtttyatttttctagcagtctaaaggtcatgaaataaattataaaataaaaacagtgggtcttcaagctagatgatactgttttctttcttgcatggacaattattttaaaatattttggtttttctgcacttattatttaaatatgactccccacccacacttgaatctagggacattgtagttttctactgcagactttgtttctggtttatactgggaatatattgtttatcgttttcagtgaaagcattcactgtttaaatttccttttaaaaataataatggatctttacaatttctttgagctgctcagtgtgtataatgtgttgaattttctgttagtggttgggaggtggaaatagatactttatctctattttagccatttccataattatatatctcaatagtcttgtcaatgcatcattagtcctatgactgaattaatgattactttcagtagtcacttaatttcttactgatgatgatgattctacttctgtgaatcaacttggatgattctctaaaatcttagaaagctaattttgttaatgctatgcatataacacatcaatacattttctctattaaaaaaattaaagtgttataggtagatcagaatttaccattactaactcctcagtcctccttatttccctgttaccagtttggtatatttatatattaggttgatccatatgaaattgccaatattatttctgaactgatgaaaagtagcaatttcttatgagtcaacctgttatatgtgcccatagactacatataatgactttgcatgtttttatattatagtgctatacctcaaatactgttctgcaatttattttttcactcaacagtgtctttttgataatttctttcatggcagtctatacaagtttctacctccctacttttaaaatgtttcgtactttcgtaatgtttggatttgtcatggctttacttactccctaatgatgaatattggcattattaacacttgtagtcattagggttcatatgactataaattgctcttataaagcattagtactattcattaaaa

SEQ ID NO: 698869 - DNA, 1413 bp, Homo sapiens
atttatcagtcttattgatcttcttgagtcagcctttgttttcatggacttttctctattttctttcctctttctgttttattgatttatattctcatctttattttttcctatcttctcactttgagtttaatttgatcttctttttttgtttactcttacgtgtccctgtttggaaggcacacttgtgaagtttaggtcagagctttctattctccttggcttatatctgtggtctgtctaggaaaatgaaatttctatcaccttctggataaatcacactattatctatgcaggcaacaatagcacatattttctcaaagattacctttgccctcaagttaggttttatttttctagcagtctaaaggtcatgaaataaattataaaataaaaacagtgggtcttcaagctagatgatactgttttctttcttgcatggacaattattttaaaatattttggtttttctgcacttattatttaaatatgactccccacccmcacttgaatctagggacattgtagttttctactgcagactttgtttctggtttatactgggaatatattgtttatcgttttcagtgaaagcattcactgtttaaatttccttttaaaaataataatggatctttacaatttctttgagctgctcagtgtgtataatgtgttgaattttctgttagtggttgggaggtggaaatagatactttatctctattttagccatttccataattatatatctcaatagtcttgtcaatgcatcattagtcctatgactgaattaatgattactttcagtagtcacttaatttcttactgatgatgatgattctacttctgtgaatcaacttggatgattctctaaaatcttagaaagctaattttgttaatgctatgcatataacacatcaatacattttctctattaaaaaaattaaagtgttataggtagatcagaatttaccattactaactcctcagtcctccttatttccctgttaccagtttggtatatttatatattaggttgatccatatgaaattgccaatattatttctgaactgatgaaaagtagcaatttcttatgagtcaacctgttatatgtgcccatagactacatataatgactttgcatgtttttatattatagtgctatacctcaaatactgttctgcaatttattttttcactcaacagtgtctttttgataatttctttcatggcagtctatacaagtttctacctccctacttttaaaatgtttcgtactttcgtaatgtttggatttgtcatggctttacttactccctaatgatgaatattggcattattaacacttgtagtcattagggttcatatgactataaattgctcttataaagcattagtactattcattaaaa

SEQ ID NO: 698870 - DNA, 1413 bp, Homo sapiens
atttatcagtcttattgatcttcttgagtcagcctttgttttcatggacttttctctattttctttcctctttctgttttattgatttatattctcatctttattttttcctatcttctcactttgagtttaatttgatcttctttttttgtttactcttacgtgtccctgtttggaaggcacacttgtgaagtttaggtcagagctttctattctccttggcttatatctgtggtctgtctaggaaaatgaaatttctatcaccttctggataaatcacactattatctatgcaggcaacaatagcacatattttctcaaagattacctttgccctcaagttaggttttatttttctagcagtctaaaggtcatgaaataaattataaaataaaaacagtgggtcttcaagctagatgatactgttttctttcttgcatggacaattattttaaaatattttggtttttctgcacttattatttaaatatgactccccacccacacttgaatctagggacattgtagttttctactgcagactttgtttctggtttatactgggaatatattgtttatcrttttcagtgaaagcattcactgtttaaatttccttttaaaaataataatggatctttacaatttctttgagctgctcagtgtgtataatgtgttgaattttctgttagtggttgggaggtggaaatagatactttatctctattttagccatttccataattatatatctcaatagtcttgtcaatgcatcattagtcctatgactgaattaatgattactttcagtagtcacttaatttcttactgatgatgatgattctacttctgtgaatcaacttggatgattctctaaaatcttagaaagctaattttgttaatgctatgcatataacacatcaatacattttctctattaaaaaaattaaagtgttataggtagatcagaatttaccattactaactcctcagtcctccttatttccctgttaccagtttggtatatttatatattaggttgatccatatgaaattgccaatattatttctgaactgatgaaaagtagcaatttcttatgagtcaacctgttatatgtgcccatagactacatataatgactttgcatgtttttatattatagtgctatacctcaaatactgttctgcaatttattttttcactcaacagtgtctttttgataatttctttcatggcagtctatacaagtttctacctccctacttttaaaatgtttcgtactttcgtaatgtttggatttgtcatggctttacttactccctaatgatgaatattggcattattaacacttgtagtcattagggttcatatgactataaattgctcttataaagcattagtactattcattaaaa

SEQ ID NO: 698871 - DNA, 2736 bp, Homo sapiens
ggttaactgcagagtgaaagattactgacatttttttctgcatagatatttcccctcttctctgcttatatctagtatgcttgttttgtgtgatctctgggatgtgagattttccagaccccacttttctcagggactctccatcctgctcatgtctagctatctgcctactctaacaattccactttagaagtaccaaagaaactaagaaactcagtgtatggccaagaagttagagtgagacctttttgccggttaaagcataatgagaaattggataggagagaatctgacattataaataaattgagaccatttatttctagaagagaaagaggatttcatttttagaccttggtttctttttggttttctgttaaaaatttagacatccttattttgttacttgggctataatcttgggggatactgtattggtcaaataggctgcaccgtactttgagatggaaagttatcacagacaggaagaaaaaaaaagtgtttttttctgctttcactgtctcactcaccataacacttctgacaccagatgtgtggaggcctgtttccccacacgccaagcaatcctccagcagacaccagctgggtgacctctcattcaactcaattctgaccttatctgcctggagtagatctataccagttcccacaggttaagggctcagtcctacaaaactgtctccaactttagatgctagtagcaactagttggttgtcatatatacttatgaccaactggctatcaatcagaggttcctataactcctttctcaggtttggttgatttgctagaatggctcacagaactcagggaaatactttacttacatttacccattcatcataatggatattatgaaggataaaaatgaacagccaatggaaaggatttgtagagcaaagcagctgggaaggggtacagagggttcacaccctctctgggtcaccttctaggaacctccacatgcttagctattcaaaaactctctgaaccccgcccttttggattttcataaaggcttctcttgataggcaggactgaataaataattgagcattggtgttcaactcaagcttcagcccctctccgtttctggaggttggaggctgggctggaacttcaagccctctctctaatcctgccatggttggtacttctgatgaatagccccatcctgaagctatctagaggctgacagccatcagtctactcattagcatataaaagactctcttatcactctggaggttacaagggttttaggaaagaaagaagataaaatacatatatatcttattataaatcacaatatcacaaaagtagactagaatgtgagtatttggtgtgctgtattctacggctttggaaaatgtttgattaaagtatrttttgtacctccttcagagacttccatgggccatagatatactgctcctctcacggtttcaaagatggtacaaaggtggggtagtgattccccaggagtaggctcaggaagtggggacggaactgcttaccttcctgtgggaacaaccatattcctatttaccatggattgtgtgttgagccgctggcttaaaagaaaataaaaaatagtgtggactgcaagtgaggtgatgattctgcctctgtccccaaacttcctcctcttctcagtgaaaaaggtgaaatttccatcctttcttcgtgcttctccttctgaaactgactttgcaaaaattgtatcagtgagaaaatcatggcagtaaaagagatctgatttaacccaccctccatcttgcctttcccttaatcattcttgggcttaggctaagctaactttgggagacatttggtttatagtttaaatgataataggccttcaccaaaactcagctggctttgtacagctaatcaggctaggaggaggagagaagcgattctgctaaggtgtagacataaacaattgccagccattcctgtggataacaccactactgtagattggccttttaagacatcctttcagggtttattgtttgttcgtttttttggcatgtctgacacccatggctccacctggacctgccaaccccactcctgtggacccactcagaagtgattcagctcaagaggtcagcttcagctccttataattttatttcagccccaaccaatcagcagcaagcacctattagagaggtgcttctattatacacccattacagaggtgcttctattacctaggtacatttcagccccaccttttcccctaaaacgcctttgaaaaacccctacctgtgagccttggatgagattaatttgagtactaactccatctcccaaaaggcatggctggcctcatgtctattcaactctttctttactgcaatgccatagtctttatttgtgcaacaggcacaaaggacacctcaggcagttagacttctgacaatcccctttgtggcttttctccccaaccctacctccacaacatacaaagagaaaagagaccctattctgataggtcagaatcccaggacactgtttgttccatggacattagtggaagtggtcactgtgttacaattctttacccttgctccctctgtctgtttgataaagagacctaggcaagacctgcctttttgggacagacctgttcagatattttctgccactctacttcctctatgcccaagcaataggaagcatgcctattagatattaaccat

SEQ ID NO: 698872 - DNA, 2736 bp, Homo sapiens
ggttaactgcagagtgaaagattactgacatttttttctgcatagatatttcccctcttctctgcttatatctagtatgcttgttttgtgtgatctctgggatgtgagattttccagaccccacttttctcagggactctccatcctgctcatgtctagctatctgcctactctaacaattccactttagaagtaccaaagaaactaagaaactcagtgtatggccaagaagttagagtgagacctttttgccggttaaagcataatgagaaattggataggagagaatctgacattataaataaattgagaccatttatttctagaagagaaagaggatttcatttttagaccttggtttctttttggttttctgttaaaaatttagacatccttattttgttacttgggctataatcttgggggatactgtattggtcaaataggctgcaccgtactttgagatggaaagttatcacagacaggaagaaaaaaaaagtgtttttttctgctttcactgtctcactcaccataacacttctgacaccagatgtgtggaggcctgtttccccacacgccaagcaatcctccagcagacaccagctgggtgacctctcattcaactcaattctgaccttatctgcctggagtagatctataccagttcccacaggttaagggctcagtcctacaaaactgtctccaactttagatgctagtagcaactagttggttgtcatatatacttatgaccaactggctatcaatcagaggttcctataactcctttctcaggtttggttgatttgctagaatggctcacagaactcagggaaatactttacttacatttacccattcatcataatggatattatgaaggataaaaatgaacagccaatggaaaggatttgtagagcaaagcagctgggaaggggtacagagggttcacaccctctctgggtcaccttctaggaacctccacatgcttagctattcaaaaactctctgaaccccgcccttttggattttcataaaggcttctcttgataggcaggactgaataaataattgagcattggtgttcaactcaagcttcagcccctctccgtttctggaggttggaggctgggctggaacttcaagccctctctctaatcctgccatggttggtacttctgatgaatagccccatcctgaagctatctagaggctgacagccatcagtctactcattagcatataaaagactctcttatcactctggaggttacaagggttttaggaaagaaagaagataaaatacatatatatcttattataaatcacaatatcacaaaagtagactagaatgtgagtatttggtgtgctgtattctacggctttggaaaatgtttgattaaagtatattttgtacctccttcagagacttccatgggccatagatatactgctcctctcacggtttcaaagayggtacaaaggtggggtagtgattccccaggagtaggctcaggaagtggggacggaactgcttaccttcctgtgggaacaaccatattcctatttaccatggattgtgtgttgagccgctggcttaaaagaaaataaaaaatagtgtggactgcaagtgaggtgatgattctgcctctgtccccaaacttcctcctcttctcagtgaaaaaggtgaaatttccatcctttcttcgtgcttctccttctgaaactgactttgcaaaaattgtatcagtgagaaaatcatggcagtaaaagagatctgatttaacccaccctccatcttgcctttcccttaatcattcttgggcttaggctaagctaactttgggagacatttggtttatagtttaaatgataataggccttcaccaaaactcagctggctttgtacagctaatcaggctaggaggaggagagaagcgattctgctaaggtgtagacataaacaattgccagccattcctgtggataacaccactactgtagattggccttttaagacatcctttcagggtttattgtttgttcgtttttttggcatgtctgacacccatggctccacctggacctgccaaccccactcctgtggacccactcagaagtgattcagctcaagaggtcagcttcagctccttataattttatttcagccccaaccaatcagcagcaagcacctattagagaggtgcttctattatacacccattacagaggtgcttctattacctaggtacatttcagccccaccttttcccctaaaacgcctttgaaaaacccctacctgtgagccttggatgagattaatttgagtactaactccatctcccaaaaggcatggctggcctcatgtctattcaactctttctttactgcaatgccatagtctttatttgtgcaacaggcacaaaggacacctcaggcagttagacttctgacaatcccctttgtggcttttctccccaaccctacctccacaacatacaaagagaaaagagaccctattctgataggtcagaatcccaggacactgtttgttccatggacattagtggaagtggtcactgtgttacaattctttacccttgctccctctgtctgtttgataaagagacctaggcaagacctgcctttttgggacagacctgttcagatattttctgccactctacttcctctatgcccaagcaataggaagcatgcctattagatattaaccat

SEQ ID NO: 698873 - DNA, 2736 bp, Homo sapiens
ggttaactgcagagtgaaagattactgacatttttttctgcatagatatttcccctcttctctgcttatatctagtatgcttgttttgtgtgatctctgggatgtgagattttccagaccccacttttctcagggactctccatcctgctcatgtctagctatctgcctactctaacaattccactttagaagtaccaaagaaactaagaaactcagtgtatggccaagaagttagagtgagacctttttgccggttaaagcataatgagaaattggataggagagaatctgacattataaataaattgagaccatttatttctagaagagaaagaggatttcatttttagaccttggtttctttttggttttctgttaaaaatttagacatccttattttgttacttgggctataatcttgggggatactgtattggtcaaataggctgcaccgtactttgagatggaaagttatcacagacaggaagaaaaaaaaagtgtttttttctgctttcactgtctcactcaccataacacttctgacaccagatgtgtggaggcctgtttccccacacgccaagcaatcctccagcagacaccagctgggtgacctctcattcaactcaattctgaccttatctgcctggagtagatctataccagttcccacaggttaagggctcagtcctacaaaactgtctccaactttagatgctagtagcaactagttggttgtcatatatacttatgaccaactggctatcaatcagaggttcctataactcctttctcaggtttggttgatttgctagaatggctcacagaactcagggaaatactttacttacatttacccattcatcataatggatattatgaaggataaaaatgaacagccaatggaaaggatttgtagagcaaagcagctgggaaggggtacagagggttcacaccctctctgggtcaccttctaggaacctccacatgcttagctattcaaaaactctctgaaccccgcccttttggattttcataaaggcttctcttgataggcaggactgaataaataattgagcattggtgttcaactcaagcttcagcccctctccgtttctggaggttggaggctgggctggaacttcaagccctctctctaatcctgccatggttggtacttctgatgaatagccccatcctgaagctatctagaggctgacagccatcagtctactcattagcatataaaagactctcttatcactctggaggttacaagggttttaggaaagaaagaagataaaatacatatatatcttattataaatcacaatatcacaaaagtagactagaatgtgagtatttggtgtgctgtattctacggctttggaaaatgtttgattaaagtatattttgtacctccttcagagacttccatgggccatagatatactgctcctctcacggtttcaaagatggtacaaaggtggggtagtgattccccaggagtrggctcaggaagtggggacggaactgcttaccttcctgtgggaacaaccatattcctatttaccatggattgtgtgttgagccgctggcttaaaagaaaataaaaaatagtgtggactgcaagtgaggtgatgattctgcctctgtccccaaacttcctcctcttctcagtgaaaaaggtgaaatttccatcctttcttcgtgcttctccttctgaaactgactttgcaaaaattgtatcagtgagaaaatcatggcagtaaaagagatctgatttaacccaccctccatcttgcctttcccttaatcattcttgggcttaggctaagctaactttgggagacatttggtttatagtttaaatgataataggccttcaccaaaactcagctggctttgtacagctaatcaggctaggaggaggagagaagcgattctgctaaggtgtagacataaacaattgccagccattcctgtggataacaccactactgtagattggccttttaagacatcctttcagggtttattgtttgttcgtttttttggcatgtctgacacccatggctccacctggacctgccaaccccactcctgtggacccactcagaagtgattcagctcaagaggtcagcttcagctccttataattttatttcagccccaaccaatcagcagcaagcacctattagagaggtgcttctattatacacccattacagaggtgcttctattacctaggtacatttcagccccaccttttcccctaaaacgcctttgaaaaacccctacctgtgagccttggatgagattaatttgagtactaactccatctcccaaaaggcatggctggcctcatgtctattcaactctttctttactgcaatgccatagtctttatttgtgcaacaggcacaaaggacacctcaggcagttagacttctgacaatcccctttgtggcttttctccccaaccctacctccacaacatacaaagagaaaagagaccctattctgataggtcagaatcccaggacactgtttgttccatggacattagtggaagtggtcactgtgttacaattctttacccttgctccctctgtctgtttgataaagagacctaggcaagacctgcctttttgggacagacctgttcagatattttctgccactctacttcctctatgcccaagcaataggaagcatgcctattagatattaaccat

SEQ ID NO: 698874 - DNA, 1468 bp, Homo sapiens
gaactatttgcattttgagtccattaaggtggctgggggcagtggtgggaccagacatgggtcttattaccaaataatccaacctagaagtctatagcattcctttctgatagtccctcctccttgcccagcctctactttaggtcatacctttaaagtagcactagttagttctgagtagttgaggacactcagggcctccaagcaaaaattttaggaaaggtctatttatccttcattagccgcaaaataaactgatattccatggccttgcagttcagggactgctgggttggtgtttacatgtgtggtgagaaatgcttcctgctgtctcttctaaagacactctcttatgctttgcactttctccagccagttattgcacatcagaaacaccaggggagctttcaaagctttgggctccctggggttcaccctagtccatctttattagaatcttcagtggtggagcacaggcaytgacattttttaaaagcacctccagagtttctaatgggtagtcaggactgtgagctactgatccagccagactcaaaccccatgagtcattaaccttcaccaagttaaataactaatccgccacaaaggaaaaatcctgcaaatctggagcagctgtcgatagtgttatagaaagtgatttgttttcatcctggagtcttccagctgctggagaagctgaataaccctttatgggactggacaaattcgagaaggactaggacaatgatgtctgggcttgtcttctgggtccccttcaacctctgactacagtattgcagtattgctacctaaagagccagggtggagatttcagcaaacatttggtaataaaatcccaggggattggatcctgccgcatgcacacccctatgaagattccactgggccagaattccacggctgcacatgttctgactcgcaaattcttagacccatcttcacctggagagaggtcaaaggtgatgtgctggtaattgtgaatctgccttaattatggcaagttaagttttgctaagagcagatttttgggtccagcactgtcctacacaatctagccaattctaagccccaatgaatcaaagaactgttaagctctgccaatcagctgggctcccacgtgtgacctgcagccactcacactcaagcatcagacatttgtctgtattccttttggtcaaacagaatattcaccactctccagttctgtggacacctgcctaggtgaacactggcagccatgaaattctgtcccagtggaattttcacagtggtgtaacccacaggcagggttcttaaggcttcaaagggcagaaggacaagctcacctttctcctaagctatatcagctttttttaatccacaggagatgccgattttctgcgtttgcaacagccaaatgagttttgtcctatgcacaagacaagttgtaatttatcaaatccactca

SEQ ID NO: 698875 - DNA, 1197 bp, Homo sapiens
ctgaaaccttcgcctccctggttcaagcgattctcttgcctcaacctcctgagtagctaggattacaggcatgcgccaccaagcctggctaatgttgtatttttagtagagacagggtttctccatgttcgtcaggctggtctcgaactctcgatctcaggtgatctgcctgccttggcctcccaaagtgctgggattacaggcgtgagccaccgtgcctggcctgttttgtttttttaattgtggtaaaatgttcgtaacagaaaatttagtggcacagaacacttttaaggttaagggctttccaaggacttggctatgtggaattctgatagtcttagactattgttgaggattcttaccacatcctatcaaagatgcagaccagcttctcattctttaggcatactccaaaaactcaacctgccttcctttgttcttatccactaaaatctactctttctcatggaattcttaactccaacgaacacaaaagtagacaacatggtataatgaaactcctgttaccccacttcaataattgtcaacattttgccaataaagctatcataggaatttttttttatatggcttgagggcagggattttacattcttcaaatatgaggtttcctaacaccatttactaaataattcattattttcctactaatttgaaagtgaggccgcgagcggtggctcacgcctgtaatcccagcactttgggaggcgaggagggcggatcactaggtcaggagatcgagaccatcccggctaacacggtgaaactccgtctctactaaaaatacaaaaaaatagctgggcgtggtggcgtgcacctgtagtcccagctgctggggaggctgaggcagaagaatggcgtgaacctgggaggaggagcttgcagtgagccgagatcgtgccactgcactccagcctgggtgacagagtgagactccgtctcaaaaaamaaaaaaaaaaacaaaaaaaaaaacaaaaaaaaaaacaaagtcaaactctcctatgtattaaattcctacatgtatctggggcctttctggatgccctgttttgttccatcattttttttccttctttataatcaccatattatttggaattcagtaatttttgtacattttaataagcaccttggtcggacacggtggatcacgcctgtaatcccagcactttggga

SEQ ID NO: 698876 - DNA, 721 bp, Homo sapiens
catttcgagtaaacatttcacgccgttcaggtatttttatcctccaccactgtctggttcagaaccccactccgagcttgggcatcagaggagagctttgtcctttgctgtctcttctcttcctccttgcagcccctcaatagctgctccaagtgtcccctagtgggaagtggagaagggagacctctcctttcttggccaggccacgtttctctatctgactgggtcctcagtgttatttggttgcttgattggctctacctaggtgatgtcccaggtaggattctgctgtgatgtcatgctcagtataagtcgtggcccaggtgatgtgtctctgtccaaggtcctaagcccagtggaccttcaaaggctagtggccacgttttcagagccgcagccactctaactcccatcaagcaattccctttcttactcaactggcgtaactatcctgagttacccaactttacctagttcatggtggaaacttcataggcccccttctatgatgttccagaggrtgcggtatgatacttgttgtgcccagatgtgccaccccacaactgctcacacaagcttcatgctgggctccactatagttgagttgacaactattaatatgtactttaagaaaatgaaggagtatgtgctctgggtttcagactctcttctacctcataggcacttcccttggagttctccaattttgagggacaggtca

SEQ ID NO: 698877 - DNA, 624 bp, Homo sapiens
tgacataactgcacccaacgtccaaagttaacggagtaagagtgtgatgaacctggcttggccgagggaaggcagractacttcattgacagtccctataagattttgtttttagacggagtctcactctgtcgtccaggctggagtggagtggtgcgatctcagttcaccgcaacctccgcctcccaggttcaagctattctctggcctcagcctcccaattagctgggattacaggcacctgccaccatgcacagctaattttttgtatgtttagtagagatggggtttcaccgtgttagccaggctggtctcaaactcctgacctcgtgatccacccgcctcggcctcccaaagtgctgggattacaggcatgagccaccgtgcctggcccctttaagatcttatgtagtggggaagagatcatttcagagagagagcaaaagtgaatgagagagctgcttctataagatggagaatgaattctggagccagaaacaacacatgccaacacattgccacttcactctgccaggccgaccgtttgcttcatcactgaaggacttcagcagaggctgaatggtcaaggattgataactccttgcctaggctgctgtggggaga

SEQ ID NO: 698878 - DNA, 1228 bp, Homo sapiens
ccccaagagcctctgagtaggagaacgggtggcctctggaccacagctgccctgatggagcccctgtgactcctaaagccgtgtagatcctaaggtctgacccasgtagcctctggagagggaccagggaccctttgggagggctgcagagaacaccagcccaggattttctgctttccttgccatccctgctactagtgaggcagtacagtgaagtgctccggaaccccatccccgggggagagtctggctctttccctctctacagtgtggctttggataaattttaacccctgtctctgcatctacaaaatgggtacaatagtatctcccttacaggattgtagtggggtgaaaagcttaggaaggtgtggagagccgagtaggcactcaataaacataaatagtggtagttatgagtattatttttgcctctggggattgtttggtacgtgaagggcacatgctctttggaatacaccatttccccttatccctgagtttcagggacaaccacaattttttggtacaggatgaagtccaggagcaaaccttgaagttccaggcctcttagttgccacttccttcctcttttgtccttcgtggcagtaaataaccctggggtaataattgccaggagttgtgcctggaaacaaacaagctcactttgacagggctctgcagaaattagaatagctgaatgacattagtttaggtgatctgggcgtctgctgcccacctcctcccagtttgctctttattataggcagatatggtagtagttagctgagcccctgaccccatgacactctcgctgccttctagattctgctatgccagggcagcctccccactcctcactttttctctgctcattgctcatttgggctctccaggggaggcaggggcggggagatgatttgcataacatctgaaaatagaattttggcagcttttgtcagatgccagggttcttgggaagggcatggatactgaagaggaaaaaacaaaaggaagtattctgggaattctgtttgttcttggcaccagacaggaattctagttcactaagaagatttttctctgcatcccgaaccccttcagcccatccttcacctttctctgaacacattcctgaactttctgaatgcctggggctattttgagtctgaagcaagcccttatgggtcctggtggttcccttgggttcacctcaggagagagagaa

SEQ ID NO: 698879 - DNA, 1228 bp, Homo sapiens
ccccaagagcctctgagtaggagaacgggtggcctctggaccacagctgccctgatggagcccctgtgactcctaaagccgtgtagatcctaaggtctgacccaggtagcctctggagagggaccagggaccctttgggagggctgcagagaacaccagcccaggattttctgctttccttgccatccctgctactagtgaggcagtacagtgaagtgctccggaaccccatccccgggggagagtctggctctttccctctctacagtgtggctttggataaattttaacccctgtctctgcatctacaaaatgggtacaatagtatctcccttacaggattgtagtggggtgaaaagcttaggaaggtgtggagagcygagtaggcactcaataaacataaatagtggtagttatgagtattatttttgcctctggggattgtttggtacgtgaagggcacatgctctttggaatacaccatttccccttatccctgagtttcagggacaaccacaattttttggtacaggatgaagtccaggagcaaaccttgaagttccaggcctcttagttgccacttccttcctcttttgtccttcgtggcagtaaataaccctggggtaataattgccaggagttgtgcctggaaacaaacaagctcactttgacagggctctgcagaaattagaatagctgaatgacattagtttaggtgatctgggcgtctgctgcccacctcctcccagtttgctctttattataggcagatatggtagtagttagctgagcccctgaccccatgacactctcgctgccttctagattctgctatgccagggcagcctccccactcctcactttttctctgctcattgctcatttgggctctccaggggaggcaggggcggggagatgatttgcataacatctgaaaatagaattttggcagcttttgtcagatgccagggttcttgggaagggcatggatactgaagaggaaaaaacaaaaggaagtattctgggaattctgtttgttcttggcaccagacaggaattctagttcactaagaagatttttctctgcatcccgaaccccttcagcccatccttcacctttctctgaacacattcctgaactttctgaatgcctggggctattttgagtctgaagcaagcccttatgggtcctggtggttcccttgggttcacctcaggagagagagaa

SEQ ID NO: 698880 - DNA, 1228 bp, Homo sapiens
ccccaagagcctctgagtaggagaacgggtggcctctggaccacagctgccctgatggagcccctgtgactcctaaagccgtgtagatcctaaggtctgacccaggtagcctctggagagggaccagggaccctttgggagggctgcagagaacaccagcccaggattttctgctttccttgccatccctgctactagtgaggcagtacagtgaagtgctccggaaccccatccccgggggagagtctggctctttccctctctacagtgtggctttggataaattttaacccctgtctctgcatctacaaaatgggtacaatagtatctcccttacaggattgtagtggggtgaaaagcttaggaaggtgtggagagccgagtaggcactcaataaacataaatagtggtagttatgagtattatttttgcctctggggattgtttggtacgtgaagggcacatgctctttggaatacaccatttccccttatccctgagtttcagggacaaccacaattttttggtacaggatgaagtccaggagcaaaccttgaagttccaggcctcttagttgccacttccttcctcttttgtccttcgtggcagtaaataaccctggggtaataattgccaggagttgtgcctggaaacaaacaagctcactttgacagggctctgcagaaattagaatagctgaatgacattagtttaggtgatctgggcgtctgctgcccacctcctcccagtttgctctttattataggcagatatggtagtagttagctgagcccctgaccccatgacactctcgctgccttctagattctgctatgccagggcagcctccccactcctcactttttctctgctcattgctcatttgggctctccaggggaggcaggggcggggagatgatttgcataacatctgaaaatagaattttggcagcttttgtcagatgccagggttcttgggaagggcatggatactgaagaggaaaaaacaaaaggaagtattctgggaattctgtttgttcttggcaccagacaggaattctagttsactaagaagatttttctctgcatcccgaaccccttcagcccatccttcacctttctctgaacacattcctgaactttctgaatgcctggggctattttgagtctgaagcaagcccttatgggtcctggtggttcccttgggttcacctcaggagagagagaa

SEQ ID NO: 698881 - DNA, 1228 bp, Homo sapiens
ccccaagagcctctgagtaggagaacgggtggcctctggaccacagctgccctgatggagcccctgtgactcctaaagccgtgtagatcctaaggtctgacccaggtagcctctggagagggaccagggaccctttgggagggctgcagagaacaccagcccaggattttctgctttccttgccatccctgctactagtgaggcagtacagtgaagtgctccggaaccccatccccgggggagagtctggctctttccctctctacagtgtggctttggataaattttaacccctgtctctgcatctacaaaatgggtacaatagtatctcccttacaggattgtagtggggtgaaaagcttaggaaggtgtggagagccgagtaggcactcaataaacataaatagtggtagttatgagtattatttttgcctctggggattgtttggtacgtgaagggcacatgctctttggaatacaccatttccccttatccctgagtttcagggacaaccacaattttttggtacaggatgaagtccaggagcaaaccttgaagttccaggcctcttagttgccacttccttcctcttttgtccttcgtggcagtaaataaccctggggtaataattgccaggagttgtgcctggaaacaaacaagctcactttgacagggctctgcagaaattagaatagctgaatgacattagtttaggtgatctgggcgtctgctgcccacctcctcccagtttgctctttattataggcagatatggtagtagttagctgagcccctgaccccatgacactctcgctgccttctagattctgctatgccagggcagcctccccactcctcactttttctctgctcattgctcatttgggctctccaggggaggcaggggcggggagatgatttgcataacatctgaaaatagaattttggcagcttttgtcagatgccagggttcttgggaagggcatggatactgaagaggaaaaaacaaaaggaagtattctgggaattctgtttgttcttggcaccagacaggaattctagttcactaagaagatttttctctgcatcccgaaccccttcagcccatccttyacctttctctgaacacattcctgaactttctgaatgcctggggctattttgagtctgaagcaagcccttatgggtcctggtggttcccttgggttcacctcaggagagagagaa

SEQ ID NO: 698882 - DNA, 1778 bp, Homo sapiens
tttttctcatagaggtcttatacatgctttgtttgatttacttttaagaacctgattcattttatttaattagaaacagcatagttttaaaaaataattttcaacctttgaaattatctgatgcttgtatatacaagtacaatttacttttgtattttaagtcaaaaaaattttatagccaggcgtggtagctcatatctgtaatctcagcactttgggaggccaaggtaggaggatcatatgcggccaggagtttgagatcagcctgggcaacatagtgagagccctgtctctacaracaaacaagcaaacaaaaaaattagctagctaggcttggttgtgtgtgcatgtagtcccagctacttgggtggctgatgtgagaggattgcttgagcccaggaggtcgaagcagctgtgggctgtggtcatgccactgcactccagcccaggtgacagagcaagatcctgtctccaaaaaaagaaaattttaaaccaacaaaaattataaataaaccttttacttgggaataattttagatttatggaaaaattgcaaatatggtacagggagttcctgtataccccaaacacagccttccctaatgctaacatcttatgtaaccacagtacattagtcaaaaagtaacaggtcgacatcagtacattactaacaggtaaattccaggctgtatttggatttcaccagtttttccactagtctttttttctcttccaagagccaattcagtatacctcattgcatttagtgtactttgatttttgaaaacagctaccttgcggaaccctgttattaattctaatattttatatattgattctttggaaatttctttgtatacaatcggcaaataataattttgttctttccttcccagtctttgtattttaagtgtctttttcctgctgtattgtattaggtaggacttctagtaccttgatgaatagaaataatgatggttggcattcatatcttattcctgatctcaaaggaaaagctttcaacatttccttaatatgatgtttttgtaagacttttctagagactctttctcacatcatggaagttcccttttattcccagtttaagagaaagcatttttaaaaatcatcaatggctatgaattttatcaaatatatattttctgcatctattgaaatgatcacatgaatttctgcttttatctgtttatgtagtgtattaactcgaatagattctctaatgttaaattaaatttaaaatcctggaataaatccaaccttatatcaggttatattattttttttatatattgctgaactcagtttgttaatatgttttttaggatttgttgcatcgatgttcttatgtgaaattgacctataatttttgctttgatatcaagataatactggcctcataaaataagctggggcatgactttcttgtccgcattcctcctctggaagagtctgggtaaaactggaattatttcttccttaaacatttcactctcatcagtgtttaaagccaagaaatatagcaatcccggccaggcaccgtggctcatgcctgtaatcccagcactttcggaggccgaggcgggcagatcacctgaggtcgggagttcgagaccaacctgaccaacatggagaaaccccgtctctactaaaaatacaaaattagccgggtgtggtggcgcatgcctgtaatcccagctacttaggaggctgaggcaggagaatcgcttgaacttgggaggcggaggttttggtgaacc

SEQ ID NO: 698883 - DNA, 1130 bp, Homo sapiens
ggattaaatgagattccggagtgcccagcacacagcccatcaagacctgtaggtgtgycacactccacgttgtcaccatgacatcagcaacccctcctcttcccccacggagtcttccccactttctgaagtctgaagaactgggactggaacatgtccaaggggctgctcgtcactgccggagggataactgttcagacactgtcgtcacacagtcacagaaagactcagaacttcattgctactttatttgttgttttctgcctttaggatacttccttatgataaaaaatgtgatattactaaaaaaatattaaaaagtagggagaaatgctaccaagtatactccacattttggcttactttcttccagatttataatgcgtattttggatgtaattgagattctactgcatgtacattttattctggtatttcacaggacatgataaggtaagcatgctgtcatgctgttaaaaactcttcagagacatcattaaatgggcacatcctattccatggtagggctacaccaggcccccattgttaaatatttaaattgtctccaatattttactgttggaagtcacactgtcataagatacttgtgcatacgtctttgcatttttgtttattttatttgagcagaaatggggctaaaagttatggatatttttaagattcttaatacaaattgccaagttacattccagaaaagtctggccaagtctttcctgtggctagggtttaggagttcctgctacacactcacatcctctccttcaatggcttgtccttattcatcaacaagcaaaatagggcacttgcctttttctttttatctttttattttgaaataatttcaaacttagagaaaagttgcaagaacagagaaagacactcacatagatgcttcccctagatggtccaattgctaacatttttgtcatatttgctttattattcctcaatagataggtatgtaggcagaaatatacatatgtaacatacatacacatacataaacacacatatatttttttggaatcatctgagactaagttccaaacaggatgtcctttatgcctaaatacttcagcatgtattttatagaaacaaagacattttca

SEQ ID NO: 698884 - DNA, 1130 bp, Homo sapiens
ggattaaatgagattccggagtgcccagcacacagcccatcaagacctgtaggtgtgccacactccacgttgtcaccatgacatcagcaacccctcctcttcccccacggagtcttccccactttctgaagtctgaagaactgggactggaacatgtccaaggggctgctcgtcactgccggagggataactgttcagacactgtcgtcacacagtcacagaaagactcagaacttcattgctactttatttgttgttttctgcctttaggatacttccttatgataaaaaatgtgatattactaaaaaaatattaaaaagtagggagaaatgctaccaagyatactccacattttggcttactttcttccagatttataatgcgtattttggatgtaattgagattctactgcatgtacattttattctggtatttcacaggacatgataaggtaagcatgctgtcatgctgttaaaaactcttcagagacatcattaaatgggcacatcctattccatggtagggctacaccaggcccccattgttaaatatttaaattgtctccaatattttactgttggaagtcacactgtcataagatacttgtgcatacgtctttgcatttttgtttattttatttgagcagaaatggggctaaaagttatggatatttttaagattcttaatacaaattgccaagttacattccagaaaagtctggccaagtctttcctgtggctagggtttaggagttcctgctacacactcacatcctctccttcaatggcttgtccttattcatcaacaagcaaaatagggcacttgcctttttctttttatctttttattttgaaataatttcaaacttagagaaaagttgcaagaacagagaaagacactcacatagatgcttcccctagatggtccaattgctaacatttttgtcatatttgctttattattcctcaatagataggtatgtaggcagaaatatacatatgtaacatacatacacatacataaacacacatatatttttttggaatcatctgagactaagttccaaacaggatgtcctttatgcctaaatacttcagcatgtattttatagaaacaaagacattttca

SEQ ID NO: 698885 - DNA, 1130 bp, Homo sapiens
ggattaaatgagattccggagtgcccagcacacagcccatcaagacctgtaggtgtgccacactccacgttgtcaccatgacatcagcaacccctcctcttcccccacggagtcttccccactttctgaagtctgaagaactgggactggaacatgtccaaggggctgctcgtcactgccggagggataactgttcagacactgtcgtcacacagtcacagaaagactcagaacttcattgctactttatttgttgttttctgcctttaggatacttccttatgataaaaaatgtgatattactaaaaaaatattaaaaagtagggagaaatgctaccaagtatactccacattttggcttactttcttccagatttataatgcgtattttggatgtaattgakattctactgcatgtacattttattctggtatttcacaggacatgataaggtaagcatgctgtcatgctgttaaaaactcttcagagacatcattaaatgggcacatcctattccatggtagggctacaccaggcccccattgttaaatatttaaattgtctccaatattttactgttggaagtcacactgtcataagatacttgtgcatacgtctttgcatttttgtttattttatttgagcagaaatggggctaaaagttatggatatttttaagattcttaatacaaattgccaagttacattccagaaaagtctggccaagtctttcctgtggctagggtttaggagttcctgctacacactcacatcctctccttcaatggcttgtccttattcatcaacaagcaaaatagggcacttgcctttttctttttatctttttattttgaaataatttcaaacttagagaaaagttgcaagaacagagaaagacactcacatagatgcttcccctagatggtccaattgctaacatttttgtcatatttgctttattattcctcaatagataggtatgtaggcagaaatatacatatgtaacatacatacacatacataaacacacatatatttttttggaatcatctgagactaagttccaaacaggatgtcctttatgcctaaatacttcagcatgtattttatagaaacaaagacattttca

SEQ ID NO: 698886 - DNA, 1130 bp, Homo sapiens
ggattaaatgagattccggagtgcccagcacacagcccatcaagacctgtaggtgtgccacactccacgttgtcaccatgacatcagcaacccctcctcttcccccacggagtcttccccactttctgaagtctgaagaactgggactggaacatgtccaaggggctgctcgtcactgccggagggataactgttcagacactgtcgtcacacagtcacagaaagactcagaacttcattgctactttatttgttgttttctgcctttaggatacttccttatgataaaaaatgtgatattactaaaaaaatattaaaaagtagggagaaatgctaccaagtatactccacattttggcttactttcttccagatttataatgcgtattttggatgtaattgagattctactgcatgtacattttattctggtatttcacaggacatgataaggtaagcatgctgtcatgctgttaaaaactcttcagagacatcattaaatgggcacatcctattccatggtagggctacaccaggcccccattgttaaatatttaaattgtctccaatattttactgttggaagtcacactgtcataagatacttgtgcatacgtctttgcatttttgtttattttatttgagcagaaatggggctaaaagttatggatatttttaagattcttaatacaaattgccaagttacattccagaaaagtctggccaagtctttcctgtggctagggtttaggagttcctgctacacactcacatcctctccttcaatggcttgtccttattcatcaacaagcaaaatagggcacttgcctttttctttttatctttttattttgaaataatttcaaacttagagaaaagttgcaagaacagagaaagacactcacatagatgcttcccctagatggtccaattgctaacatttttgtcatatttgctttattattcctcaatagataggtatgtaggcagaaatatacatatgtaacatacatacacatacataaacacacatatattttttyggaatcatctgagactaagttccaaacaggatgtcctttatgcctaaatacttcagcatgtattttatagaaacaaagacattttca

SEQ ID NO: 698887 - DNA, 2427 bp, Homo sapiens
aggctcaatctagagaggtggcatagagaataatggttacatttaatggctagtcattatatctttctttggaggtagcttgtcttgttcaaacctagtcatgaactggccatatcactgggaaagttagtttaatcatctataaaatggaaataactggttcatatgggtattgtaagatattaatcttataaaacatttggagtacttcccagctactatttttagattattcacttgaataagccaggtgttttcacatctgtaagctttagctcattccctgccttttgcttgatgtgttcatctccccttgtgaaaattttctatttgttattcagagatagctttcctctgactggtacctcaaaccaccacccatccaagccagtcatctggaccatttctcctgcttgcatgggctcactgttctgtatggattcttccaccatagaatttaccacatgggttagagttatttatttatttatttttggtcttctgaacaagacttagaacttttggaggttgctgatcttgtcttatacaaatttatatccacagaacctagtctgttgttgtagcttgaggcacagaatgaatttgatggatttaattgaatttaactaaattaaaagcataatactctcagggaactcatctcacaatctaagcctcttgcttaattaaagtagcctgtgaatgcagtcatagcaagctacagccaatgtatagaaaacattcaccctacatggctatttaggcccaaacttaagcctaaaccagtcatgccaggcataacacctttcttatctgtctctcacctctgctttgctcttcctgagcaatgtggggcccatgcctttctgaggaacagaggaaggaggaaggtggggtggggaggaagaaatactcctacaactttacaaaaccttccttcacccctcaatgcaggaaggaaggtagagagagtggctgtatgtgctgtattaacaggcatgctcaggcttgtttgagtccttactttttttttattttgttttgttttgtttttatatatatatttttttttattatactttaagttctaagtcctttctaaccacctgactttgtgcggaaggtccaaacaccattaggcaaaccccagtaatgttacaagcacagtgacctatcccagagcaacttttttaagaggatccgtggtttttaccacgcctttgagtggaagcagaatttgaactctctcatactaattcttgtggagccttcaacctccataaagtgtgcaggaggtactcatcatacattttaaactaaaataatttgattaagcgtttgggtctctgagggaaaagttaaagaggactcttcactctattctttaatttcgaggcaaatggacacaacaggaggtagtctgacatgtaaaaatagaaacctttacagccaagcagatctgggtctaaatcctgactcatttactctttagttccgtgctcattaaagttaataatgatgacaatgatgataatcactagcacttacatgtgcttactacatgccaggctctgttctaagtgcctcgcatgtatcaacttattgaagataccaccaccatattttatagtgaaggaatctgaggcacagaaaggttttgtaatggatacaagttactaaagagccgagccagaattcaaacccaggcagctgggctgcagatatccatgctaatatacactgtgcttccctgactcccacgtacctctggagcacagcgtctggctttcagaatctgagtttccttccctgtaaagtgcatatgatgaggccaaccttggtgaggcctgaaggagatagtgtacattgaaccctagacaccagaggggcacccacactagagtaggtgcctctaatgtcaacttgtacactcacaatgtcctatcagatttctaagtaaactctaataaaattctgagatgtctagagtgcccaagaacagcaaatgtgtgggtggactgaacaaattggggttttgaaatttactgtttagaaccttccactgatccagaaggcagtcatagtctgtgatgcccactatctcaatatttctaaattaactatgtcttttgttacaggctagaagcccaccaactgctaacaaccagctggagrgtaagtcaaaagctatgagagcccagaaggagaacaattatttagacctggaggggccagttgggaaagtctttgaagggtcttcagaaaatggaccaaaagaaaagaggaaaagtcattctactgagaggtgtttgtgtaatcaaagcaaccgaggcctaagaactcacaaaagattagaaaagggtaaaggatgcctggaaagccggactaggaaaaggctgtgaagggccctgaaggtcacatgtcaca

SEQ ID NO: 698888 - DNA, 1088 bp, Homo sapiens
attacatgtgctttaaaagaaccagagataaaaaaagataaaagatttttacaagataaaatttggctattttctacaactgtattcccccaaaatgattatgactccaaatccactttgaatataatatttagggtgattattatgaatattaatgtccctaataattaactggataaaataaattcttctgcaccataagaaaattcaaaatacatgaatggtcccaggacaaagctaatgaaagggaaggaagaaatgtaaccaacacttatttattatgtacttgtactgtgtcctaggtgctttgattacattctcttctattttgtccacctctggcatgacatggaaggacaatgtattgccaggaattctccaaaatgaaggacagttttaggggcaggagattttttttaaaagagccagcatctatagagttcctgctatatgccaaatactgtgccagaaccttgaatcacactgcttctgtttcatacatgctcartcctctaaagtgagctcaaagatgccttctaaccacatgccaaagtagggagttctaagaagaggacgaagtcctcaggcacacagtcttaagggttgaaagtttttaagtgaggagtagaagttaaaagaatgtgaaaatgaaccttggctgacagaagccacctcacccagatatgccaaggagattaccctcccaccggcacaaccaccacctgccccgccacttcccaacagccaatggctgactcatgaacacggaagtccagtctgcttcaaatcatgataagtctgctgtactacttatgctccagagtcccctattgatcaggccaaggctagacttcattagaggatatcctcgtttggtaatttgcactttcctatgtcacttccctttttctgatataggtttggcctgaagaacacttcctcaataagtcccttgtcctcagtttctgacttaggctctgcttctggataacccaacataaaatgaagaaaatttgagttcctggccatacttctggttatcacacctaatgatttctgatcttcacaatgactcttcgaggtaggga

SEQ ID NO: 698889 - DNA, 988 bp, Homo sapiens
ctaaccctgctaggtatttcacatatattatctttcattagctcacatttatggtttaacactcaagagttacaaaaaaataaaacgcataaattctgcataattaaatgtgactcctgagcagaacatgctttctctgctgagactggcagctgagctttgtttcaccaatggatccagttgtgacttgtaggcttcctgatttctggctgatggacaggcttgcaagtcagccgagtgacaaatctgaaaacaaatcaagagtgggcatgtgccagtgacttcctggaagacaaacatcacagccctgagcttaattctgacaccctgggcgtaagaaaaagttctgccgaagctaggttcaagcagagaatcgcagcactggatggaaactggagggaatcattcccagggcatgcaaattctaagatggcccasgatgctcggcaacgttttatcttgtgtttgagacagtctttatttttcacgtgatgcatgtgcatgagctcctggcctgcagaatgagtattatgttacagtaatccagtcctgtcttctcctaggattcttaaatctcttccatgcctctgagcatgtgccagcaatgcggcatgctttccctagccatccttccaagaaaatcctttgagaatattaaattcattcagaagaacattctcatcccagtaagatttctctgtttttcctttgagctttttggtaaaagatgccacatttactcattgatttatggcttcccaggaatctggagtctcacctttcatgcaatggattctctctgcatatgtattattaattatctaaggtttgtgataggacaaactatcctcaggcaaccaatattgcttacctttaaaatgggaacatgagacagaatcaaggaataggggctgaccaaaggaaaggcaaagagaagcaatgccatgattcctatctcctctatcccccaatctttccttcaatacag

SEQ ID NO: 698890 - DNA, 988 bp, Homo sapiens
ctaaccctgctaggtatttcacatatattatctttcattagctcacatttatggtttaacactcaagagttacaaaaaaataaaacgcataaattctgcataattaaatgtgactcctgagcagaacatgctttctctgctgagactggcagctgagctttgtttcaccaatggatccagttgtgacttgtaggcttcctgatttctggctgatggacaggcttgcaagtcagccgagtgacaaatctgaaaacaaatcaagagtgggcatgtgccagtgacttcctggaagacaaacatcacagccctgagcttaattctgacaccctgggcgtaagaaaaagttctgccgaagctaggttcaagcagagaatcgcagcactggatggaaactggagggaatcattcccagggcatgcaaattctaagatggcccaggatgctcggcaacgttttatcttgtgtttgagacagtctttatttttcacgtgatgcatgtgcatgarctcctggcctgcagaatgagtattatgttacagtaatccagtcctgtcttctcctaggattcttaaatctcttccatgcctctgagcatgtgccagcaatgcggcatgctttccctagccatccttccaagaaaatcctttgagaatattaaattcattcagaagaacattctcatcccagtaagatttctctgtttttcctttgagctttttggtaaaagatgccacatttactcattgatttatggcttcccaggaatctggagtctcacctttcatgcaatggattctctctgcatatgtattattaattatctaaggtttgtgataggacaaactatcctcaggcaaccaatattgcttacctttaaaatgggaacatgagacagaatcaaggaataggggctgaccaaaggaaaggcaaagagaagcaatgccatgattcctatctcctctatcccccaatctttccttcaatacag

SEQ ID NO: 698891 - DNA, 1236 bp, Homo sapiens
gatgcttagtagcaaaggaatacctgtcaattccaattattcagtatagtcatcagagaaaggaagaatttccatgggaattaattttgccaattatttttgtctttatgcaatggactcaaaggcacctagctattctcacaaaaatctgtgacaaaattttttatatcatacaatacataacgtctggccccacagagttgctatgatgattaaattagcaaaatgtctagaagtgactggcagagagtaagtactcatatcagtatgcatattgaatatatatttttaaaagtcagtaaccaatagatgcatttgtaacaaaatcaaacagccagctactacttcattaaagtcccatgaatgttttgtattcatataaaccagtatattcaaaactacaccaatggtacaaacttttatcttaagaggaaaacagttgggtttttctccttaattttattagttatttatctattttaatgggtttcacacattgaacattgtttttagtgatagaaacaactttccattttgagtattttttaaaaaaatgcaaacaaatttaaaaataaggaaatgatggtatggatggtatgtaggtaagacaaatgcaggtatgacaaaaacagtacatataaagctaacattttgaaacatactgatatgaacgaaataaataactacatttttctttctttaaaccattgtttcagttttktatatcaacttttaaatcaactaattgtctggcatgaattatgaaaccatatggcattcagtaataacttatttgacaaatgatatatgagacctttatggaaaaattacaaaatgataaatgatatgaaaggacataaaattatctaagtgaatgtagtgtgatgccacgattattaatgaaaaacttaatattgtgaagatgatgattctccccaaatcatctattaattcaatggaattacaatgaacaaaaactcccatcaccttttacatggaagtagataaatacatctaaacatcacagcaaaaacaagtagagggtactttttctatcaacattcatagtaattttaacacatttgagcctgaacctttgcccctcacctcatgggctccggtgtggaaactatattatcccagaaaaaatagatccctgaagctcaacaaaaattataaacctagtgctttagcttcatgcaacaggataaaggagcacaattacaaagaaatcaa

SEQ ID NO: 698892 - DNA, 1236 bp, Homo sapiens
gatgcttagtagcaaaggaatacctgtcaattccaattattcagtatagtcatcagagaaaggaagaatttccatgggaattaattttgccaattatttttgtctttatgcaatggactcaaaggcacctagctattctcacaaaaatctgtgacaaaattttttatatcatacaatacataacgtctggccccacagagttgctatgatgattaaattagcaaaatgtctagaagtgactggcagagagtaagtactcatatcagtatgcatattgaatatatatttttaaaagtcagtaaccaatagatgcatttgtaacaaaatcaaacagccagctactacttcattaaagtcccatgaatgttttgtattcatataaaccagtatattcaaaactacaccaatggtacaaacttttatcttaagaggaaaacagttgggtttttctccttaattttattagttatttatctattttaatgggtttcacacattgaacattgtttttagtgatagaaacaactttccattttgagtattttttaaaaaaatgcaaacaaatttaaaaataaggaaatgatggtatggatggtatgtaggtaagacaaatgcaggtatgacaaaaacagtacatataaagctaacattttgaaacatactgatatgaacgaaataaataactacatttttctttctttaaaccattgtttcagttttgtatatcaacttttaaatcaactaattgtctggcatgaattatgaaaccatatggcattcagtaataacttatttgacaaatgatatatgagacctttatggaaaaattacaaaatgataaatgatatgaaaggacataaaattatctaagtgaatgtagtgtgatgccacgattattaatgaaaaacttaatattgtgaagatgatgattctccccaaatcatctattaattcaatggaattacaatgaacaaaaactcccatcaccttttacatggaartagataaatacatctaaacatcacagcaaaaacaagtagagggtactttttctatcaacattcatagtaattttaacacatttgagcctgaacctttgcccctcacctcatgggctccggtgtggaaactatattatcccagaaaaaatagatccctgaagctcaacaaaaattataaacctagtgctttagcttcatgcaacaggataaaggagcacaattacaaagaaatcaa

SEQ ID NO: 698893 - DNA, 663 bp, Homo sapiens
tacaatgccttgacctagttactgtcactgtggttttgtcttcagggactaaaagatacaataagaatttgttcctttaattgtcctgttgatgcacaaaatacttaatgcttctacataggtctgctcttgtgccccacagagcactaagggaaagtccccacaataaaagtgcttttcacctgagctgctacgtgtgacagtaaagcagctgaaggttaaaaaaatcaaagctccccaaatatgggtatgacagctggtccaacctcacggtctgtactttccctctgtaacagcatggataaatacagagataactagcaactgataccctagtgtgccaagcaatcgatgtatccgtgtgattaaaaaccagcatttaaccatactctagatacactaaatatcaaccccacactcatagcctgtaattccactttgcttccagatggcagttacaattggaaaggaaatacctagtttacagaaggcattaatacttcattgttgcagaaaccaaacccttaaaaaaatgtatcctggactttctgacctggataataacaaacagtgaaaaatatgtatctaagaatacacttggaacagaaatgtgaaaaaccaaaagtaagagatattatgaaggatcaaatataaaatsaccca

SEQ ID NO: 698894 - DNA, 643 bp, Homo sapiens
ttgtagttttcctgaaatgttaattatatttattatttcattcagttattccttcaaaacgacatttgttgagcacccactgtgacaattcagtaataaacaaagaagtttcctcaaaataattttgccatcatagaatgttcattctaattagggaggcaggaatagagagagggggtaagaaacataactgatgacaagtgttagaaagggggaaaaaaagcagaaaagatagatgtgaaatattgatgtgggagtggttgaaatgttagaagtggaggtaaaagtagacctcactgagaaaatgacttaaagataagacttggaggcaccggggragctattatgtggccaccctgggaagagccagacgtccaggaagggaacaacaggattctttcaaaaacaacaaagccccatgagaacatgcccagtgtgcttgagtgagactgtgaaaactagtttggctagatcagggggaatggaatgacagcaatgggagaggaggttccgtaagccaactaaggattctggctcttacttggaagaaagtaggaagacttcagagggcacaagagggacagaatctgatttttcttttaaggacatcctgactgcgttgttgacaacaaacagtggagtg

SEQ ID NO: 698895 - DNA, 643 bp, Homo sapiens
ttgtagttttcctgaaatgttaattatatttattatttcattcagttattccttcaaaacgacatttgttgagcacccactgtgacaattcagtaataaacaaagaagtttcctcaaaataattttgccatcatagaatgttcattctaattagggaggcaggaatagagagagggggtaagaaacataactgatgacaagtgttagaaagggggaaaaaaagcagaaaagatagatgtgaaatattgatgtgggagtggttgaaatgttagaagtggaggtaaaagtagacctcactgagaaaatgacttaaagataagacttggaggcaccggggaagctattatgtggccaccctgggaagagccagacgtccaggaagggaacaacaggattctttcaaaaacaacaaagccccatgagaacatgcccagtgtgcttgagtgagactgtgaaaactagtttggctagatcagggggaatggaatgacagcaatgggagaggaggttccrtaagccaactaaggattctggctcttacttggaagaaagtaggaagacttcagagggcacaagagggacagaatctgatttttcttttaaggacatcctgactgcgttgttgacaacaaacagtggagtg

SEQ ID NO: 698896 - DNA, 597 bp, Homo sapiens
tcagttcaccaaaggatatgaatttatttctggaccctcaaatctattttatgcatcaatgtgtctatccttgtgtcagtacctgtcttggttactgtagctttgtgataagttttgaaatcaggaattgtaagtccttcaactttgttcttctttttcaagattgttttggctatttgaagcctcttgtaattacaaatgaatttgaatttgagagamaactttccatttttgccaaaaaaaagctattggaattttgatagaggttgcattgatttgtacattgctttaggtagtgctgacatgttaacaatactgtctttcaattcatatacatggaacatctgttcaattatttagttattttaaaatatattttagcatagcatttgctatgttgatcacagtcagttacatgaatgaacaacatatcaactttatgtacaaatttaaaggattgtttatctagcaccatcttcttcagcagtcacttttcttctgccctagctagaaggctgagcttttatactccatgcattgttgtgcatttcccattattgtaactgcctctgggtaaagcagaaagattaaaaagcc

SEQ ID NO: 698897 - DNA, 985 bp, Homo sapiens
ggtgggtgaaccatgcacaggaagagcagaggagagttgtacatatgatgtgtgccacacagtatcagcttccagctctggaggagaccagaagcctctgatggtggtcctgcttgttactttctaggaagttatccattcatcagccaatagctttcccaaagacctatgcctggtagtgtccttgaaggcaataatgtcaaggtcaaagattacatataaggatgcgtccagctaaacctagggtaggattcaacagaaaagggaaggtaaaagactaaattataaacaggtaccactgcccttttcgcggagagagttttcagggggctcatgctctgttgtatccagggtttgtgatcttgacctggcaccatatggagaggatgcatcataaatagccatccaagctgctgttcaacacttcttaacccaggtcctaagtatgataactgccatgtgcattctgtcagaagtgtacgttttgctcacttttacaaacacctgcatccacatacccagaagtctttgattggtagaacaggatttaaaagtagatctcaaagctttacctggttgtgctgatagctttctgccaccacgggatgcccctcttcaacaattatcatatggaacctctttgtttgcaaataatagagaatcaaacactagaaaccctgaacaagcttaagcaaaaaggaacacttwttataaacatactggggtatctcatcaaactgaacgacaggactgtattagcgacttgggtggaaataagctggaattggggatttgaacactctcaggctactcttctggccgtcttctgtgctccatcttctcccgcaatattgactggctttgtttcccaattcatgtgggtgaaaatggccacctccgactgctattgaattttctcttccagtcccatttccaaaattcctagggaaaagttcagtctggcttgagggatgcccatcctcag

SEQ ID NO: 698898 - DNA, 985 bp, Homo sapiens
ggtgggtgaaccatgcacaggaagagcagaggagagttgtacatatgatgtgtgccacacagtatcagcttccagctctggaggagaccagaagcctctgatggtggtcctgcttgttactttctaggaagttatccattcatcagccaatagctttcccaaagacctatgcctggtagtgtccttgaaggcaataatgtcaaggtcaaagattacatataaggatgcgtccagctaaacctagggtaggattcaacagaaaagggaaggtaaaagactaaattataaacaggtaccactgcccttttcgcggagagagttttcagggggctcatgctctgttgtatccagggtttgtgatcttgacctggcaccatatggagaggatgcatcataaatagccatccaagctgctgttcaacacttcttaacccaggtcctaagtatgataactgccatgtgcattctgtcagaagtgtacgttttgctcacttttacaaacacctgcatccacatacccagaagtctttgattggtagaacaggatttaaaagtagatctcaaagctttacctggttgtgctgatagctttctgccaccacgggatgcccctcttcaacaattatcatatggaacctctttgtttgcaaataatagagaatcaaacactagaaaccctgaacaagcttaagcaaaaaggaacacttattataaacatactggggtatctcatcaaactgaacgacaggamtgtattagcgacttgggtggaaataagctggaattggggatttgaacactctcaggctactcttctggccgtcttctgtgctccatcttctcccgcaatattgactggctttgtttcccaattcatgtgggtgaaaatggccacctccgactgctattgaattttctcttccagtcccatttccaaaattcctagggaaaagttcagtctggcttgagggatgcccatcctcag

SEQ ID NO: 698899 - DNA, 621 bp, Homo sapiens
aggaaaacattcaagggaagagaaaaaatttttttttgcatttgtggcagacctggctttatcttaatgttctatgtttgtttttcgacgcagaaaagtcaaatagccataagagtcacaaaataattgaaagaaaaatggcttggtgcttctcatgtctagaatatttatagcagagggaggagctaggctgtgtatatccattattcaacaggccaggtaaagacagaagattggccaacggcagctcaaagacagagccctggggattctcttaggtcttatggaagctgcatcagagctattgctaaactatgtcaactgtaactttccattagcctgatgacctgtgatctaccaatgccacaacatgrctggaatgctcagacagttaccaaacaggaagataagccatgggtaattatttcaatagaaacttagagttgaagtgattgttcctgtaagagtctattaattagaattagattttgctgctaaactaaaaaactctcctaatagtggcctaatcataaaaagagtccagaggtaggcagcctgtggctggtgtgatgtctggtatggtgacaccaaagagtcatcagggacccaggctctgaactg

SEQ ID NO: 698900 - DNA, 622 bp, Homo sapiens
gtgcaagacttgaatttcagaccatgccattccagttactttacaaggtatatttcattagaatgaagcaagacgaaatcttgaaatagtcttatttgtaccattctgtttcacttttctttgttgggaaacctttccctggtcaacaagagacatgcacaatgattttttattctttttttttttttgagacagggtctcattctgtcacccaggctagagtgcagtggyccaatcacagctcattgcagcctcaacctctgagggcacaggtgattctcctgcctcagcctcctgagtagctggaactacaggtacacaccaccatgcccagctaatttttgtagtttttttcttttgtagagacagtgtcttgcaatgttgcccaggctggtctcgaactcctgggctgaagtgttccacccacattgctctcccaaagcgcaggcattacaggcatgagccacctttcccagctgcatgttgattattatttttttttttttttttttgagatggagtcttgctctgtcacccaggctgaagtgcactggcgtgatctcagctcactgcaacctctgcctcccgggatcaaatgattctcctacctcaccttcccaag

SEQ ID NO: 698901 - DNA, 744 bp, Homo sapiens
tttgagatatgtttcaggggtcaagtccaaaagcgaagagccagatgatataatgagaaatggatcatcagaaaagcacaatgatttggggaagatcagaaaatcaaaaaaaggcagggaatagagcaatgtgagctgtcctaaaattttccagtaaacattgttaaaagaaatggctggctgggcgcaatgtctcatgcctgtaatcccagcactttgagaggctgaggcgggcagatcacgagttcaggagtttgagatcagcctggccaacatggtgaagccctgtctctactaaaaatacaaaaattagccgggtacggtagtgcatgcctataattccagctactggggaggctgaggcagaagaactgcttgaacccaggaggtggaggctgcagtgagctgagatcacagcactgcactccaacatgggcaacagagtaagacactgtctcggaaaaaaagaaaaaaaagaaaaagaaatggctatgctaagcgaaatcagccagacacgaaaagacaaatacggtatgattccacttatatgaggtgccgagaagagkcaagtttacagagacagaaggcagaagaaagatcacagggcttagggggaaacgtgaatgggaagttagtgtttaatgggtgtggggcttctatttgggaagatgaaaaagttctggagatggatggtggtgatggttggacagcactgtgaataacagacttatagccaatgaactg

SEQ ID NO: 698902 - DNA, 662 bp, Homo sapiens
ttgaggaatctcagggaagtgaagtgaagtaacagaaagcacttagcttctatcaaagccttatagaaatagaagctgaggcgaagttggctgagtgcagtggctcacgcctgtaatttcagtgctttggaatgccgaggcgggcggatcacctgaggtcaggagttcgagaccagcctggccaatgtggtgaaaccccatctctattaaaaatacaaaaaattagccgggcatggtggtgcacacctgtaatcccagctactcgggaggcygaggcatgaaaatcacttgaacccgggagcaggagtcagaggttgcagtgactaagatcacgccactgcgctccactccagtctgggcgacacagcaagactccatctcaaaaaaaaaaaaaaaaaagctgaggagaaattatacaccaataaataaaacttgatatttaacttaacattgaaaactatattcagtggtttgtttataagccccggaatctctaaatacatgttttaccacctttaattaggtattatctaggatgacaactgtttttgacaagtaaaatagaggactggaactaaaattgtacagaagggacttagactagacattagaccatttatgtcaaatggattatgttatatgagaagaccatgcactctttg

SEQ ID NO: 698903 - DNA, 662 bp, Homo sapiens
ttgaggaatctcagggaagtgaagtgaagtaacagaaagcacttagcttctatcaaagccttatagaaatagaagctgaggcgaagttggctgagtgcagtggctcacgcctgtaatttcagtgctttggaatgccgaggcgggcggatcacctgaggtcaggagttcgagaccagcctggccaatgtggtgaaaccccatctctattaaaaatacaaaaaattagccgggcatggtggtgcacacctgtaatcccagctactcgggaggccgaggcatgaaaatcacttgaacccgggagcaggagtcagaggttgcagtgactaagatcacgccactgcgctccactccagtctgggcgacacagcaagactccatctcaaaaaaaaaaaaaaaaaagctgaggagaaattatacaccaataaataaaacttgatatttaacttaacattgaaaactatattcagtggtttgtttataagccccggaatctctaaatacatgttttaccacctttaattaggtattatctaggatgayaactgtttttgacaagtaaaatagaggactggaactaaaattgtacagaagggacttagactagacattagaccatttatgtcaaatggattatgttatatgagaagaccatgcactctttg

SEQ ID NO: 698904 - DNA, 1510 bp, Homo sapiens
gatctacatggctagaactaagttaaggagagtagagtggaatgaggttggagattctgagctcatcctccagttcagttccactttctgtaagttctataaacagaactgtttaccccttcatctaggtgctcttggcacttcatacatatttgttattacaccaactttaagtagttatttatgtcgtttatttaccctgagactgagactagatgcctaaataggtatagtcagccctccatatcccaaggtcccacattcacagattcaaccaactgtggatcaaaaccattcaggggaaaagaaacgattaagaaaaaaaatctggctgagtgtggtggcttacacctgtaatcccagcactttgggaggccacaaggggaggatcatttgagcccaggagcttgagaccagcctgagcaacatagtgagtccctatctctaaaaacaaacaaacaaataaaaacctttgaaatctaacaataaaaatttcaaataaaaaatatagtatagcaactatttacatagcctttacattgtctaaggcattataaacactctagagactatttaaagtatataggaggatgtgcatataattttatgtcaagggcttgagcatccatggatttttggtatycacatggggcccagaacaaatctcctgtggatactgagggatgattctatttaatacatgtatttgaaattgaattccaaaggagaggggagatggtctgttttccttgtgttaaggttaattctttgggatcctaaattcattgagctgtttctttctacatataactaatttttgaaggttaaagagacagtgtaaaatcccaaagtggtgatcatcaatgatttttcaaactattagatgaaaagcttactgtggaatttatgatggatcagtctgtcctcactagtgatcagttttaacatcactaaaagtaggacaactagacattatgttcctgctgatgtgatgcaagaagaagtacacagcaccacctgggaagtattcttgccaagtaaattgaacttgaatctaatcagatctttggactaactatcagtttacaggaaatactagagatggaggaacatgttagatggcacatcaagcatattgttcaccaaatctagaatgtgaaaatttttttttaggacaaatggcccaatttcctcagttaataaatgacctttttaaaataaaaaaaaaaagttggggagggaaggaaactattgtagattaaatagacatatcagctgattacaacgcatagacttcattctgaagctgattcaaataaatcaaccataaaaagatattattgaggcaactggggaaaactgaccatggcttagcattagataatattaaggagttgctgttacttttgttagttataataaagatagagtctttggggttttttaaatgtccgtatgagttagagattcatactgaagtatttatggatgaaatgatatgacgtctggg

SEQ ID NO: 698905 - DNA, 1145 bp, Homo sapiens
tatcccaatgcctctgtagtaggtactattattttactcattttacagatgaggaacttgaggatcagagaggttagagggcttgcttggagtcacagagctagtaactagaagagctgggattggaacccaggtcagttggaygccaaagcccaggttctcatccactccttctaccaccttccaatattgactcaggggcatttcttcccaccacgcctgctgtaggctgaggaatgcgatgtctcccagcaccccaaagagtgaggtgccgtgtgatgagctaactcggaggtgtagctcaaaagccctgctatgactgagccgtctgccagggctgtgagtgctcagagtggagacgttctcatccgccatcagggaatactcactccattgtgctggccccacctaaatgtttttttattgcctgcccttcaccatgagtaatgccactttccattttaagctgggagcttcaggagatgactgcattacaagccagggtttaaagctaagagctgcctgggggattactcacccatttcaagacgctgcccacaatgcaccctcccactcaggatgctgctggaagatcttcttccttgccaaagcctaaaagaaatctgatttcccctggaatccgactaggagtggtgccagaatatcagaaagctggcgagttaactggttctccaagtggagctaccgtgcttgtttctggtcctctcatgtgtgctaaggttttgttgcttgttcattcatttggcatttgctgagggtctactatgtgccatgcactctgcccatgatggagagactatcacaagctaaacagctttagtccttgtcctcagggagctaacagtctgggggtgtggggataaacagacaattatagtaaaatatcataacagaatatgctaaatcatatgacatgcatgctcagggagttttggaaaccaacagccagaggatttatactaaggtaggtatgaaggatgaggaggagctggcttggtttcttaattgtaagcaaccaaaattgactctagaaggagagttcagagaacctggggttgctcccagagtcactgggaaggtgtggtggccccaaatcacactgcaggaatggtccagccagacca

SEQ ID NO: 698906 - DNA, 607 bp, Homo sapiens
gccctgcatttaataagtgggagatgtggtcacagtggataaaaggagcacacataaaactttagagaggtgatttcactagagggagttttttttttttttttttyttgagatggagtctcgctctgtcacccaggctggagtgcagtggcacgatctcggctcactgcaagctccgcctcccggattcacgccattctcctgcctcagcctcccgagtagctgggactacaggcgcccgccaccacgtccagctacttttttttttttttggtatttttagtagagacagggtttcaccgtgttagccaggatgatctcgatctcctgacctcgtgatccgcccgtctcggcctcccaaagtacgtggattacaggcgtgagccaccacgcccagccgagggaggtcttgattcaacagagtcattagtgcctggagattcatggaggagctgagctttgaacagatgccaggagtggaggagaggtcagaagtcaggggatgagcttcgaacagaggtcggagctgagacacctctaatggtggtatagcaaagcagtaaattgggccccaaagagtcaaaggcaaaaggcaagtccaaagctg

SEQ ID NO: 698907 - DNA, 607 bp, Homo sapiens
gccctgcatttaataagtgggagatgtggtcacagtggataaaaggagcacacataaaactttagagaggtgatttcactagagggagttttttttttttttttttcttgagatggagtctcgctctgtcacccaggctggagtgcagtggcacgatctcggctcactgcaagctccgcctcccggattcacgccattctcctgcctcagcctcccgagtagctgggactacaggcgcccgccaccacgtccagctacttttttttttttttkgtatttttagtagagacagggtttcaccgtgttagccaggatgatctcgatctcctgacctcgtgatccgcccgtctcggcctcccaaagtacgtggattacaggcgtgagccaccacgcccagccgagggaggtcttgattcaacagagtcattagtgcctggagattcatggaggagctgagctttgaacagatgccaggagtggaggagaggtcagaagtcaggggatgagcttcgaacagaggtcggagctgagacacctctaatggtggtatagcaaagcagtaaattgggccccaaagagtcaaaggcaaaaggcaagtccaaagctg

SEQ ID NO: 698908 - DNA, 683 bp, Homo sapiens
tttatttctgtttttataggtgaagagtaaagaatgaaggctytgatcaaataatacaaaattatacaagcaagaatcattttgctttgaaaagcacattaactgaagcaattattatcaatgttatgttaaataatcatattaataaacttagttacccatattttagtaaacaaactaagattctcaataaattgagagtaaatccagaaatagagacttacagtgacaaaatgagaattgttaattaaatgtcattcattctcaactcttcaaagcataacaaattgtcaaaaaggtaactgagactgtgcagcacatgtcacataaaaactgcttaagctaaaattatgaaccttccttagcattcctggattgtttcttaacataatttttctaactggcctaatttccatgtttccttgcatatgcaagtaataaatacaataagtggtgcagttagaggtaggtataatgacttctagaacagtgacagctgagattataaatttaagtttagagacagacaacataacaatgagtcatgcaaatatgaatatttataatagatgatgctaagtcatctcaagggcaggttaaactgtgttcaatgccttcccaccaacagtactttctcattcctacttcactttattttctttcatagaactttgtcaccacct

SEQ ID NO: 698909 - DNA, 576 bp, Homo sapiens
tcagtggctgtcacagtactgttcctcgggtaatgtctagatctccagttccttgatacttctaatgcttttgctctatcagttccctcctatgctttacctcttcccctctcgaaaccaatgtctttccaatcttgcatggccaaggttttaaaaagaattggctaatgtgctttttctactccttttagtcaattggcaaatgctctcaatggccactatagtgggatcatatttatattatactcatgtgttgcttaawggcagggacacattctgagaaatgagtcattagatgatttcatcattgtgcaaacatcatggagtgcaattacacaaacctagttgtgtaatagcccactatacacctaggctgtatggtacagcctattgctctcaaccttcaaaccagtaccacatgcaactgtaatgaataaagtaggcaattgtaactcaacggtaagtgtgtgtatctaaacatagaaaaggtacagtaaaaaatatggtgttatatttgtgtccattgtcatatatgtggtttgtccttgaccaaaaaatcattattgcagagcttga

SEQ ID NO: 698910 - DNA, 1974 bp, Homo sapiens
actaaaagacctggcactttaaggaaaacaacaaaagcacacatacaactcttcatggtcaattggcaaaataaaataggtttttctccttccatttttcacaaatggaaagacaagctgagtgaggaaaacaggaaggcatacactagaaattagacatgccccccaaaaaagaatttaggggagtattggtaagggactccgaggctaaaaataatagagtctttatatccataagaagggcaaggtcagctagatgctcatggaactggttaaatggatgtcatggaaaggtggaacttgcagaaactacaaacagcaacaatataacaatagaaaactttcggtgactaccagccatatgccaggcactgtaccaaggatttcacatacagtgcctcatttaatccccataatttactgttgttggtgtccttttacagatgaggacactgagtcacagagagaataagggacaaagtcacacagctggcaagtgacagatttgacaaatgaatgcaagcctgagtctagagtctgcatactctgtgccttagactttggtaacaaataaccaaacagatcagagttactggcctaattaatggaaaactcgcaagatgaaactgtcaaggcagacacagacactgcagataaagaccagatggcatccacatgaaagttcattgaaattgacaaacaggtagactgggcacgatggctcacgcctgtaatcccagcactttgggaagctgaggcgggcggatcacaaggtcaggagattgagaccatcctggctaacatgttgaaaccctgtctctactaaaaaaatacaaaaaattagctgggcgtggtggcgggcgcctgtagtcccagctgctcgggaggctgaagcagaaraatggcgtgaacccgggaggcggagcttgcagtgagccaagaagttccactgcactccagcctgggcaacagtgcaagactccctctcaaaaaaaaaaaaaaagaaaaaaaaaaagaaattgacaaacagactctgagctggagatgaacaatgtgatctatgccctgccctgactttgcttccagtccccaaacaagctcagagggaacagagcagtgagtttggatcttggaccagataaattagtaccacctataacaaagttagagtcactgagtatttaacaacatatcacctagcctagaaaaagctacatggtgtgtaaaaaagaatgcatgcctatcttatctactaaagcaaagtccattaatttctcccttcaaagggtaaaagaaaactaatgactttgatagattttgacattatttacttggcagttgagacttggccctgttccaaaaggggcttgaataaaagatgaataaaatacaagataaattaaaatagaaagccataaaagaaaggtaaggatagggacaaaaatgatgaccagaaattgggctaaactcttgtcacattgcttcacaaatttagattctaagtttagcatgtaaagcacacacacacacacgcacacatggacaaaaagaaacattgctaattatacaatttacagtttaaagagatgaaaacaaatcaattgcccgggaaaatctatttgctattgataactagcatcaggcaggaatttatatgggggattctggtgaactggaccttgtgtgatataactaaaaacttatcatccttaccatgagcacaaagaacagctcaaaaagctatttcttacgtctgttctcaatgaagatggagaatatcaaaacaaagtgttgcgttgaaaaccccatggtgggaaagactctgatgccttggatacaattctgtgtcaaaaattatcatttgttagaattagtaaagaattgtaaaatggcttaattagttgttatttgacaggccagattaggggtaagttgtcaattctttgaataaagcactcttataaacgatccagg

SEQ ID NO: 698911 - DNA, 1974 bp, Homo sapiens
actaaaagacctggcactttaaggaaaacaacaaaagcacacatacaactcttcatggtcaattggcaaaataaaataggtttttctccttccatttttcacaaatggaaagacaagctgagtgaggaaaacaggaaggcatacactagaaattagacatgccccccaaaaaagaatttaggggagtattggtaagggactccgaggctaaaaataatagagtctttatatccataagaagggcaaggtcagctagatgctcatggaactggttaaatggatgtcatggaaaggtggaacttgcagaaactacaaacagcaacaatataacaatagaaaactttcggtgactaccagccatatgccaggcactgtaccaaggatttcacatacagtgcctcatttaatccccataatttactgttgttggtgtccttttacagatgaggacactgagtcacagagagaataagggacaaagtcacacagctggcaagtgacagatttgacaaatgaatgcaagcctgagtctagagtctgcatactctgtgccttagactttggtaacaaataaccaaacagatcagagttactggcctaattaatggaaaactcgcaagatgaaactgtcaaggcagacacagacactgcagataaagaccagatggcatccacatgaaagttcattgaaattgacaaacaggtagactgggcacgatggctcacgcctgtaatcccagcactttgggaagctgaggcgggcggatcacaaggtcaggagattgagaccatcctggctaacatgttgaaaccctgtctctactaaaaaaatacaaaaaattagctgggcgtggtggcgggcgcctgtagtcccagctgctcgggaggctgaagcagaagaatggcgtgaacccgggaggcggagcttgcagtgagccaagaagttccactgcactccagcctgggcaacagtgcaagactccctctcaaaaaaaaaaaaaaagaaaaaaaaaaagaaattgacaaacagactctgagctggagatgaacaatgtgatctatgccctgccctgactttgcttccagtccccaaacaagctcagagggaacagagcagtgagtttggatcttggaccagataarttagtaccacctataacaaagttagagtcactgagtatttaacaacatatcacctagcctagaaaaagctacatggtgtgtaaaaaagaatgcatgcctatcttatctactaaagcaaagtccattaatttctcccttcaaagggtaaaagaaaactaatgactttgatagattttgacattatttacttggcagttgagacttggccctgttccaaaaggggcttgaataaaagatgaataaaatacaagataaattaaaatagaaagccataaaagaaaggtaaggatagggacaaaaatgatgaccagaaattgggctaaactcttgtcacattgcttcacaaatttagattctaagtttagcatgtaaagcacacacacacacacgcacacatggacaaaaagaaacattgctaattatacaatttacagtttaaagagatgaaaacaaatcaattgcccgggaaaatctatttgctattgataactagcatcaggcaggaatttatatgggggattctggtgaactggaccttgtgtgatataactaaaaacttatcatccttaccatgagcacaaagaacagctcaaaaagctatttcttacgtctgttctcaatgaagatggagaatatcaaaacaaagtgttgcgttgaaaaccccatggtgggaaagactctgatgccttggatacaattctgtgtcaaaaattatcatttgttagaattagtaaagaattgtaaaatggcttaattagttgttatttgacaggccagattaggggtaagttgtcaattctttgaataaagcactcttataaacgatccagg

SEQ ID NO: 698912 - DNA, 1017 bp, Homo sapiens
gatttctctataaaagtggagtctatagaaaatggcatcaattccattacaaagctactctcaacaagaacaaggttagaaggaaatggaatagattcatcagggttgttggacaaaataagtataaaatcatcttagcactatgcttagcatgtagtaactgctcataaatgcttcactgatatgacttgtctttgaaactctcaagtacagagtccatagtggttatgttccttcatatccaagaggcggtagagccttggctaagaatgaaggttctgaaaccatcctgtctactttgcaattaggctscatcacttgcctcctttgtaattttatgtgagcacttggctaactcatgcctcagtttccttttccataagtgatgttcacaagggacggaccacaaaatgttgttgggaatactaaggaaatcaatacattaacttagaatagtacttaaaccatcacaagaacccaatagatattagacaggactacctatcaacttctctttgctgaacgcttaccttggtctttatcagatatcatcctctggcatccagaccaaagccaacacatgttcatgcttctggaatatacctgtagtgttgtgttccctgctgcttgtcagagatgtggtcttaattaagcccatttcagtctgtgaactccctgtcagagtctttcttgggtggctttccagagtctttaagttctcctgaatggctctggatcctccccagcctgcccttttctgtccgtctcatgccaggccgagcgctgtccctggaaggatgtgaagatggagtgggaaagcacttggcaatggattgttcagcagcagcataaagccttctttcctcctggaactcgcttccctcattgtctaactgggccctttaaagtggccaggtctttttaaaaattttaactttcttagatcaccaccaacttctttaactgtttcttaagcaaaactataaaaaatgcttcattttgtgctggtgggtgcta

SEQ ID NO: 698913 - DNA, 631 bp, Homo sapiens
tcaacatggccattattactacagggaatacatggaagcactcttcttaagaatgtgacacccagtgttctgaattcccaacttcaggagaaccccacttagttcagctaacaaagggttcagagagttagaactctttgccatgttcctgacacacctgaccatttgtcattcagacagtgaggatgcctggtttgaaggccatgagctggctacattatttggaagggcagagcctagcttattatcttattatggtgtgagagagatgggctcggtttttaaggggatttcatttccttccatggcatgggtgcagttgtgccaggaaggaaactgcttggcaattttcctatctggctcaaacatcatgccactctaccgtgctagggaattccattctggatctgatctgtcaccctgggtaagggtctyggggcctagggttgttagagctgctgtctgtggtgcaggaagtgttatggtcaagcaggaaccacgatacacatgctaagttgtcctctgttttctaccccagccttcaaccaggtcaggaattaatggtgggagtactaaaatgacccagaggactttcccactgccacactactgaggggacagacctgcctcc

SEQ ID NO: 698914 - DNA, 575 bp, Homo sapiens
ctactcgggaggctgagtcaggagaataacttgaacccaggaagtggaggtcgcagtgagctgagatcacaccactgcactccagtctgggcgacagagcgagactccatctcaaacaaacaaacaaaaaacctgtgggtgaacattacaatgctaacaaacacagccagtcacaaaaaaggaaacactgtatgatttcctttataaaaaatgttcttaaacaggccaaactcatctatcccattcaatatcaaaatggtggttacccttagggggatcggtgtctagaagagggcatgagaggggcttccaggctgaaggaaaagtcccaattcatgacccgggtgctggctacagaagcgtatccactttgtgaaaatttcttgagctgtgtcccatgatttgtgtccttttttctrtttatgttgtacttgaataaagattttactatgcttataaaaaataaatggaccaatatcccataatgctccaagaaaagcatgatttttttaaagggtatttgcgaagcccactatgtttccaatttctgtaaattcagatcacaaaggtaaagg

SEQ ID NO: 698915 - DNA, 609 bp, Homo sapiens
aacgcagttctgggccacctccctttggcactctagcttagaattcaccacttaattagattaagcttacagaccaagaactcttttttgctgtgtgatgcaatatgtctaccacagcccctgaatcataatttagttgtttagcaattctacctgcaagacagtttcttaatagtcctggtagaaagccacctgagaagactgattatcctaacttgagacaaatgttcattcctggactaaaatttatggccagaggtggggtttactctgcccaggccagtgcagcaggcccaggcctgcaatggtggcactstggtttgcaatcatccatcctagccatgagaaagtgctccctactgggaagaggacttctggcatcagaagtggggaaggagtgctggaccagtaagagtgatatccatcttggacacgaacaataaggctaggggtcgctctgactaagccatttttccacatcgccactgtgttaatctccccgagtactgcacttctgaatttctcccatattcaaaaactttcaagacttccctttgctcagtgataaatctggttcattgagttgaggagaattattcaaggtcatct

SEQ ID NO: 698916 - DNA, 909 bp, Homo sapiens
cactgcaagctttgcctcctgggttcatgccattcttctgcctcggcctccagagtagctgggactacaggcgcctgscaccacacccggctaattttttgtattttttagtagagacagggtttcaccacgttagccaggatggtctcgatctgctgacctcgtgatccgcctgcctcagcctcccaaagtgctgggattacaggtgtgagccaccgccagttaatttttgtatttgtagtaaagatggggtttcaccatgttggccaggctggtctcaaacttctgacctcaggtgatccacctgccttggcctcccaagatgctgggattacaggcgtgagccaccccacccggcctttctaccctctttataaagcttttcctttggacagattggcctggttgctgttctacaaatatactttatgtggttctgcacccgggtcattacagaagctattgcacctttgtaagggctgccttccttcacccatcaaatccttaccatcccaagaagcactttcaaaaacccctctttgtgaagtctctcatgatcatttacttttcaccatccagtaatagacaggaaatggaagatgggatgtctatggacagagcttcctcctctcaatataacagcttaagaagcatgatgtttacatctaaagttactcacactgttactcttcagcaaaacaagagtgttggactcgataattgcaaggtcccacctaactccaagggactccaagggattggctaggagagttgctttcaggaagatataaataaacacctgcctctcacagtgttcactgccccctcaaacaataaatggaagacacagtttgaatatcagcttttctgcttatatggggagaatagaaataaagttcactttgatac

SEQ ID NO: 698917 - DNA, 926 bp, Homo sapiens
tgtctctgatgagcttctcctccctcccagagacaatgcaggggtggttttcagcagaatgtgccacctgcacttctgattgttctgagacccagcccagaggggtggagaaggcgcacaaaccctattccaataaactgcctgcagagaaccacagcctgctaatagtcgttgaggtctcagccccctaaggtctccaagctcatttgaccagcgcagctgcgacttcggctgtctgcctctggcaggtgccaatatcagcatcttgtcccactgccatggggagttaatttttgctccagggcagctgccaagcccagcaccggcatcaatagaaggttttctctgattttcttctcttcctctcaggctaggctttcttaccaatccccaattttcttytgtagggcgccaggagactggccagagatctttagactcttacttagtttgaacatctcttgctgctcacacccaggcttcttcagcagaaagcatgacccatagtaggtactcagaaactggttgaatgaaaagccttgacatttaagggctttattctgtcatacggtagcaagaactggcctattggcatcgtattcctggcattgagctgtattgaccctgaatgtgtcctcctgaggtttttgagggtgacctaggagaaagggtctgaaaaagcactgggatccaagtgactttaaatctgcccgtggcatttcctgctgagaggcgagaaactagcatctctcccaacaggctcacatccgccaggaaggacagagcccaaaacgggggtagactttgtgggaaattcgccagttagtccgctgagattttaatctgcctcaagcacaggatgctgacaagaaaggtagaccactcccccgatcccagacaaaccccaggggtgacaacttctccat

SEQ ID NO: 698918 - DNA, 926 bp, Homo sapiens
tgtctctgatgagcttctcctccctcccagagacaatgcaggggtggttttcagcagaatgtgccacctgcacttctgattgttctgagacccagcccagaggggtggagaaggcgcacaaaccctattccaataaactgcctgcagagaaccacagcctgctaatagtcgttgaggtctcagccccctaaggtctccaagctcatttgaccagcgcagctgcgacttcggctgtctgcctctggcaggtgccaatatcagcatcttgtcccactgccatggggagttaatttttgctccagggcagctgccaagcccagcaccggcatcaatagaaggttttctctgattttcttctcttcctctcaggctaggctttcttaccaatccccaattttcttctgtagggcgccaggagactggccagagatctttagactcttacttagtttgaacatctcttgctgctcacacccaggcttcttcagcagaaagcatgacccatagtaggtactcagaaactggttgaatgaaaagccttgacatttaagggctttattctgtcatacggtagcaagaactggcctattggcatcgtattcctggcattgagctgtattgaccctgaatgtgtcctcctgaggtttttgagggtgacctaggagaaagggtctgaaaaagcaytgggatccaagtgactttaaatctgcccgtggcatttcctgctgagaggcgagaaactagcatctctcccaacaggctcacatccgccaggaaggacagagcccaaaacgggggtagactttgtgggaaattcgccagttagtccgctgagattttaatctgcctcaagcacaggatgctgacaagaaaggtagaccactcccccgatcccagacaaaccccaggggtgacaacttctccat

SEQ ID NO: 698919 - DNA, 926 bp, Homo sapiens
tgtctctgatgagcttctcctccctcccagagacaatgcaggggtggttttcagcagaatgtgccacctgcacttctgattgttctgagacccagcccagaggggtggagaaggcgcacaaaccctattccaataaactgcctgcagagaaccacagcctgctaatagtcgttgaggtctcagccccctaaggtctccaagctcatttgaccagcgcagctgcgacttcggctgtctgcctctggcaggtgccaatatcagcatcttgtcccactgccatggggagttaatttttgctccagggcagctgccaagcccagcaccggcatcaatagaaggttttctctgattttcttctcttcctctcaggctaggctttcttaccaatccccaattttcttctgtagggcgccaggagactggccagagatctttagactcttacttagtttgaacatctcttgctgctcacacccaggcttcttcagcagaaagcatgacccatagtaggtactcagaaactggttgaatgaaaagccttgacatttaagggctttattctgtcatacggtagcaagaactggcctattggcatcgtattcctggcattgagctgtattgaccctgaatgtgtcctcctgaggtttttgagggtgacctaggagaaagggtctgaaaaagcactgggatccaagtgactttaaatctgcccgtggcatttcctgctgagaggcgagaaactagcatctctcccaacaggctcacatccgccagraaggacagagcccaaaacgggggtagactttgtgggaaattcgccagttagtccgctgagattttaatctgcctcaagcacaggatgctgacaagaaaggtagaccactcccccgatcccagacaaaccccaggggtgacaacttctccat

SEQ ID NO: 698920 - DNA, 553 bp, Homo sapiens
tcccacaatgcactacccagcatcaaggacaacaaactgcatccacagacaacagggttgaccctcacaaacatatttttgagccaagaagccacacacaagaggcatataaagaacaaaagtgggtgagactaacccaggaggttagaaggcaggatcaagagaggccacccttgctgggaaaggtgccggggactgtgggctgggggrcacccatgtgaacttctgcttcttgatgtaggtgctagttacacaggcaactctgttgataaaatgtatcaggctgtatacttattatgctctatgcaaatttctatatgtgtattaaaattcaataaatgtttttaaaaagaagacatagtttaaaaaactggatataggatgttctgatgctgctgctgaggcataaggagattctgatgcagtttaataagcaaagagtgaacttttgtgttttagttggatgaaagtttacaaaaaatagtggggtgtgatggtgcacctgtagtcccagctagttgggaggctaaggcaggaggatggcttgagccct

SEQ ID NO: 698921 - DNA, 678 bp, Homo sapiens
tgaatatctcaattaccccaatttaatctttacacattatatgaatgtatcgaattatcatatgtaccctgaaaagatgtgmatctattacgtatcaattttttacagtcaggcaactttctgtaatgcagagccggacctggccaccagaggctgaagaggtgtggtggtggcagctgctgcagctcctgctgcctgtggcaggagcaagcacaggaagaagctgggagaagggccagagacccacagagacacgcggctgtgctgcgtcagcctgtgtgggcgctccagtggagtgagtcgccagtgaaggactgagatgaatcagtagctggggtgcaagtctaggggccaaggagcctgagtgtggaggcccgagggtctgcaggacctggtagcatggctgtggtgagatggggtgaagtgggctcatgcacaactggagaggtcttgtgttctaataaaatcacaaaagtaatcgatgttcagtgtcaaaaattcaaacaaaacagaggcatgagagtgaaactaaaggtttctgcccttctctgaaagcaatttctcttcttctcccagtgagaaactgtgagcaatctgctgtctaccgttttattctaggaaatctgtagactttattccccctagtcagatgtcacacgaaatgttatattccctttt

SEQ ID NO: 698922 - DNA, 643 bp, Homo sapiens
taaaccatggtccttcctgctaaaatattccacttagaattgtaaaatattcttctcaataactcctgaaagagcctattaagaaattaatgaggctgggcatggtggctcacacctctaattccagcacttttggaggctgagacgggtggatcacttgaggttaggagtttgagaccagcctggccaatatggtgaaaccccgtctcaactaaaaatacaaaaattacccaggcatggtggcaggcacttgtaatcccaactactcgggaggctgaggcaagagaattgcttgaacccaggaagtggaggttgcagtgagccaagatggcagcactgcactccatcctggatgacagagttaaactccatctcaaccaaaaaaaaaaaaagaaaaagaaaagaaactaacaaatgtaagagygtctatgttccaaatccggtgtattattttatgcagcctttcacaagctctaaaagattcactgtgcagaactggaggttctagagaaagaccacgcctcctcctacaggtaactcttgattcaggaagcagctcttggcttatccctgggcttagtggaattcaaatacctgaccataggacaccaagggctttgggacctgaaaggcacatcatgtc

SEQ ID NO: 698923 - DNA, 1248 bp, Homo sapiens
gctgtcacttctatttcaaaggaaggacaaagacgtctggccattagaaaagaaaagtgaagagaaggatcagggttcagacctagagcctgggctctgggagaaartggctccatcagcagagaacagaaagagtttgttccacgccaggcatgcttggtcccagttggcaagacacaaggaggaagaaattggaagcaaactgggcttgctcctccacttccttggagaagtgctcttctcaaatacccccttatcagacagactttccttgaccagttcatcatgcatagtcactctctactcggactccatttctccttcagagcacatgtcaccacctgctgaagtctatgtttgtttactgatgtgttctaccacctggctggatctcaataaaacataggttccaagagggatggtctttgtgtggtttatttcacatcttttgtaccaaaagcagtgcctggcacacagtagatgcttaataaacattagttattgttattaaagtgctttaaaaagtgcctggcacacaaaacatattcagtaagtattcgtgcttattggtgaagatctcagaaaacttgcaaaaagataaagaccttggagaatagtcacacttagtcatcaggaagaagaagaattcacagagcagttacagagacaagaaaacagtggcctcctttcgggcagagaagagagacaaggtgtgcccaccatgaaggtcacacctcagaccatgcagccacaggcttttccaagtactaatgcaggaaacagcaaagggaggcagaaccagttcatcctaggacaggttaacagttgtgagaaacaaagaatgggtattttctgaacacagaaaagaaaggcacttggtctgattaaatttttgacttataagaaactgacttgcaatggccactttggcccaatcctttcctttcctcctgtcagataatttggaaatccagattctggcagagttcacaagagctcacttagctgggagaccaaacatcaagctaattagaaaattcataattgactactccagatatactgggattacaagatcagctcattcagcaaatatgcctactgtacactgagaaaattcttgtcaaagtcattaatataacttcatggtgacatcggtctttgcagctggtagaatcaaagttttgccacttctcaacctctccccgacaggtcagggctcagagaggctgtcactgcccaaccacc

SEQ ID NO: 698924 - DNA, 1248 bp, Homo sapiens
gctgtcacttctatttcaaaggaaggacaaagacgtctggccattagaaaagaaaagtgaagagaaggatcagggttcagacctagagcctgggctctgggagaaaatggctccatcagcagagaacagaaagagtttgttccacgccaggcatgcttggtcccagttggcaagacacaaggaggaagaaattggaagcaaactgggcttgctcctccacttccttggagaagtgctcttctcaaatacccccttatcagacagactttccttgaccagttcatcatgcatagtcactctctactcggactccatttctccttcagagcacatgtcaccacctgctgaagtctatgtttgtttactgatgtgttctaccacctggctggatctcaataaaacataggttccaagagggatggtctttgtgtggtttatttcacatcttttgtaccaaaagcagtgcctggcacacagtagatgcttaataaacattagttattgttattaaagtgctttaaaaagtgcctggcacacaaaacatattcagtaagtattcgtgcttattggtgaagatctcagaaaacttgcaaaaagataaagaccttggagaatagtcacacttagtcatcaggaagaagaagaattcacagagcagttacagagacaagaaaacagtggcctcctttcgggcagagaagagagacaaggtgtgcccaccatgaaggtcacacctcagaccatgcagccacaggcttttccaagtactaatgcaggaaacagcaaagggaggcagaaccagttcatcctaggacaggttaacagttgtgagaaacaaagaatgggtattttctgaacacagaaaagaaargcacttggtctgattaaatttttgacttataagaaactgacttgcaatggccactttggcccaatcctttcctttcctcctgtcagataatttggaaatccagattctggcagagttcacaagagctcacttagctgggagaccaaacatcaagctaattagaaaattcataattgactactccagatatactgggattacaagatcagctcattcagcaaatatgcctactgtacactgagaaaattcttgtcaaagtcattaatataacttcatggtgacatcggtctttgcagctggtagaatcaaagttttgccacttctcaacctctccccgacaggtcagggctcagagaggctgtcactgcccaaccacc

SEQ ID NO: 698925 - DNA, 632 bp, Homo sapiens
ttctcctttgggggctcattccgatcagggtgcatctgggaagtcgggcgactgtgtccatctcctgggtggaagaatgacccagggaagtgctccatggggaaggcggggcatgagagaagggaggggtggtcccgaggaccctttccatagacctgggagttcccggtgagcacgcggaaaggacgcggtgggagmggcaggtgcagagggaggacttgaaggttccatccctaacagaggacagcgtggccgagtactcatgcttccaaccctgcacagaggatagtgcatgcccagcatgcagactcgcttccatcgcgacacagaggacagcatggagcccagctcgagtgccgtccccccaccatgacagcgcagcatgggccttccaagccacagagccacagggaagccagtcctcctggaccgtgtgtggctgttttggagccagttgtgtcctgtgaagagcgcagcggccgcaggtgaggcaggagtgaagatggaggaggcggccatctctctggggcctggcaacagcgagagcttttgccaagccactgtctcccggaggacaagatctccttcccaaaagcaagatggccaagagtatggagaagaaagtaggtaat

SEQ ID NO: 698926 - DNA, 560 bp, Homo sapiens
gccccttctatatttttttcttttggtgaaagcttcttcaaacttcctttcccctgaagaacctggcccccaattccagttgtttaaatttgccygccacctttctgctccatttatatatcccgaagagtaattattccccctgaaaaaagtctgccatcgctattggaatgaaagaagtagcagaaaagatgagattaacaggatacacgatggcctttaatgatccagttgctatcactttctttttagcctgtttctttgtgtgtgtgtttatgggtgtgtgcatgtcatgtgtgtatttgactgaaatcttgagacatttctttggctatcagacttctgagagaaattgctttgcacagaagcataacatagatgtaagtattgaaccaaatgtgcagcttatgtttatattacaaaattagttttggtcagctctccatgtacgtggccaacagactgagaaaaatcccaagctctggtgtggacagtgagcacaattacagcttatgccagtgttgacagttcatcgagcaaagccctagttattttggagt

SEQ ID NO: 698927 - DNA, 560 bp, Homo sapiens
gccccttctatatttttttcttttggtgaaagcttcttcaaacttcctttcccctgaagaacctggcccccaattccagttgtttaaatttgcccgccacctttctgctccatttatatatcccgaagagtaattattccccctgaaaaaagtctgccatcgctattggaatgaaagaagtagcagaaaagatgagattaacaggatacacgatggcctttaatgatscagttgctatcactttctttttagcctgtttctttgtgtgtgtgtttatgggtgtgtgcatgtcatgtgtgtatttgactgaaatcttgagacatttctttggctatcagacttctgagagaaattgctttgcacagaagcataacatagatgtaagtattgaaccaaatgtgcagcttatgtttatattacaaaattagttttggtcagctctccatgtacgtggccaacagactgagaaaaatcccaagctctggtgtggacagtgagcacaattacagcttatgccagtgttgacagttcatcgagcaaagccctagttattttggagt

SEQ ID NO: 698928 - DNA, 560 bp, Homo sapiens
gccccttctatatttttttcttttggtgaaagcttcttcaaacttcctttcccctgaagaacctggcccccaattccagttgtttaaatttgcccgccacctttctgctccatttatatatcccgaagagtaattattccccctgaaaaaagtctgccatcgctattggaatgaaagaagtagcagaaaagatgagattaacaggatacacgatggcctttaatgatccagttgctatcactttctttttagcctgtttctttgtgtgtgtgtttatgggtgtgtgcatgycatgtgtgtatttgactgaaatcttgagacatttctttggctatcagacttctgagagaaattgctttgcacagaagcataacatagatgtaagtattgaaccaaatgtgcagcttatgtttatattacaaaattagttttggtcagctctccatgtacgtggccaacagactgagaaaaatcccaagctctggtgtggacagtgagcacaattacagcttatgccagtgttgacagttcatcgagcaaagccctagttattttggagt

SEQ ID NO: 698929 - DNA, 636 bp, Homo sapiens
tctagcaatatttttcttatatcttagaatctgttttggtaaacatacasaaatcagaaatccaagtgtttctcttctccatactggaaatatctatagcaggttctgctcagcaattttaaaaactgaccatttcttgagtggcttgttccctgaagatgaaaaagagctgatattttctaatatttatttacttggagaaatagccaaagggagggggaaaaaaaaaggtctgcaagatcctttaacaggagatgttgggcacgcagtcacccatttatggagcaccaaacaagcttaatgtggtaaagaaaacaagatcactaagtccatacatgcacctgtaaaatcactaattctgagcttccttctcaacacatcacctcacatccttctactgaccccactgctcttgcaaaggtctcttgtcccctgctatggcagagaatattggctgcctattccaagatccatgttccctcttcctctgtattaacagatagccaacttttttgctaccaaaattatagctcagaataaacaattacattattttgcagccaggccaggtgatttaaattctgtgggacttccaggaaggctgcttaaaaagaaaagtgtcagctgtgtgggatc

SEQ ID NO: 698930 - DNA, 626 bp, Homo sapiens
tgattcattgaagaccctgttataccctgagcaagttcatcattctatcctcttactccataacattctctgaggcttgcaattccaaaacaagggcaggagaagaacattttttcactggttgctagttccatgagatgacccacgcattaaatgaatgaatgaatgagtgattccttggtcaaatgagattaggggatgctgcatattcagtctyccttttggagaattacagaacaagttaacatatatcagactctgaaaatcctgctccaaaggaatttttttaacatggcattttttttctaacttagttgactgaggacaggcctgaaatcttgcagatttagaagatgtggcgactcctgggttgaacaatctgtatggctttatagggcagcttttgccatgggccccttctttttctttaagtaatacctattaacatcttgaggagagattcttgcattctgtgggacacagtttaggaaacactagattgagataataatccactcatcatgactatgtaaatggaactactttcacagccttagtagggcaaaaagtctgagtggggtcgatttgtgccagagcactaatccatcaatcctgcctggaacccg

SEQ ID NO: 698931 - DNA, 1196 bp, Homo sapiens
ccaaggctctgggccagccagtccctgttttactggcaccacggtccctcctaggcgaggacgaagagggaaggggtggagacctccaccttctctgcgtgtggctgcgtccctttacagaatgacaggcccttacttccgagggcggggactaatgtgtaaggcttaacagatccaattccagaaattatctgtgtttttttcaatcaccctcttgtgcccccccaccccccattaaatttcatcttttatctttttttgggccttcgtaatgaaaagtggttttaaaggttgaccagttttactacttagtgcctaacaggctgagtgattataccgttgaaggaggtcacagcgggaaggacatggagagagatggggggtctgaggcctggggagtgaggtctggttccctctcctccccttggagccagagggcaccttcgtgactaagaagggagaggatctggccttgtgcagctctgcccactgagaggtaacacctgttctccagctgggtggcagctccctgaatcaggccagtttgtactttttcacctaactcacatgatttccacttcagtcgcactaccgctggctgccccattgtggacagcttcattaacctccgttgctcctaaaggcagtcttttgatggaaatgagtggcggaaaaggctgagagcaaccaggccaggctcagcccacttacttactatagttagcctctctgttatgcctcacttaccccaaggactctctgaggagtggccattagtcctacagctcctgagtgcatattgtggccagtcccacaaatgtgaagttctcttctttcctccgtgagtygttgggtcaaatagaactcttgttaatagctcaccaagtcagttaaagattgggaaggtgggcattgtgaatttgggattaaataatgtccaggtggttagaatggacttaaagagaaatagagaggaaaaggatctagtggtcatagtgaatcccaagttgaaatgagtcaacaggaagggacagtgatgaacaggaagggacagtgggaaaaccctgacagaaatgctttagctacatcctgtaccttcccacttttattagaagatgcttgatttttgttctaagaagggaaatatgtattctaggttcaacaagttataaattccttaagggcagacatctttt

SEQ ID NO: 698932 - DNA, 864 bp, Homo sapiens
ggctgttgttgttgttgagatggagttttgctcttattgcccaggctggagtgcaatagcgcaacctcagctcactgcaacctcagcctcccaggtacaagtgattcaayctcccaagtagctcagattacaggcatgagccaccacacctggctaatttttttgtatttagtaaagacggggtttcaccatgttggtcaggctggtcttgaactcctgacctcaggtaatccacctggctcagcctcccaaagtgctgggattacaggtgtgtgccactgcgtctggcctaattttttatatttttagtagagacggggttttgccatattgcccaggctcgtctcaaactgctgggctcaagtaatcctccctccttggcctcccaaagtgctgggattacaggggagccactgtgccttgcccccatttcttattctctcctttttaagtgatgatggaacgaaggccaggaaatggtaaaaaatctttttgaggtaacacagcaccttggacataggaggtgcttgataatttttttttttttttttttagacggagtttcactcgttgcccaggctggagtgcaatggtgtgatctcggctcactgcaacctctgactcccaggttcaagagattttcctgcctcagcctccctagtagctgggattacaggcacatgccaccacgcccggctaattttgtgtttttaatagagacggggtttctccatgttggtcaggctggtcttgaactcccgacctgaggtgatccaccccagtctcccaaaatgctgggattacaggcatgagccaccgcgcccggccgataaatattaattatggtttacgaggggttttaaa

SEQ ID NO: 698933 - DNA, 1466 bp, Homo sapiens
tcctcccctacccgcactcccgaactttcaaattccctcttagcatgcgcagcacctttgagaagtagcagtggaaggaactccagatgaggggaagtcattcaggatcaggtggcaggggtggcagcccagatccccccatccctgcactgccaaggactttctggaaggtccaggctgctgctttctttccaccacactgaggaacatttagccccaaacactcatccattcagtagatagtgagtgggaccacagggtagatgtgccagtagtatgtgcggctggttattttgtggtgtgggggagggggagcttgacacagaagaaagagcccacaaaagatacagactgtcctggataaggagactggagggagtagttggtgaatttggggcaagagatagccaatttttttctttttttcttttttctttcttttttttttaagaaataagttttgcgcttgtcacccaggctggagtgcaatggcacaatctyggctcactgcaaccttcgcctcctggattcaagcgattctcctgcctcagcctcctcccgagtagctgggattacaggcgccggccaccatgcctggctagtttttgtatttttggtagacagggggtttcatcatgttggccaggctggtctggaactcctgacctcaggtgatccagccgcctcagcctcccaaagtgctgggattacaggtgtgaaccaccgggccagccagaaagccacatcttgaaaggtgagtaggagtagggggtgctagggatccctgctaggtagagagactggaaggagcaacggccaggaggggtcagagccccgcccagcaggcaaactggcaaaagcttggctgattgagaagcaggccaagcccactgacaggcaccaaattcccagggcctctagttgagaggttcttagacagggctagggttcaggggcttggatcactcaggaacttttgcagagtttgatgtgagcacattttctgtgtgatggaatattagttttctattgctgttgtaacaaattaccacaaacttagtgtctttaagtgacacaaatgtattatcttacagttccgttaagtcagaagtctataatgccggctcactggtctaaaatcgagttttcagtggggctgcattcctttctgggggtctaggggagactcccttttcttgcctttgctagcttctgggcttttcttaggtcaagcccttctctatattaaaatccagcgttgttggtagagtcctcctgctgccacttctgatgctcaccacctgtcttcctcttccacatataaggctcctgaagctgggcacggtggctcacgcctgtaatcccagcactttgggaggccaaggcgggcggatcacttagggtcaggagttcaagaccagcctgaccaacatcgtcaaaccccatctctactaaagatatgaaaa

SEQ ID NO: 698934 - DNA, 1466 bp, Homo sapiens
tcctcccctacccgcactcccgaactttcaaattccctcttagcatgcgcagcacctttgagaagtagcagtggaaggaactccagatgaggggaagtcattcaggatcaggtggcaggggtggcagcccagatccccccatccctgcactgccaaggactttctggaaggtccaggctgctgctttctttccaccacactgaggaacatttagccccaaacactcatccattcagtagatagtgagtgggaccacagggtagatgtgccagtagtatgtgcggctggttattttgtggtgtgggggagggggagcttgacacagaagaaagagcccacaaaagatacagactgtcctggataaggagactggagggagtagttggtgaatttggggcaagagatagccaatttttttctttttttcttttttctttcttttttttttaagaaataagttttgcgcttgtcacccaggctggagtgcaatggcacaatctcggctcactgcaaccttcgcctcctggattcaagcgattctcctgcctcagcctcctcccgagtagctgggattacaggcgccggccaccatgcctggctagtttttgtatttttrgtagacagggggtttcatcatgttggccaggctggtctggaactcctgacctcaggtgatccagccgcctcagcctcccaaagtgctgggattacaggtgtgaaccaccgggccagccagaaagccacatcttgaaaggtgagtaggagtagggggtgctagggatccctgctaggtagagagactggaaggagcaacggccaggaggggtcagagccccgcccagcaggcaaactggcaaaagcttggctgattgagaagcaggccaagcccactgacaggcaccaaattcccagggcctctagttgagaggttcttagacagggctagggttcaggggcttggatcactcaggaacttttgcagagtttgatgtgagcacattttctgtgtgatggaatattagttttctattgctgttgtaacaaattaccacaaacttagtgtctttaagtgacacaaatgtattatcttacagttccgttaagtcagaagtctataatgccggctcactggtctaaaatcgagttttcagtggggctgcattcctttctgggggtctaggggagactcccttttcttgcctttgctagcttctgggcttttcttaggtcaagcccttctctatattaaaatccagcgttgttggtagagtcctcctgctgccacttctgatgctcaccacctgtcttcctcttccacatataaggctcctgaagctgggcacggtggctcacgcctgtaatcccagcactttgggaggccaaggcgggcggatcacttagggtcaggagttcaagaccagcctgaccaacatcgtcaaaccccatctctactaaagatatgaaaa

SEQ ID NO: 698935 - DNA, 1466 bp, Homo sapiens
tcctcccctacccgcactcccgaactttcaaattccctcttagcatgcgcagcacctttgagaagtagcagtggaaggaactccagatgaggggaagtcattcaggatcaggtggcaggggtggcagcccagatccccccatccctgcactgccaaggactttctggaaggtccaggctgctgctttctttccaccacactgaggaacatttagccccaaacactcatccattcagtagatagtgagtgggaccacagggtagatgtgccagtagtatgtgcggctggttattttgtggtgtgggggagggggagcttgacacagaagaaagagcccacaaaagatacagactgtcctggataaggagactggagggagtagttggtgaatttggggcaagagatagccaatttttttctttttttcttttttctttcttttttttttaagaaataagttttgcgcttgtcacccaggctggagtgcaatggcacaatctcggctcactgcaaccttcgcctcctggattcaagcgattctcctgcctcagcctcctcccgagtagctgggattacaggcgccggccaccatgcctggctagtttttgtatttttggtagacagggggtttcatcatgttggccaggctggtctggaactcctgacctcaggtgatccagccgcctcagcctcccaaagtgctgggattacaggtgtgaaccaccgggccagccagaaagccacatcttgaaaggtgagtaggagtagggggtgctagggatccctgctaggtagagagactggaaggagcaacggccaggaggggtcagagccccgcccagcaggcaaackggcaaaagcttggctgattgagaagcaggccaagcccactgacaggcaccaaattcccagggcctctagttgagaggttcttagacagggctagggttcaggggcttggatcactcaggaacttttgcagagtttgatgtgagcacattttctgtgtgatggaatattagttttctattgctgttgtaacaaattaccacaaacttagtgtctttaagtgacacaaatgtattatcttacagttccgttaagtcagaagtctataatgccggctcactggtctaaaatcgagttttcagtggggctgcattcctttctgggggtctaggggagactcccttttcttgcctttgctagcttctgggcttttcttaggtcaagcccttctctatattaaaatccagcgttgttggtagagtcctcctgctgccacttctgatgctcaccacctgtcttcctcttccacatataaggctcctgaagctgggcacggtggctcacgcctgtaatcccagcactttgggaggccaaggcgggcggatcacttagggtcaggagttcaagaccagcctgaccaacatcgtcaaaccccatctctactaaagatatgaaaa

SEQ ID NO: 698936 - DNA, 1769 bp, Homo sapiens
tgagggatctggagtctttcctctggggcgtctatttttccctagggcaggcattggcaagctttttctgcagggcctagatagtaaatatyttaggctttgtgggccagatggtgtctgttgccactactcagctctactgctgtggcataaaagcagccatagacagcttgcaaatgaatgcgtgtgactgtgttctaataaaactttatttgcaaaaacagaatggagtatggtttggcccacaggttgtactttgacagtctcttgcctgtgggtatatatgtctggctcctggaggcctgagagcagggtcggggaggggctgagggtctgttggggctcagaacatgataccctaaagtatagtatgttggcatgctgagtactttgaactaaaggagaatggaagggcctcagaagccaaggctttcaccttctctcctgcccccgtctcccatccctttttctcccccgacgtaagtcatagaaacaagaattctttttcgccaaagtgggtcatagaaactagaatgcctctcctgcaaagcaagccacaaaacctagaaaggtcactcgctcccttctcccttgaaaaccctcattccagagaggtcctacctgggaggtaggaatgctactcagagacactaagaagaatctgaacagacaggccttgctgggtttcctcccctcagtctgttaccagtagatcacacccttttgtccaatcacatttctacaaggcttcccattcttcatggaacctaagcacaaatacagttttccctgggtctttgagtcttcatttctgaaggcttctgtgtcatgtgaaactgatgaaataaatgcatttatgcttttctcttgttaacctcttttgttatagcagtgttggccgtaatccttatggtagatgaggaaaggtatcacactttccatccctacaggccccacagttcagtgcgtagagcttccattaattctcttattttcaggtggcctcttatgagatctgatgtgtctgagatctgagcgtatgtggctcaatttctctcaagaaaaaactgcccatctcctgcagtggtggtaggtgggaaggattgtttcctagtagggcaggagatctaggggtgcaaagtctcctgtgacagacttgaccattcctctgctgttagccccatgcctcattcctgctttccatggtccctagtgccttcaagagccaaggccaggctttgttgcgaaaactggctcactttgtcacatcacttctgcccccaacatgtaggttagaatgttctttactctgtccctatgcactttcttttttattaaattttgaaatatttcaggcatacagaaatgtataaaaattgtaagattttactttgataccttgtactcgctgaccaattaaaaaaataaaaaataacaaatacagacataggggcctgtggttatgttccccaattacgtaaactttgtatcttggacaaatgtgttgaaattattaatagtttgttaaccttgtgagttcatgccatttttgttcctttagtgacatgttgcatttgaggaaagggagaagatgaacatatgtctacaatattgtcttggttgcattgagtgactttattacaatttacttaatcgtttcctttttattagacacagatttttttcttttttaatatacatagtgctgtggtagaacaccgttgttcacacagatttttttttttcatcttctgggttatttatttaga

SEQ ID NO: 698937 - DNA, 622 bp, Homo sapiens
tataagaatattgctattcaaatatcccttcccacttcccactggcaactgtgccatcggtatctttgtcaacttgtttctcaccagtgcagggcatcatggacacttaaggatacaaggtaaaaagattgcaaagaaaaaactgcaaattccatgaaaggttcaggatttaatggaattgacggaaatgacgtggcaggctcttaggtaaagctgttactgattaaagatctggcggaaatagacctgataattttagaagagaaaatgacaagamtgatggccaggagcttcagaagagaaaagacttgcatactgaaggattaaggaaggcttcaggaatgcattgaagagcctcttgatcatctgcaacacaatggaagtcaaagttgaatgaataccacaatgcagtttttcagtctggcacatattaaccatgcttatgccctgtgacccatccatttggctcctatgtctgttgtagcttgtagtattgtcagaggcgtgtgaaccagagcaactccatcttaaacaggagctgggtaaaacgaggctgaaacctactgggctgcattcccagacagttaaggcattctaagtcacaggatgagataggaggtca

SEQ ID NO: 698938 - DNA, 604 bp, Homo sapiens
catctaagggcattcgatatgaatcttcaaaattctgtgcttgctacaaagcacgcctgctgaggtattttcctgggagccgccttatgtaaaaatttggaaaagcagcggcctgggcctagggcttccatgttcattgcagcacggttcacagtagccaagatatggacgtgacctatgcgtccatcagcagataaaaaagatgtgtgtgagagakatatacacacatatgtgcgtgtgtgtgtacacacatatatacacacaaaatggaatattattcagccatgaaaagaaggaaattctgtcatttatgacaacctgggtgaacttggaggacatggagtagaataagccaggtacagaagaaggacaattctgcatattctcacttagatgcggaatctaaaaaagttgaactcatagaagcagaagaatggtggttaccaagacaaaatcttgatattatcttggttcttagaaatgcaggatattcacctagactgtcatgatgtggttaaaatgggtgaagatgctgcgtgacacagggagaggcagcaggacttagaaatgtgtaggctttataagtttgtaaaagattaaaata

SEQ ID NO: 698939 - DNA, 604 bp, Homo sapiens
catctaagggcattcgatatgaatcttcaaaattctgtgcttgctacaaagcacgcctgctgaggtattttcctgggagccgccttatgtaaaaatttggaaaagcagcggcctgggcctagggcttccatgttcattgcagcacggttcacagtagccaagatatggacgtgacctatgcgtccatcagcagataaaaaagatgtgtgtgagagagatatacacacatatgtgcgtgtgtgtgtrcacacatatatacacacaaaatggaatattattcagccatgaaaagaaggaaattctgtcatttatgacaacctgggtgaacttggaggacatggagtagaataagccaggtacagaagaaggacaattctgcatattctcacttagatgcggaatctaaaaaagttgaactcatagaagcagaagaatggtggttaccaagacaaaatcttgatattatcttggttcttagaaatgcaggatattcacctagactgtcatgatgtggttaaaatgggtgaagatgctgcgtgacacagggagaggcagcaggacttagaaatgtgtaggctttataagtttgtaaaagattaaaata

SEQ ID NO: 698940 - DNA, 604 bp, Homo sapiens
catctaagggcattcgatatgaatcttcaaaattctgtgcttgctacaaagcacgcctgctgaggtattttcctgggagccgccttatgtaaaaatttggaaaagcagcggcctgggcctagggcttccatgttcattgcagcacggttcacagtagccaagatatggacgtgacctatgcgtccatcagcagataaaaaagatgtgtgtgagagagatatacacacatatgtgcgtgtgtgtgtacacacatatayacacacaaaatggaatattattcagccatgaaaagaaggaaattctgtcatttatgacaacctgggtgaacttggaggacatggagtagaataagccaggtacagaagaaggacaattctgcatattctcacttagatgcggaatctaaaaaagttgaactcatagaagcagaagaatggtggttaccaagacaaaatcttgatattatcttggttcttagaaatgcaggatattcacctagactgtcatgatgtggttaaaatgggtgaagatgctgcgtgacacagggagaggcagcaggacttagaaatgtgtaggctttataagtttgtaaaagattaaaata

SEQ ID NO: 698941 - DNA, 604 bp, Homo sapiens
catctaagggcattcgatatgaatcttcaaaattctgtgcttgctacaaagcacgcctgctgaggtattttcctgggagccgccttatgtaaaaatttggaaaagcagcggcctgggcctagggcttccatgttcattgcagcacggttcacagtagccaagatatggacgtgacctatgcgtccatcagcagataaaaaagatgtgtgtgagagagatatacacacatatgtgcgtgtgtgtgtacacacatatatacacacaaaatggaatattattcagccatgaaaagaaggaaattctgtcatttatgacaacctgggtgaacttggaggacatggagtagaataagccaggtacagaagaaggacaattctgcatattctcacttagatgcggaatctaaaaaagttgaactcatagaagcagaagaatggtggttaccaagacaaaatcttgatattatcttggttcttagaaatgcaggatattcacctagactgtcatgatgtggttaaaatgggtgaagatgctgcgtgacacagggagaggcagcaggacttagaaatgtgtaggctttataagtttktaaaagattaaaata

SEQ ID NO: 698942 - DNA, 2289 bp, Homo sapiens
tgaacraacctcttatttcctcagccaccttgtgttcccccagcacttggctgagatgaatgtgatattttcacaaggaaacaaaaaaggaacaacaaaactaacaaacagattgcaaaagcatagaaatggatgttgatctatctcagataatgttttatggctaacgtgtagaaatatattagtgaaacagtcaaaacctaaataacaagaggaaaagaacacatactcccacaagcaggcacacacacacacccctaccaaaattatatacagttgaattagaaatgcttcagaaaacatttattcataatggttaaatttataaaacactatatccagtagtcactgctctaagggctctacatgagttatttaatgcttacatgtcattttcttttcttttttttttctttttttgagacagagtcttgctctgttacccaggctggagtacagtggcgctatctcggctcactgtaacctccacctcccaggttcaagtgattctcgtgtctcagcctcccaagtagctgggattgcaggcatgcaccaccacacctggctagcttttttttttttttttttttttttttttgtatttttagtagagatggggtttcaccatactggccaggctggtctcgaactcctgacctcaggtgatccacccgccttggcctcccaaagtgctgtaatcctccaaagggattacaggagtgagccactgcgccggccattttcatctccattttagagatgtggaaactgaggatcagagagattagggtaaaaagattgttacatttacttgctagggagtggcataggcaacattcaaatccagacagtctggcagtggagtccacaggcctggccaggaggctatgctgggtaggtctactatgtgttaggcattttatgaggtgttttatatagattagctaattcaaactgtgacataggtataattatctctgcttgacagatgagaaaacagaggttaactaatttgccaaaattataaaactagtaaatggctaagctggattttactaacttgccaaagttatataactaataagtggctgagctcggttttaaaacttgattaaattatgttcaggacacattgcctatgaaggcaacatgtaatattttaaagaattaaaaataattttcttttcatttttgatttacacatcaaggaataggattcaagtatctgagcttttttttttttttttttcccatggtgctccttgtcctttaacaatgcctgataaatgagtcattaccatacctcactacacacaggggagatgtgatttaatttccagtctatagccaacaccaaacctggggttttgaagggtgcattacaactggctttaaatgtacttgatttttctccaggagaaaaaaaatcttcttagacatagaaagaaatatatccattaagtatcaaacactatttcatttctatgtaaatctatggataagataacttagtgatttcatatttccctgtgaatgcaataaaatctgatggaaaccaaagaaaaaatatctacaccaaatctttcaatatgcattcctcagtacattccagagcttggagcacatgcaggaaagtatggaaaaaatgactgcctgtgttcttctacttagatttaattttccttttgagcctttagtgtgagcataggtgtggtgttttattgtacatttgtcacatgtttccaagttgccactgaattaagcatgtgcttcttgaatataagaggaattgaaacagaaaaatttcttaaaggaaccattgcactctctgttcctaaatagagaaatatctgcacatttaagcataaaatggagagacttttatgcttgcaaccatactcacaatgccctacttttataatagtgggtcttactcgaagaaacattcattaactaattattgtggttaaattatgcttcagggtcttcacaaaaaaaaatccacttttcacagatcttgaaatcctggaagttctaaaaagaaagtagttccacaaatgggaattgccagtagcatttaagggctggtgattagaaaaagaaaagcaaatacaatcataggtaactccatgactcttttaaaatagaaaagtctctctggcagggcgcagtggctctcgcctgtaatcccagaactttgagaggccgaggcgggcggatcaccagaggtcagcacttcaagactagcctgaccaacatggcgaaaccccgtgtctactaaaaatacaa

SEQ ID NO: 698943 - DNA, 806 bp, Homo sapiens
tctaacaaacaaccttcaagtcacaataacaatacaaccaaggtttttctttttgctggttcagattacatctctattagtgcaacagagggcttctgttcagcacagtcactcagggactttccttatcatcattctaaaggaaaaaaggattcctgagagagtcttgcagtaacaactgggtgttcaaccctccagagtgacacctatcacttcttcctacaactcatttgccagtcctaatccctacaactgcaaatgggccaccaagtgcatttaatatstgtctgaatttggggaatataaaagcttttgccaagagctctaatgactaccaacagttacctcaaagaaggacttctgattttgaaaacagcattttcctttttaccagcaaattgtaaagtgctgagtgaacagagggaaagtagaacaagccccattggattgagaggcttcatgggatggaagtcagaaggagaggaccctgtttatttggaagcaaaaacaggtgttagaaatggaaaaatgaaagagggagaccaatttactatgcaactttgttcatatcaattttgcttaaaattacattgttttaattagagtccattattttaatgcagatatactttaaaatcacataaaataatcaagattgttcatgagaagactgtcaccaaaaatactgcatacatttatgtttgtggggtattacaatgaacaaaaccaggttaattaacctgaattaaaaatagttgaaatttgaaatgtacatacactaaggtttatgtatacaagtttctatg

SEQ ID NO: 698944 - DNA, 1156 bp, Homo sapiens
actaagtttacgccttcttataaagatatacagtatagcatataagagtgtgttccttagtactgactggtgtagaataaataaataggtcagtggaacagagtagagagcctagaaatagacctaaatatatatagtcaatttagttttgaaargatgggctgtgtgtgatgactcttgccgcctgtaatcctggcactttgggaggcagaggcaggaggatcatttgagcccaggagttcaagaccagcctggccaatgtagtgaaaccctagtctctacaaaaataaaaataaattaaccaagcatggtggcttatagctatagtcccaggtactccagaggctgaagtgggaagattgtttgagcccaggaggttgagattgagtgggtggtgatcacaccactgtgctccattctgtgtgacacagtgagactatctcaaaaaaattttttttaaggaaaaagtcttttcaaaaattgcataagcaaactgagtaagcatgtgaaaaaaaaaaataaacctcaaccgaaacctcacactataccttcatgaggtaaactgtcagcctactgtaaaagctaagactataaagcccccagaaggaaaagacggggaaatatctttgtaaacataggagacaaagattttgtagaaataaaaaaaaatgataaactagacttaatcaaaatttttaaaaatttgctcaacaatataaactactataaacataaaaaaatcaagccataggctaggagaaaatatttgcaattaacatgtcaaaaaagactaagacttgtatcaatcaacaatatataaagaactataaaataataatctaaagacaaaaaactccatgtgttcccttaaaataaagaacaattaaaatgggcaggagacttcaaaaagatgtgtgaatgatcagaggcattttttaatcaaggaaatgcaaattagcatcacaatgaggtattatttaacaaacacccactgaaatttccaagattatatatgtaggtatacacacacacacacacacacacacacgtatatatatacacatacacacacatacacatacacacatgctcaaataactccaaatgttgggcagaatacagaatacaattggaactccctcatgtattgcctctg

SEQ ID NO: 698945 - DNA, 1110 bp, Homo sapiens
tccctatagaagtgaatctgaccgaattaaggaattttattttgtcactctcaataaaatgacaaaagcaacacatgacaattcctccattatttatttcatgaacacactcattaaaccaagctgcaggattctcagttgtgcaaaagtacacaggacacatttagtaccatacacaaggacatagcacctttgattagaagtatgttcaatacattattgtgaactacactaaaaataatgatttttcataagcaaaattctcagagtaacctgcaaaaacatccaccagatgaactgggttgaaaacatttaacagttccctctctaatgcaagttgcttctcagtattgggcaagttttctgtcttggtgtttaagtaaaaaggcatcttttatttgtgttaattccttgcaaacatagtgaatgttgtgagtagttattttcactactgcccagacaaaaggaaaataaacttttttagttaatgcttttgtagtttttcaaattagatcttttagtagcttccttctaaaatttcctccttcagccastgagtttatagtgtattcaaagctgagaaactaattatgggcatttcaattgccttgtgcacatcctgctcaaatacgaccacttccagagaaagctgggactacaggtgttcagtaagataatctctccaattctataccattcccttcaccatccataatatttatttatttatttatttatttatttatttattttcagtcggagtctcactctgtcaccccggctggagtgcagtggtgcaatcttggttcactgcaacctccgcctcccaggttccagcaattcttgtacctcagccttctgagtagctgggattacaggagtgcaccaccacacccagctaatttttttatttttagtagagatgtggttttgccatgttggccaggctggtctcgaactcctgacctcaagtgatctgcccaccatccataatatttaaataagcatattgacttcttcttaaactaagggttaaatataatattttattttaatagttcaggttcatgtatctcatatcttatgctcaagttaataattcctatttgc

SEQ ID NO: 698946 - DNA, 1110 bp, Homo sapiens
tccctatagaagtgaatctgaccgaattaaggaattttattttgtcactctcaataaaatgacaaaagcaacacatgacaattcctccattatttatttcatgaacacactcattaaaccaagctgcaggattctcagttgtgcaaaagtacacaggacacatttagtaccatacacaaggacatagcacctttgattagaagtatgttcaatacattattgtgaactacactaaaaataatgatttttcataagcaaaattctcagagtaacctgcaaaaacatccaccagatgaactgggttgaaaacatttaacagttccctctctaatgcaagttgcttctcagtattgggcaagttttctgtcttggtgtttaagtaaaaaggcatcttttatttgtgttaattccttgcaaacatagtgaatgttgtgagtagttattttcactactgcccagacaaaaggaaaataaacttttttagttaatgcttttgtagtttttcaaattagatcttttagtagcttccttctaaaatttcctccttcagccagtgagtttatagtgtattcaaagctgagaaactaattatgggcatttcaattgccttgtgcacatcctgctcaaatacsaccacttccagagaaagctgggactacaggtgttcagtaagataatctctccaattctataccattcccttcaccatccataatatttatttatttatttatttatttatttatttattttcagtcggagtctcactctgtcaccccggctggagtgcagtggtgcaatcttggttcactgcaacctccgcctcccaggttccagcaattcttgtacctcagccttctgagtagctgggattacaggagtgcaccaccacacccagctaatttttttatttttagtagagatgtggttttgccatgttggccaggctggtctcgaactcctgacctcaagtgatctgcccaccatccataatatttaaataagcatattgacttcttcttaaactaagggttaaatataatattttattttaatagttcaggttcatgtatctcatatcttatgctcaagttaataattcctatttgc

SEQ ID NO: 698947 - DNA, 582 bp, Homo sapiens
tggaaagcagggtttaatagcatgttttccccactgtgcctgagaaaagatgcaaacccctggttaaaaaccttgcacgtggatacatgtcccaggagcactaatagagaaatggccagggagaagaccagaaggtagaattcctggctccccaaggcccattcagcatctagaactacactgtccaatatggtagccactagccacacaggctccttaaatttaaagtaaccaagcttaaatgtaatttaaaatgtgttttcttagctgcattagccacatttcaagtgctcaataactatgtatggctcaagactactgcactgtacagcacaaataaaaaatgtttccgtcatcatagaaagttctattagacagcagtagtcagcaaacttttccgtaaagggcttacaagtaaatatgtttggctttgtggacaagaaagtctctgtcacaattattcaatactattgytttagcataaaagcagctgtagtctgtatgtaaataaacaagtatggccgtgttccaataaaactttattttaaaaaacaggctttggtctgagggatgcaacatgcc

SEQ ID NO: 698948 - DNA, 1198 bp, Homo sapiens
tgttgcccaggctggagtgcaatggcacaatctcggctcactgcaacctccgcctcccaggttcacgcgattctcctgcctcagcctcccgagcacctgggattacagatgcccgccaccacacccagctaatttttttgtatttttagtagagatggggtttcactatgttggccagactggtctcaaactcctgacctcgttattcrcccaccttagcctcccaaagtgctgggattacaggtgtgagccaccacacccagccaaggattgttacatttctatcctttatgtcaagtcagagcctggttagccctctgagataggaatgaatctgagattccaaaaaataaatgaacttgaagataggaaactttcccagccccatacagactttctactgagccagtgttttgttggagatgtgtcactttcttttaaggaacatacagaagaccttggggtctccgtgtctgtgtgtctggtacccttcagtgtgaagcaaaacacatttggaaatgtgaaattttgactgtgccccctttcaactgttcaccattctttgatttatttaatgaatatttatcttctgcccacagggacagataactgacatgttgagaacttaaaagtaactggtcttatcttcacctgcctttccataaacatttatattcatagcatcagtgtcacaatctatcattgattgattttgaagttgtgtgtttctcagagccttacttacaccagcttatgaacgaacagataagagctagcaaaatttctgctcagagtctgtacataaaatggcaccactggctatagtttatactggaaaatagctttcatctttcatggcacacaataggcccacactaatggcctggtgatgaatgctgatgctgagagctctgtattgaggtcaattacaagaccacacctggactccacaggaactgtgctgggaggcatcaatgtctccaccaagcgctcgggggtacagtcgtagtgaaggagctgagtatttgcccaccctgcttttcaggttcaagtgaaaagactttgaaattataccttaaaaaaaagaaacttgtgaaacataaaatataactttaataacagaatgtgtgacactatgaatcttggagaatggcttaagaaactcagcaagcatttttttctagcccttctctaatga

SEQ ID NO: 698949 - DNA, 586 bp, Homo sapiens
gcatgagggtagtgtttatttctttgacctctctgctactccagacttctttgtaagatctagatttgggaagaagtagtatactgtaattataatagtacatgctatctttatttttaaatgacaaatagtaattatatataattatgaggtacaatgtgatgttttgatatatgtatacattgtgaaatgattaaattagcctaattcacatatctatcatctcttatacttgcatttttatggtgaaaacaattaaaatctactctcttaaagatttttcactatacgttattacaaactctcatcactatgctatgcaatagatctctcgagcttaatcctccttgtaactgaaattttgcacccttcgaccagtttctctccgttccccatcctgctcccctatactctggtaaccaccattctactctctacttccatgagtttgatttttctagattccacatataagtraaatcatacagtatttgtctatctgtgcctggcttatttcacttaacaaaatggcctccaaattcatccatgttgttgcaaatgagagaatttccttctttttaaaggc

SEQ ID NO: 698950 - DNA, 1750 bp, Homo sapiens
cactaaaccataaaaaagattttcttgaactaatcagaacataaaaactcttattttaagcaaataatattccaaacagtaagtctccttttataaagacaaatgacggtaaacagaccaaatcagagagtttgtaaaattcttattattatgattgaaggagaaaagctcattcgggttttggtattgaggctgatacagatacgaacgttctcaacgtgcatgatttacaactgccattataccgtgatggcaaatcttcaaacagagttgaaacaattttgatcatcctccctccccatgaaaacaaaaaatgctatcacaatagaaaaagaagaaaaagaaacataatgggtaactgaaagtcattgacttgatttaaaatctggtcaaaagattgtggctctctgtaaacaaagaagcatagactgtctcattctttcccacagtagtgttctgatgcaagaggatatatatttgggttcccaaattcttgcctccctaagggaatttaacttctatacaattctcagcaataaatatgaaccaccatttcacactgtaaaacatttctgtcaacatagcagatgctaaagatgatagatttgactaagaacacatccagataatacaatgtattttgagtgatttggaaagaaaagtaatctctgcaggtgaagagaatattctaatgatatacttaatttagacaacgtaattttttaaatgtttctaccttttttcttttcttaattttagcaaggaaaaaatatttagaatgctcccagaattgaactttaaagtaaaagtcacaatgttcagctatctatttttgttttatattacagatttatgcatggcctgcgttaaataccatgtgagttttatagagaaaagagaggacatagacattamctttaagaatatcccttatttgcttttaacataaaatgtcaatctaaaaactaaacattttagatggcctttgtggaaattttcagctataaccatcagaaaaaatgggcctgagaaacactgtcaatttttttaatccattgaaccaaatcattttgcaaaatattgtatttgtacatttttaaaactattatagtttacatttagaatataaaacagcagggcataactctttcaagtaactttcaatttttaataagagagtagatctaggaacaaacgtctaaggagtgttttattgttgttgttgttgttattcaagatatgacccataatacgtagatgtggaaaatccctgtttttccagtggtcagatgttttgaacttgtgttgactgaaccataaaaatggctgactccaccactacaacactaaggaaattgaacctgaaagatacatttccttgttttgttcctgggtttttttccttctgaattacttgattttcctaggaacttcagaatctcttttactattgttttgaaattattaattaacctctcaagcaagtgaataaaatcgatgtcaccatttaaggtgagaaaaagaaatgctctgccgcacaatttattatccttttttagcactgcatgattttaaatcaaggtttagatattctggaatggaaaaattgcactagaaaagaataaatttatagctacagactcaaagggccttgttccctaaagaacctctgcttccaagatctttctgattcatcacaaagacctaaatgtggggagaaatatttttaaaaagttaaaaaaagaataat

SEQ ID NO: 698951 - DNA, 618 bp, Homo sapiens
aaatgtattccttgaaatgtttgttcaattggctattaaatagatgttaactaaaacatggtttggtgrtatgtcagtcagctattgctgcaataatgctgagtaacaaagaagccccaaactcagttatctcctctactgttgttttccctgtttcccggttgttcccaccccaccaacctcctttttaatactctattcttggccaggtgtggtggctcacacctgtaatcccaacactttcggaggccgatgcaggcagatcacttgaggtcagaagttcaagaccagcctggtcagcatggtgaaaccctgtctctactaaaaatacaaaagttatctgggtgtggtggcaggtacctgtgatcccagctactgagaggctgaggcatgagaattgcttgaacccaggagatggaggttgtagtgagctgagatcactacactgcagtccagcctgggtgacagagtgagattccatcttaacaacaacaacaacaacaacaacaacaacaataacaacaacaaactctattcttgttattggttggcagctagtacccactaagatgcatcagaataattaggtatcatttaatattaaaaaatggggacact

SEQ ID NO: 698952 - DNA, 618 bp, Homo sapiens
aaatgtattccttgaaatgtttgttcaattggctattaaatagatgttaactaaaacatggtttggtgatatgtcagtcagctattgctgcaataatgctgagtaacaaagaagccccaaactcagttatctcctctactgttgttttccctgtttcccggttgttcccaccccaccaacctcctttttaatactctattcttggccagstgtggtggctcacacctgtaatcccaacactttcggaggccgatgcaggcagatcacttgaggtcagaagttcaagaccagcctggtcagcatggtgaaaccctgtctctactaaaaatacaaaagttatctgggtgtggtggcaggtacctgtgatcccagctactgagaggctgaggcatgagaattgcttgaacccaggagatggaggttgtagtgagctgagatcactacactgcagtccagcctgggtgacagagtgagattccatcttaacaacaacaacaacaacaacaacaacaacaataacaacaacaaactctattcttgttattggttggcagctagtacccactaagatgcatcagaataattaggtatcatttaatattaaaaaatggggacact

SEQ ID NO: 698953 - DNA, 577 bp, Homo sapiens
ttctccaagacacatacagacatgcacacacgcaagcgcaactttgcagaatgcaaaattttcarttaacaaattgggagtctctttatggcagaactgggagtattttttgtttattaccagatggaaagcatctatcatattttatccttttctagacctcaggcataaatttaaggcactgtcttctaagaaataactcgacttgtttgactactaagaatactgcatcctaatcacccagcattaagagtggcatttgtttcaattttttgcataattagctcatgtctttacttgatatcctttaacatttatgtaaagtggtgatcatgaataatactctgtcaagacagagtgggccctgtttctttggctgggcttaggtattatgtcattgcccttggctgaggcacctaaggaataccaataagaaaaaggcacatgactaagcattttaagttcttcccacaatgtgcttggctaaggcactagccaaagagactactttaaaaatatttatttgcaaagagaaataaaacaaatgagtaatttcttgaagatatatcacatttca

SEQ ID NO: 698954 - DNA, 668 bp, Homo sapiens
gttacccagcaaggcagcagatgacaggaatcagaacttggaaatggaatcataagcacctttccagaacacattcaataaaataaaaatataacgaaacacctctttctctccaactccttcattctgcagtgttccatctgcttttgctctgccattttctcttgccaaatgccttgttagccaaataaagcatgtttaatacagtttatttaattcactagctgacaggactccatgaaattaacaaaggctacatgtcttggtatttgaagatgatgtataattccattatgcttaaaaaattagtagcaatattatatgggtgactctaaactctatcacaataatctctagaactgtttaaaatgcctgggtccattccccgagaactgaagacacaaatgtggaggcaacagagcccagcatgtgcattctgaaaatgttccattagtgattattatgctcatatctgcttggggatgactattctacttatgataacagcacataatggcagttaatatkttaagcaattacttatcatgtaccttattctgctaagtgcttcacatgtattaacttatttattccaatgttgactcaataaggtaggcatttgattgtcggggacatctcagacttagagatgttaagtagcttcccaa

SEQ ID NO: 698955 - DNA, 735 bp, Homo sapiens
cattttaaaaaagaaacatgtcaaatcaataaccaaactttactcaataaaccataaaaggaagagcaaacaaaatccagagctagcagaaggaaggaaataaagattagagcagagataaatgaaattgagaattaaaaaattatacagagatcaacaaaactaaaagttggttcttttaaaatatcaataaaattaatatacttttacatagactaagcaaaacatctctattcagctgacttttttttacaagggagccaacattattcagtggggaataatagctttttcaacaaaaagtgctgggaatactgaatattcatatgmaaaaaaaatgaagctggacccctacctcacattatatacaaaatctagattggatcaataatgtaaatatacgagtgaaaaccatacatgcttagaagaaaacatggaaataaaacattgctgtggattggcaatgcattcttagataatacaccaaaaatacaagcatgaaacaaacaaatgtagccaaaatgtaccagaatctgaaaacatgtattatctataaagaattagaggggaatttggtgaaagaaatatgggagaatgggatattgctctgtgaatgcttttgtgcataattgtacatttttaattaagttaatcttttacactctcaaagtgtgatattaagcaagcaaagataagttattacaagactctaaaaccgaatgcaatgagaaacaa

SEQ ID NO: 698956 - DNA, 2182 bp, Homo sapiens
atgtattatggaattaagttattgtaagttctgcctctttatatatgtatgtctacgtatttgtaattggttttcaagagtaaaatcaaacacatttacacatgaacaacatttaatgttttcagtgggacttttatactgcatctctttcaacataatgttaattgttaagacttatcaggagaaatattaatcttataaaattgtaagaatgtattgaggtatttttatagctgcacctttagctctatctttgcaggttggaaatatgccttgtaaaatatctgtattcattaatatatttatatttattgtaatattttaatggctaaaaagaaatgcatttcattagtaaaatagtagatgaccatttttcgctcaacaggaagaatatgtcttggctggtaagctagaatgtaggcataatgtagaaatgaataaatgaagtgattgtcattcttacattcttatgactatgacaaagaagggtactgaagtggagtttatgcaaaggttgacgagatttatgggcartggtacagaggttgatggtcctaattattccaggcatggtggctgttgtcaagcaagttggcaaggtctataaatgcaccatattcaggactcaatgatgttttctctgcattaataactaacttcatgaaataagagaaagcacttaagtaagcagggctggaagttggtcaccaaattaaatccaactgaaaacttgaaataaccttcatggagtcataacaacatgcattggttaacttttcttgagagttaagactggactaggcaacaccaaaaaatgaaataatcgatcaaattttaattactgtcatcatacatagattatatgtatttattttttaattaccatgtttaagagtgcaatcttggaggaataccaccagaagttgaaaaatgttttctcggctaggtgcagtggctcatgcctgtaatcccagcactttgggaggccgaggtgggcggatcacgaggtcaggagttcgagaccagcctgaccaacatggtgaaaccccatcgctactaaaaatacaaaaattagctgggcctggtggcgcacgcctgtaatcccagctactcgggaggctgaggcaggagaatcgcatgaacccgggaggcggaggttgcagtgagctgagatcgcaccattgcactccagcctgggcaacagagtgagactccatctcaaaaacaaatacataaataaataaataaaataaagtttagaaaaatgttttctctaagacaaaggaaaatgtccagattactggactgtttctgttgatgtggtgacccaactgggtaataaaaaataattaaaataggatgctaatacatgtgatgggttacctctgggaagtctctgcccaatctgtcttttcagtagactggatatcagtaacagaaaggtattccaacacattctgacctgcaggactacaagcagagaggttttgacttctctctcaggtatctgagggaaactgactataaacaataatcagacttctgggattagaagacaggtctttcactgagttgtggcctcctctgtatgccttcagtaatcattgatatgataataaatcaggtatgtagaaaaggtgatggtaagacatattttaacaaaggaaatttccaagactcaagatatgttgaaatttccatcaaatctaatctttgtttaagaggcccctttttaccaagtgacatctagatatcggtggatggaaagacagggaacaatgttgtgtaatggcagaagaaatgagtacctacagaaatcagatcgctcagcctacatctaagtgaaaaggctgcaaagatttggagtaataatgtgttttggcttttcctctcatcatgaaaaaagataaattcaggaaagaattagcctatttacatgaagaaatgaaagtaaatacaaataataatttaggtatttaaaaggttggaaaacctgattgcctttatagtgcagaggtataaaataaaacagaaggcactttaaatgataaagatattaatattcaccctcagacatgaatattttcttctcacctgatgcaattatttctaatagactcgagggagctgccattaaattgagagaaaaaccaagaggtcatggaacaaaagaaataaaaaa

SEQ ID NO: 698957 - DNA, 1499 bp, Homo sapiens
ctgtctgagcatcctcctggtagagggaaatcaatggattccagaccagctgcttgactccttttttgtctactatttttcttgtgcctatagcagtgtcgggcacatggtagcctgaaaaatcattttcttagtgactaagttgagtaagtatcaccaatagccatgggagttgtggaacactgtgttcagaaagaatacggagactccatctagacccctgtgaaataatagaacatgatatggttgcaatgtcttaacatatgagcataggagagaatcgtgacagcccaatgttcacacattcttctctggagctcttataaatagaccatagtcttctttgaaaaggattaactaataaaaatgagttggtgccctaatgtcaacacctataatttaacaattttcaaaataaaaaatttagaaaaagatgatagtttttgaagtcatgaattctaagctttgtccagatttcccactgtactgtcataaggctattacattatttctattctttggtttgttattaattatcttcaagaacttaatgrgactgatgattgctttcattgagacaggtggccttcatccagatctgtactgtaatccaaaaatgattatcctcaatcacctatatttgcttgccagggcttctataacaaggtgtcacaggctgggtgcttaaacaacagaaatttatttcctcatggtctggaggctggaagtctaagatcaaagcgttgatagtgttgatttctcctgagtcccctatcctagactcgtagatggtcatctttcccctctgccttcacatgatctttccactgtgtgtgtctgtatcttaatctcttctaatgaggagacaaatcatactggataaaagcccatactaagggccttaaataccttttaaaagatcctattcccaaatacagccatagcctgaggtactggtaattacttcaacatacaaacttcagggagggggcacaagtcaccccacagcatcatccaaagcacagacttgtcctactgttatacagtatggttatgttttcagtactcttttattctacttgacgttaagaatagtaaatgatactgttttatcatggaaaaatatttggctttcttctccaataagaatcatttgtgagtgcatgagatgtgcttttgttaatacaccaattactatgcttttgcaaaagcacattattgatggtaccaaattatatacaaaaattatgaaggcagaaacctctggtacaagaggtgagtaagatatccaccagttcaccatttaaaccaataaatctctgtaaaagaaacaattgggaaataagaaacctattcaaaaataatttctcacaaataataaatatatgtgagcaaaatattattagtttctaccatcactgaaaactctctctaactgatgaaaaatatacaaaaacagtacagtgaaaattagagtttccaaataatctctgatttag

SEQ ID NO: 698958 - DNA, 1499 bp, Homo sapiens
ctgtctgagcatcctcctggtagagggaaatcaatggattccagaccagctgcttgactccttttttgtctactatttttcttgtgcctatagcagtgtcgggcacatggtagcctgaaaaatcattttcttagtgactaagttgagtaagtatcaccaatagccatgggagttgtggaacactgtgttcagaaagaatacggagactccatctagacccctgtgaaataatagaacatgatatggttgcaatgtcttaacatatgagcataggagagaatcgtgacagcccaatgttcacacattcttctctggagctcttataaatagaccatagtcttctttgaaaaggattaactaataaaaatgagttggtgccctaatgtcaacacctataatttaacaattttcaaaataaaaaatttagaaaaagatgatagtttttgaagtcatgaattctaagctttgtccagatttcccactgtactgtcataaggctattacattatttctattctttggtttgttattaattatcttcaagaacttaatgagactgatgattgctttcattgagacaggtggccttcatccagatctgtactgtaatccaaaaatgattatcctcaatcacctatatttgcttgccagggcttctataacaaggtgtcacaggctgggtgcttaaacaacagaaatttatttcctcayggtctggaggctggaagtctaagatcaaagcgttgatagtgttgatttctcctgagtcccctatcctagactcgtagatggtcatctttcccctctgccttcacatgatctttccactgtgtgtgtctgtatcttaatctcttctaatgaggagacaaatcatactggataaaagcccatactaagggccttaaataccttttaaaagatcctattcccaaatacagccatagcctgaggtactggtaattacttcaacatacaaacttcagggagggggcacaagtcaccccacagcatcatccaaagcacagacttgtcctactgttatacagtatggttatgttttcagtactcttttattctacttgacgttaagaatagtaaatgatactgttttatcatggaaaaatatttggctttcttctccaataagaatcatttgtgagtgcatgagatgtgcttttgttaatacaccaattactatgcttttgcaaaagcacattattgatggtaccaaattatatacaaaaattatgaaggcagaaacctctggtacaagaggtgagtaagatatccaccagttcaccatttaaaccaataaatctctgtaaaagaaacaattgggaaataagaaacctattcaaaaataatttctcacaaataataaatatatgtgagcaaaatattattagtttctaccatcactgaaaactctctctaactgatgaaaaatatacaaaaacagtacagtgaaaattagagtttccaaataatctctgatttag

SEQ ID NO: 698959 - DNA, 852 bp, Homo sapiens
gctctcaccccggggtgtgagcccgagactggcaacttctgtgccacttgccctcccctctcccctctctcaccctatgggctggaatgagaagtgggcagagccagggtgctttgcttacacaggcaggaatgatgtttcttttgcaaggcagagcaatgtgacaggcatcaaggtcacytgctggccttgggccacctgcctgagcacgtacagctccatgagagggaaagggatccctgtgtagtctcagctcctatagttttgggtcccaaccaatgcaactacttcttggagatgttgtgcagattattaaggtatcatctaagaatttatacatgatgatttctataatcttttaattctatgacctccccctcacccatcttctttccttcaaaaccagccatcctgacagttccccaaccatagtcaaacataagcaccctattatttcagtcactccatttctttttaagtcccaaggttctaaaaagtcaagaactttccatctcctacttctcttgtaccccgacatccagtctcttcccatggcacatcgtcttttcctttagaaaatatcctctgcaatgacacaaaacatctaagttctatttgcggttatctaaacttaaagactggctttaaaagggtgatgcattctttagcctgcaagtgatcacattctcctacatctgttgatgttccattagggcaaaataacccagaaggccaagcttcacaaaagtcaaaggttccgatgatacaaatatgctttggttccaaatgcagcatgaatcaaacatagttttatattaatcaatacacccagctggaagaatattctgattt

SEQ ID NO: 698960 - DNA, 1004 bp, Homo sapiens
aaatgatacaaatttcgctgtgattactgttctgatttgaatcgggcatgttatagaagccttctgtctatttcctctgtctccagtgcttgatctaacaggttatgcttataaagactagaataaaacattccttaaatggtatcttctaattaatccttcaaaactcatttttaaaatcctttaaaaattttaaaacagatgatgataataaattatcaggaaaagctaataaytataatagtcctgcaaatatcatgacatatattgattggtctgaaactatacaacaactgaaagcaatagttacattattatttaactattattattactaatctgggtgtttttctttagccataggccttcatatttacctagaatctgtcctccttcctaccagaatgtaattgagtaaatcaaatctgtgataatgaccatgccagagatgttacatttaaagggaaatataatgtaattagacatgacaagctcatttaaaatgagtgcatttcatatgtggggttaatgcctacaccatcctcccaggacactggcttggttcatgttgtgtagcttagggcaggggtccccaagccctgggccatggaacaatactggtccatggcctgttaggaaccaggccacacagcaggaggtgagcagcaggtgagcgagaattacagcctgagcttcgccttctgtcagatcagtggtgtcattagattcttacaggagtgtgagccctattgtgaacaatgcatgtgaaggagctaggttgcacacgccttatgagaatctaattaatgccagatgatctgaggtggacactttcatcctgaaaccatcttccccaccgacctcagtccatggaaaaatggtcttccatgaaactggtccctgctgccacaaaggttggggaacgttggcttagggaatcccaactctacaggcagtatggccaggagcactgaaaacttggagctcagagagatggaataatc

SEQ ID NO: 698961 - DNA, 612 bp, Homo sapiens
tgatagcacgacagggtgactatagtcagcaataatttcttgtacattcagaataactaagagagcacaacgggaatgttcacaacacaaagaaatcatgaatgcttgaagggatggatggctgccccatttccctgtgatccgtgcacactgcacatctgtgtcagagtatctcatgtatcccacaaatatatgcacctcctaggtacccacaaatatcaaaaatagatgtgactgaaggagcttgtagcacaggtgacactgatgggaaaaataagtcttgggaagaagccaayactatggctgcagaaaacagagaacacaggggcccttgatgctgtaatcaagctgcctggtcctgaaactctcactgcctctgctgccacatatgtgagccactagatttgcatcctatttaagccagtttgagttgatttttctattactgccctcaagtgacacaggcagtcatggaaggtgcctgtgagaaagttcaacaccagaaccaagtaagaccaatggatggaaatgatccagccctgtgaaagcctcacagaagggatttgagcatgaggaatggaacccatccagaaataagaagacgcttggtgc

SEQ ID NO: 698962 - DNA, 806 bp, Homo sapiens
tgaggtttcactgtgttgctcaggctggtcttgaactcctggcctcacggaatccttctgtcttagtctcccagtgggctgggattataggtatgagccacctcacctgacctgcgacgatttttcaayaatgtaatttctcttttacagagccacctaagctgaagattcccttgagaacaagtactgtcctgcggtttcatggcccttcttccatttgtggttcttgcgaagtggaatttaaatgacatcttatcaagatggataaaccctagtttcccagtgctggaatatagaaaatggatggacaagtaaatcccactcagcacccatagtccaggcatggggacctcaacacacctgagccccagacatcacctttcattgtgagtagctctgagatgacacttctgctgttcccaattccagcattaattggattagatagttattttatgaagaattttcatatgccacaatcctgaccatatcttcaagtgaacagaaaaattctattaaaaagtcaaccttctgtctcactctgttgcccagactggagtgcagtggtgcaattatggctcactgcagcctcaacctcctgggctcaagcaatcctcctgcctcagcctcacaagtagctgggactacaggtgcttgtcaccacacctcactaattttcccatttgtgttatatgtggattccacaggactgacttcgaaaacttgagtatgcgtggattttggtatacacagaaatgggagagctggaactaatccccccatataccaagggacaaattgtatct

SEQ ID NO: 698963 - DNA, 1698 bp, Homo sapiens
caccattttggccaggctggtcttgaactcctgatctcaggtgatccgcccacctcgccctgccaaagtgctgggattacaggcatgagccactgcgcccagcttcattatcactttcatcatcaggagggcaggaagcatccagcacaggagaaagatgtagactgggaggctaggcctgtctctacctttcacttttctctgcctgctttatattcgctggcagctgattagactgtggccaccagattaagggtaggtctgcccatttactcaaatgctaatctcctttggtaacaccccacagacacacccaagatcaacaaacctgcatccttcaatccaatcaagttgacactcagtattaaccatcacacagagggacaacggtaaggacagggctttgtgttttttgtaatgggttctcatgaggaactaaaatgactattatgaggagacgtggcttgcctacacactggctgcccactcaatcttatgtaagaactgaggaaattgaggttcctgtaaagggacccagcacactccctttcctgagtggcagggaaggaaggctcagtcttccgggttttcttctaccccacgtagaaccatgtaaagaccacgaggccatgttcagtgtcctaaacaatttgaagagggaagagaacttataggtatagaatattttaacaaagaaagtggaaaactgtctttctcttaaggaactgacatcctagaaaaccaaggcaatcacctaggaagtaggccaggagaggctgactgacagaatctaaaagcataaaaatttgcattgtaggccaggcacagtggctcatgcctataatcccagcactttggaaggctgagtggggtagatcgcttgagcccaggagttcaagaacagcctgggcagcataaggtgatcccatctctacaacaaaaataaataaatgaaaaatttacatggtcttccaataaatagggaatataatagaaataaaatatcttacatttgtcacaatcgttatgaaacacctagaaaaatggtgaagacacatataaggaaaacacacacaactttttatgagcttccagtttgaatattcaaataagattttaaaatactacatttttctgaaaatgaagatcaatttttgcaatggcatcaattctcctctaaataaatcagtgaatccagtgcaatcctaatcataagtcgcagcagaattttgagtgtttgtgtaactggaagaccagatgaaattatactgcgaaaaatgtgaaggattatgtaaaagggggagcttgtcattctggacttgaaacttactctgtaggattggtaaatgaaacaggaattgatagacatgtccacggaccaacatagagattctagaaatatattcatgcaaagccgactcttttggtcaagcgcgcgygcgtgtgtgtgtgtgtgtgtgtgtgtgtgttagggaggggaaatgcagaggggtttccaggactacttggtgcttctccttcaggtaattctggattccatcagctttcacaggtatctcttctgtgctgtcttcctgaagccatctgtggagtcaagcagtcatggctcagggacactttgaagtaggtaccagcacatctgcacggagcatcaggaggaaggcagatgaatacttaagacccagcctggccgctaaa

SEQ ID NO: 698964 - DNA, 1698 bp, Homo sapiens
caccattttggccaggctggtcttgaactcctgatctcaggtgatccgcccacctcgccctgccaaagtgctgggattacaggcatgagccactgcgcccagcttcattatcactttcatcatcaggagggcaggaagcatccagcacaggagaaagatgtagactgggaggctaggcctgtctctacctttcacttttctctgcctgctttatattcgctggcagctgattagactgtggccaccagattaagggtaggtctgcccatttactcaaatgctaatctcctttggtaacaccccacagacacacccaagatcaacaaacctgcatccttcaatccaatcaagttgacactcagtattaaccatcacacagagggacaacggtaaggacagggctttgtgttttttgtaatgggttctcatgaggaactaaaatgactattatgaggagacgtggcttgcctacacactggctgcccactcaatcttatgtaagaactgaggaaattgaggttcctgtaaagggacccagcacactccctttcctgagtggcagggaaggaaggctcagtcttccgggttttcttctaccccacgtagaaccatgtaaagaccacgaggccatgttcagtgtcctaaacaatttgaagagggaagagaacttataggtatagaatattttaacaaagaaagtggaaaactgtctttctcttaaggaactgacatcctagaaaaccaaggcaatcacctaggaagtaggccaggagaggctgactgacagaatctaaaagcataaaaatttgcattgtaggccaggcacagtggctcatgcctataatcccagcactttggaaggctgagtggggtagatcgcttgagcccaggagttcaagaacagcctgggcagcataaggtgatcccatctctacaacaaaaataaataaatgaaaaatttacatggtcttccaataaatagggaatataatagaaataaaatatcttacatttgtcacaatcgttatgaaacacctagaaaaatggtgaagacacatataaggaaaacacacacaactttttatgagcttccagtttgaatattcaaataagattttaaaatactacatttttctgaaaatgaagatcaatttttgcaatggcatcaattctcctctaaataaatcagtgaatccagtgcaatcctaatcataagtcgcagcagaattttgagtgtttgtgtaactggaagaccagatgaaattatactgcgaaaaatgtgaaggattatgtaaaagggggagcttgtcattctggacttgaaacttactctgtaggattggtaaatgaaacaggaattgatagacatgtccacggaccaacatagagattctagaaatatattcatgcaaagccgactcttttggtcaagcgcgcgcgygtgtgtgtgtgtgtgtgtgtgtgtgtgttagggaggggaaatgcagaggggtttccaggactacttggtgcttctccttcaggtaattctggattccatcagctttcacaggtatctcttctgtgctgtcttcctgaagccatctgtggagtcaagcagtcatggctcagggacactttgaagtaggtaccagcacatctgcacggagcatcaggaggaaggcagatgaatacttaagacccagcctggccgctaaa

SEQ ID NO: 698965 - DNA, 573 bp, Homo sapiens
agtggccagagctggcttcacagggtaagagccagctaagctccagggactttccaggaaaagtgtcccttgaaaagggtgtgaccttttcactgctcccaacagcaccctaaaaatggcttggccttttccatcccctgagctccatagagaacacagccagcagaggacacattctctgtcatccagaaatgggtttctcagccaagggacagcaggactggtagagactgtcaggccacacagctgcctgcacagcaccgccatgcttggccagaagggcgggagggatggcgggggctggctgtccacaggccgcgcatgtcccggaagctcactggaggtggtgcactttggaggggcgatgtcaggagacagcttcctcttgctgggctacaagattccacaagcacagcacgggactgattcccagtgctagaggtgaggcagttggccacgtatatatatgtatatrtgtgtgtgtgtgtgtgtgtgtgtgtgtgtgtgtgagagagagagaatttatagctatttatagaacagggcaggggcataccacagagggggcacaag

SEQ ID NO: 698966 - DNA, 2726 bp, Homo sapiens
ttctacagcaaggaaattttgatttgaaccaaagaatccttcatttcattttgtagcaggctccagtcccttttgggaaaggtaagggtatatataatgaataaataaataatatcactgtattttgcattggcagaaaaaaaatctgtatgtgcaagcaacaatcttttccttgtttcaatattaaattgcttacttggactaaagtaaacctttagaagtataaaactgcttggtattcgtatcagttagcataaattcaaaggaaatcaatcagcataaccaaatgacattgagtcaatgttgacttactcttctactggacttctttttttttttgagacagggtcttgctctgtcacccaggctggagtgtaggaatgatccccacttactgcaacctccaccccccagctcaagtgatctcccacctcaacctcccaagtaactgggaccaccccgccatcatacccagctaattttttttttttttgagacagagtcttgctttgtcccccaggctggagtgcagtggcccaatcttggatcactgcaacctctgcctcccgggttcaagcgattcttctgtctcagcctcccgagtagctgggattacaggcacaggctgccacgcctggctaatttttcttttttttcaggggaggtggggggacagggtttcactgttgttgcccaggcaggaatgcaatggcgtgatctcggctcaccacaatctccgccttccaggttcaagcaattctcctgcctcagcctcctgagtagcgtggattataggcatgcaccaccacgcccagctaattttgtatttttagtagagacaggggtttctccatgttggcaggctggtcttgaactcccaaccttaggtgatccgtctgccttggcttcccaaagtgctgggattacaggtgtgagccactgcgcccggccacctggctaattttttgtattttagtagaaacggggtttcaccatgttgccaggctggtcttgaactcctgagctcaggcaatccactcacctaggcctcccaaagtgctaggattacaggcgcaagccaccacacccggccctttttttgtatttttagtagagatgtagtctcatcatgttgcccaggctggtttgaactcaagtgatccaccctgtcctcccaaagtactaggattacaggtgtgagtcaccactcccggccaagacttctttttatttacatttcatgggaattatattttggagatgcctaaggcacagaaaacttaaatgatgctatagactgaattgttttcccccacccattcatgcgtttaacccctaacccccaatatcactgtatctggagacaggatctttaggaggtaattaaggttaagagaggtgcactgatcccagcccctctctctgccacatgaggacacttagagaaggtggcagccacaaagcaggaagaccgctcttgccagaagcagcagctgcaggcacactgatcttgggcttcctagtctccagaactgtgaaaataaatttatgtttatttatttacagacaaggtctcactctgttgcccaggctggattgcagtgtcatgatcatggctcactgcagcctcraattcctagactcaggtgattctcccaccttggcctcccaaagtgctgggattacaggcatgagctaccatgcccagccaattctgttgtttaagccacccagtctgtgtgttttgttatagcagccggcagactcatacaaatgacctgcctaaacccttgactgtctcctttgtagctttcaggtcttcatcttacatatgtcttcattatttccttttctgaagaaatgacacccagtccaccctagcaaaagtaagccccatgctcattctctgtcagagcacttttttgtttctttttttttgagatggagttttgttcttgttgcccaggctggagtgcagtggtgtgatctcagctccctacaacctccgcctcccaggttcaagtgattctcctgcctcaacctcccgagtagctgggattacaggcgcccaccaccatgcccggctaatttttatagttttagtagagacagtgtttcaccgtgttggccacgctggtcttgaactcctgacctcaggtgatccacccgcctcagcctcccaaagtgctgggattataggtgtgagccaccaggcccagccatcagagcactttttagaaagcatttatcctggccgggtgcggtggctcacacctgtaatcacagcattttgggaggccgaggcaggtggatcacggggtcaggagtttgagaccagcctggctaagatggtgaaatcccatctctactaaaaaatacaaaaattagccaggcgtggtggtgggcacctgtaatcccagctacttgggaggctgaggcaggagaattgcttaaacccgggagcagaggttgcagtgagctgagatcgcaccactgcactctagcctgggtgacagagagagactctgtctcaaataacataacataacataacataacataacataacataacataacataacataacataacataacattacataacataacataaaatgcatttatcctagtcggtattgatttgtttacttgttgattttcacttgcatatcacggagaccctctctctcttgctctgtcaagtgccttctcaaggcggaag

SEQ ID NO: 698967 - DNA, 587 bp, Homo sapiens
aggcttttttattcccacgccagtcccatctttattctaacgtgccacgctccaatgcagcggttctcagcgtgtggcctgaggacccctgggattctggaggccctttcgatgggtctgtgaggcccttcgttttccaacttcatatccatgtgaggccagatastcttcatgtaattcaaccaaaacatcagactgcaatagattgaatgtagatatgagaaccagctgtcctctattaagccagatagcaaagagattcataaaactgtaaaacaatgccactctttatggtgtcttttgttttggagaatataattatttttaataaaaatgtgttctttacattaacatgatgggtttattgttcttttaaaatgaagtaatgaagtgtttttaaattttctcaattttagtttctaatatggtaaatatcaaaaaatatgatccacataaacgaacctcctggtgggttctttgtaatttttaggagcgtgaaagtgtcctgaaaccaaccaggtgcggtggctcatgcctgtaatcccagcactttgggaggctgaggcgggcagatcacgcagtcaaga

SEQ ID NO: 698968 - DNA, 587 bp, Homo sapiens
aggcttttttattcccacgccagtcccatctttattctaacgtgccacgctccaatgcagcggttctcagcgtgtggcctgaggacccctgggattctggaggccctttcgatgggtctgtgaggcccttcgttttccaacttcatatccatgtgaggccagatactyttcatgtaattcaaccaaaacatcagactgcaatagattgaatgtagatatgagaaccagctgtcctctattaagccagatagcaaagagattcataaaactgtaaaacaatgccactctttatggtgtcttttgttttggagaatataattatttttaataaaaatgtgttctttacattaacatgatgggtttattgttcttttaaaatgaagtaatgaagtgtttttaaattttctcaattttagtttctaatatggtaaatatcaaaaaatatgatccacataaacgaacctcctggtgggttctttgtaatttttaggagcgtgaaagtgtcctgaaaccaaccaggtgcggtggctcatgcctgtaatcccagcactttgggaggctgaggcgggcagatcacgcagtcaaga

SEQ ID NO: 698969 - DNA, 626 bp, Homo sapiens
tgctgattggtccgtttttacagagtgctggttggtgcatttacaaacctttagctagacacagagygctgactggtgcatttttacagagtgctgattggtgcatttacaaacctttagctagacacagagtgctgattggtgcattttttcagagtgctgattggtgcgtttacaaacctttagctagacacagagcgctgattggtgtgtttacaatcctttagctagacagaaaaggtctccaagtacccccctccacccaggaagcccagctggcttcacctctcattagctcccagcaaattaaacaactcattggaactaaatagtccacatactctggggatccacaaacccatatttgcctgagttccaaaaagatggagctgactacttctttgggcagatgttgttaccttggtggggagtggcatcccatgagcacacaattagaaatttcttcctcactttcaaaattcttgctgctaaaactgcatacaacagccacccagccaagaggaattaattcattggctcaggttgttttagataataggatagtcttagattgcatcttagctgaatagagaaaaatatgtataattgcaaataccatgtgctgt

SEQ ID NO: 698970 - DNA, 1079 bp, Homo sapiens
ctcttactgtcaggaagacctgagcctcctatttaggcctttggatgggtgtggagagagggcagcatctaactagtgctgatctgagatcaactgcaggtccccaggcaaaccccacagaagggtgaatcagattccaaggccagtgaattttatccattgtgccaaccttcatagacaaggaatggctgctcagagccttgcagtgagatcaatgttaaagttctgtagttttaaggctcagtgggaaaaagtagccacccgcatctgccctgggcagatgaccaatgacctgtatttactgcccctgttctagaccagtacaagattagctgtctgttgggtagtttccatgtaaatagtttgttacctggggcagttgaaaggtcaggaggaaaagaagaggggattaaaataaattgctggaacgggggactggcggcggcagtggtgctcacttgaggctccagcctgcagtgagcattgagcacttaatttatggagtgctcagctgaggttgccactagctgcttacgagaggccagcagcaccgtgagccaggcccacttagggaagattcttggctcatccatgtgactcaccttcctcatacgtaacatggggacaatggggatatatgtcacagggctgctgtttatcttgccggatgatctaatgcacatggatgaagaagggaatgtgggaaatacatgctctcagtcttaacagaagggaaaactgaagcccgcagtgggttggaagaggtggagaaaatgcaagaaacacagacagctttgtgattgcaactttgttccaggtcctggttgtgtctttaattccatattaattgttttgtctttagtacttaactcctatctggaagaactcctcattagcccatctgccctggcatggcccacttctgaggggtttccttggcctgtttccctgatgtgtatcatgtgacccctccagttgcctggacragggtgggcatgtcaccagggagcagccagtggcctcagaggtaccctgatggacctcaggccctgcaggtttgaactggagacagaagagtg

SEQ ID NO: 698971 - DNA, 3205 bp, Homo sapiens
cagagaaccaaaaggaaaacagcatgtgacaacaaaggtagagactggaggtctgctgctgcaagccaagagcatcaaagacttctgacaaaacactggatgaaagaaagatgcaagaagcattcctctattgcgttcagaggtagcatgaccctctcaacaccttggtttcagaactccagcctccagaactgggagacacacatttccaaattcttgtttgtttgtttgtttgtttgttgtttttgcatgtgtgttaagctacccagtttgtggtacttcgttgtagcagatttaagaaacaaataaaggaatatttcttcttttcctaaagtaggagaacagaaatagcagctatgttgtaaccatgagaagagcaaacctgaggatgaagcagacgcaagaacaagatggctgagagttatgatggagtcttgaccttccgaggatgaaatctcaacctttaggttttttccataaaatgatatccttttttactgaacaagccagtctgagtgacatttttctgatactttcataagtatgggaaacacacacacactctctcgtgtgtgtgtgtgtgtatatatatatatatacatatatatatacgtgtgtatatatatatgtatatatatatacacacacatacacagacatatggtgtagtatgtatgtttacatatatatacatatatatttcatatatctgttacagagacataagtgtgctggcacttcatttaatcaccatttatgattgtacattcactatctgtgctgttctctgttctatacaaaaaatttaaaatagttttctttcctctaactttaaggcccttaaggatcagtgttaagcgttgtgttatgtaatatcccgagccgtccttatggtttgtactttatacgccctgattctgttttagcgcctaccactccacttggtaattattcattaaattctggtgtccctctgtctgcttgtgaagccagagcatgtatcctaatgctgtatttatagcaccaagctcaaagtattgaagcaagcaatgttggtggaatgaataaagaatagttgccattcttttctgaaatcttgaaatattattaaccagctctcctctcatttttttttaaattgtgagtcttccttctgtctgtcactcacaatgactcagacaacaatgacatgctccatttatttctagcattcatgcctcaaagttgccaggtagactcagcattggaataatgatggggaattctctctctctatgttagtgttaataatattcatggcaaaaaaattagaattttcccatgaggagaaacctctttcctttttctgtgagtataatgaacgctcagttatggatatactagtggctccgtagcgatacattgcaaaattctttttctgcctttcatgatataatttaaactctttactgtagcatactatgtcccttccgatctagacaacttagatgttctgacttccctcatttctcctcattctaccaattgtctgtcatcttcgttgaccctggacttccctggttttagcactaaaagttccctgtcccaggaaaagtgtcagacccaggcaaacaaagactgttagtcactgtttttggcttctcaacttccctctatttgactgtgagatgcctcaaagaattcagtgtaacctctatttgtttttgacacatggttggtacaaagcrttaataaatagacaaatcgatgactgaataaaaggagtatgtcatagaagagttttggaatcaaaaagatgtggactaaaatctcacatcagtcatgttggactatacaactgactttatgtttactaagcctcagttccatcataagcaaaagcgtggaggggagaagaataataagagccacttcatggacatgtcataggaataagatgagactatgagctcctagtaggcttgtaaatcacttgcatgcataggctgtgctgtgttaattatagcaatctcacataggtacccaataactgtctgtgtaattagagtaatactttatgcaaaatgcttagagcacagtagatgtttgctaaatgaatgctattgttagtgttgttattaacattaaaatgaatgaaaaatatcttgattacccaaaatatacaagctgctgtgcttagtcttgggagagatgaacctgggggaaaataaggaatactctggttatagggctggagctgtgctcgcttagctacaatgcaaagcatgatttgataactcccaatcagaacatggagcttcatgcacggagtatgtattcaatgggacaaaagtataagttaatgaaaaagtaactgagtaaaaatatgaaagcttgaactagtacaaaacatgaatactttgaaaagtgagaagtcctgagatctcatccctatcctgcttgtacttagagtgtgctttcaggagtttaattactctctctggtataaattccttattttcaaaactgggccacttggtctcactttgttatttgttactattgttaatagtcaaatacatttttcagacattaaatttcccagctacagaagttctttccttgtgttgttaatgcctgccagtatggctaagcttgtgctcattgagaatgtagcgtgggccagtcagaacccacggcttctaatagtcacgtagcaagataaaccaaaggaaaccttaaaccacagctaggctaactaagccgatttagtctttttaatacctgctgggaaaaaacaaaatgaaccaatacttccttgttgttgaacaaacttcctgttgctatggacagatcatttttcatttacctaaatagtcacagaggatattattgaattaataggactctaagttccctgaatttactctcaagagcccacctgtgttaacacaggcacactatagaaataattgccaaagcacaagttagaagtaaacgactgggctatctgattgtgagatgaaagccgttgatgagtgaaattcctgggaaactcggcttctcctaactattgagattagtccttgttcctactatattgtgagttaaaccttctcatggataaaaagcaaaaccagaaatctattgccatgaaaataggtgtaaaagaaagcctgggtaacgcttcctataatcaagttctccaacaagcactgactccttt

SEQ ID NO: 698972 - DNA, 3205 bp, Homo sapiens
cagagaaccaaaaggaaaacagcatgtgacaacaaaggtagagactggaggtctgctgctgcaagccaagagcatcaaagacttctgacaaaacactggatgaaagaaagatgcaagaagcattcctctattgcgttcagaggtagcatgaccctctcaacaccttggtttcagaactccagcctccagaactgggagacacacatttccaaattcttgtttgtttgtttgtttgtttgttgtttttgcatgtgtgttaagctacccagtttgtggtacttcgttgtagcagatttaagaaacaaataaaggaatatttcttcttttcctaaagtaggagaacagaaatagcagctatgttgtaaccatgagaagagcaaacctgaggatgaagcagacgcaagaacaagatggctgagagttatgatggagtcttgaccttccgaggatgaaatctcaacctttaggttttttccataaaatgatatccttttttactgaacaagccagtctgagtgacatttttctgatactttcataagtatgggaaacacacacacactctctcgtgtgtgtgtgtgtgtatatatatatatatacatatatatatacgtgtgtatatatatatgtatatatatatacacacacatacacagacatatggtgtagtatgtatgtttacatatatatacatatatatttcatatatctgttacagagacataagtgtgctggcacttcatttaatcaccatttatgattgtacattcactatctgtgctgttctctgttctatacaaaaaatttaaaatagttttctttcctctaactttaaggcccttaaggatcagtgttaagcgttgtgttatgtaatatcccgagccgtccttatggtttgtactttatacgccctgattctgttttagcgcctaccactccacttggtaattattcattaaattctggtgtccctctgtctgcttgtgaagccagagcatgtatcctaatgctgtatttatagcaccaagctcaaagtattgaagcaagcaatgttggtggaatgaataaagaatagttgccattcttttctgaaatcttgaaatattattaaccagctctcctctcatttttttttaaattgtgagtcttccttctgtctgtcactcacaatgactcagacaacaatgacatgctccatttatttctagcattcatgcctcaaagttgccaggtagactcagcattggaataatgatggggaattctctctctctatgttagtgttaataatattcatggcaaaaaaattagaattttcccatgaggagaaacctctttcctttttctgtgagtataatgaacgctcagttatggatatactagtggctccgtagcgatacattgcaaaattctttttctgcctttcatgatataatttaaactctttactgtagcatactatgtcccttccgatctagacaacttagatgttctgacttccctcatttctcctcattctaccaattgtctgtcatcttcgttgaccctggacttccctggttttagcactaaaagttccctgtcccaggaaaagtgtcagacccaggcaaacaaagactgttagtcactgtttttggcttctcaacttccctctatttgactgtgagatgcctcaaagaattcagtgtaacctctatttgtttttgacacatggttggtacaaagcgttaataaatagacaaatmgatgactgaataaaaggagtatgtcatagaagagttttggaatcaaaaagatgtggactaaaatctcacatcagtcatgttggactatacaactgactttatgtttactaagcctcagttccatcataagcaaaagcgtggaggggagaagaataataagagccacttcatggacatgtcataggaataagatgagactatgagctcctagtaggcttgtaaatcacttgcatgcataggctgtgctgtgttaattatagcaatctcacataggtacccaataactgtctgtgtaattagagtaatactttatgcaaaatgcttagagcacagtagatgtttgctaaatgaatgctattgttagtgttgttattaacattaaaatgaatgaaaaatatcttgattacccaaaatatacaagctgctgtgcttagtcttgggagagatgaacctgggggaaaataaggaatactctggttatagggctggagctgtgctcgcttagctacaatgcaaagcatgatttgataactcccaatcagaacatggagcttcatgcacggagtatgtattcaatgggacaaaagtataagttaatgaaaaagtaactgagtaaaaatatgaaagcttgaactagtacaaaacatgaatactttgaaaagtgagaagtcctgagatctcatccctatcctgcttgtacttagagtgtgctttcaggagtttaattactctctctggtataaattccttattttcaaaactgggccacttggtctcactttgttatttgttactattgttaatagtcaaatacatttttcagacattaaatttcccagctacagaagttctttccttgtgttgttaatgcctgccagtatggctaagcttgtgctcattgagaatgtagcgtgggccagtcagaacccacggcttctaatagtcacgtagcaagataaaccaaaggaaaccttaaaccacagctaggctaactaagccgatttagtctttttaatacctgctgggaaaaaacaaaatgaaccaatacttccttgttgttgaacaaacttcctgttgctatggacagatcatttttcatttacctaaatagtcacagaggatattattgaattaataggactctaagttccctgaatttactctcaagagcccacctgtgttaacacaggcacactatagaaataattgccaaagcacaagttagaagtaaacgactgggctatctgattgtgagatgaaagccgttgatgagtgaaattcctgggaaactcggcttctcctaactattgagattagtccttgttcctactatattgtgagttaaaccttctcatggataaaaagcaaaaccagaaatctattgccatgaaaataggtgtaaaagaaagcctgggtaacgcttcctataatcaagttctccaacaagcactgactccttt

SEQ ID NO: 698973 - DNA, 2837 bp, Homo sapiens
gatccaaataggaccaatcagagacctccctcaaggaatctgctatacctgccaggcaagagagggtctatcttccttctgagtgagaagttataaaggcataggcatagagaccatctttccagcctgtgcaagaaataagtcaacattcagaagaagcaaagtcatgatatatgagagagtttaaaccctgatatctcctagtttaggtcccagagctggttattactgcagcaagctggactcattttccagatgtgtgagataagtcttttttcggccacttctatcactggtaactgaaaatgttttcacaaaaatgttttgactcactttactcagtaatcaaaagatttcctaaatgattaaaacaggttaaaggaaaaattaaaataaactaggctagaatgaaatatagtgcaatattaaattgatcttaaaataaacatggattttctaaccacagaagtgataaaagaatatcccagagaaaaacgggcaataacagtagtaaataattaacaggagaagaaaatctaatagctaataaacacataaaaatgttcaacctatgagcaattaatgacatccaaatccaaacttgatacaattttgaataataaaagtaataaagtaacagtaatacttaatgctagtcagggtgttgtgcaattaatactttaataaactactagtgagagtaggaataacagtttttcacgaacgatttgaaagtatgtgtcatctaattattctgcttcttggaatctatcctaaggaaaaatacaaaatttttgcttaaaattgtacatayaagtgagttcatacagctttatttttaatagtgaaagcttagatgtaacttaaataacccataatatggttatgttacataaattatgggatacttataaatagactataattcagccattagagtgttttagaaaaatatttagagaatatacataatataatgttaaataaaacaagcaatctatgaagttttatatataagatatgatctcagtttcagttttcaacattctacatgtagaatgaaacaaactacatattaacaatggctatctatgggtgacttttattttcttttgtacagaatactaacctttccaaattttctccagcaaaaacatgagagaaaaacttaaagagagagcatacgacttttgctagctgtgtccttgcccagaaaatcaccttgaaagactcttgcatcaattatatttcacctacttgcaggagttcctgagaaattaaggggtactcaacattgataagcagttgattaaaacagtacttaacacagcacagggcagaaaggtgcatttgtgtgtgaaggtgaaggaaggggagcaaagcaggaggagatcatccaaaggtcgagaaacgacttatgagaattgcttttgttcagcctgaaaaaacatttccatttagttcttcaacttagtgtggtgccgaaatcctgtgacaaggactgaaccatcgcacctatttatatattcaagtcccatccaggcagtgggaaattccaaagaaacaggcataatcatttggatgtactgtaaaacgggtgagcttttaatgaatgtgcaaaggttgtatggatcaattgtccatttgattaattcttcgggcaggagagaattaaatgtacttaggctacacaccagtaaaagctgaatgctttttaaaatgtgattttctatgttgaggccaatttttttctgtgcaaaaaacatttcttgagataataatggaagtcaatgagaaaatgcaatttgccatataagtattcagctacatactactttgtcagaaaagcaactaatgcgcaaacaaggtgaaggtctgtatagtattcaccattattttagctaaccttcctttcaagttcttatttgcatcatttcacagtagaggccataaatccctatttcagaaataatgcattgtcgaaactttaccctttccctctataaggtattcagcactagtatactagagacctctaaatccaaaagaggtaattatcttcaattcctgggcgactgcgaaggcccagggaaaagacaaatcttgtactttttatcacttggaatgataatgtctgatatgttggtggaaaggatggaaatattctgaaggccgggcacatccctatctagaggctcaggaatcatttcattgcattcactcaaggagtatttcttgagtgcccattgtgtgctagacacagtgctaggtcctgggagtagagaagaaatgaaggtcaatgttatctcggaacatacagtctagagcgggggatagatttatcaaattgcccaaatacataatggcttcattattctgtcccaagtggtataaactcccaaactattagcttatattccaagataggcagacctcactgcagtagggaagactgactgtacaggacctccttcctgctaatgactgagaatggccctaaagacagatactagaggagtccagtctgaatgaaaaggtgggaaccacttttcctttaacccagacaggatgagctcctccaactaattggcccaagtaacacctgttaagactccacgccccccacccccaactccagttgctacttcctttaccatctagctacagagagatcgacatctccctctgcagaggtgctatttgcatttgtcttaagctgaggtagggaggaagatggattcccagctaagagcaaaacacagagtagctgtttcttcttcactgggagccaagacacagacagacacacagacagagtcctggacagaccttgcccc

SEQ ID NO: 698974 - DNA, 2837 bp, Homo sapiens
gatccaaataggaccaatcagagacctccctcaaggaatctgctatacctgccaggcaagagagggtctatcttccttctgagtgagaagttataaaggcataggcatagagaccatctttccagcctgtgcaagaaataagtcaacattcagaagaagcaaagtcatgatatatgagagagtttaaaccctgatatctcctagtttaggtcccagagctggttattactgcagcaagctggactcattttccagatgtgtgagataagtcttttttcggccacttctatcactggtaactgaaaatgttttcacaaaaatgttttgactcactttactcagtaatcaaaagatttcctaaatgattaaaacaggttaaaggaaaaattaaaataaactaggctagaatgaaatatagtgcaatattaaattgatcttaaaataaacatggattttctaaccacagaagtgataaaagaatatcccagagaaaaacgggcaataacagtagtaaataattaacaggagaagaaaatctaatagctaataaacacataaaaatgttcaacctatgagcaattaatgacatccaaatccaaacttgatacaattttgaataataaaagtaataaagtaacagtaatacttaatgctagtcagggtgttgtgcaattaatactttaataaactactagtgagagtaggaataacagtttttcacgaacgatttgaaagtatgtgtcatctaattattctgcttcttggaatctatcctaaggaaaaatacaaaatttttgcttaaaattgtacatataagtgagttcatacagctttatttttaatagtgaaagcttagatgtaacttaaataacccataatatggttatgttacataaattatgggatacttataaatagactataattcagccattagagtgttttagaaaaatatttagagaatatacataatataatgttaaataaaacaagcaatctrtgaagttttatatataagatatgatctcagtttcagttttcaacattctacatgtagaatgaaacaaactacatattaacaatggctatctatgggtgacttttattttcttttgtacagaatactaacctttccaaattttctccagcaaaaacatgagagaaaaacttaaagagagagcatacgacttttgctagctgtgtccttgcccagaaaatcaccttgaaagactcttgcatcaattatatttcacctacttgcaggagttcctgagaaattaaggggtactcaacattgataagcagttgattaaaacagtacttaacacagcacagggcagaaaggtgcatttgtgtgtgaaggtgaaggaaggggagcaaagcaggaggagatcatccaaaggtcgagaaacgacttatgagaattgcttttgttcagcctgaaaaaacatttccatttagttcttcaacttagtgtggtgccgaaatcctgtgacaaggactgaaccatcgcacctatttatatattcaagtcccatccaggcagtgggaaattccaaagaaacaggcataatcatttggatgtactgtaaaacgggtgagcttttaatgaatgtgcaaaggttgtatggatcaattgtccatttgattaattcttcgggcaggagagaattaaatgtacttaggctacacaccagtaaaagctgaatgctttttaaaatgtgattttctatgttgaggccaatttttttctgtgcaaaaaacatttcttgagataataatggaagtcaatgagaaaatgcaatttgccatataagtattcagctacatactactttgtcagaaaagcaactaatgcgcaaacaaggtgaaggtctgtatagtattcaccattattttagctaaccttcctttcaagttcttatttgcatcatttcacagtagaggccataaatccctatttcagaaataatgcattgtcgaaactttaccctttccctctataaggtattcagcactagtatactagagacctctaaatccaaaagaggtaattatcttcaattcctgggcgactgcgaaggcccagggaaaagacaaatcttgtactttttatcacttggaatgataatgtctgatatgttggtggaaaggatggaaatattctgaaggccgggcacatccctatctagaggctcaggaatcatttcattgcattcactcaaggagtatttcttgagtgcccattgtgtgctagacacagtgctaggtcctgggagtagagaagaaatgaaggtcaatgttatctcggaacatacagtctagagcgggggatagatttatcaaattgcccaaatacataatggcttcattattctgtcccaagtggtataaactcccaaactattagcttatattccaagataggcagacctcactgcagtagggaagactgactgtacaggacctccttcctgctaatgactgagaatggccctaaagacagatactagaggagtccagtctgaatgaaaaggtgggaaccacttttcctttaacccagacaggatgagctcctccaactaattggcccaagtaacacctgttaagactccacgccccccacccccaactccagttgctacttcctttaccatctagctacagagagatcgacatctccctctgcagaggtgctatttgcatttgtcttaagctgaggtagggaggaagatggattcccagctaagagcaaaacacagagtagctgtttcttcttcactgggagccaagacacagacagacacacagacagagtcctggacagaccttgcccc

SEQ ID NO: 698975 - DNA, 2837 bp, Homo sapiens
gatccaaataggaccaatcagagacctccctcaaggaatctgctatacctgccaggcaagagagggtctatcttccttctgagtgagaagttataaaggcataggcatagagaccatctttccagcctgtgcaagaaataagtcaacattcagaagaagcaaagtcatgatatatgagagagtttaaaccctgatatctcctagtttaggtcccagagctggttattactgcagcaagctggactcattttccagatgtgtgagataagtcttttttcggccacttctatcactggtaactgaaaatgttttcacaaaaatgttttgactcactttactcagtaatcaaaagatttcctaaatgattaaaacaggttaaaggaaaaattaaaataaactaggctagaatgaaatatagtgcaatattaaattgatcttaaaataaacatggattttctaaccacagaagtgataaaagaatatcccagagaaaaacgggcaataacagtagtaaataattaacaggagaagaaaatctaatagctaataaacacataaaaatgttcaacctatgagcaattaatgacatccaaatccaaacttgatacaattttgaataataaaagtaataaagtaacagtaatacttaatgctagtcagggtgttgtgcaattaatactttaataaactactagtgagagtaggaataacagtttttcacgaacgatttgaaagtatgtgtcatctaattattctgcttcttggaatctatcctaaggaaaaatacaaaatttttgcttaaaattgtacatataagtgagttcatacagctttatttttaatagtgaaagcttagatgtaacttaaataacccataatatggttatgttacataaattatgggatacttataaatagactataattcagccattagagtgttttagaaaaatatttagagaatatacataatataatgttaaataaaacaagcaatctatgaagttttatatataagatatgatctcagtttcagttttcaacattctacatgtagaatgaaacaaactacatattaacaatggctatctatgggtgacttttattttcttttgtacagaatactaacctttccaaattttctccagcaaaaacatgagagaaaaacttaaagagagagcatacgacttttgctagctgtgtccttgcccagaaaatcaccttgaaagactcttgcatcaattatatttcacctacttgcaggagttcctgagaaattaaggggtactcaacattgataagcagttgattaaaacagtacttaacacagcacagggcagaaaggtgcatttgtgtgtgaaggtgaaggaaggggagcaaagcaggaggagatcatccaaaggtcgagaaacgacttatgagaattgcttttgttcagcctgaaaaaacatttccatttagttcttcaacttagtgtggtgccgaaatcctgtgacaaggrctgaaccatcgcacctatttatatattcaagtcccatccaggcagtgggaaattccaaagaaacaggcataatcatttggatgtactgtaaaacgggtgagcttttaatgaatgtgcaaaggttgtatggatcaattgtccatttgattaattcttcgggcaggagagaattaaatgtacttaggctacacaccagtaaaagctgaatgctttttaaaatgtgattttctatgttgaggccaatttttttctgtgcaaaaaacatttcttgagataataatggaagtcaatgagaaaatgcaatttgccatataagtattcagctacatactactttgtcagaaaagcaactaatgcgcaaacaaggtgaaggtctgtatagtattcaccattattttagctaaccttcctttcaagttcttatttgcatcatttcacagtagaggccataaatccctatttcagaaataatgcattgtcgaaactttaccctttccctctataaggtattcagcactagtatactagagacctctaaatccaaaagaggtaattatcttcaattcctgggcgactgcgaaggcccagggaaaagacaaatcttgtactttttatcacttggaatgataatgtctgatatgttggtggaaaggatggaaatattctgaaggccgggcacatccctatctagaggctcaggaatcatttcattgcattcactcaaggagtatttcttgagtgcccattgtgtgctagacacagtgctaggtcctgggagtagagaagaaatgaaggtcaatgttatctcggaacatacagtctagagcgggggatagatttatcaaattgcccaaatacataatggcttcattattctgtcccaagtggtataaactcccaaactattagcttatattccaagataggcagacctcactgcagtagggaagactgactgtacaggacctccttcctgctaatgactgagaatggccctaaagacagatactagaggagtccagtctgaatgaaaaggtgggaaccacttttcctttaacccagacaggatgagctcctccaactaattggcccaagtaacacctgttaagactccacgccccccacccccaactccagttgctacttcctttaccatctagctacagagagatcgacatctccctctgcagaggtgctatttgcatttgtcttaagctgaggtagggaggaagatggattcccagctaagagcaaaacacagagtagctgtttcttcttcactgggagccaagacacagacagacacacagacagagtcctggacagaccttgcccc

SEQ ID NO: 698976 - DNA, 1130 bp, Homo sapiens
ggcggtgtatgccgctgttcttgctgtcgctcccgacacctccgtccgcttctggtcatgagaggttaggcctgggggaagcgggcagaggaggaggcggcgaggggccgcggcgcagggggctctggggagaataggcactcgaggctcggacgtgggtggagaactctgccctcggagattccggaagagttgtgttgaattttcttcccttttttctcctctttcttgtctgtgcatgaaggaaagtgggagggttctatgttatttatagaaaagacactgaaagcctgctgtccaacgtcgctcttcagttttgacgaaataacacccgtggcgtcggggcctcggtgaaagcctttagtgaaaagcactgaaacccaaaccgccagacacggtgactgcaccactgttcagtcctgggagtgaaatagaatgacacagaacattccctgacgttaactctagcctcctcctagacaaacgggaaaagcacggcagtgtgggatagcctctgcgttttgtcagctgggattccgactctgttcttctgtttctaggaggtccacactggatcatttattagagagatctttctctgctagagtcctctttcctcacacccctccctccgtaatacacacaccaccgacggtggcattttattgggcggactgtgtaactgcttattcagactaaagagttacctagcaattacgtggtgactctccaaagtatctatgctttaaatgtatttaggtaacattcttttgcgcggggaggtaatattmttggtggcaccattaattattggaaactttatgagctttgggaaagctgcttgagcagaaaatctaatttgtaggtcacctaagtgcagtgtttattattagttacctatgatgataataaggcattaagatttaatgttgttttttttcctaacatttccaaccattaaaaaatactggctcactcttccttatgaaacttctttgatgtagaatctacatcagagatgaaactgcaccatttgggaaaagtaaatgtaccagagtacccagtgaggactggtgctcattaacatctgctgggtacccatacttcatgactgttttgcggatgccttc

SEQ ID NO: 698977 - DNA, 2087 bp, Homo sapiens
tttttgtctgtttgggcccttgtagttgtgaatgactcaagtgtggagaactattcagcactattcataagtatgagttctaccagcttgctgtggagctcagaagcaacctggcctgactcagagagctttcaagaagtcattatgaagactaacgaagggcaccacaagggggtggactgaacacccagataaaaatgacttgaaatattaagttcgtgacagcaccaagaaataagatgagtaccatattagtcagttctccaaggtgggggcaaaccagaagagcagaagatgtaaaccagagggcatcccagaaaaaggctgctatgcagatgtggtggggcaaggaagccccagacccagagtctaggtagaaacaagggcacaggcggggtcctggggctttcttcagggcaattagttggaaggccaggcaggcaaggcagccccttccctcaatctcaacttctgctatgcagcaagaagccatgactgcagatagtgtggtgggcaactggggctcagaaagaaggaggtaccctggagcctactactgcagctaaagagggatagagacctgtccacacacattaaacgcctccgcacattcaccaagaacaagagacacagacgataaactgtgtccacagacaggcaaggaggaaattctcaatacaaagagaagagcaaaaatcatcagacactccagaaaaacaaacacatgaaacaaaaccactaagctggctcggcgcggtggctcacacctgtaataccagcactttgggaggccgaggtgggcacatcacctgaggtcagccgttcgagaccaggctgaccaacatggagaaaccccgtctctactaaaaatacaaaattagctgggcatggtgatgcatgcctgtaatcccagctactcaggaggctgaggaaggagaatcacttgaatccaggaggcggaggttgcggtgagccragatcgcaccattgaactccagcctgggcaacaagagcgaaactccatctcgaaaaacaaaaacaaacaaaaaaaaaacacaaaacactaagcttaataaggcagagaaggaaattatcttctaaggaaatagtgaaaatgaccaaatactttaaagattattaacatcttatgataggttacttggggggaatcgccacaaaataagaatagttggtataaaacaagaatcaagtagaaactttacaaatttaaaataagtgacttttaaaaaacttcagcatagtgagcaaataaccaaatgtgaaaactaaatcagtgggctaaacgtccaagccaagaaagtcttcctaattttttcttaaatttaaaattaaacaagtttaatttgttgtaaaatacattaccatcttaattatttttaagtgtacagttcaggggcattaagtacattcatattgttgtgtgaccatcaccaccatccatccagagaactcttcctatcttgcaaatcccagactctgtacccgttaaaaaacctcccaccgcaactcaacccagcctctggcaaccaccattctactttctatctctatgaatttaactattctaggtctcttatgtaagtggaatcattcagcatttgtccttttgtggctggcttatttcactctgcattatgctctcaaggttcagccatattgtagcatgtgtcagaatttcctttctttctaaggctgaataatattgccttgtctgaaataccacaccttgtttatccattcgtctgtcagtggatacttgggttgtttctaccttgtgactattgatgccattccctgatttttatgctatagaacaaaccattgaaagaataaaataaaaagtaagatatgtatagattcaggagctccaaataccaaaatttgagatggtctggggagaggtagaaaacttaaataaaacaataaccacagaaaaattgaaaaggcagtcaaaaatctaacccttaaaaagatagaaggcctggatccttttctggacacattctaccagagactatgtgatattaactctcccagagcatagaaaaaatgcaaacgttctcaat

SEQ ID NO: 698978 - DNA, 2087 bp, Homo sapiens
tttttgtctgtttgggcccttgtagttgtgaatgactcaagtgtggagaactattcagcactattcataagtatgagttctaccagcttgctgtggagctcagaagcaacctggcctgactcagagagctttcaagaagtcattatgaagactaacgaagggcaccacaagggggtggactgaacacccagataaaaatgacttgaaatattaagttcgtgacagcaccaagaaataagatgagtaccatattagtcagttctccaaggtgggggcaaaccagaagagcagaagatgtaaaccagagggcatcccagaaaaaggctgctatgcagatgtggtggggcaaggaagccccagacccagagtctaggtagaaacaagggcacaggcggggtcctggggctttcttcagggcaattagttggaaggccaggcaggcaaggcagccccttccctcaatctcaacttctgctatgcagcaagaagccatgactgcagatagtgtggtgggcaactggggctcagaaagaaggaggtaccctggagcctactactgcagctaaagagggatagagacctgtccacacacattaaacgcctccgcacattcaccaagaacaagagacacagacgataaactgtgtccacagacaggcaaggaggaaattctcaatacaaagagaagagcaaaaatcatcagacactccagaaaaacaaacacatgaaacaaaaccactaagctggctcggcgcggtggctcacacctgtaataccagcactttgggaggccgaggtgggcacatcacctgaggtcagccgttcgagaccaggctgaccaacatggagaaaccccgtctctactaaaaatacaaaattagctgggcatggtgatgcatgcctgtaatcccagctactcaggaggctgaggaaggagaatcacttgaatccaggaggcggaggttgcggtgagccgagatcgcaccattgaactccagcctgggcaacaagagcgaaactccatctcgaaaaacaaaaacaaacaaaaaaamaacacaaaacactaagcttaataaggcagagaaggaaattatcttctaaggaaatagtgaaaatgaccaaatactttaaagattattaacatcttatgataggttacttggggggaatcgccacaaaataagaatagttggtataaaacaagaatcaagtagaaactttacaaatttaaaataagtgacttttaaaaaacttcagcatagtgagcaaataaccaaatgtgaaaactaaatcagtgggctaaacgtccaagccaagaaagtcttcctaattttttcttaaatttaaaattaaacaagtttaatttgttgtaaaatacattaccatcttaattatttttaagtgtacagttcaggggcattaagtacattcatattgttgtgtgaccatcaccaccatccatccagagaactcttcctatcttgcaaatcccagactctgtacccgttaaaaaacctcccaccgcaactcaacccagcctctggcaaccaccattctactttctatctctatgaatttaactattctaggtctcttatgtaagtggaatcattcagcatttgtccttttgtggctggcttatttcactctgcattatgctctcaaggttcagccatattgtagcatgtgtcagaatttcctttctttctaaggctgaataatattgccttgtctgaaataccacaccttgtttatccattcgtctgtcagtggatacttgggttgtttctaccttgtgactattgatgccattccctgatttttatgctatagaacaaaccattgaaagaataaaataaaaagtaagatatgtatagattcaggagctccaaataccaaaatttgagatggtctggggagaggtagaaaacttaaataaaacaataaccacagaaaaattgaaaaggcagtcaaaaatctaacccttaaaaagatagaaggcctggatccttttctggacacattctaccagagactatgtgatattaactctcccagagcatagaaaaaatgcaaacgttctcaat

SEQ ID NO: 698979 - DNA, 2087 bp, Homo sapiens
tttttgtctgtttgggcccttgtagttgtgaatgactcaagtgtggagaactattcagcactattcataagtatgagttctaccagcttgctgtggagctcagaagcaacctggcctgactcagagagctttcaagaagtcattatgaagactaacgaagggcaccacaagggggtggactgaacacccagataaaaatgacttgaaatattaagttcgtgacagcaccaagaaataagatgagtaccatattagtcagttctccaaggtgggggcaaaccagaagagcagaagatgtaaaccagagggcatcccagaaaaaggctgctatgcagatgtggtggggcaaggaagccccagacccagagtctaggtagaaacaagggcacaggcggggtcctggggctttcttcagggcaattagttggaaggccaggcaggcaaggcagccccttccctcaatctcaacttctgctatgcagcaagaagccatgactgcagatagtgtggtgggcaactggggctcagaaagaaggaggtaccctggagcctactactgcagctaaagagggatagagacctgtccacacacattaaacgcctccgcacattcaccaagaacaagagacacagacgataaactgtgtccacagacaggcaaggaggaaattctcaatacaaagagaagagcaaaaatcatcagacactccagaaaaacaaacacatgaaacaaaaccactaagctggctcggcgcggtggctcacacctgtaataccagcactttgggaggccgaggtgggcacatcacctgaggtcagccgttcgagaccaggctgaccaacatggagaaaccccgtctctactaaaaatacaaaattagctgggcatggtgatgcatgcctgtaatcccagctactcaggaggctgaggaaggagaatcacttgaatccaggaggcggaggttgcggtgagccgagatcgcaccattgaactccagcctgggcaacaagagcgaaactccatctcgaaaaacaaaaacaaacaaaaaaaaaamacaaaacactaagcttaataaggcagagaaggaaattatcttctaaggaaatagtgaaaatgaccaaatactttaaagattattaacatcttatgataggttacttggggggaatcgccacaaaataagaatagttggtataaaacaagaatcaagtagaaactttacaaatttaaaataagtgacttttaaaaaacttcagcatagtgagcaaataaccaaatgtgaaaactaaatcagtgggctaaacgtccaagccaagaaagtcttcctaattttttcttaaatttaaaattaaacaagtttaatttgttgtaaaatacattaccatcttaattatttttaagtgtacagttcaggggcattaagtacattcatattgttgtgtgaccatcaccaccatccatccagagaactcttcctatcttgcaaatcccagactctgtacccgttaaaaaacctcccaccgcaactcaacccagcctctggcaaccaccattctactttctatctctatgaatttaactattctaggtctcttatgtaagtggaatcattcagcatttgtccttttgtggctggcttatttcactctgcattatgctctcaaggttcagccatattgtagcatgtgtcagaatttcctttctttctaaggctgaataatattgccttgtctgaaataccacaccttgtttatccattcgtctgtcagtggatacttgggttgtttctaccttgtgactattgatgccattccctgatttttatgctatagaacaaaccattgaaagaataaaataaaaagtaagatatgtatagattcaggagctccaaataccaaaatttgagatggtctggggagaggtagaaaacttaaataaaacaataaccacagaaaaattgaaaaggcagtcaaaaatctaacccttaaaaagatagaaggcctggatccttttctggacacattctaccagagactatgtgatattaactctcccagagcatagaaaaaatgcaaacgttctcaat

SEQ ID NO: 698980 - DNA, 1898 bp, Homo sapiens
ccaaggcctgaaatgccatcatcttgggctctgtacatccttcgtgtgctctgggcctttgccctgtggagacctctcccaaggatgagggagcagagccggcccttccatatcttccagcatctctgccatgtaaacagaaaactagacattggagagctggtgagagttgaaggaatcatgaacctaacaggagagaaacaggacctttttccttccttccctggagcctccctcacacacagatgggctccccaccactctgcgccaaccatggggctccaagggactccctgatggagatgggggtacctgcaaggaaaggggtggcgtttcattgcccgttgggatgtcttctcatacaaaggactagctgagccaccgtctgtgtcatttgagctggttgagcaagaaaaaagaatgagacagagatggctgggcagagaggggctgagtgcggtgcctgcacaggcgtcttgcatggggacaatgcgttcgctccctctgggccagctgcaccccaggaggcttgctgggtgggccaccttgccgatgccatggccagggacctgctggtgaggtgaggggccccatggaaggtacttggcggagagtatggggggcagcaggaatctccctccctctccaggaacccagtggtgggtaagcactgcaggggctgtgaagagcagcacctcccaggagcaccagttaagtcagaagtccttcgctcttgcccatttttctcctaccagccgatattccagagggaaagggagacccagggtgggcggggtaatgaggccttccttgtccccttcctcagggccacaggcccaatccaggctgggcagaagcgcattcactagggtcagcttaataaattctcctggacctggcgttttgatatgggacaccagccaggaagggatgggagctgttggggtgtcctagggatggataataaaggttggacaagggacagtgggaggcagtaattgggaaaaaagtcattttgtattcatacctcacttgggccaaataatagtgtaaaactaaaagtacaggagggctctgtacttttagttttaagtggggggcaaaaaccttggggcacagaggtggggagggggaggggtgcccatcccaaatgctacagccaaggcctggggtggcagtggagcggaggtgagtctgaagctcgtgtcctggcaaaggagggcagcccagagtgggaaacagtgggtagagaaatgcgcctgtgattacggagcagagacgggaggacccatcgacacagcggaaaggtaggaagaactcacagacaagccaggggaagtggaaggaacagcactggaggcaagaggaaataaccggaggaagtaaaccgctccatacagggggaaattgagaggataaccccaagtatttcagccattacacaaagagaggctgtcaggatattgtctgaaaacaagccctagctctgcaggattgacgggatgcatgcggaacagcaaggtcgagaagggctgggggcggtccgtgtgtggacagataagacacagacgtggcgtgccagcagtgtgagccacagacaggcggactttcagcttagaacatgtgatgatgaaaagcaaatcttataaaggaaaaaagtcatagacccatatggactaagcaaaatgatggttaaatacacaaagccaaaattactagaattgtaaggagagcttgatccaaatacagttacagtgggcgatgtcaatacacagctctcaggccagtcaataaaaaggaatgatataaaagaataaccaatacatttgatttaataggtggagattctttttttttcatgtrtgtaaagtatagttgttaaaacagcagaaacagag

SEQ ID NO: 698981 - DNA, 807 bp, Homo sapiens
ttacaagaaaggaaactgcagtacagaatatcatggactaatccctgagctggtaaaaaaagaaaaaaagtagctttaagactactttttaagcttcaagactgaaataaaggtcttccagatttaattcttaaggtttttgtctgatatgaatgtttacatattttcttttgggatctgaattcacttgattgtctgatgaaatgtctcctgaaaatggcaggtacacccggagagacacacaattttgctcataatttcaagaggtttaccatcagccccaggctaagaaccactgttctatgctattcaatctctataacggcaatagggcaagaaataaagaaattctgaaatgggctgggtgcggtggcttacccctgtaatccyagcactttgccaggccaaggtgggtggctcacttgagcccacgagttcgagaccagcctgggcaacatggtgaaagcccgtctctacaaaaaatacaaaaaaattagctgggcagggtgacacatgcctgtagtcctagctactcaggaggctgagttgggaggattacttacagtgaactaggattgtgtcactgcactcaagctggagtaacagagtgagaacctgtctccaaaaaaaaaaaaaaaaaattctaagatggaatattaagcactgagaagatgagaattaaaaccaagttcctttggttcttttccaaattttctttcttctcctgaaatatatggtctctcagaagggatggcttatcccgaaattaaatgtgttaaaacatgtcctggggggaaatatgaaaaa

SEQ ID NO: 698982 - DNA, 807 bp, Homo sapiens
ttacaagaaaggaaactgcagtacagaatatcatggactaatccctgagctggtaaaaaaagaaaaaaagtagctttaagactactttttaagcttcaagactgaaataaaggtcttccagatttaattcttaaggtttttgtctgatatgaatgtttacatattttcttttgggatctgaattcacttgattgtctgatgaaatgtctcctgaaaatggcaggtacacccggagagacacacaattttgctcataatttcaagaggtttaccatcagccccaggctaagaaccactgttctatgctattcaatctctataacggcaatagggcaagaaataaagaaattctgaaatgggctgggtgcggtggcttacccctgtaatcctagcactttgccaggccaaggtgggtggctcacttgagcccacgagttygagaccagcctgggcaacatggtgaaagcccgtctctacaaaaaatacaaaaaaattagctgggcagggtgacacatgcctgtagtcctagctactcaggaggctgagttgggaggattacttacagtgaactaggattgtgtcactgcactcaagctggagtaacagagtgagaacctgtctccaaaaaaaaaaaaaaaaaattctaagatggaatattaagcactgagaagatgagaattaaaaccaagttcctttggttcttttccaaattttctttcttctcctgaaatatatggtctctcagaagggatggcttatcccgaaattaaatgtgttaaaacatgtcctggggggaaatatgaaaaa

SEQ ID NO: 698983 - DNA, 565 bp, Homo sapiens
tacagttgctcaagcagcactctacacactgcacactatccttgacatctttctctctctcactgcctgcatccaagtccgttaccattctatttcattctcttgaacttacacaccatttgcccccttcttagccaggatcctagtctgtacctcctctgcttcccatccagatgagttgcaaaggtctcctccatgcagttccatttccactgcccacccttcacccacatcctgtcctctactgagcagccagactgatctaactcattctacctcatttaaccaaatttgctccaatgtaccttcctaacctaatgtattccagtgtaatctttctaaagctcagctctattgttattacttaggttatwtatttgagccagaatcttatatatatatattaaccctaactctttggaacagtgcttgcccatcataaaaatgctgagctcaaaactctgaaatggcaagatgcacctactcttctttcattcctctattctgtggtaaaaaacatgactcagaatcaaagcaaacaaggctctacatcatctagcccttg

SEQ ID NO: 698984 - DNA, 856 bp, Homo sapiens
tataaccagctaaactatcattcatgagatgacaaaatagatacattataacacaaataaagactgagacatctacctccatcaacataaataaatctcaaaacgtaacaccgagaaaagcaagctgcaacaggatatgtacaatactattggcctgcaattataaagcccaatactgaagtatcaactctttgtgatttaaagtgcaaagcacaattaagaaaaatacaaccacacttaagatggtagttattgctggataggatagaagggaaggaaaaagcaatgggacttcacctgtgactgaaatgtcttatctttttttaaaataaaaaaaaacaggccaggcagggtggctcacgcctgtaatcccagcactttgggaggccgaggcaggtggatcacgaggtcaggagatggaaactagcctggctaacatggtgaaaccccgtctctactaaaaatacaaaatattagccgggcatgggcgtggtggcgggtgcctgtagttgcagctactgggggctgaggcaggagaatggcatgaacccaggaggcagagcttgcagtcagcagagatcgcgccactgcactccagcctgagcgacagagtgatactccgtctcaaaaaaaaaaaaaaaaaaaaaatgaggaaataacaaaatattaacatttgttaaatctagatgtaggcacatggtatctgtgattttctgttctttttatgtgtytgaaatctttcaaaataaaaatttttaaagaaatatatctacatcaaataggagagagaagaaaccaaggagaagcaagagaaggacaaaagaggtaactcaacatggtaagctcttgagggtgg

SEQ ID NO: 698985 - DNA, 3338 bp, Homo sapiens
gaagtaaaattaaactgcacatttgtctcagccattcatttgacttggctgattctggcccagcagtcacagactgctccacaccagtcaaggtggggacaaatgtgggctacccattactactgtatcgctgagcatgtggggaaaccatctcattggaataggaaggatgcagattttgcaacccaatcatttaagtttgaatcctacctgggtcatgcattacctaggcaacctaggcaagttaattaaatctgtgagctgcttcctagcttctgtctctataatggacgtaatggtgatgatgatggtgaaacgtcccagatggatgatagagatgggttgaattaaataatgggtgtaaagcacctagtataaaattctgagttcaaggtagaaattctacaaagatttattatctttccttactccataatattatgtatctatataactcaaagattttgtggctcacaaagcacattccataatttgagacctcacccctcaacgcagctataaatttacactgactcctgggaatatctgcatgtattggttccacaggtttgtgcagcaatttctatgtgccaggaactgcactattgctttatcatttgttgtctcatttgcccttatttcatacatgaggaaactgaggctctatgagattaagaaactcacccatgttatcacagctcttgcttgttagaagcagaaatctagaagtgtctgattccagagtctcatttcttaatcaataggctacactgcccatctagagagcaagattaatgacaggtcctcagagacctttggtgagatcccaaaccagttatctgagcaatggataattattaaattgtctacttttctacacctctggaaactcagagacaactggcctatacaaccagactcatccaggggttctagaattgcaagtgaagatagacacatcttaagatttgcctagcatgtctgcctctgctatttctctcttattttgtattagtaactggagggcagttcaatatttatggatttcctttatcattgcatccattttcaaaatctgttaaaagtatttccttctaaattaactaacttcagaactttccaggagcaatgtgatggctgtgctgatgttagggtgaaatggtgttaatcttgtcattagcacagtgtgtcaaagagttgctaaattccctgtgtcatcttgaatgaaaacaactccgtcactctaccagcagagagaaaatgtgtcctgttaatgctgtcattggggttttcagcggactggggagaagactagtgtgaaatcttctgctcaaagcctggagtttcatactttgtcatttctgatctacttagctttggggattctattcacatctaccttgtctacatagaaaagagagaactgaagagcttcccttttggttgcagctctgcatctcactggagacaaccacgtatttgcacgttttttacccagtggagatgggtgaagttggttctcccagtgaaaggtctccactcctgcctcatactgcccacmatgcagctgcagatggcttattgtagaaggttctggtgctgaaatgagccaatggcacttatgctgccctctggcctttggtctagaagcttacctgcccagctgcttatactgctcatttggagcagttattaaaatggtgtctaattaagaatgccacagagagctttgtacagaatacccagggaacatcctggctcatatgaggctcacattcattcaacaatgactaggtccttaaatgttttccttaatactgtattacataggaaaatattttagatgccagaaataatttactcttttatcagcagaaattattttattgcatagtacaggttaaaaagtatcatataatcaaatgaggttgacacctagagaaggatcccatatgttatatataacatgaagagtaaatgcattgtttgatgaaattccatctgctgagcaatcaagcacatgtaacccatgcatggaaatcactttccaagaaggcaggagagcatcccacgttagggcagtctccagtcctatcccctcaccccaccccctgacacggattccttgctgccagccagcacatagctgaggctgcttcctttgccagagagctctctcataactaagtgccaggcaaatgaattcgtacatgaaaagggaacacctagctagtttttagagatcatatagtttttcccacatagtacttctatcgcctaaggcagatgttccaaaactccagtcgcgctagttagtagtgtagcctcagggctgcccccttccctaagtgaaccaaggggaaatcagctgggcattcttaccattaatgtcctaggtcaggggctggaaaagttgttaagtgacagatacttgcaggccattttccatccccaatgaaattggtaagaagacttacagaatcaaattcctcctagatgtttatttagctgtggaggctgacggctactattaatgtccagattcatgggccttgtctagaccatgccaagaaaactcagtaaactcggttcatttagacaaaaggaaaagaggatattttcaattcattaacacattgaatgacaaacagcttgacattagatagaccatggctccctacaattttgtgtagaaatacccttttctaaatataaatgtataatctatgaaaacataaatgtattatgtactgcagagtttttggagctcactaaagattaaaataatagggcttgataaacttgtggagttttggtctcctagtaggcactctataaatgtttgttgaatgaatgaatggacaaatgaatcacatttccattgtccatgtggttgtggtgttgtgtgaaagcagcttctcaatgtggtgcatattttcatgatatcatataaaggcctaactgagaactgctctgcttttcagaattctttggtgatctggacacgctgatggggcctctgacccagcacagcagcatgaccaatcttgtccgctacgttcgccaaggactgtgttggctgcgcatcgatgcccacttgttgtagtgggtgttctcagatctctagcatcacgacccatcactctacctctaccagcgcactgatggtcactggtggaactccactcactggggaacgttctctttggttatgtttgtttttatgcttcttttgttatctgtaaaaaacagaagtcattgtaagttgacactacaacttaagggcagtgtacgttttattacttagtcattttttttcttttagcatttgatatgca

SEQ ID NO: 698986 - DNA, 3338 bp, Homo sapiens
gaagtaaaattaaactgcacatttgtctcagccattcatttgacttggctgattctggcccagcagtcacagactgctccacaccagtcaaggtggggacaaatgtgggctacccattactactgtatcgctgagcatgtggggaaaccatctcattggaataggaaggatgcagattttgcaacccaatcatttaagtttgaatcctacctgggtcatgcattacctaggcaacctaggcaagttaattaaatctgtgagctgcttcctagcttctgtctctataatggacgtaatggtgatgatgatggtgaaacgtcccagatggatgatagagatgggttgaattaaataatgggtgtaaagcacctagtataaaattctgagttcaaggtagaaattctacaaagatttattatctttccttactccataatattatgtatctatataactcaaagattttgtggctcacaaagcacattccataatttgagacctcacccctcaacgcagctataaatttacactgactcctgggaatatctgcatgtattggttccacaggtttgtgcagcaatttctatgtgccaggaactgcactattgctttatcatttgttgtctcatttgcccttatttcatacatgaggaaactgaggctctatgagattaagaaactcacccatgttatcacagctcttgcttgttagaagcagaaatctagaagtgtctgattccagagtctcatttcttaatcaataggctacactgcccatctagagagcaagattaatgacaggtcctcagagacctttggtgagatcccaaaccagttatctgagcaatggataattattaaattgtctacttttctacacctctggaaactcagagacaactggcctatacaaccagactcatccaggggttctagaattgcaagtgaagatagacacatcttaagatttgcctagcatgtctgcctctgctatttctctcttattttgtattagtaactggagggcagttcaatatttatggatttcctttatcattgcatccattttcaaaatctgttaaaagtatttccttctaaattaactaacttcagaactttccaggagcaatgtgatggctgtgctgatgttagggtgaaatggtgttaatcttgtcattagcacagtgtgtcaaagagttgctaaattccctgtgtcatcttgaatgaaaacaactccgtcactctaccagcagagagaaaatgtgtcctgttaatgctgtcattggggttttcagcggactggggagaagactagtgtgaaatcttctgctcaaagcctggagtttcatactttgtcatttctgatctacttagctttggggattctattcacatctaccttgtctacatagaaaagagagaactgaagagcttcccttttggttgcagctctgcatctcactggagacaaccacgtatttgcacgttttttacccagtggagatgggtgaagttggttctcccagtgaaaggtctccactcctgcctcatactgcccacaatgcagctgcagatggcttattgtagaaggttctggtgctgaaatgagccaatggcacttatgctgccctctggcctttggtctagaagcttacctgcccagctgcttatactgctcatttggagcagttattaaaatggtgtctaattaagaatgccacagagagctttgtacagaatacccagggaacatcctggctcatatgaggctcacattcattcaacaatgactaggtccttaaatgttttccttaatactgtattacataggaaaatattttagatgccagaaataatttactcttttatcagcagaaattattttattgcatagtacaggttaaaaagtatcatataatcaaatgaggttgacacctagagaaggatcccrtatgttatatataacatgaagagtaaatgcattgtttgatgaaattccatctgctgagcaatcaagcacatgtaacccatgcatggaaatcactttccaagaaggcaggagagcatcccacgttagggcagtctccagtcctatcccctcaccccaccccctgacacggattccttgctgccagccagcacatagctgaggctgcttcctttgccagagagctctctcataactaagtgccaggcaaatgaattcgtacatgaaaagggaacacctagctagtttttagagatcatatagtttttcccacatagtacttctatcgcctaaggcagatgttccaaaactccagtcgcgctagttagtagtgtagcctcagggctgcccccttccctaagtgaaccaaggggaaatcagctgggcattcttaccattaatgtcctaggtcaggggctggaaaagttgttaagtgacagatacttgcaggccattttccatccccaatgaaattggtaagaagacttacagaatcaaattcctcctagatgtttatttagctgtggaggctgacggctactattaatgtccagattcatgggccttgtctagaccatgccaagaaaactcagtaaactcggttcatttagacaaaaggaaaagaggatattttcaattcattaacacattgaatgacaaacagcttgacattagatagaccatggctccctacaattttgtgtagaaatacccttttctaaatataaatgtataatctatgaaaacataaatgtattatgtactgcagagtttttggagctcactaaagattaaaataatagggcttgataaacttgtggagttttggtctcctagtaggcactctataaatgtttgttgaatgaatgaatggacaaatgaatcacatttccattgtccatgtggttgtggtgttgtgtgaaagcagcttctcaatgtggtgcatattttcatgatatcatataaaggcctaactgagaactgctctgcttttcagaattctttggtgatctggacacgctgatggggcctctgacccagcacagcagcatgaccaatcttgtccgctacgttcgccaaggactgtgttggctgcgcatcgatgcccacttgttgtagtgggtgttctcagatctctagcatcacgacccatcactctacctctaccagcgcactgatggtcactggtggaactccactcactggggaacgttctctttggttatgtttgtttttatgcttcttttgttatctgtaaaaaacagaagtcattgtaagttgacactacaacttaagggcagtgtacgttttattacttagtcattttttttcttttagcatttgatatgca

SEQ ID NO: 698987 - DNA, 1177 bp, Homo sapiens
taaagcttacattgcagtgagattttttttttcacttcagtttataactggaatgtttttgtttacctttattttaaaatgaacgttcagaccaggtgtggtggctcatgcctaaaatcccagcattttgggaggccaaggtgagaggatcgcttgagttcagaagtgtgagaccagcctgggcaacatagggagacctcatctctaccaaaaatttttttaaattagccaggtatggtggtggcatgcacctgtggtcccagctactcaggaggcagaggtggaaggatcacttgagtccacaccactatactccagcctgggtgacagagtaagagaccttgtttaaaaaaacaaaacaaaacaaaacaaaaacagataatctgcaataagtctgaattatttgcactagttaattttatgtccattacaaatgagtgctccccgaggtcaggagatcaagaccatcctggccaacatagtgaaaccccttctctactaaaaatacaaaaaaattagccaagcatagcagcacacacctgtaatcccagctactcaggtggctgaagcaggagaatcgcttgaacccagaaggcggaggctgcagtgagccaagatcgtgccactgcactccagcctggcgacagagtgagactccgcctcaaaaaacaaaaggtgtgctcccttttcatagtgtacagttatgaaaaattgctagccagtcaaaamgtacatttccctgatccccttatatctagatagtgcatatcagtttttgccgatggagtgacaacagaattggtgtgttacttcaaggccaaggtgttttagaagtgaatataccttctctgtgttcttttttgcattttgctggctggatgcagatgactgtcaggctctaggggatagtggacccgcaagatagaaggagctgatccttgattcactttggacaggaaagaggtccaaagaccagtaactcagtcactttaatgtgaccaaaaaaaccatgtcaagctacttgtgtagtttagcaattagcatcaccttaataatatgcttgcttcgttaatactgcagatgctgttaatctgaccagatatgatgtttgtctgaaaaccaaaccattattattgatcaggtacaatttctggaataacaaagacaatattgaagg

SEQ ID NO: 698988 - DNA, 594 bp, Homo sapiens
gtcatcgccttggttttatgtgtctgtgactctttcccccagcctctccaccagaactgacatctccactcaggactttctcctactgcccagctgtgatcctggcccctctcttcttcggcacaaggggattcttagatatagctcctgtttcttgggtgtgggtctccctgtttcttggtttggtcccttgttttaggaatgtgctccccctagggtttccagagaaagtgttttcctcctactctcctgggtaattagaggtttggctgacagtattgtrggtggatacttttcttttgcccaatgttttccagcttctagtcttgggcagctgaatgatcagaagttgtcctgtttcctcatactttgcctgtcccatggttaatttctgtctctctctctctctttctggaagcttgtagaatcttcttgttccctacatcctgcactttcacagtggtgggtttggtgtgggtctgttttcaaccattgtgctgagtacttggtgggctctttcctgtgttctcttcctggcaaactttcttgaatgatatcattggtgatttcttccactttggtttctctggcgtg

SEQ ID NO: 698989 - DNA, 1167 bp, Homo sapiens
tgtgggccagttagcactgagaccttgcttccagagaaatctaaacgagttgttgatttttcagtttgttcagctttttacttsttgttagaactgagtgaaaatttttaagctacttacatacctgatggaaattcgaagtctctagggcatgactggaggatatcagccccacagcaggttgaggatggagtcatgagtgaaatgggtgaaatgagcccatgggctttggaaactgcagatctgtccttctgcctctgaccccctggtgagtccatgtagaaagagaaaccaccattgcaaagcatatgatggtgagaggaagctagcttggctgcccgcatctcacctctagtctcaaactggctctcttctctgattcctgggcataggccagggtaagcatgggaggaatttatagtttaactttaaagcaaggatgataatagtccctccctaaaatcagctcctccttgtcggggactaccttggtaaatctaagaaaagaccacaaattatgggaggggcccaaattctgctaaaatgcaggcatagtttctataatctcttactgctcaggagtcatgtgtccagaggtcacaagatttgtgactttcctagttgctcctatagatagcaagactactgtagaatctgagatttatcttttgagatgtttctcagacttttgcattctggcaaccagctgacctcatctagactcatgaccaatggctcaaccagtcatgtggcccccactcagaggcagattcaacaaatacataccattttcctacctgcatcattttatctccagccagtcaacagtacttattccttagaccttcgcccctcaaagtttttgaaaaactctaacctcagagccactggggaaggtgatttgagtcataataaatttctgtcctcctgtttggcagccttgggctaagtaaaactattctttactacacatcaccttcacaataaattggctttgcctgtgcagagggcaagaacctgtcaggtgattataagaatggatggagcagtcactgatctctttctggtggtctgtttcatgagtcagcctctcagagggaaagagccctggactgggacacagtggaagctcattctcctggtgacccggggacattgcctcattac

SEQ ID NO: 698990 - DNA, 1095 bp, Homo sapiens
tgccatggacatctatatctcatccaaagagaccctcagcagatcagaagggccaagaggtcctgagatggctatgtatgattgtaagatgaggcaaacttccttggaaggcacagaaagggacagcgaaacctggcaggtgagaccatgcagtgatttggcccttggttctatggaccagtgtcaagtcaggctgatgcggcctaagctcctatccaagtcgcggcaggtggggtcaagagcccgatcccaaccagctccctgccctgtgagtcccatctcacaatcacccagcccaggctcaaatcctgcaaacaaactaccctaatttcccttttaagaactccactaagatctttcaagggattcttccctgaggtaaatctgatgcacttagctttgcttgatcaatacatttttttgtcctttgcatgacttgacagcaataatgagaacttttttttttgcttcagtcatttaaatgcttaagataatatgaatgctaggctcagagaacaattttaaaagagcatagatacagttaccctaaaagaaggaggaggaggagcagagcagttggggtcctggcttctttgatactagaattcaatggcaattgaagtagaaatcagtgaatacaggtgaaatcagtaaagtcaagtgatgagaaataattgttatttatttcctctttatttggctgcaacttggggtaaaaaagaatttcactgggttcaactgcatcacacagatgtttcttggacctaacttgtttcatatttttttagagaagctacacgctgaacatcatggtacgtgtctgtaatccctgctacttgggaggctgaggtggaggatggccaggagttgagcccaggaggttgagaccagcctgggtaacatagtaagacaccattaaaaaaaaagagagaagaagaagaaacttcaaaaattaacctctgtaagcagaactaccatttgattcagcaatcccactactgggaatctacccagaggaaaagaagtcattatataaaaaagatayttgcacacgcatgtttatagcagcacaattcccaattgcaaaaatttgga

SEQ ID NO: 698991 - DNA, 592 bp, Homo sapiens
tgtgacatatgtattcctaaaaattaccacgctatgcaaaatcaggcaatccaaaaccacagggcttatgagaaaaatggggttagggacataacattcaaaaacttcctcagtgacccattaaaaaatcataggaatgttatatagattgagcatcccttatcagaaatgcctgggacaacaagtatttcagattttttttttttttttttttttttttgcattttggaatatttctattgtacttactggttggacattccaaatctccaaaaatccaaaatccacaatgctccaatgaccatttcctttgagcatgatgtcgacactcagaaagtttcggatttcaraatttcggattagggttcctatcaaaatggtaaaacactgacatgtattacatgctcaaaaaatactggctgggtgcaatggctcacgtctgtaatcccagcactttgggaggctgaggtgggcggatcacttgaggtcaggagttcaaaaccagcctggccaacatggcaaaacctccctccactaaaaatacaacaaattagccaggcgtggtggtgcatgcctgtaatccgagctactc

SEQ ID NO: 698992 - DNA, 540 bp, Homo sapiens
tgagacggtgactgatatttccaaaagagatgactacaggttgcattcatttttaagagagatcttagcagactggactttcagtatcatgaaacataaaggaaagatgtttcataagamaaaagaaagctgagcgcaatttgaattgcatttaacctggagaagttctttatatgccaaagaaaggcaattttctgccccacatttgcctaacagaagttcaatgtgattgcctcatagagaccctttaactaatgctgattcctccttaaagggcaggtttatcttactgtttcttccttgtcaagttaggtacattttcatttctctagccaaaataaagtgttttaggcgttgatttaggttggatctacactcaaatatttttttttttttttttgatacggagttttactctgccacccaggctggagtgcagtgacgtgatctcggctcattgcaacctctgcctcccgggttcaagtgattctcctgcctcagcctcccgagtagctgggactacaggcgtgcgccatcatg

SEQ ID NO: 698993 - DNA, 1794 bp, Homo sapiens
atttcctggtgttggaaggagcacctcaagtgcaatgatgcaggattgctgacttaattttgatgctgtactcaactcttacttgtgggaagatgttacctaagaacgattttgaaggagtgggcaggttgagagagctcagattcacactctgttagagaacaagtctcacctatacatcagaagttagtccccgagaaaaattcttgcctgcagaaatacagtcttggtctctcaagagtgattgctctggcctgctaggatttccattaagggatgtcattgactattgattttgcccaaatgtgcacttcttctaatgcaaagtgagtttatattctggctgaacatcttggtacttttcaaactacaacaaaggtgcttggtaaaaaaaggtttgaagttaatgagatttcatttagtttgcattgtattttctataacctaagaaaacccatccccaaaccttaataatttaaaatgaccattgaccagtcaaatagtccccatattttcaattttcctgtaatagatcatgtctctgttgaagcggactattatagctgcctgaaaaagtattgtttgatgtctgtaagcacagtcagcaatcaataatttgaaatttgtaccatttgtacctttaagtcctggcacatcattttttatttcattcaatctgcttactgttgaagaaaaagaattttgaactattgccacaaaacacatttatgtgtgaaacagagttcatttatatggcaggaagtatgtcattttgacgtttatttgcaatattaattgtatatattgatttcattttttcagaaattgtaaatttattataaatactaccactgatgaccttattttggtgacactattcttctgcagaacttgaaaagatttggcatcttcatggctttttaaattcagaaagacaacatatgctgtaatattaaattaaaattctgtaattggttgttagttcaaggacaaacttcagtaggaagtgcatcttttttcaatgttgcctcttagctgttagatgaagaatgaatgacctttcatgatcagctcatatttacttgtctctctaactcatttctcgtgtttgatcttagcccaaatataaatatagtgtggaaagttatctttagccatttctaagtatcaccagtgttttcagttggtaatcataagagcagcctatgattactttcaaaacctttctctgccctcatcaaatataccgtcctctccacaaacacacagggatagtattttttttaaaaaaaaaccttcttccctacaggtttggggtttgaaataactgagtactctgagtaatgaatccttacaaaggacagctgagtttagcatgcccaagggaaaaagaaggtcaaagtgttgccacccaagaatcctgggagcttcytcaaagaaaggaaggaagaccttagactcttcatgaggaatgagatgttctcaggcttttcaagaggatacaggatttaggctggacaggccagcttgtctgtaataattgctgcctgaaagagaggaacacccttctaaaaggatgactacactttgggagacagaaaggtagtctggagtctgttctttcactgactcaaaagtacagttcaattactttactttgcagacatcatttttaaaaatcacattgagcaatttagtgttcacattttaattgaggacctagtgtatgatggtgtgatagacatgtgaaaggggcatttgagttggatcttgaaagatgggtaagacagatgg

SEQ ID NO: 698994 - DNA, 1794 bp, Homo sapiens
atttcctggtgttggaaggagcacctcaagtgcaatgatgcaggattgctgacttaattttgatgctgtactcaactcttacttgtgggaagatgttacctaagaacgattttgaaggagtgggcaggttgagagagctcagattcacactctgttagagaacaagtctcacctatacatcagaagttagtccccgagaaaaattcttgcctgcagaaatacagtcttggtctctcaagagtgattgctctggcctgctaggatttccattaagggatgtcattgactattgattttgcccaaatgtgcacttcttctaatgcaaagtgagtttatattctggctgaacatcttggtacttttcaaactacaacaaaggtgcttggtaaaaaaaggtttgaagttaatgagatttcatttagtttgcattgtattttctataacctaagaaaacccatccccaaaccttaataatttaaaatgaccattgaccagtcaaatagtccccatattttcaattttcctgtaatagatcatgtctctgttgaagcggactattatagctgcctgaaaaagtattgtttgatgtctgtaagcacagtcagcaatcaataatttgaaatttgtaccatttgtacctttaagtcctggcacatcattttttatttcattcaatctgcttactgttgaagaaaaagaattttgaactattgccacaaaacacatttatgtgtgaaacagagttcatttatatggcaggaagtatgtcattttgacgtttatttgcaatattaattgtatatattgatttcattttttcagaaattgtaaatttattataaatactaccactgatgaccttattttggtgacactattcttctgcagaacttgaaaagatttggcatcttcatggctttttaaattcagaaagacaacatatgctgtaatattaaattaaaattctgtaattggttgttagttcaaggacaaacttcagtaggaagtgcatcttttttcaatgttgcctcttagctgttagatgaagaatgaatgacctttcatgatcagctcatatttacttgtctctctaactcatttctcgtgtttgatcttagcccaaatataaatatagtgtggaaagttatctttagccatttctaagtatcaccagtgttttcagttggtaatcataagagcagcctatgattactttcaaaacctttctctgccctcatcaaatataccgtcctctccacaaacacacagggatagtattttttttaaaaaaaaaccttcttccctacaggtttggggtttgaaataactgagtactctgagtaatgaatccttacaaaggacagctgagtttagcatgcccaagggaaaaagaaggtcaaagtgttgccacccaagaatcctgggagcttcttcaaagaaaggaaggaagaccttagactcttcatgaggaatgagatgttctcaggcttttcaagaggatacaggatttaggctggacaggccagcttgwctgtaataattgctgcctgaaagagaggaacacccttctaaaaggatgactacactttgggagacagaaaggtagtctggagtctgttctttcactgactcaaaagtacagttcaattactttactttgcagacatcatttttaaaaatcacattgagcaatttagtgttcacattttaattgaggacctagtgtatgatggtgtgatagacatgtgaaaggggcatttgagttggatcttgaaagatgggtaagacagatgg

SEQ ID NO: 698995 - DNA, 661 bp, Homo sapiens
atctagcccctcatctatttttatcatttcctttattacattctttcaagtcctttttatatagtaaatcattcattcattcaacagatacaaatgcctatctgtcccaggctgtgctaggttctggggatacaacaagaacatggtagacatgctccctgccttcatggcacattgagtccagcagagaagaaagagattgaacaagggtttgcacatctgatgagagaatgccaggataatagagaaggctttccaaaggaagcatcttgcatgcagcaatcctcacccaagcaaaacggggaccatgtcaaaagcgagaccaagggawcagcaggtgcaaagctctggggtggaacacaaagaaggtctatagggctggagcttaagaaagtgagcacggaggggtgcaggatgaggctggggaagaccatgcaagaccctgtttgcccatctgcctcttagaattcatagcacactcaaggccactaacagggacaaaacaggatcttcctagcctgacacacctccagactagccctccgtgagcatttcacccaaacacagagtctgtactatgttaatgtacatccccaaatcaccagcaaggcaaagcagtctcctcctctgagattcttttaattatatggggatatagaga

SEQ ID NO: 698996 - DNA, 1019 bp, Homo sapiens
gttcttgcatgcctggtccggcgcagcacaaggacgcaggatggtgggaacatgtagagggagggcacctgctcagagcttcttcrcatcctttctgccacatctgattcatcagatctggccacatgaccataactggctgcagtggaggatgggaaatgtagccttaatattgagtggcaaatgtttaaataaaaaatcagagtaccattaaaaaatgcagtagctttcaaaattttaaaaccatgattcataataataaatatattttacctaatgactcaatacaggcaccatgaacacatagaaaacttttataaaacaatacttaccactactttgagtgatgcatttaatatttttattattaattaatttatttattaattatagctttataaataaagatatatttataatatctttatcgcaggctggagtgcagtggcaccatcttggctcattgcaacctctacttcctgggttcaagtgattctcgtgcctcagccttttgagtagctgggattacaggtgcctgccaccatgccctgttaatttttgtatttttagtagagacggggtttcatcatgtcggacaggctggtctcaaactcctggcctcaagtgatctgcccaccttgacctcccaaaatgctgggattacaggcatgggccatcatgcttggccaacatttaatatttttatagtttataaaataaatgttgtttgtgaccaacaaatgggggatgcctgcaatttgaaaggcgctactacagaaggatgaaagaagaaatcgagagagtaactaggggtctctaccatggagaaggaagtacttgagcatagggaagataatttacctaaattccttgcagtgcacatcacagtattagacactggacagatacaagaaaacagtcaaccaaagcaatcagtccataaatcaaacaatcaacgaaatattacccagcagaggtggagtctttactgatagttcagaccaaaaaaaaaaaaaaaa

SEQ ID NO: 698997 - DNA, 1019 bp, Homo sapiens
gttcttgcatgcctggtccggcgcagcacaaggacgcaggatggtgggaacatgtagagggagggcacctgctcagagcttcttcacatcctttctgccacatctgattcatcagatctggccacatgaccataactggctgcagtggaggatgggaaatgtagccttaatattgagtggcaaatgtttaaataaaaaatcagagtaccattaaaaaatgcagtagctttcaaaattttaaaaccatgattcataataataaatatattttacctaatgactcaatacaggcaccatgaacacatagaaaacttttataaaacaatacttaccactactttgagtgatgcatttaatatttttattattaattaatttatttattaattatakctttataaataaagatatatttataatatctttatcgcaggctggagtgcagtggcaccatcttggctcattgcaacctctacttcctgggttcaagtgattctcgtgcctcagccttttgagtagctgggattacaggtgcctgccaccatgccctgttaatttttgtatttttagtagagacggggtttcatcatgtcggacaggctggtctcaaactcctggcctcaagtgatctgcccaccttgacctcccaaaatgctgggattacaggcatgggccatcatgcttggccaacatttaatatttttatagtttataaaataaatgttgtttgtgaccaacaaatgggggatgcctgcaatttgaaaggcgctactacagaaggatgaaagaagaaatcgagagagtaactaggggtctctaccatggagaaggaagtacttgagcatagggaagataatttacctaaattccttgcagtgcacatcacagtattagacactggacagatacaagaaaacagtcaaccaaagcaatcagtccataaatcaaacaatcaacgaaatattacccagcagaggtggagtctttactgatagttcagaccaaaaaaaaaaaaaaaa

SEQ ID NO: 698998 - DNA, 1308 bp, Homo sapiens
gttgttaaaaataatctcggccttgaggaactgacattttgctgattaaataatctgccccatagcataataggcaattttacatttaaaaaaaaaactaagagttacgtagaaaatttcacatacctaaaaccataacaattgggaaaaatatatcattattatgactatatgataaaagacattctaaatactaaggtacattaatgaatattgtattgatagcagatattaaggtttttgtaaaaaagatctatctttatacttttccaaatcacagaggcaatgcttaaagaataacttactatgacataataatcctaatatagttagcaaggaaggaaataacctcctgacaatggcttataaggctttacatgattttcaccccctcactccctctccagccatctctcctatcagtcacctcctcacttgccccattccagccacagtggccttattattattacgtatgtatcatatgtaatatatataatatataatatcacatataatatatactacatactattatatataatataaaatataatacatgtataatataatataatatttatacatattaaatatacatttttgttgttgttgaaatggagtcttactcttgtcgcccaggctgaagtgcagtggcatgatcttggctcactgcaacctccgcctcgcggattcaagcaattctcctgcctcagcctcccgggtagctgggattacaggggcacaccatcatgcctggctaatttttgtatttttagtagagacagggtttcgccatgttggccaggctggtctcaaactcctgacctcagatgatccascccccttggcctctcaaagtgctgggaatacagatgtgagccaccgcacctggccccattattatatatgaatccaagaaaatatacagagaaaccatcaagaaataaaaaaaagggtttagtaaagaagctagtaacaaaataaataccaaaatctattctagttaccaacaaaaacagaaaaaagcatggaaaatatcccattcgtgacagcaaaatcaagacaaacaaaatacaaataagaaatatctgagacctgtatgaaaaacttctactgaggaacatacaagaaaatctgaataaacagaaaaagatgttatattcttaagtgtgactcagagttataaagacatcaattcttcataaattacaacatgaaattagtgcaatcttatgaaaaccccaatgattttggttcttttttaatttgacaaaatgattttcaaatttatctagaaatataaac

SEQ ID NO: 698999 - DNA, 791 bp, Homo sapiens
tttcaaagcagaaatataaattaattttgccaattctggcaaccaataaccctcaaattttctatgaccttagctttttccccctttatttacctcataaaagggaagttaggacatattaatcctgtaaatagctccatattttctgagatcacttcagaagaagactatttgaataagatgaaattactatttgtcggggaatttaattatactctttttcttggtgttggttttcaagtttcttaatgcctttagttaatagcaggtagctatagcaattttaaagtatctctttcagttataacactctctgttgacttttttaaagcacctaacaattgacaaagctttttaaaaatctcacttgaaaaaacaaaaaagactcacttgactcttgcagctactatgtgaggtggtgagagcagcctttactaccyaaactttacaaatgacaaaactaaggttctgagagttaagagacttgcttgaggacacaaagtagctatgtcatgttagccggtgcaagaagtgaacatctaaacactgactcctgggctcttggtaatacagggaacacctctccaattggtttgctttccacgctccgctccaccctcaccccggcgtgcttttcactggggggattttctcatgagctcaggtgggctctgggctgtatcatgctcatccatatgcactcatctatgagatgctcattcctctttattaaggaactatgacaaataaaatctgttaaaaaaaagttctagatctccagttctctctcc

SEQ ID NO: 699000 - DNA, 1030 bp, Homo sapiens
cgctagttctcttcttcttcccatataccttgcttgtagggtttctatcaacacagaaagcatattcattttcattatctaagaggatcttcagaaaaactctctaggtatagaaggtagaaataatgctttccttacagataatgaaattaacttaatgtttgagaaattaagtggcaataaattcaatactggaaagcttatcataataaaaattatataaatgacagtgtctttttgtttggtcttctaggaagctcagagtcaaatctaaaggttaatgtttgcacctctgttggtccagaattccatgaaataattgaaaagatattttaatatggaataacatatgtgttggcagacaaatatatttaaatttaaaacataatttaatacataatatccatatgtataaacatatattaaattaaaaactttatcaatttatacaaatgtattcattgttttacaaacactttagtaatgytaatatgtacttaataatagccttatgagaaaagtttttgattgtttccccatcccccttttacagaagatgaactcgactctctgagagaatacgtaacttgcttaaagttacatagctagaaaaggcagaaccagaattcaaatccaagtaatctcagtctagattctgtgcctttaatctctttcctaatactgcttctgttgtgatacttaaaaatgtagtttcttgatgaaactttgacttagaggtctacagcttctaagagctagcagttgtcaactgttttgttcctttagagggagatttccactggtgggagcacaagagcataaaggtagggaactggctggctcttctatcatcatcatcatcatcatcatcatcatcatatgtattatctattgagtgtttactataaaatgggcacatttctatacagtttacaaataggcattatttggttcccacagcaacatatcaagtacatattcctttttgtttgtttgttcgttttgtttgagatggcatctcactctgttg

SEQ ID NO: 699001 - DNA, 1478 bp, Homo sapiens
caggtggcgggcgcctgtaatcccagctactcaggaggctgaggcaggaggattgcttgaacctgggaagtagaggttgcagtgagccgagattgcggcactgcactccagcctgggccacagagccaggctccgtctcaaaacaaacaaacaaaaacagatgttgtgttgcaggtagctaaagctgccaaaggggtctgggtatattcagtgtgggagatgggcgttggtccgtattcctggctggggaaaagaaaggtggtatagacctttcctataccaggtgatatacagagttcatagttttgccaagggttccaaagacaggtgtcggtggtgatgacaagtcatctctgcttcctctaactctagtgctcttggtcaccaatgcctgaggcctggaattttataatttaattcgtcatgtgggggtgtttggtctccccagtgagacaggtgtctgtcttaatgtgtcccataacccctattgcaccagatgtttgtctctgcactaggccgttgcccgagagctcaccggggaatgagttagttggggacccctggagaacctttgtgttctggagcctacagagggctctggcctgccggaggggactgataacagctgtacatctgctgctgcagcctctgcctccaccagcatcatcttttgcaagggaaactgcagtcttctccattggcctccctcctttcaatgcattctccacacagcagtcaagtgatctttttgaaaagataggaatcaggctatgccactgttttcttaatgtcttctgtggcctcccatagcattcagaatgaaatccaaactccttgctgtggtctatacaaacctgcaggagatggcctattgccttagtttcttctcctcttgcccactctgattcagcctcctgggtttttttcccagttcatcaaatatgccaagctctttcccaccccagggcctttgcccttgttctttctgctttctttttcccagagctgggctgttgtcatctatcaagtcaccgctcaggggtcaccttcctcatctcctatagaaagtggattccccttgttactctctatttcatcactgtttctttctttcacgtgctaatcataagctgatatggtttggctctgtgttcccacccaaatctcatctcggactgtaattctcacatgtcaagggaggaacctggtgggaggtgactggatcatgggggcggtttcctctatgctgttctcatgatagcgagggagttctcatgagatctgatggttttaaaagtggcrgtttcccagttagctgggcgtggtggtgcacacctgtaatcccaggtactcgggaggctgaggcaggagaattgcttgaacctgggaggcggaggttatggtgagccacgatcacgctgttgcacgccagcctgggcaacaagaatgaaactccatctcaaaataaataaaaataa

SEQ ID NO: 699002 - DNA, 608 bp, Homo sapiens
cttaccacgttgtaatgtaayttaactcttcacagggttcttgactccacaaaatcattaactcctgagcacagaggctgagcctgtttcattcatcattgtaattccagagactggcatcaaatgcttgttggagtgaataaacaaatgggtaaccagacatttttcacttccctcctacattcgtatcattatttattggtttttggcttgacaagctatccattcattcatgtttagtcagggtgatataattgaaaactgatcttaaagaagaggtcaggaatgaaggtggtgacagagccatgctctctctagaagactctaggcgagaatcctacctgcctcttccagcttctggaggttgcagacaatcctcagtgctccttggcttacaggtgcatcgctctgatctctgccttcattgtcacatggtcttctccctgtatgtctgtgtctctgtatcaacatttccctctttttatttttatttacttatttttatttatttatttttgagacagagtcttcctctgtcacccaggctggagtgcagtggcgcgatcaaggctcactgcaacctgcacctccagggttcaagcgattct

SEQ ID NO: 699003 - DNA, 660 bp, Homo sapiens
tctggcctcaggtttatcctttggtgtttataggagttttctgagctggggaggatcctcaagtctaccattctggtgaccctatgcacatgccactcagatctgcattgatccgtgagcagtggaagcagtctagaccgcgcctaggacataggaaaggaataaaggagcaaactgtttagcaacatggaagctgcaggaagcatctgcctgccctattctaaccactctgaaaaacccaaagccttgtggctgragggatctacttcccattcactctcatcgtgtaagccgacttggcttctgtacctccatgccatggactggcttagaggagaaggacatagggctgctgcgggtggaacagggttagcagtgcaggtgagcaacagcccaaagtggacagtgattctttttgtttgtttgtttgtttgttttgagacagtcttgctctgttgcccaggctagagtgcagtgggacaatcatagctcactgtagccttgaactcctgggctcaagtggttctcccacctcagcctcccgagtagctgggactacagttgtgcaccaccatgcccggctaattttttaattttttatagagacagggtctcactctattgcccaggctggtctggaactcctggcttcaagcaatg

SEQ ID NO: 699004 - DNA, 617 bp, Homo sapiens
tgtccagtgtgtgctgacgctctccatgtctccatcgcccgccatcttgtgtgctgggaaatctctaccattgctgttctcaggaaattctgaggagattccaacctggttcatcacgaaatagcaccaccaacatctcgcttatgaatccgtttagttaagcagaccctgcagaaatcccctttccttcctttcaagtcctgaaatctgcctccatatccaatagacaagacgtagaaataaagtgctcacccatttaccaatggtatctcaggcacatcatctagcttctatgaggttctgaagttcactgattacaaacaaaataggtacaatacttatctcagaggacattatgagagttttactagaaagcgactttgcctagtggagtgccttgcacccatggaggaaaatcactaaataatgcttatgatgatggctaatttaatagaggtagctgaaagcctgactctttwttttcccccccagggggaaaaatgtgaataacagcttcaatgacaagcacctacttactaacattattttctttactggtatgaattagtcctgcaaagggctaggcttcaagttctgccatatttcaaaatctgtta

SEQ ID NO: 699005 - DNA, 617 bp, Homo sapiens
tgtccagtgtgtgctgacgctctccatgtctccatcgcccgccatcttgtgtgctgggaaatctctaccattgctgttctcaggaaattctgaggagattccaacctggttcatcacgaaatagcaccaccaacatctcgcttatgaatccgtttagttaagcagaccctgcagaaatcccctttccttcctttcaagtcctgaaatctgcctccatatccaatagacaagacgtagaaataaagtgctcacccatttaccaatggtatctcaggcacatcatctagcttctatgaggttctgaagttcactgattacaaacaaaataggtacaatacttatctcagaggacattatgagagttttactagaaagcgactttgcctagtggagtgccttgcacccatggaggaaaatcactaaataatgcttatgatgatggctaatttaatagaggtagctgaaagcctgactcttttttttcccccccagggggaaaaatgtgaataacagmttcaatgacaagcacctacttactaacattattttctttactggtatgaattagtcctgcaaagggctaggcttcaagttctgccatatttcaaaatctgtta

SEQ ID NO: 699006 - DNA, 973 bp, Homo sapiens
tggtgtatccttgctgctcataatacattgtgtaaagagagagacagattgaggggaaaaaaactattgaactaataggaagcaagacttgatcttgaaaattctcagcctttccaaatgttaaaatgtgctaaaatggagagatagcttccaagcactccagaaaaccacacacatgagaaaaagccaaggctmtgactatacgatcttttcctaaaatctcagaaagagcaaaaggccagagggttcagccacacaaagggctctttcaaaaaattaagggtatgcctcacagatcttctcaatcaaaccacagggcctctaggaaaatgaaatgcattgtccctcagcaacctcggcagaagcccaaggtagagaaggacttttctagaaaacatctgtgggtgaagatgtgtctaatggagtaaaccccagggaaattcatggaaggcccacaaagttcttgagaaaattctttcagaagaaacactgccaggttggactaagtgggacagagataggatcaaatgaaaagagacccttgtaactccaattctactagtaggaagcaggttgataaaatgactccaaacgtgagctgactttcatttagaaaaggaagaatgactcagatggtagaactaagatcccaggaagcagattctagagccatggagaattattcccaaagtttgaaatttaattttaaaaatctgaacattttctcagttgtattttggaattattatggaccaatgattcctttttatcctccatttccccttttttaaagaaaaatgtctgcagcttctttcctatacctctcccagaattgtatcttggatgttgggggaagataatttgtccctttcatttacagattcatcagttgagaggaactatgtgtccatggagcctcacccacacctggcctgatttaggtaatgaaactctggtcttggagcaaatgctg

SEQ ID NO: 699007 - DNA, 973 bp, Homo sapiens
tggtgtatccttgctgctcataatacattgtgtaaagagagagacagattgaggggaaaaaaactattgaactaataggaagcaagacttgatcttgaaaattctcagcctttccaaatgttaaaatgtgctaaaatggagagatagcttccaagcactccagaaaaccacacacatgagaaaaagccaaggctatgactatacgatcttttcctaaaatctcagaaagagcaaaaggccagagggttcagccacacaaagggctctttcaaaaaattaagggtatgcctcacagatcttctcaatcaaaccacagggcctctaggaaaatgaaatgcattgtccctcagcaacctcggcagaagcccaaggtagagaaggacttttctagaaaacawctgtgggtgaagatgtgtctaatggagtaaaccccagggaaattcatggaaggcccacaaagttcttgagaaaattctttcagaagaaacactgccaggttggactaagtgggacagagataggatcaaatgaaaagagacccttgtaactccaattctactagtaggaagcaggttgataaaatgactccaaacgtgagctgactttcatttagaaaaggaagaatgactcagatggtagaactaagatcccaggaagcagattctagagccatggagaattattcccaaagtttgaaatttaattttaaaaatctgaacattttctcagttgtattttggaattattatggaccaatgattcctttttatcctccatttccccttttttaaagaaaaatgtctgcagcttctttcctatacctctcccagaattgtatcttggatgttgggggaagataatttgtccctttcatttacagattcatcagttgagaggaactatgtgtccatggagcctcacccacacctggcctgatttaggtaatgaaactctggtcttggagcaaatgctg

SEQ ID NO: 699008 - DNA, 973 bp, Homo sapiens
tggtgtatccttgctgctcataatacattgtgtaaagagagagacagattgaggggaaaaaaactattgaactaataggaagcaagacttgatcttgaaaattctcagcctttccaaatgttaaaatgtgctaaaatggagagatagcttccaagcactccagaaaaccacacacatgagaaaaagccaaggctatgactatacgatcttttcctaaaatctcagaaagagcaaaaggccagagggttcagccacacaaagggctctttcaaaaaattaagggtatgcctcacagatcttctcaatcaaaccacagggcctctaggaaaatgaaatgcattgtccctcagcaacctcggcagaagcccaaggtagagaaggacttttctagaaaacatctgtgggtgaagatgtgtctaatggagtaaaccccagggaaattcatggaaggcccacaaagttcttgagaaaattctttcagaagaaacactgccaggttggactaagtgggacagagataggatcaaatgaaaagagacccttgtaactccaattctactagtaggaagcaggttgataaaatgactccaaacgtgagctgactttcatttagaaaaggaagaatgactcagatggtagaactaagatcccaggaagcagattctagagccatggagaattattcccaaagtttgaaatttaattttaaaaatctgaacattttctcagttgtattttggaattattatggaccaatgattcctttttatcctccatttccccttttttaaagaaaaatgtctgcagcttctttcctatacctctcccagaattgtatcttggatgttgggggaagataatttgtcyctttcatttacagattcatcagttgagaggaactatgtgtccatggagcctcacccacacctggcctgatttaggtaatgaaactctggtcttggagcaaatgctg

SEQ ID NO: 699009 - DNA, 1356 bp, Homo sapiens
aaatacagtcagcatcttcccctgtttctgaactggactaactggacagccataaaatttatgtgaaagagactaataacaaactaattgttaaaaggattaattcttaaaaagtatttttaattttgaaaagtaatacatgcttattataacaaaatcaaagtgtgctgattgaggacgtaaaacatttttaaatttcatgctcatctttctccctcccccagcccatctcctgtgatattcattgttaacagttctatgtctttttctagatggttctgtgtttaccaccctattgcatgaaatgcctaaaaatccagtcaagtgaattttgccatttacatcactgtgtgacctcttgtttttccttcatgcaattttgtggcyatgtttccgtgtcagaacaagtagatttactttttaaaactaattaaattttatttttttatcaaagttacacatgtacataattgtaagtcaaagataaaagaattataaggaaaaacagctgtctttttcccacgcctcttgatccccaaagcccttcagattccatcaccttcaacgtttttagatctttcttctgctgatacccttatgtctctaaataatatgtgtacacccccgactctttttttttttttttttgagacaaagtctcactctgtcacccaggctggagtgcggtggcacgatctccactcactgcaacctctgcctcccgggttcaagcgattctcctgcctcagcctcccgagtagctgggattacaggcacgtgccaccacacctggctaatgacaccccctttttaaaaattttccaatttctgacattgtccaccagcttcctaatacagtagatggggattatttaatgccgttgcagcgccacatagaagtatcaaacaaccagctcacacattttcccatcttctgtcctccctgaataattgcattacagcttcttgttagactggcattcagcactgacattattgtgactgggtaattattgttcacagctgactgaactatgtagggtactgtgattaatttcctttctttttgcaaatttaattttcctggagttagtcgttgccttgtcctttcattttcttaatgttttatgtagtgtttatgaatatatccaccaaagtttctggcaaagatgaaaaattctccaattgcagtcaagtgttggcaaacctgatctttctgtgtatttgctcgtttgtggatgtctgtcctaggtcttcagtctagacttccttccccatcaccccagcatcttctgtgcctctcttctgtttcctgtattccttgcccttgactgacttcctccttattgcagagca

SEQ ID NO: 699010 - DNA, 1356 bp, Homo sapiens
aaatacagtcagcatcttcccctgtttctgaactggactaactggacagccataaaatttatgtgaaagagactaataacaaactaattgttaaaaggattaattcttaaaaagtatttttaattttgaaaagtaatacatgcttattataacaaaatcaaagtgtgctgattgaggacgtaaaacatttttaaatttcatgctcatctttctccctcccccagcccatctcctgtgatattcattgttaacagttctatgtctttttctagatggttctgtgtttaccaccctattgcatgaaatgcctaaaaatccagtcaagtgaattttgccatttacatcactgtgtgacctcttgtttttccttcatgcaattttgtggccatgtttccgtgtcagaacaagtagatttactttttaaaactaattaaattttwtttttttatcaaagttacacatgtacataattgtaagtcaaagataaaagaattataaggaaaaacagctgtctttttcccacgcctcttgatccccaaagcccttcagattccatcaccttcaacgtttttagatctttcttctgctgatacccttatgtctctaaataatatgtgtacacccccgactctttttttttttttttttgagacaaagtctcactctgtcacccaggctggagtgcggtggcacgatctccactcactgcaacctctgcctcccgggttcaagcgattctcctgcctcagcctcccgagtagctgggattacaggcacgtgccaccacacctggctaatgacaccccctttttaaaaattttccaatttctgacattgtccaccagcttcctaatacagtagatggggattatttaatgccgttgcagcgccacatagaagtatcaaacaaccagctcacacattttcccatcttctgtcctccctgaataattgcattacagcttcttgttagactggcattcagcactgacattattgtgactgggtaattattgttcacagctgactgaactatgtagggtactgtgattaatttcctttctttttgcaaatttaattttcctggagttagtcgttgccttgtcctttcattttcttaatgttttatgtagtgtttatgaatatatccaccaaagtttctggcaaagatgaaaaattctccaattgcagtcaagtgttggcaaacctgatctttctgtgtatttgctcgtttgtggatgtctgtcctaggtcttcagtctagacttccttccccatcaccccagcatcttctgtgcctctcttctgtttcctgtattccttgcccttgactgacttcctccttattgcagagca

SEQ ID NO: 699011 - DNA, 1908 bp, Homo sapiens
tggcattgttcagcaagaaatataggcacagtactgtattaaaatgcacacacaccacaaaacaaaaaaacagagaggaaagcaaataaatgtcatcctctacattgtgcgagaaaattagttaaaaatgcacaggactgcccaataaatatttcagaggtggttttctacctgaggcagcatcaatcactgtggaaactccccttcgatcagagactggacgggatgaccctggcatgctgacggggtcagagcggactggctggatcctgcaatgcaatttaatttaattcacatatgttactggcatcaaaactgtcacttgctacaaatgaccttaaatcaggaatgctggagtagcacaatccattaaagaaccatccattctaaaacaagacaaacaggggagctgcagtccctaattgctgcacaaggataaaacactacaaayattctctacactctggaccccttctaacttatctttgtgtgttattccatagatttttaaggaagggactgaaaagctgacattaatttaaagggatacaataagtagaatgggagaggaaattaaacactgaaaatgtttatactgaaacctttgggatttccaagggacacacatgaagagttttgagaatcctgaaattcactaatatcaccatagctattaatgtgttccataaaaggcagcaatgtgtaatttcaaattttgagatgctccattaaaatgctcaatgaaagttactttatatctgacagtaagcataggataacaaagatgtactgtggccggggtgggtcactactaactgagctacctttataaaattaccaactagcatacaacaatcaattagaacctcagtaaacgtgcaaattactacacacaatttaaagttgcttaagaataataaacatccatcctggctaacacggtgaagccccgtctctactaaaaatgcaaaaattagccgggtgtggtggcatgcacctatagtcccagctactcaagaggctgaggcaggagaactgctggaacccaaaaaccagaggttgcaatgagccaagatcgtgccactgcactccagcctgggtgacagagcaagactccgtctcaaaaaaaaaaaaaaaagaataataaacatataaatgccaaatgccgagtgtctctttctagctgcattagaataaatactattaacataaaagtatctggaagattaaaagatctgaaagtcccaggcaacttagtgaaacaaaaacttattacaacaatatatgcatgcatttctggtaattcattcatacagtaagtatttactgaatattaattgcttgtaggcattactctgagaacaagcagaaacaaaacataaaatacagaccaatgtgtatatatatgacatagcacatgaacattcatgacaatgcaaaataaaactaaagtgtaaatatgaatgacataaatagtaaaagctcagattgaggagatgggggaatacatgcagggtccacatcagttagagatcttgcagagctggaacagggattaggtctgtatatagtaatagtatatacgcataatgaagaggagcaagaaatgccctttaagcacaggactacaacatatagaaacttagattagtgactgaatacgatagattcagggcatcttgaagtgcatgatttggctgaagtatagagttcataaaggctattgatggaagataaaaagttgataagaaacatgggacagatgacagaagcctgaaatgccaagtatgaactgcagactagttatgaaatgcatgcttttgttgtgaggaagaaaaaacaggagggaggtataggatgatctattaccggaaggtgaaaatactgattaacaaatattgatcactg

SEQ ID NO: 699012 - DNA, 184 bp, Homo sapiens
gctaaataataaatcaagtctggccaaaacttgtgctttcctcatatatgtatrtacattttcatccaagactatactttagcttttccatagtatttgcagctgcctattatagcttccattcataacctccccaaatccctagggcagctcctatacatctttggcacaaggaaagaggtat

SEQ ID NO: 699013 - DNA, 643 bp, Homo sapiens
gaatattttgtcacaattagatctggcttagagatgtgggaaacagggtaaggatgatcaggtatagtgtcctgaatgattgagcccgagactttgatcatttttcataaatgatttaaaacagcactaatagaaatataatatgtggcacttacttaattttagattttctagtggacactgtaaaaaacaagcaggagaaattaattttagtaatgttttatttgacccatatatcccaaacctggtcattttgacatgtaatcaacataaaaatcaatgagatattttacattcttttcttatacaaagtctttgaaatctggtatatattttacaattrcagcataggttgaatttcagctacattccaagggctcagaagcatgtgactagtgggtaccatattggacagcacagatctagaagaaggaatgtacagtataatcttcagatttacacatggcactcagctcagaagtgccaggttaagaagtagaatatgaaggaagaactctcaggacaagtatgtaagaaataaatccaaactacactttaaaatatgagatctaggattcttaaagtagtagtcagtatgtcactgtgcttccaaaacaagaaatctgacttttcatgaaagatg

SEQ ID NO: 699014 - DNA, 847 bp, Homo sapiens
tgtgagcctgtattgttgactggtgatgcttatgattttcaaggagaacaaactgtatacatctttccctaggactttaattgctcaacacctgggtttatattgaggccagagtgaatgacagtagctattaatcaagtagctggcaaactgcagaagctgaattggtccaggtgagcttaggctcttaggccaccctaagagaaccacctgtgtttagggagtaaaccttctctgctatccttgcccctggtccaactagtttgaaaatccctacaataaacatgttttggctgcaggtactaatgatgataaagcccagaataaatcagaacctcacatccctatggaaaaaaccctcgccgttcttcacttcctcatttataaaggggagttgtagmcacacccactcccatcacgctgttttgtgaggaacgaattagatcattggtacagacactgcacagtggggtgccatgcaatgcatggcagtagctccaatcacaccttcccagaggggacctgtctcaggactctcagggtaaataagcctcctagaactttgcaatatagtgactctgaaataggtattatgcttgctgttattttaatgttattattaatacacaggcaataagcacctccagggaatacacacagcttcatgtcctgtcctttccttatagaattcaggggtcccagggatggcattctgggttggccacatggcatccatcccagccctctctccctgcccatggatcccttctctcccagatgtccatctctcagcatctcttggtgctagtacatgggaatgaggcctgcagctagaaagtttgcttga

SEQ ID NO: 699015 - DNA, 847 bp, Homo sapiens
tgtgagcctgtattgttgactggtgatgcttatgattttcaaggagaacaaactgtatacatctttccctaggactttaattgctcaacacctgggtttatattgaggccagagtgaatgacagtagctattaatcaagtagctggcaaactgcagaagctgaattggtccaggtgagcttaggctcttaggccaccctaagagaaccacctgtgtttagggagtaaaccttctctgctatccttgcccctggtccaactagtttgaaaatccctacaataaacatgttttggctgcaggtactaatgatgataaagcccagaataaatcagaacctcacatccctatggaaaaaaccctcgccgttcttcacttcctcatttataaaggggagttgtagccacacccactcccatcacrctgttttgtgaggaacgaattagatcattggtacagacactgcacagtggggtgccatgcaatgcatggcagtagctccaatcacaccttcccagaggggacctgtctcaggactctcagggtaaataagcctcctagaactttgcaatatagtgactctgaaataggtattatgcttgctgttattttaatgttattattaatacacaggcaataagcacctccagggaatacacacagcttcatgtcctgtcctttccttatagaattcaggggtcccagggatggcattctgggttggccacatggcatccatcccagccctctctccctgcccatggatcccttctctcccagatgtccatctctcagcatctcttggtgctagtacatgggaatgaggcctgcagctagaaagtttgcttga

SEQ ID NO: 699016 - DNA, 1145 bp, Homo sapiens
tgtagatattattcattgtgagtttattgtgtagaattcatatgaaaacacattttattttagagcagttaaacaaattagaaaagcctgatgcattcagaatcaaataagccaaaataagcataagaaagataaccttgagcccatactctttcatggaaactttctaaggtataaaaataaaacaagccaatggcattatagaaaatgtgatatccaaatagaattgtttataaatagaatgttttacaaagtttccatgaggcatcagctgttctttaaccccttgcatgttgacattttccagcccactagctaaattaaggcttaggaaaaaattacctatgcattgtatttttatgygtctgttaatctatttttatatgctctgggcatacagcatcagttccagtataaacatatcaaaagatacgccctatacacacaacacatgtatgtgggcaaacataagaaagaatataaaatgcttcttttacctctatgttgcagaaaaaagctgtaacaagacaaaagtttaacatgagtagagtgagccagcctgcttgattttctggatttgttgcagtttaagcttattgtattaatctagttaaaaatagcaccctcatacatgtgctcaaaagtgtcccattttagatgataaattccatggcaattccaagtaagaggcaagaactgatcagttatttgtgagttactatagcagtcagaggaagctagattaaaaatgcttgaaaatatttgttatctatcaagagaataccattcagttatattcagttaaaaccagatttcaggacaattggtattgaaagattgtttcatctgcccaaccagcagtatcactcttttaaaattagctatgtatgattatttttctctgcccatctatttctttttccctgttacacacacacacacacacacacacactccagttacagtttgatacacaacaatactttggtgtgtatcattacagtttagtaaatataatcagcctagaaacaaggaaaacagtcttcatttttcatataaaaacgccaatcagttcccataatcctggagcaaacaactttgttactttctcttcacaataggcacaaagagcaaacaaaaaacgg

SEQ ID NO: 699017 - DNA, 716 bp, Homo sapiens
ggggtcttgctatgttgctcaggttgtccttgcactcccggcctcaggcaatcctcccacctcagcctccccacttactagcttagggaycccttcgcctttttaagcccccttaactgcctgtctaaacatcaaccacctgggccatgctgtgtgacctgaagtcttcagctcaccctctctgggctaggcatcagagcagtgtaggccaaatgcagaagcgtgacccaccaactctttttttttgagacagcgtcttgttctgtcgcccaggctgaagtgcagaggcatcatctcagctcactgcaacctctgcctcccgggttcaagcaattcttgtgtcccagcctcctaagcagctggaattacaggtgcacgccaccatgcccggctactttttgtattttttttttttttgagatggagttttgctcttgttgcccaggctggagtgcagtggtgcgatctcagctcaccgcaacctccttgaattcaagtgattcttctgcctcagcctcttaagtagctgggatcacagttgcccaccaccacgcccagcttttttgtatttttagtacagacagggtttcaccatgttggccaggctggtctcgaactcctggcctcaagtgatctgcctgcctcagcctcccaaagtgttgggatgacaggcgtgagccacaccgcaccgggccacagctaggaactcctgatgt

SEQ ID NO: 699018 - DNA, 738 bp, Homo sapiens
cactccaccctgggccacagattgacactgtcttcaaaagaaaaaaaaaaaaaagcatgtttctaaccactctccttctatcaaaaatacttttgggcctgggtgcggtggctcacgcccgtaatctcaatggtttgggaggctgaggcaggtggawcacctgaggtcaggagctctagaccagcctggcccacatggtgaaatcccatctctactaaaagtacaaaaaattagctgggcatggtggcaggtgcctataatcccagctacttgggaggctgaggcaggagaatcacttgaacccgggaggcagaggttgcagtgagcggagatcacaccactgcactccagcctgggcaacaagagcaaaactccgtctcaaaaaaaacaaaaaaacaaaaaaattttgggttattttaggggacagaaggacaggaagggggttcattccttaaaaatctatttgtgtctccaacagaaatatggtgcaaggcatgtagatagccttacaaaaggaaaaagaaatagcaataataataattttaataatttatcttctttgaccgggcgtggtggctcacgcttgtaatcccagcactttgggaggccaagatgggtgggtcacttgagcccaggagtctgggaccagcctggacagcaaagtgagactctgtctctacaaaataaaaaataaattagccaggtgtggtggtacgccagtagtcccagctacttggc

SEQ ID NO: 699019 - DNA, 642 bp, Homo sapiens
aatgaattgggtttgcccctcactgttagaaagaccctgaattccctcccgatgctactagggtaaaagccatgttcttatgctcatttctctaaggwaatgcaaatagagtttattaaggcgtttctggccaactaaggtggattttgtcatgtagacacaatatagaccataatacatgtacatatgcaaaaacacacctaaacacatatccacaaacaaataaaaatcttacagctttcattttagaattttagtgatgagatagtaatacaaactcactagttgattaaagtcaactggatccaattgtatttctgacaaattggaatcgttaacatggataaactttatttgcccctataggtaatataatgaaggctgggggaaatattttgggtaaagcagtttctaatggcagtgtaacttataaacaaataaacaaatgaaacctctacagtttcagcatcttttttttttctgtttcacatgagtttaggattaaattttcaattgcttacactttagctagaactggctgaattgtataagaaaaaaaaatctccaactagccttaaactagattttttgtgtgggttggaggggggcgggtggtggtgatgtggtttgcttgattaacaa

SEQ ID NO: 699020 - DNA, 609 bp, Homo sapiens
ggaaccctccctggagcacaacacccagggcctatgggggtgttccctggtggtcctggccagtggtgctgcccttctttctacttccaaaatcccagaccactgctgctctgactatgggctccactccctcaacccattcttttattaaatgccttttctgcacytgctggagtgattatatggtttttgttcttggttctctttaatgtgatggatcacatttattgatttgcatatgttgagccatactggcatccctgggatgaatctcacttaatcatagtgaatgatctcttttgatgtgtttctaaacatggtttgttaatattttattgaggacttttacatctatgtttgttagtgatgttggcctatgttcttttttggctttgttttggttggttgtttttgagagatggagtccccctatgttgtccagactggtcttgaactcctgggcttaagcagttctcccacctcagccttccaaagtgctgtgattacaggcaggagccaccacacccagcttgctttttgtttttgagagagcatcttgctctgttccccaggctggagtacagtgacacaaacatggctcactgcggc

SEQ ID NO: 699021 - DNA, 609 bp, Homo sapiens
ggaaccctccctggagcacaacacccagggcctatgggggtgttccctggtggtcctggccagtggtgctgcccttctttctacttccaaaatcccagaccactgctgctctgactatgggctccactccctcaacccattcttttattaaatgccttttctgcacttgctggagtgattatatggtttttgttcttggttctctttaatgtgatggatcacatttattgatttgcatatgttgagccatactggcatccctgggatgaatctcacttaatcatagtgaatgatctcttttgatgtgttkctaaacatggtttgttaatattttattgaggacttttacatctatgtttgttagtgatgttggcctatgttcttttttggctttgttttggttggttgtttttgagagatggagtccccctatgttgtccagactggtcttgaactcctgggcttaagcagttctcccacctcagccttccaaagtgctgtgattacaggcaggagccaccacacccagcttgctttttgtttttgagagagcatcttgctctgttccccaggctggagtacagtgacacaaacatggctcactgcggc

SEQ ID NO: 699022 - DNA, 1317 bp, Homo sapiens
tgtacacaaaaaacacaattcaggccaggcgcggtggctcacgcctgtaatctcagcactttgggaggctgaggtgggtggatcacctgaggtcgggagttcragaccagcttgatcaatatggagaaacctcatctctaataaaaatacaaaaattagctgggcttggtggcgcatgcctgtaatcccagctactcgggaggctgaggcaggagaatcgcttgaacccgggaggtggaggttgcagtgagctgagatggcaccattgcacttcagcctgggcaacaaaagcgaaactctgtctcaaaaaaaaaaaaaattcactagcaacagatttatacgactgatctgggaatgtttttgaatgtgacattttcattctgccacgtgtcttgtgttttgactcagtttccccaccacttcgttttgcatttgatccttccttcaaacagtgctgaaggcagcaaagcattatgtgtagcattttttaaagaggcaggactaggccgggtgcagtggctcatgcctgtaatcccaacactttgggaggccaaggtgggtggaccacttgaggccaggaattcaagaccaccctgggcaacatggtgaaaccccgtctctattacaaatacaaaaattagccgggcgtggtgacaggcacctgtaatcccagctacttgggaggctgaggccagagaatcgcttgaacctgggggtggaggctgcagtgagccgagatcgtgccactgcactccagcctgggtgacagagcaagactctatctcaaaataaataaataggcaggattatttgaggccagctgtattgtaaacccaattacaaacctggacactgaaattgtgtgactgtacttgtttaaaacacacacacacacacacacacacacacacacacacacagaattgtttatttggatttttctatgcttagttgaacacgttaaagggactgtgaggtcaagcactatctacagaccaatgttattcttattaagggcctctccttccagatcatagtccttcatcctaggctcctctgaagtggtatgattggttgtgttaatggtactttggcctccagattgtctctgaaagggtgtgggtgattttatgcaacaagttaaacactgtttcataactcccagcattcttttatcccatcctcagtcccaagatctgaatttattccagtattacccccaccccccaggatattttttcccttctcaaggccaaccctatgtgacttcatctggagaagaactagagagctctgaggctgcaggagggatgggtc

SEQ ID NO: 699023 - DNA, 1317 bp, Homo sapiens
tgtacacaaaaaacacaattcaggccaggcgcggtggctcacgcctgtaatctcagcactttgggaggctgaggtgggtggatcacctgaggtcgggagttcgagaccagcttgatcaatatggagaaacctcatctctaataaaaatacaaaaattagctgggcttggtggcgcatgcctgtaatcccagctactcrggaggctgaggcaggagaatcgcttgaacccgggaggtggaggttgcagtgagctgagatggcaccattgcacttcagcctgggcaacaaaagcgaaactctgtctcaaaaaaaaaaaaaattcactagcaacagatttatacgactgatctgggaatgtttttgaatgtgacattttcattctgccacgtgtcttgtgttttgactcagtttccccaccacttcgttttgcatttgatccttccttcaaacagtgctgaaggcagcaaagcattatgtgtagcattttttaaagaggcaggactaggccgggtgcagtggctcatgcctgtaatcccaacactttgggaggccaaggtgggtggaccacttgaggccaggaattcaagaccaccctgggcaacatggtgaaaccccgtctctattacaaatacaaaaattagccgggcgtggtgacaggcacctgtaatcccagctacttgggaggctgaggccagagaatcgcttgaacctgggggtggaggctgcagtgagccgagatcgtgccactgcactccagcctgggtgacagagcaagactctatctcaaaataaataaataggcaggattatttgaggccagctgtattgtaaacccaattacaaacctggacactgaaattgtgtgactgtacttgtttaaaacacacacacacacacacacacacacacacacacacacagaattgtttatttggatttttctatgcttagttgaacacgttaaagggactgtgaggtcaagcactatctacagaccaatgttattcttattaagggcctctccttccagatcatagtccttcatcctaggctcctctgaagtggtatgattggttgtgttaatggtactttggcctccagattgtctctgaaagggtgtgggtgattttatgcaacaagttaaacactgtttcataactcccagcattcttttatcccatcctcagtcccaagatctgaatttattccagtattacccccaccccccaggatattttttcccttctcaaggccaaccctatgtgacttcatctggagaagaactagagagctctgaggctgcaggagggatgggtc

SEQ ID NO: 699024 - DNA, 1979 bp, Homo sapiens
atacctccctcctggagttcctcatgatctccaacagtgggctgctagttatcatctggttcctcctccttctgatctcttatactgtcatcctggtgatgctgaggtcccactcgggaaaggcaaggaggaaggcagcttccacctgcaccacccacatcatcgtggtgtccatgatcttcattccctgtatctatatctatacctggcccttcaccccattcctcatggacaaggctgtgtccatcagctacacagtcatgacccccatgctcaaccccatgatctacaccctgagaaaccaggacatgaaagcagccatgaggagattaggcaagtgcctagtaatttgcagggagtaaactttaagtaagttgactttaaatgacaaatttctctggatttttattttcycacatgaaaaatggaggaaagtctttataaagcataacaaatcagattacacttatatttcttgaggacctagtgctgtgtcaagtactgtgttaagcacttccacgctttttttctttttttttttttttagatggagccttgctctgtcacccaggctggagtgcagtggtgcagtctaggctcactgcaacctccacctcccgggttcaatgattctcctgcctcagcctcccgcgcagctgggattacaggcacccaccaccacgcccggctaatttttgtattcttagtagagatggggtttcactacaatgaccaggctggtctcgaactcctgacctaggtgatccacccgccttggcctcccaaagtgctgggattacaggcgtgagccacagcgcccggcctaacacttccacagttttatctcattacttttcatgaaaccgacagtagatatattattattgttgttaaacagttttacaaatgagaaaacgcagagagaagtgacttgctcaaaggtgaacagtaagtgagtggcagagcttgccctggaacctggttcttcttgactccaagtttagaggcaagaaataggaatgggatttgaaactcaagagtttcctgcgaccacaagagaaaacctagagaggtcttcgtctatagagaagtatctctgatgaatggtcaactgcttcatcttaactctgggacagttacattcttttctgctccccacctccctgcctcattccccactgtggaatttagaaagttatctcgccctccctcctcccccacaaaaaaagtttgagtcgccgctgcgggttgctagcggagtcgcgcgtcgggagctacgtagggcagggaaggcatggcttctgttttcgtccaatgagaaggggccagcggtggcggtcgggccaggtccggggcctggggacgccgaggcggccgcggaggagcgccgcgtcaaggtctccagcctgccctacagtgtggatgcgctcgtgtcggacaagaagccgcccaaggaggcatccccagtgccggccaaaagcgcctcttccggggccaccctgcggctactgctgctgccggggcacggcgctcgggaagcgcacagccccgggccgctgatcaagcccttcgagaccgcctcggtcaagtgggaaaactccctaagacggagcggcgtggatgcaggaaccctgctgataattcgccgccgccaagacacgtgagccctaccacctgcaccctgagaaaacacaagaccaatccgaagccgcgcacagcctttaccacgtcccagctcctcgctctggagggcaagttgctccagaaacagtacctctccattgcagagggtgcggacttctccagctctccgaacctcacggagactcaggtcaaaatcttgttccagaaccgaagggccaagacgaaaagactgcaggagtcagaactggaaaagctgaaaatggctgcaaaacctatgctaccctccagcttcagtctccctttccccatcagctcgcccctgcaggcagcgtcca

SEQ ID NO: 699025 - DNA, 1979 bp, Homo sapiens
atacctccctcctggagttcctcatgatctccaacagtgggctgctagttatcatctggttcctcctccttctgatctcttatactgtcatcctggtgatgctgaggtcccactcgggaaaggcaaggaggaaggcagcttccacctgcaccacccacatcatcgtggtgtccatgatcttcattccctgtatctatatctatacctggcccttcaccccattcctcatggacaaggctgtgtccatcagctacacagtcatgacccccatgctcaaccccatgatctacaccctgagaaaccaggacatgaaagcagccatgaggagattaggcaagtgcctagtaatttgcagggagtaaactttaagtaagttgactttaaatgacaaatttctctggatttttattttcccacatgaaaaatggaggaaagtctttataaagcataacaaatcagattacacttatatttcttgaggacctagtgctgtgtcaagtactgtgttaagcacttccacgctttttttctttttttttttttttagatggagycttgctctgtcacccaggctggagtgcagtggtgcagtctaggctcactgcaacctccacctcccgggttcaatgattctcctgcctcagcctcccgcgcagctgggattacaggcacccaccaccacgcccggctaatttttgtattcttagtagagatggggtttcactacaatgaccaggctggtctcgaactcctgacctaggtgatccacccgccttggcctcccaaagtgctgggattacaggcgtgagccacagcgcccggcctaacacttccacagttttatctcattacttttcatgaaaccgacagtagatatattattattgttgttaaacagttttacaaatgagaaaacgcagagagaagtgacttgctcaaaggtgaacagtaagtgagtggcagagcttgccctggaacctggttcttcttgactccaagtttagaggcaagaaataggaatgggatttgaaactcaagagtttcctgcgaccacaagagaaaacctagagaggtcttcgtctatagagaagtatctctgatgaatggtcaactgcttcatcttaactctgggacagttacattcttttctgctccccacctccctgcctcattccccactgtggaatttagaaagttatctcgccctccctcctcccccacaaaaaaagtttgagtcgccgctgcgggttgctagcggagtcgcgcgtcgggagctacgtagggcagggaaggcatggcttctgttttcgtccaatgagaaggggccagcggtggcggtcgggccaggtccggggcctggggacgccgaggcggccgcggaggagcgccgcgtcaaggtctccagcctgccctacagtgtggatgcgctcgtgtcggacaagaagccgcccaaggaggcatccccagtgccggccaaaagcgcctcttccggggccaccctgcggctactgctgctgccggggcacggcgctcgggaagcgcacagccccgggccgctgatcaagcccttcgagaccgcctcggtcaagtgggaaaactccctaagacggagcggcgtggatgcaggaaccctgctgataattcgccgccgccaagacacgtgagccctaccacctgcaccctgagaaaacacaagaccaatccgaagccgcgcacagcctttaccacgtcccagctcctcgctctggagggcaagttgctccagaaacagtacctctccattgcagagggtgcggacttctccagctctccgaacctcacggagactcaggtcaaaatcttgttccagaaccgaagggccaagacgaaaagactgcaggagtcagaactggaaaagctgaaaatggctgcaaaacctatgctaccctccagcttcagtctccctttccccatcagctcgcccctgcaggcagcgtcca

SEQ ID NO: 699026 - DNA, 1979 bp, Homo sapiens
atacctccctcctggagttcctcatgatctccaacagtgggctgctagttatcatctggttcctcctccttctgatctcttatactgtcatcctggtgatgctgaggtcccactcgggaaaggcaaggaggaaggcagcttccacctgcaccacccacatcatcgtggtgtccatgatcttcattccctgtatctatatctatacctggcccttcaccccattcctcatggacaaggctgtgtccatcagctacacagtcatgacccccatgctcaaccccatgatctacaccctgagaaaccaggacatgaaagcagccatgaggagattaggcaagtgcctagtaatttgcagggagtaaactttaagtaagttgactttaaatgacaaatttctctggatttttattttcccacatgaaaaatggaggaaagtctttataaagcataacaaatcagattacacttatatttcttgaggacctagtgctgtgtcaagtactgtgttaagcacttccacgctttttttctttttttttttttttagatggagccttgctctgtcacccaggctggagtgcagtggtgcagtctaggctcactgcaacctccacctcccgggttcaatgattctcctgcctcagcctcccgcgcarctgggattacaggcacccaccaccacgcccggctaatttttgtattcttagtagagatggggtttcactacaatgaccaggctggtctcgaactcctgacctaggtgatccacccgccttggcctcccaaagtgctgggattacaggcgtgagccacagcgcccggcctaacacttccacagttttatctcattacttttcatgaaaccgacagtagatatattattattgttgttaaacagttttacaaatgagaaaacgcagagagaagtgacttgctcaaaggtgaacagtaagtgagtggcagagcttgccctggaacctggttcttcttgactccaagtttagaggcaagaaataggaatgggatttgaaactcaagagtttcctgcgaccacaagagaaaacctagagaggtcttcgtctatagagaagtatctctgatgaatggtcaactgcttcatcttaactctgggacagttacattcttttctgctccccacctccctgcctcattccccactgtggaatttagaaagttatctcgccctccctcctcccccacaaaaaaagtttgagtcgccgctgcgggttgctagcggagtcgcgcgtcgggagctacgtagggcagggaaggcatggcttctgttttcgtccaatgagaaggggccagcggtggcggtcgggccaggtccggggcctggggacgccgaggcggccgcggaggagcgccgcgtcaaggtctccagcctgccctacagtgtggatgcgctcgtgtcggacaagaagccgcccaaggaggcatccccagtgccggccaaaagcgcctcttccggggccaccctgcggctactgctgctgccggggcacggcgctcgggaagcgcacagccccgggccgctgatcaagcccttcgagaccgcctcggtcaagtgggaaaactccctaagacggagcggcgtggatgcaggaaccctgctgataattcgccgccgccaagacacgtgagccctaccacctgcaccctgagaaaacacaagaccaatccgaagccgcgcacagcctttaccacgtcccagctcctcgctctggagggcaagttgctccagaaacagtacctctccattgcagagggtgcggacttctccagctctccgaacctcacggagactcaggtcaaaatcttgttccagaaccgaagggccaagacgaaaagactgcaggagtcagaactggaaaagctgaaaatggctgcaaaacctatgctaccctccagcttcagtctccctttccccatcagctcgcccctgcaggcagcgtcca

SEQ ID NO: 699027 - DNA, 632 bp, Homo sapiens
ttattgcaaggacttggcttacatgattgtgaagctggctaggcaagtaygtaatctgcagggcaggccatcagctgaagttgctgtctacatgcagaattttcctccttcagggaaacctcagttcttctctttagttctttcaactgattgaatcaggcacacccagatgatctaggataacctcctttacttaaagtcaactgattatagacatcaattttatctacaaaataccttcacagcaacacctagattagagtttgattgaataactggaaactatagcctagtcaagttgacacataacacagaccatcacaaagggagaatgattaattatcaatgatgctgggcttcctgcatgagaatttacatgatatttcctctacacgtgtcctgtatccgtttagtggcttgacattataatagtagctaagtctgacaaacatttattttcttagaaatgtgatacatatagaaataattttctcagctcaattttccatgactgagtctttagcataattactccatccaggccattcatacactggcaaccattatactggctagtggttgcagtaaagatgagctttgatggacattttacgacctacctgtacttttga

SEQ ID NO: 699028 - DNA, 632 bp, Homo sapiens
ttattgcaaggacttggcttacatgattgtgaagctggctaggcaagtacgtaatctgcagggcaggccatcagctgaagttgctgtctacatgcagaattttcctccttcagggaaacctcagttcttctctttagttctttcaactgattgaatcaggcacacccagatgatctaggataacctcctttacttaaagtcaactgattatagacatcaattttatctacaaaataccttcacagcaacacctagattagagtttgattgaataactggaaactatagcctagtcargttgacacataacacagaccatcacaaagggagaatgattaattatcaatgatgctgggcttcctgcatgagaatttacatgatatttcctctacacgtgtcctgtatccgtttagtggcttgacattataatagtagctaagtctgacaaacatttattttcttagaaatgtgatacatatagaaataattttctcagctcaattttccatgactgagtctttagcataattactccatccaggccattcatacactggcaaccattatactggctagtggttgcagtaaagatgagctttgatggacattttacgacctacctgtacttttga

SEQ ID NO: 699029 - DNA, 632 bp, Homo sapiens
ttattgcaaggacttggcttacatgattgtgaagctggctaggcaagtacgtaatctgcagggcaggccatcagctgaagttgctgtctacatgcagaattttcctccttcagggaaacctcagttcttctctttagttctttcaactgattgaatcaggcacacccagatgatctaggataacctcctttacttaaagtcaactgattatagacatcaattttatctacaaaataccttcacagcaacacctagattagagtttgattgaataactggaaactatagcctagtcaagttgacacataacacagaccatcacaaagggagaatgattaattatcaatgatgctgggcttcctgcatgagaatttacatgatatttcctctacacgtgtcctgtatccgtttagtggcttgacattataatagtagctaagtctgacaaacatttattttcttagaaatgtgatacatatagaaataattttctcagctcaattttccatgactgagtctttagcataattactccatccaggccattcatacactggcaaccattataytggctagtggttgcagtaaagatgagctttgatggacattttacgacctacctgtacttttga

SEQ ID NO: 699030 - DNA, 596 bp, Homo sapiens
aagtgttggaattacaggtgtgagccaccgagccccgcccagatagaattttatgatactttcaatcaatatttatttagtgactaccatgcacccaggatttatatgtactagcctgcaggaatacgaagttatattttatatgctttgaacaggaaatagtaatcttatatctgccttctatttgttccttcttcacgcatgatacataaattaagtgcttgctatgtaactgattatgagcctagcaccaacttgtgtagaggtggatatcagaagcttatggtttatttagggtaccaaagcttgatttgtttgttcttcaatttgacataattaccaacatttaaaactgggagttaggggtggsagagtgttgtacaaagacaaatatttccattttctcttggaaaatcagcaggcctggcaatcttgggcatgccttccaagtattctgttgtatatgattggcaaaaggggcttgcaacggtagaggaaagaaacattatgaaatagcaatttttcaatggaatattttttttaattttagaaagcttcacataatgtgtttcatggtataccaaagacattttggg

SEQ ID NO: 699031 - DNA, 596 bp, Homo sapiens
aagtgttggaattacaggtgtgagccaccgagccccgcccagatagaattttatgatactttcaatcaatatttatttagtgactaccatgcacccaggatttatatgtactagcctgcaggaatacgaagttatattttatatgctttgaacaggaaatagtaatcttatatctgccttctatttgttccttcttcacgcatgatacataaattaagtgcttgctatgtaactgattatgagcctagcaccaacttgtgtagaggtggatatcagaagcttatggtttatttagggtaccaaagcttgatttgtttgttcttcaatttgacataattaccaacatttaaaactgggagttaggggtgggagagtgttgtacaaagacaaatatttccattttctcttggaaaatcagcaggcctggcaatcttgggcatgccttccaagtattctgttgtatatgattggcaaaaggggcttgcaacggtagaggaaagaaacattatgaaatagcaatttttcaatggaatattttttttaattttagaaagcttcacataatgtgtttcatggtataccaaagacatttkggg

SEQ ID NO: 699032 - DNA, 609 bp, Homo sapiens
tgaaaccctgtctctactaaaaacacaaaaaattagctgggcatagtggcgggcacctgtaatcccagctacttgggaggctgaggcaggagaatcacttgaacccaggaggcggaggttgcagtgagccgagattgtgccactgcactccagcctgggagacasagctagactcaaaacaaaacaaaaacaaaaacaaaaattagccaggtatggtgatgcatgcctgtagtcccagctacttgggaggctgaggcaggagaattgcttgaatccaggaggcagaggttgcagtgacccaagattgcgccattgcactccagcccgggcgacagtgagactccgtctcaaaaaaaaaaaaaaaaaaagttgggtgtgctggcacacgcctatagtctcaactattggtaggctgaggcgggaggatcacttgagcccaagacttggaggctgtagggagctgtgatccagtcagcttttagttttatttatattttatattgcaactataggagtcaaattaagcaagtttgtttcaagattttcaagagaagcctggattttatttgcaaaatattacaggtacagctctttaataaattcatcctt

SEQ ID NO: 699033 - DNA, 2075 bp, Homo sapiens
ttcccagctacttgggaagctgaggcaggaggattgcttgcacctcggaggtcaaggctgtagtgagttgtgctcatgccactgcactcagcttgggcagtgcagcaagatgctgactcaaaaaaaaaaaaaaaaaagacagtctcactctgttgccctggctggagcacagtggtaggatcatggctcactgcagactccaactcctgggctcaaccaatcctcccacctcagcctcacaagtagctgtgactatagataagtgccaccacgcctggctgctattttcctgttgttgacattgtgtttttccacgttttagtgttaagtgacaggaacaacagaggttttttaaaaaagactttccttggcaaaattaaaggagaacaacactatatcagtctttcatcttttttttattgctttaaactactgaaagaagtctggtaaccactgctacacaccatgcctccttcccatggcaaggctgagccccgaaatccaggtctaaaggtactctccatgttgttttagactacccccctatgtgggattacacttattcctctccacacagatgacaacttcctggtctcatattgcgtaggatagccaggtgtggtggcacatgcctgtagtcccagctattcaggaggctgaggggagaagactgcttgagccaggagtttaaggatgcagtgagctatgatggcactggtgaacagccactacattccacccggggcaacatagcaagaccctatctccaaaaatgcagcccccgaaaaaacaaaaaacacctaaaaattaaatactgtaataccagcattttgggaggccaaggtgggaagattgcccaaggccaggagcttgagacagtctgggcaacacagcaagatcccatctctctatctctctctctmtatatatatataaatatagatatagatatatatagatacataaataatgagagtatcacacacattaagtaagaccagtggaagctccagtgcatcagagcacatatgtgtgtgtgtgtgtgtgtgtgtgtgtgtgtatacgtatgtgtattaaataaataaaaataaaattttgttttgttttttgagacggaatcttgctctatcacccaggctggagtgtagtggcgccatctcggctcactgcaacctctgcttcccgggttcaagcgattctcctatctcagcttcctgagtagctgggattacaggcgcgagccaccacacccagctaacttttgtatttttagtagagatggggtttcatcatgctgtagtgagctggtcttgaacccctggcctcaagagatccacccgccttggcctcccaaagtgcttggattacaggtgtgagccaccgcgcccagctaaaaataaaaattgtttaaatatctatcactgaagcaatttcatccagccagtgtgtgttatttggaatttctctggctgtctttgtgtcctctagccaaaaaaaaaaaaaaaaaaaaaaaaaaaaaaatcatctcattcaataagcccatttattaaattccatcaatatgtcatctcctcttctaggtactatgtcacccagcctgggtgacagcatgagactccatctcaaacaaaaaagtttaagtaagctcccagctgagacctaaagtatgagaagggaccagtggggaaagaattgcagggaagagcatccaggcaaagggaacagcttatgcaaacacacagattccaggggaaaagaactaggggacagtgaaattggaggaggtgaggcagcaccaggtcatggtgaacctcagagctatttggggggtgtcgattttggtgcaaatgcaataggaagcccttggggaaaggggcggtttaagaaggagaatgagatggggcctgatttacattttctgcaagttattctggctgttgggggtagagaggaggcagggaggcgggaaggaggctgtgctggcctccagggccaagctggtgatggcttgacacaggggtggcaacgagaacagagggaagtggggtagggatttattttggaggtagaattga

SEQ ID NO: 699034 - DNA, 852 bp, Homo sapiens
taagatgtctcagggaacgtcacctttggagtgtgggggaaagggaccgacatttgccgaagtcctacgatgttctagattctcttgtaccctttcttcaaaggagaagactgagtcccagggaagggaactgactcgcccagggtcactcagctcagaggtggtgaggttggcctgggaacccctgtgatcatttccaaaccttgctgaccccatgggaccacagtttctagctcatcccatcccccagcaggacacactgcttgaagttaagaaaaattctaggccaggtgcagtggctcacgtctgtcatcccagtactttgggaagccaaggtgagaagatcgcttgagtacaggagtttgaaatcagcttgggcaacatagggagaccccacctctacaaaaaaaaaaaaattagcacggcatagtggtgtgcacctgtagtcccagctactagggaggctgaggtgagaggattgcttgagcctgggaggttgaggttgcagttagccgagattgcaccactacactccagtctgggtgacacagtgagattctagttaaaaaaaaaaacaagaattctgagaacaaggacttgcccagagccgaggcccagagccaggggcctgactctagacagtggaaccaagaagccggcactcgggacatacatggtccctgtctgtgtggcatacagtggatgcacatggcgagactcgccagctcatgagcgcaggaaccctgcccctctggcctagragccacctgccgtgggggccacgggctcctgaagctgctcccccaagagtcaccaggcagggtctggatcgcagagttgacactaaacaca

SEQ ID NO: 699035 - DNA, 2214 bp, Homo sapiens
taacaccatcaatgacttcacaggactcttgaaacaaaataaaactccttgccatactctagcaaggccctaaatgatctggctttcccttcgacatcgtctcattattctcatccatcattatgttttagctgtcacagcctcctttctgttttacaagcatgccaagctcttccctattcccgggacgtcacatttgttgttccctctgcatgaagtccttttttcccagttcctgcatggctcattcacatccttcaggtctcagctcacataacatctcctcagatgtcttcactcttcacctacctaaggtggtctcttaagttatcccaagattgtatttattactaccaaagcccttatcacagtgtgagaatatcctttatatacttgtttactgcctatcacaacacagaacagaaggcccaaggaggcagaaactttgtccagcttgttcaccacagaaccactgtacctaaaacagtggttggtacacatcaaacattttagaaaacattagtggcaagcaaaaaaaggaaatgtcatgatgaactggtcttccgagaaacttggtctaggaagtaacgtacaggatgacttcccaaaagcacagactaaagaaacagacaaattaggcgcctcttactaaaaacttagtaataagtgtttaaaggcttggataagaactgattgagtaagaacaacaaagaaaggagtgaaattggccgggtgcggtggctcaggcctgtaatcccaggactttgggaggccgaggcaggcagatcacgaggtcaggagatcgagaccatcctgtctaacacggtgaaaccctgtctctactaaaaatacaaaaaaattagccaggcgtggtggcaggcgcctgtagtcccagctacttgggaggctgaggtaggagaatggcgtgaacccagtaggcagagcttgctgtgagtggagatcacgccactgcactccagcctgggcaacagagcgagactctgagaaaagaaagaaagaaggaaagagagagaaagagagaaagagagaaagagagaaagagagaaagagagaaagacagaaagacagaaagacagaaagaaagaaagaaagaaagaaagaaagaaagaaagaaagaaagaaagaaagaaagaaaaagaaagaaagaaagaaagaaagaaagaagagagagagagaaagagagagagaaagaaagagaaggaaagaaagaaggaaggaaggaaggaaagaaagaaagacagaaagaaaggactgaaatttagaaacttgcagaagataaaggcaataaaatttagtaaccccttaaatacataggatacagagactaaaaaatgtggcaagtcaagaaactgtcacaaacctcacagcttaggttacatggaagacttccatagcatttgaagtctatactttatatacttcataatttaacctttattttatccaacaggaccaaacactaagtacccaacagagacacttgggaggcatagtaaacttcacagaggtgccatcacccaagctgacccaaaaaataaccagttatttttgtcaaaactaagaagacattaaattattacatccaygtttatcagaaaatgtaccaacattctgtacaccagcattatataaatgggggtactctgttataagtcaaggataggaaatgacatcaagtggcaccaaaaacaaacaaatttgatttcatacagtgaagagacagatcagtcagagcagtaaacagctcttctctaaaggtgacagggtactggaaagagaccacaggaatggtaggacaactaaggttgtttttatagaaatcatgaaatgttgttaagctatagcaataaatgtagcataattgttgctaagttatttagtattattttctttttttaaaatacattcaagtgtaccatgaaaaatttcagtattcaaagctgtgtccaaaagagaaaataattgggaattgctgaccttcaatatttcaagcattgtgctaggtagtggacaaataaacattaataaaacatagcctcataaagcttataagactaattggctatgatggaaaacaagcacacacataaaaaaattatagaaagaagcgtgacagatcaacttctggcatgacagtatgaggatctccactgttctggtctcccgtgaaactggttaaacaaattttttaag

SEQ ID NO: 699036 - DNA, 1828 bp, Homo sapiens
atgcaagtgctatagcaaaagataaatatattcaactattttaggatatatacaaccttaagttatctgtgaaagccagatgagttctggagacattggtatgcaagatcatgcccctgagactatttgttttccaaagctccttcatagcatccagtcctcaaacaacaaacattcttttgctattgaaactggttcagaacagaacagaaagaacaaggcttgctggttgaagcattggaggtaagccgaccatttgcttcacaaagcaaagcttcaccctacctcttcaaggcgctttcatctgaaaactggatttggaaccaagtagaaacaagctctctccagtgggattcatcacttcctgatttcagatgggcacaaacaatagactcttgtattttcctgctattcacgtttttagtcaggtctgaaactgaaggtgtgcttaaataatgatggcttatacacatttctttttctccaacctgggattcagagtcatactttcccagataaaggtgatactgtttttcaggtcagttcactcaaagatggtgcaaaataatatgaggaaaaagtccttcataatgagacagataattggaagcatacagtctctgctgatcctttcaatgccctgtaatttttttttcttgatttttaaaagatgtggatttcttttctgagggyagggtatagggaggagagctctttggttgtccaaatgctattaaaatcagataatttcatctatgtgactttcaggaagccatttgtttcccatattctcatttgtgtttaattaacaaagactgcaattgtttacacctatacacactagaagtttgaaagtagtgctgctaatcatcaatgtgacactttcatctccattgctttttaaggatggtcagtctcttttgaaatggaaataaaaaaatacgaactaaaactaaagctacacacaagtgctgtttttgcctccaaatcttcataaatgtaaaaccccattattgatctgacttatcatttcaacaaatcctgggatgctgcaaccacaaatgtacattgctcttgctcacaagagagtctgttcaactctcccttccttagccacctactcatatgtgaaagatatctgtggacaaaacactaaaagcatcgaactgataatgttttgggccagctcatgccagaacactcttaaagaccaattttattttctttgtaatgtaagatcatgtaggaacaatattctcctatctttgaaagaagttttcttaaaagacaatagttaaagaagtgctaatattacaggtgggtattcacttttttcttatcacaacctattagaaataagaatttaaagactgggtctaaagcagaaaacaaccagagataaaaataatgaaaattatgaagcactgatgtaccaattgtattaggtaggtagaaatctaaatatttagtaagcattatattaaataccatataagatagtacctaagtaaaagacatatttaatctttgcggacctcttatattccagtcacttatacaagacaaagaaagtaaaagcctagtttcatttgttattagtcctgagaagcaggtgaacagtaaactagaaatgttcattccctctttctccttctgtcttagcatctatgctccagcactttctattcctctctttacagtgtgtagaaggcttataaagacttacattgacccagcaacaactggaagacattaaaaggctttttctttttagaagcaaaatcttgatacaaaaactttatagaagaaagagaacaaatacacgttc

SEQ ID NO: 699037 - DNA, 1828 bp, Homo sapiens
atgcaagtgctatagcaaaagataaatatattcaactattttaggatatatacaaccttaagttatctgtgaaagccagatgagttctggagacattggtatgcaagatcatgcccctgagactatttgttttccaaagctccttcatagcatccagtcctcaaacaacaaacattcttttgctattgaaactggttcagaacagaacagaaagaacaaggcttgctggttgaagcattggaggtaagccgaccatttgcttcacaaagcaaagcttcaccctacctcttcaaggcgctttcatctgaaaactggatttggaaccaagtagaaacaagctctctccagtgggattcatcacttcctgatttcagatgggcacaaacaatagactcttgtattttcctgctattcacgtttttagtcaggtctgaaactgaaggtgtgcttaaataatgatggcttatacacatttctttttctccaacctgggattcagagtcatactttcccagataaaggtgatactgtttttcaggtcagttcactcaaagatggtgcaaaataatatgaggaaaaagtccttcataatgagacagataattggaagcatacagtctctgctgatcctttcaatgccctgtaatttttttttcttgatttttaaaagatgtggatttcttttctgagggcagggtwtagggaggagagctctttggttgtccaaatgctattaaaatcagataatttcatctatgtgactttcaggaagccatttgtttcccatattctcatttgtgtttaattaacaaagactgcaattgtttacacctatacacactagaagtttgaaagtagtgctgctaatcatcaatgtgacactttcatctccattgctttttaaggatggtcagtctcttttgaaatggaaataaaaaaatacgaactaaaactaaagctacacacaagtgctgtttttgcctccaaatcttcataaatgtaaaaccccattattgatctgacttatcatttcaacaaatcctgggatgctgcaaccacaaatgtacattgctcttgctcacaagagagtctgttcaactctcccttccttagccacctactcatatgtgaaagatatctgtggacaaaacactaaaagcatcgaactgataatgttttgggccagctcatgccagaacactcttaaagaccaattttattttctttgtaatgtaagatcatgtaggaacaatattctcctatctttgaaagaagttttcttaaaagacaatagttaaagaagtgctaatattacaggtgggtattcacttttttcttatcacaacctattagaaataagaatttaaagactgggtctaaagcagaaaacaaccagagataaaaataatgaaaattatgaagcactgatgtaccaattgtattaggtaggtagaaatctaaatatttagtaagcattatattaaataccatataagatagtacctaagtaaaagacatatttaatctttgcggacctcttatattccagtcacttatacaagacaaagaaagtaaaagcctagtttcatttgttattagtcctgagaagcaggtgaacagtaaactagaaatgttcattccctctttctccttctgtcttagcatctatgctccagcactttctattcctctctttacagtgtgtagaaggcttataaagacttacattgacccagcaacaactggaagacattaaaaggctttttctttttagaagcaaaatcttgatacaaaaactttatagaagaaagagaacaaatacacgttc

SEQ ID NO: 699038 - DNA, 1828 bp, Homo sapiens
atgcaagtgctatagcaaaagataaatatattcaactattttaggatatatacaaccttaagttatctgtgaaagccagatgagttctggagacattggtatgcaagatcatgcccctgagactatttgttttccaaagctccttcatagcatccagtcctcaaacaacaaacattcttttgctattgaaactggttcagaacagaacagaaagaacaaggcttgctggttgaagcattggaggtaagccgaccatttgcttcacaaagcaaagcttcaccctacctcttcaaggcgctttcatctgaaaactggatttggaaccaagtagaaacaagctctctccagtgggattcatcacttcctgatttcagatgggcacaaacaatagactcttgtattttcctgctattcacgtttttagtcaggtctgaaactgaaggtgtgcttaaataatgatggcttatacacatttctttttctccaacctgggattcagagtcatactttcccagataaaggtgatactgtttttcaggtcagttcactcaaagatggtgcaaaataatatgaggaaaaagtccttcataatgagacagataattggaagcatacagtctctgctgatcctttcaatgccctgtaatttttttttcttgatttttaaaagatgtggatttcttttctgagggcagggtatagggaggagagctctttggttgtccaaatgctattaaaatcagataatttcatctatgtgactttcaggaagccatttgtttcccatattctcatttgtgtttaattaacaaagactgcaattgtttacacctatacacactagaagtttgaawgtagtgctgctaatcatcaatgtgacactttcatctccattgctttttaaggatggtcagtctcttttgaaatggaaataaaaaaatacgaactaaaactaaagctacacacaagtgctgtttttgcctccaaatcttcataaatgtaaaaccccattattgatctgacttatcatttcaacaaatcctgggatgctgcaaccacaaatgtacattgctcttgctcacaagagagtctgttcaactctcccttccttagccacctactcatatgtgaaagatatctgtggacaaaacactaaaagcatcgaactgataatgttttgggccagctcatgccagaacactcttaaagaccaattttattttctttgtaatgtaagatcatgtaggaacaatattctcctatctttgaaagaagttttcttaaaagacaatagttaaagaagtgctaatattacaggtgggtattcacttttttcttatcacaacctattagaaataagaatttaaagactgggtctaaagcagaaaacaaccagagataaaaataatgaaaattatgaagcactgatgtaccaattgtattaggtaggtagaaatctaaatatttagtaagcattatattaaataccatataagatagtacctaagtaaaagacatatttaatctttgcggacctcttatattccagtcacttatacaagacaaagaaagtaaaagcctagtttcatttgttattagtcctgagaagcaggtgaacagtaaactagaaatgttcattccctctttctccttctgtcttagcatctatgctccagcactttctattcctctctttacagtgtgtagaaggcttataaagacttacattgacccagcaacaactggaagacattaaaaggctttttctttttagaagcaaaatcttgatacaaaaactttatagaagaaagagaacaaatacacgttc

SEQ ID NO: 699039 - DNA, 1828 bp, Homo sapiens
atgcaagtgctatagcaaaagataaatatattcaactattttaggatatatacaaccttaagttatctgtgaaagccagatgagttctggagacattggtatgcaagatcatgcccctgagactatttgttttccaaagctccttcatagcatccagtcctcaaacaacaaacattcttttgctattgaaactggttcagaacagaacagaaagaacaaggcttgctggttgaagcattggaggtaagccgaccatttgcttcacaaagcaaagcttcaccctacctcttcaaggcgctttcatctgaaaactggatttggaaccaagtagaaacaagctctctccagtgggattcatcacttcctgatttcagatgggcacaaacaatagactcttgtattttcctgctattcacgtttttagtcaggtctgaaactgaaggtgtgcttaaataatgatggcttatacacatttctttttctccaacctgggattcagagtcatactttcccagataaaggtgatactgtttttcaggtcagttcactcaaagatggtgcaaaataatatgaggaaaaagtccttcataatgagacagataattggaagcatacagtctctgctgatcctttcaatgccctgtaatttttttttcttgatttttaaaagatgtggatttcttttctgagggcagggtatagggaggagagctctttggttgtccaaatgctattaaaatcagataatttcatctatgtgactttcaggaagccatttgtttcccatattctcatttgtgtttaattaacaaagactgcaattgtttacacctatacacactagaagtttgaaagtagtgctgctaatcatcaatgtgacactttcatctcyattgctttttaaggatggtcagtctcttttgaaatggaaataaaaaaatacgaactaaaactaaagctacacacaagtgctgtttttgcctccaaatcttcataaatgtaaaaccccattattgatctgacttatcatttcaacaaatcctgggatgctgcaaccacaaatgtacattgctcttgctcacaagagagtctgttcaactctcccttccttagccacctactcatatgtgaaagatatctgtggacaaaacactaaaagcatcgaactgataatgttttgggccagctcatgccagaacactcttaaagaccaattttattttctttgtaatgtaagatcatgtaggaacaatattctcctatctttgaaagaagttttcttaaaagacaatagttaaagaagtgctaatattacaggtgggtattcacttttttcttatcacaacctattagaaataagaatttaaagactgggtctaaagcagaaaacaaccagagataaaaataatgaaaattatgaagcactgatgtaccaattgtattaggtaggtagaaatctaaatatttagtaagcattatattaaataccatataagatagtacctaagtaaaagacatatttaatctttgcggacctcttatattccagtcacttatacaagacaaagaaagtaaaagcctagtttcatttgttattagtcctgagaagcaggtgaacagtaaactagaaatgttcattccctctttctccttctgtcttagcatctatgctccagcactttctattcctctctttacagtgtgtagaaggcttataaagacttacattgacccagcaacaactggaagacattaaaaggctttttctttttagaagcaaaatcttgatacaaaaactttatagaagaaagagaacaaatacacgttc

SEQ ID NO: 699040 - DNA, 637 bp, Homo sapiens
ttatttatagtatattattagaataacccagtactttaaaaaaaggtatgaagagctcaaagaactaaaatattatagtctgtattacattatagtctgtcttgcaaaatgaggtcagtgagaaaatacgtacttggaacttctgaaaaatgtgagcagggagaagtcattggaaggtaaactgtaatgaatgaataattggaatatcttcatctgagtctgctcagtaaatcagagttgcttgagaaattgttttcattgaccgattgttttttgggtttggagagaacaaaatgtgtccaggtaaatatggaagcagcaaaggcctccagtaaaagatagagtcagaggatcaaacacattgttgttgctgaattatgaatggcacaaggacctggtgaccggttaattcctttggttggattttggtgtgacaragagccttctctgctccatgatcacagacctgccattggctattgtagatatcagaatttgaaaagcattattaatcttgtcaaaccttatattgcttaagaaaaatttttgctctggaatcataaagtgacttgtctaaggccatacaattgattggttgcctagagctacctaaattttatatttagacgtcatgact

SEQ ID NO: 699041 - DNA, 1193 bp, Homo sapiens
tcgccatgatttttgttccgctcacaacagaaatcatatcagagaaaccacgacttaccataaaattattttaaaaagagaaacttgattctgatatccaaatagaatataaattctgcttttacacacgctggtcccatctgtaacacccagaagtcaattcaagaggctgtagacagtgaagggataacttcagatttcccttgaaatgtttttgcagcctcagcagaaattcaaaatgccagtagtgttgctctcagtgtctctgttctggcccccaagacccacaggcctggcttcctccaagaaatgcttgcatgaggatcaagcaggggacgagtttttcctgtgcctgtcagaaagaatactggcctttcagatgagcacttccagatttcataggtcagcctgagaacttaaaacactattacaaaatcattgtccttcagccccaagcatcttaaaagtaatttatcagcagcatcactgccaaccttaccccaagagcttgctttggcataacaactgttcagggtctcaaaatgggyttttccagagaactcgtagaggtccctgtgtttaaattactgatcccaaaactcaaaatagaatctcagcccatttgaaaactgcacttataaaaaccaccatttaggctcaaagctatgtaatttgcaaatgctcctgcttctgtctaagtttgcttttggtgcttaaaatccagccaaaggatggaatttaatacaactacaaaattaacaacagatggcctagtacatttaacctagaggagtaaacaatgtgagcgatgtctccaaaaaataaatctccccaggaaggctataagaatatctgaaaaacaccaaaataaaaactggtgacttcaaaaacgaaactcaaacccagattagatcatcatgtaagcattaccatttccctaacaataagtgtcagtttctcctttcatccacgtagaccttttgttaaggacaagataccatcttttttcctcactcttcaacaactttctcatcctatagaagggaaacgctggcaaaggctgggttaatgctggggtttccagttaagcactatagttttacaacagtacaaaaataaccaattttcaaactatcagaacacaataaaagatattcagcatgaactttaatataatgtagctttcctttgaa

SEQ ID NO: 699042 - DNA, 1193 bp, Homo sapiens
tcgccatgatttttgttccgctcacaacagaaatcatatcagagaaaccacgacttaccataaaattattttaaaaagagaaacttgattctgatatccaaatagaatataaattctgcttttacacacgctggtcccatctgtaacacccagaagtcaattcaagaggctgtagacagtgaagggataacttcagatttcccttgaaatgtttttgcagcctcagcagaaattcaaaatgccagtagtgttgctctcagtgtctctgttctggcccccaagacccacaggcctggcttcctccaagaaatgcttgcatgaggatcaagcaggggacgagtttttcctgtgcctgtcagaaagaatactggcctttcagatgagcacttccagatttcataggtcagcctgagaacttaaaacactattacaaaatcattgtccttcagccccaagcatcttaaaagtaatttatcagcagcatcactgccaaccttaccccaagagcttgctttggcataacaactgttcagggtctcaaaatgggcttttccagagaactcgtagaggtccctgtgtttaaattactgatcccaaaactcaaaatagaatctcagcccatttgaaaactgcacttataaaaaccaccatttaggctcaaagctatgtaatttgcaaatgctcctgcttctgtctaagtttgcttttggtgcttaaaatccagccaaaggatggaatttaatacaactacaaaattaacaacagatggcctagtacatttaacctagaggagtaaacaatgtgagcgatgtctccaaaaaataaatctccccaggaaggctataagaatatctgaaaaacaccaaaataaaaactggtgacttcaaaaacgaaactcaaacccagattagatcatcatgtaagcattaccatttccctaacaataagtgtcagtttctcctttcatccacgtagaccttttgttaaggacaagataccatcttttttcctcactcttcaacaactttctcatcctatagaagggaaasgctggcaaaggctgggttaatgctggggtttccagttaagcactatagttttacaacagtacaaaaataaccaattttcaaactatcagaacacaataaaagatattcagcatgaactttaatataatgtagctttcctttgaa

SEQ ID NO: 699043 - DNA, 1621 bp, Homo sapiens
atgcacatatcctataacccagtgatttttctcttaggaatttaccctacagagttcttgcacaggtgcacagttttacacgtacacaagaaggaatgctcatatcaacattgctcataatagcaaacatttggaaataaactccatccctcaataagagaatggataaatcagttgtggtgtattcatgtaagtgagcaccatacagaattagccaagtgacctcagaggtcatcgatgtgagtcattctcaaacctgcctctacatcagaatgacctggggagcttaaatagaacagattctgagtcagtatctttgaatgtggagcctgatgcacctgctgctacatgagtcaatatttggaaaacactgatgtagcttatttataaattgttaaaattatggcatggggatgggggtggattaacatgtctatggtaacccagctggtgaaagggtgagtggggaactgaaccaggttcggctgtctcctggttcagagatctctatggtatatcacgttacctttctacagtctaacaaaaagagcaggtagttaaactaaccagttagtccatcaagattgttaaactgcgtatattggttacactaagagcccagacttcaccactaggccatatgtttatgtracaaaactgtacttgtactacctaaatttatacaaataaaataataataataaaaaacttgatttcagagagcgtatcttccttctggtctgccctatgggacctcttgatcctgctaaatactctgaatttgtggttctctcttaaatagaaaacttgaatgtgaggggatctagagagagagagagatagacacaggcatacacatagcaacagagataaacatagatataatagatctagatataggaaatatggagagtaatgttttctttctccccagccaacaggaaagaattctgcatgggagtcagaacatttgtattaaagacctgattttactgggcaacagagcgagaccttgtctctacaaaaaataaacaaaactaaccaggcacagtggtgtgcacctgtagtcccagctacttgggaggctgaggtaggaggatcgcctgaaccctggaagtcaagtgtttctttctttcagcatgtcattaccaattgcacaggaccaaggaaaataaagccatgtatgtagggaaatatattatttttttgaactttagtcaaatggaacgttttgttttgggatggtaaacacatcttttgccttagagtatagataaaaggtctttgggttatggtagataaggccgggctaacacggctgcttcaagtaaaaataaggatgtgcttcaacatgaatggatttccactttccctattgagggcttgagacagaaagcctttgggcccgttttgctcagagaaggaaggagatgagaaagtctgaaagagaggaccagcctcgctactgggcaggaggtcagaagccttaggacagagaatgttgtatgaaaaagatgacacaatggtagaaatggccatagaattttaagaacagtgatgcattaaatacaattttgagtattttttgcttgatgctgttgacctccaacaccactgtcaa

SEQ ID NO: 699044 - DNA, 597 bp, Homo sapiens
tggattttttctctggaatattgacttcaacccagccacatgtggatatgcttagaacagcagggctcagtctgaagttgggaccatatctgttctcaaaacatgtggatccctgaggccagacaccaggtgcccrccattggtgtcagggccctactcctctccctgcagtgcaaggggccagtcctcaaggcaggggttcctcctctctggacacacagagaaagaggaggcggggaaacagcaagtgcccaggaagggtgaggccccagggacttgaagccagccctctgatagcatcgctgtttcagaggaacactagctacgaacggggctcccttgccagtcagtgctcagagagataagcttacctagcaggtccttcctacagctgcagcaatgatgcctggactgtgtctgcccaggggtgggtggtggaaggttctagggagaggagttggcacttccctggtgcagcccttccctctcctccccagccctgacaccaccacagccccttcgtcttctctgtccagaacctcttcccagaggctccctaaggagaccgcggagtctccgcctggggctctcacagcc

SEQ ID NO: 699045 - DNA, 597 bp, Homo sapiens
tggattttttctctggaatattgacttcaacccagccacatgtggatatgcttagaacagcagggctcagtctgaagttgggaccatatctgttctcaaaacatgtggatccctgaggccagacaccaggtgcccgccattggtgtcagggccctrctcctctccctgcagtgcaaggggccagtcctcaaggcaggggttcctcctctctggacacacagagaaagaggaggcggggaaacagcaagtgcccaggaagggtgaggccccagggacttgaagccagccctctgatagcatcgctgtttcagaggaacactagctacgaacggggctcccttgccagtcagtgctcagagagataagcttacctagcaggtccttcctacagctgcagcaatgatgcctggactgtgtctgcccaggggtgggtggtggaaggttctagggagaggagttggcacttccctggtgcagcccttccctctcctccccagccctgacaccaccacagccccttcgtcttctctgtccagaacctcttcccagaggctccctaaggagaccgcggagtctccgcctggggctctcacagcc

SEQ ID NO: 699046 - DNA, 597 bp, Homo sapiens
tggattttttctctggaatattgacttcaacccagccacatgtggatatgcttagaacagcagggctcagtctgaagttgggaccatatctgttctcaaaacatgtggatccctgaggccagacaccaggtgcccgccattggtgtcagggccctactcctctccctgcagtgcaaggggccagtcctcaaggcaggggttcctcctctctggacacacagagaaagaggaggcggggaaacagcaagtgcccaggaagggtgaggccccagggacttgaagccagccctctgatagcatcgctgtttcagaggaacactagctacgaacggggctcccttgccagtcagtgctcagagagataagcttacctagcaggtccttcctacagctgcagcaatgatgcctggactgtgtctgcccaggggtgggyggtggaaggttctagggagaggagttggcacttccctggtgcagcccttccctctcctccccagccctgacaccaccacagccccttcgtcttctctgtccagaacctcttcccagaggctccctaaggagaccgcggagtctccgcctggggctctcacagcc

SEQ ID NO: 699047 - DNA, 614 bp, Homo sapiens
ggtgaaaccccatctctattaaaaatacaaacattagctgggcttggtggtgggcacctgtagtcccagctactcaggaggctgaggcaggagaatcgcttgaacctgggaggcggaggttgcagtgagttgagatcatgccactgcactccagcctgggtgacagagcaaaaaaactccgtctaaaaaagaaaaaaaagagaacaactgccccttctagcagcagcccagatggagacacccatagcagggcgccggatccaatctcttcctctcctccctcggccttcctctccccacaaaccccagggtctagaaagtagaaggttctcccctcttctctccttcctcataatgaactcgatggagctggcccgagtgcagtggtggttacagttaattgatcacaacgacttacagatttttttgttccttctccactcccactgcttcactggacgagccaaacacaaattaaataaataggcaggtcacagtggctcatgcctctagtcccagtgctgtaggaggccaaggtgggcggatcactcgagcccaggagttcgagaccagcctgggcaatrtggtgaaatcccatctctaccaaaaaaaaa

SEQ ID NO: 699048 - DNA, 639 bp, Homo sapiens
ttgctggtattccaacagttgcttctgatacatttgtatctactgatcattctgttcctataggaaatgggcatgttgccattacagctgtttctccccacagagatggttctgtaacctcaacaaagttgctgtttccttctaaggcaacttctgagctgagtcatagtgccaaatctgatgccggtttagtgggtggtggtgaagatggtgacactgatgatgatggtgatgatgatgatgatgacagagrtagtgatggcttatccattcataagtgtatgtcatgctcatcctatagagaatcacaggaaaaggtaatgaatgattcagacacccacgaaaacagtcttatggatcagaataatccaatctcatactcactatctgagaattctgaagaagataatagagtcacaagtgtatcctcagacagtcaaactggtatggacagaagtcctggtaaatcaccatcagcaaatgggctatcccaaaagcacaatgatggaaaagaggaaaatgacattcagactggtagtgctctgcttcctctcagccctgaatctaaagcatgggcagttctgacaagtgatgaagaaagtggatcagggcaaggtacctcagatagccttaatgaga

SEQ ID NO: 699049 - DNA, 825 bp, Homo sapiens
tcaaaatcaactggaggactcgtcaaaacacaaattgctgacccttacacacagagtttctggttcagaagattttgtatggtttgagcgaagcctaaaatttgcatttctaagttatgatgatgttgatgctgctattctggggatcaaacgtcaagaaaatctgatatagataataatattaaccaccatttgtactaaatgaggtaccaaggactttgctaagtgaatgttttcatttattactgacacacttactttccatctaggtaacaatagttacaatagaaaaaactgtgaagacaaccatgtataaaataagatgtttttctaaattttataaggaaatgctcattgcattcaccatcaggttatttaggtgactagatgattctaaatgagtctccacaaaataatggccagagcttaggattaacattttaaaaaatggagtcttgggcttttctcacaagaatattagctacwactcagggctgagttggcttagaacattttcactttttatacagttttatgatttttaatcacacctttgaattccatttttcctagtaaatgcatttatagttataagaccaaacatcttgggaagtgtgtgtgccatttatattcctgtgatacattacatttatttatttatttatttatttatttatttatttattttgagatagagtctcactctgttgcccaggctgtagtgcagtggcgtgatctcagctcactgcaacctctacttcccgggttcaggccattctcctgactcagcttcccaagtagctgggattacaagtgtgcaccacc

SEQ ID NO: 699050 - DNA, 600 bp, Homo sapiens
gaaagatgaatcaagaatgacacttggatttttgacattaaaagctgggtaggtgttagaaaatagatcccagatttcttttgtaggtttgatagatttttctgcaatggattgtgaatgtcttaaagatgacatggcattttgtgtatatgatgaatttagtttactgaagactctctttgtctcaaaacagtatgaattatagtataaaagaagtacatgggggggttgccttcaagcaggaagaaagaagtacagactttatcatatgttgttggaaaaatgaaacattttagagctggtttaggtatttcattttatatgatttttttcacttagaatggtctttaacaaaggcagcaaccctgctttataaattttaactgagattatctagaacccccaaatacttcaaggatctaggattttgttctgtttttctatatatatctagaccartaggaggtggaaaacgtgccagccaaggggcacactccttatcacactgcttggtttgttgtggatacggtgcagcttatcaggccttaaggtagggaaggccataaccgtatctcatcttccctgccctccatctctgga

SEQ ID NO: 699051 - DNA, 646 bp, Homo sapiens
attagtaggaaattaaattataatcatgtattctggagaatgtatagaaagtattaaaggactgtgtagaagaaatttgaatagaacataaaggcattagattcgtgtgaaaagaacacagcagcatatgtgccttgtgatataatgtcagacaaatttctttcatataattagcgaaccctggtgttgcagaactttgcttcttagttcagctaaaaccaagttcttgtgacacgaccaggaagttaggcatgcaggcacattgaagggtgaggggaatggaatttattgggcaaaaaggaaaaaaaaaaaamaacaaaaaacacctctcaacaaagcgagaggagttcctgctaacaggctgccacctcacaggttgattttaggccacacacagtaactgaagaggccaggctcctcccctgtgtaaacagcacaaacttcccatggctccaccctgttctcccagtgcacaggccggtaggagattgtcgggagaccctctcccttatctgctttctgcatctatcactggcttactatgtacatgaatataagacagaaattttaatgtaacaactaggaagcaaaaaaaaaaaaaaaaaattacacagttttacagcctgttaatgaaattccattttca

SEQ ID NO: 699052 - DNA, 646 bp, Homo sapiens
attagtaggaaattaaattataatcatgtattctggagaatgtatagaaagtattaaaggactgtgtagaagaaatttgaatagaacataaaggcattagattcgtgtgaaaagaacacagcagcatatgtgccttgtgatataatgtcagacaaatttctttcatataattagcgaaccctggtgttgcagaactttgcttcttagttcagctaaaaccaagttcttgtgacacgaccaggaagttaggcatgcaggcacattgaagggtgaggggaatggaatttattgggcaaaaaggaaaaaaaaaaaacaacaaaaaasacctctcaacaaagcgagaggagttcctgctaacaggctgccacctcacaggttgattttaggccacacacagtaactgaagaggccaggctcctcccctgtgtaaacagcacaaacttcccatggctccaccctgttctcccagtgcacaggccggtaggagattgtcgggagaccctctcccttatctgctttctgcatctatcactggcttactatgtacatgaatataagacagaaattttaatgtaacaactaggaagcaaaaaaaaaaaaaaaaaattacacagttttacagcctgttaatgaaattccattttca

SEQ ID NO: 699053 - DNA, 646 bp, Homo sapiens
attagtaggaaattaaattataatcatgtattctggagaatgtatagaaagtattaaaggactgtgtagaagaaatttgaatagaacataaaggcattagattcgtgtgaaaagaacacagcagcatatgtgccttgtgatataatgtcagacaaatttctttcatataattagcgaaccctggtgttgcagaactttgcttcttagttcagctaaaaccaagttcttgtgacacgaccaggaagttaggcatgcaggcacattgaagggtgaggggaatggaatttattgggcaaaaaggaaaaaaaaaaaacaacaaaaaacacctctcaacaaagcgagaggagttcctgctaacaggctgccacctcacaggttgattttaggccacacacagtaactgaagaggccaggctcctcccctgtgtaaacagcacaaacttcccatggctccaccctgttctcccagtgcacaggccggtaggagattgtcgggagaccctctcccttatctgcttyctgcatctatcactggcttactatgtacatgaatataagacagaaattttaatgtaacaactaggaagcaaaaaaaaaaaaaaaaaattacacagttttacagcctgttaatgaaattccattttca

SEQ ID NO: 699054 - DNA, 646 bp, Homo sapiens
attagtaggaaattaaattataatcatgtattctggagaatgtatagaaagtattaaaggactgtgtagaagaaatttgaatagaacataaaggcattagattcgtgtgaaaagaacacagcagcatatgtgccttgtgatataatgtcagacaaatttctttcatataattagcgaaccctggtgttgcagaactttgcttcttagttcagctaaaaccaagttcttgtgacacgaccaggaagttaggcatgcaggcacattgaagggtgaggggaatggaatttattgggcaaaaaggaaaaaaaaaaaacaacaaaaaacacctctcaacaaagcgagaggagttcctgctaacaggctgccacctcacaggttgattttaggccacacacagtaactgaagaggccaggctcctcccctgtgtaaacagcacaaacttcccatggctccaccctgttctcccagtgcacaggccggtaggagattgtcgggagaccctctcccttatctgctttctgcatctatcactggcttactatgtacatgaatataagacagaaattttaatgtaacaactakgaagcaaaaaaaaaaaaaaaaaattacacagttttacagcctgttaatgaaattccattttca

SEQ ID NO: 699055 - DNA, 1436 bp, Homo sapiens
tgggaatggagattcatcctaggctttctcagagatgtgttaggtctgatcaaatgtcctccctycccttccctgagtgccagtctggtggttgagatgcttgtttgctctggcctcttgggaggtccctcatacctccttggtgatctaatcattagtccctgaatcctcatgtatttatgtgagtcaccatctgggcaagataagtaatttctctggaatatagaagcaaccccaccaataatacaaattaaacacaggaaatgtatttgttcgctagtgttcagtagaaaactaaatataagctagagaatcataggagagtagatgctcctatttgttgaaaatcatagaaaatattttggtcaagactttaacagaaatgactgaacatgcaaaagttaattttacagaaaaattataaaaattatgtaaacaatcatactgccaatgtacttcatattttccacaactgaaattatgacaagcttcccctaattctaaatctatgtctctatgtattcaagtattcttttatatccttcagtaaattggtatatattgtattatttttattacggttttttggttacttgtgtgaataggatgttttctctgttaccttttcaaattataattgttttattataatggagttgagttttttaatatttattttataattgaccgtattactgtagtttcttatcaattctaatattttaagtgtatctctgattccttacatttttatagtcaagcatatttattattattaccataattatattaactaagaaactgagttcagagagtttgagtgtttttccaacataaactttaaaaaatgatagaatatggaacagtttttacatcatagaaattatctgttccttgaaagtttgaaagaatgcttctataagagtgtctagaattggatcctctattgttggtaatagcttgacttttttccatttttcccttgactaaatatttatttcaagttttctacttcagtaaacttttctaatttatatttgtctaaagttttcaaatttaatagctttgcgtgcgccttatcattttttagtatttcatctacttcatatctgtgattatattactttctaatgcctaaatgtatgtttttgagtgatctctattttttcattagacaagctaaatattttactattttattactgtattatttgtaaatcctaattcactaattttcatttttatattattcaatatattattttattttcctatttcattttccttatttcgtgatttattttttgttttctttcctttttttctaatttcttgaattagtacagtttattttgatttcactttagtcattaaaatacctaagattatgagttaactttgaacagtgctttcttagctatttctcataagcttta

SEQ ID NO: 699056 - DNA, 1436 bp, Homo sapiens
tgggaatggagattcatcctaggctttctcagagatgtgttaggtctgatcaaatgtcctccctccccttccctgagtgccagtctggtggttgagatgcttgtttgctctggcctcttgggaggtccctcatacctccttgstgatctaatcattagtccctgaatcctcatgtatttatgtgagtcaccatctgggcaagataagtaatttctctggaatatagaagcaaccccaccaataatacaaattaaacacaggaaatgtatttgttcgctagtgttcagtagaaaactaaatataagctagagaatcataggagagtagatgctcctatttgttgaaaatcatagaaaatattttggtcaagactttaacagaaatgactgaacatgcaaaagttaattttacagaaaaattataaaaattatgtaaacaatcatactgccaatgtacttcatattttccacaactgaaattatgacaagcttcccctaattctaaatctatgtctctatgtattcaagtattcttttatatccttcagtaaattggtatatattgtattatttttattacggttttttggttacttgtgtgaataggatgttttctctgttaccttttcaaattataattgttttattataatggagttgagttttttaatatttattttataattgaccgtattactgtagtttcttatcaattctaatattttaagtgtatctctgattccttacatttttatagtcaagcatatttattattattaccataattatattaactaagaaactgagttcagagagtttgagtgtttttccaacataaactttaaaaaatgatagaatatggaacagtttttacatcatagaaattatctgttccttgaaagtttgaaagaatgcttctataagagtgtctagaattggatcctctattgttggtaatagcttgacttttttccatttttcccttgactaaatatttatttcaagttttctacttcagtaaacttttctaatttatatttgtctaaagttttcaaatttaatagctttgcgtgcgccttatcattttttagtatttcatctacttcatatctgtgattatattactttctaatgcctaaatgtatgtttttgagtgatctctattttttcattagacaagctaaatattttactattttattactgtattatttgtaaatcctaattcactaattttcatttttatattattcaatatattattttattttcctatttcattttccttatttcgtgatttattttttgttttctttcctttttttctaatttcttgaattagtacagtttattttgatttcactttagtcattaaaatacctaagattatgagttaactttgaacagtgctttcttagctatttctcataagcttta

SEQ ID NO: 699057 - DNA, 1436 bp, Homo sapiens
tgggaatggagattcatcctaggctttctcagagatgtgttaggtctgatcaaatgtcctccctccccttccctgagtgccagtctggtggttgagatgcttgtttgctctggcctcttgggaggtccctcatacctccttggtgatctaatcattagtccctgaatcctcatgtatttatgtgagtcaccatctgggcaagataagtaatttctctggaatatagaagcaaccccaccaataatacaaattaaacacaggaaatgtatttgttcgctagtgttcagtagaaaactaaatataagctagagaatcataggagagtagatgctcctatttgttgaaaatcatagaaaatattttggtcaagactttaacagaaatgactgaacatgcaaaagttaattttacagaaaaattataaaaattatgtaaacaatcatactgccaatgtacttcatattttccacaactgaaattatgacaagcttcccctaattctaaatctatgtctctatgtattcaagtattcttttatatccttcagtaaattggtatatattgtattatttttattacggttttttggttacttgtgtgaataggatgttttctctgttaccttttcaaattataattgttttattataatggagttgagtttkttaatatttattttataattgaccgtattactgtagtttcttatcaattctaatattttaagtgtatctctgattccttacatttttatagtcaagcatatttattattattaccataattatattaactaagaaactgagttcagagagtttgagtgtttttccaacataaactttaaaaaatgatagaatatggaacagtttttacatcatagaaattatctgttccttgaaagtttgaaagaatgcttctataagagtgtctagaattggatcctctattgttggtaatagcttgacttttttccatttttcccttgactaaatatttatttcaagttttctacttcagtaaacttttctaatttatatttgtctaaagttttcaaatttaatagctttgcgtgcgccttatcattttttagtatttcatctacttcatatctgtgattatattactttctaatgcctaaatgtatgtttttgagtgatctctattttttcattagacaagctaaatattttactattttattactgtattatttgtaaatcctaattcactaattttcatttttatattattcaatatattattttattttcctatttcattttccttatttcgtgatttattttttgttttctttcctttttttctaatttcttgaattagtacagtttattttgatttcactttagtcattaaaatacctaagattatgagttaactttgaacagtgctttcttagctatttctcataagcttta

SEQ ID NO: 699058 - DNA, 1436 bp, Homo sapiens
tgggaatggagattcatcctaggctttctcagagatgtgttaggtctgatcaaatgtcctccctccccttccctgagtgccagtctggtggttgagatgcttgtttgctctggcctcttgggaggtccctcatacctccttggtgatctaatcattagtccctgaatcctcatgtatttatgtgagtcaccatctgggcaagataagtaatttctctggaatatagaagcaaccccaccaataatacaaattaaacacaggaaatgtatttgttcgctagtgttcagtagaaaactaaatataagctagagaatcataggagagtagatgctcctatttgttgaaaatcatagaaaatattttggtcaagactttaacagaaatgactgaacatgcaaaagttaattttacagaaaaattataaaaattatgtaaacaatcatactgccaatgtacttcatattttccacaactgaaattatgacaagcttcccctaattctaaatctatgtctctatgtattcaagtattcttttatatccttcagtaaattggtatatattgtattatttttattacggttttttggttacttgtgtgaataggatgttttctctgttaccttttcaaattataattgttttattataatggagttgagttttttaatatttattttataattgaccgtattactgtagtttcttatcaattctaatattttaagtgtatctctgattccttacatttttatagtcaagcatatttattattattaccataattrtattaactaagaaactgagttcagagagtttgagtgtttttccaacataaactttaaaaaatgatagaatatggaacagtttttacatcatagaaattatctgttccttgaaagtttgaaagaatgcttctataagagtgtctagaattggatcctctattgttggtaatagcttgacttttttccatttttcccttgactaaatatttatttcaagttttctacttcagtaaacttttctaatttatatttgtctaaagttttcaaatttaatagctttgcgtgcgccttatcattttttagtatttcatctacttcatatctgtgattatattactttctaatgcctaaatgtatgtttttgagtgatctctattttttcattagacaagctaaatattttactattttattactgtattatttgtaaatcctaattcactaattttcatttttatattattcaatatattattttattttcctatttcattttccttatttcgtgatttattttttgttttctttcctttttttctaatttcttgaattagtacagtttattttgatttcactttagtcattaaaatacctaagattatgagttaactttgaacagtgctttcttagctatttctcataagcttta

SEQ ID NO: 699059 - DNA, 617 bp, Homo sapiens
ttttaagccacccaattagtgatactgcctcacagcagcccttgaaaattaatacaccacctttacgaaaactgttcacaaaggaactctgtgtaacattacacataaaatgtaacaaaaacacttaatatgacaactgttgtaaatatgaaaaatattatcacatgaaagatagtgggagatgttatagagttcactgccaggttactttgatggagaaagaaagagattgctcacagtgaagtttggttcatctttggaaaggacctgagagatggtctgatccgggagtgggcaaactagggcccgtaggccaaaagcggctgacggggcatgattgtacagaccctgagctaagaatagcttttacatttttgaaatgttcttgaatgtgggcccatctcttttttccttctatccagaggtttccagagccactagaaggaaggatttttagatcccyaaaagattatgtggcatagacaacctaaccccctactcacactttactgtgatgtgagaaatacgttttgattgtttaggcactgagatttctgttacacacaggtaagggttttgtgttataatagttaccataatactattctaccctaata

SEQ ID NO: 699060 - DNA, 2346 bp, Homo sapiens
catgaacatagggctcgatgcctccacagtccttcggtgtcctctccagatgcacttgagggtccaataattagaaatatattgggctcatcagaagtgtctctgatgtcaggcacggtggctcatggctacaaccccagcattttgggaggtcaagacaggaggatcccatgagcccaggagtttgagatcagcatagtgagaccacatctctacagataattaaaaaattaggcaactgtagtggcactcgcctgtagtcccagctactggggaggttcaggagggaggcccacctgagctccggtggtccaggctgcaatgagtggtggtcacaccactgcactcctgcctggatgatgggagtagaatcctctatttaaaaaaaaagtctctgataagattagagggagattatcaaaagcaagccaccccttattgcttgggttcttaacacctgagtggcaggtctggtttagacagctggagtaaactgacctagtgcttctcaaacttttgtttacaaattacctgagtatcttggtttaaaatgcagattttgaatacaggcctgcaagtctgtagttctaacaatctcccaggtgatactcatgctgctggttcagcacccacagtgaaagatcaaacattctcagtcctcttcatgacctccacactaaaggttttaacacaatcgactctctsagcacccaagcctctaacccatgaattaaacaaatacatcaacaaacaaaacaataaacagaaaaaactgagaagccaagggttgaaggttttaaaatgtgatgtattaatccacaaaaaaaacatgtctactgaagctttgattagtgtttatatttcattccctgcttcaatcacaattacatctcggttacacttaaattcttcccacatgaattttaggttccagaactgatagcaggcacaactggctacagtctaaatcaaaggcagaaacccaagaaagaagtaataatataaaaatatcaatttatctacaaatgattttaacatatccttcaaaccatgttttctaaataaatgggccttactcatcattaaggcctgtgtgtgtgtatgtgtttacataggtattgtgtggacagtagtggaaggaggcagaggacagcaacccagtgtaaatgtataggtcaaggacaaactgaacactcttaagcagaaagcagtactttgctttcatttgggtaccatttggagaaaaagactgtatttattacttcaaccacccttcagtatgtatggattgaattccaatgaaagtgcattaaaagataaaagatccaaaggaaaaaaaagcaagcaaatgtgtttgttcatttttattttgtttggaaaagaacacacctaaatatccacgtttattttctcttatcctcctataacaaagggtgagatttcagttctctactatggtcgcctctacataggaagcttccgaagtttattctaccccagagaccagtgggtggggatgaatgtcagggtcattcctatatgcctagtttagctcttggtacactgcagggactcaagcaaaatgtataaaatgaatgggtgtctgcatgcatgcttagcatttttttgggacaggactcacaagaaaatgcttttttttttttttctgttttcttctccccagtcatctcatccttctgacccttctccctggccccaccattagacaaaggtatcacggttggggccagaggaacgtttcgacagttagctggtctggctcagccatgatgatcagttacgatcttaatctccctgggtattttcttctctcatcattaaagtggaaacaatagcaatttctcttctctaattactccatcacagggttattgatggatttactagatacatataaaatggatcccataaatgcaatagctgcccaagaaataatcattttctattttaaataaactatagtttatcatttaatgttttccatgaacagtaaacttatctttaaactttgatttcttccttcgttctctgcgtctaagaacaatggagtcactctgggaacagcaatagtggcttccattatacaagggatttgaaatggggtatgggtaaatgaaagctacaaaatgactgaaaaatgatcatattttagttaaagacacattataagcatacggctaaacactgctgtcccctaatgatccaaagtcctataaatccaaataaaagatcatttcatgcccttcaaattagcgtaggttttaaaatgatcacagtccaatgttggtgaggttatcataagtgaagttaccctaactcattttc

SEQ ID NO: 699061 - DNA, 665 bp, Homo sapiens
tccaccccggccgccccctcctgcacagcctccatcctgaaggcggtgccctccttggcactcgcacacaccaaggcctgtgctgcccgacccacgccacagaaaccctgccgcagcctctctggcacccggtaggtcagcgagccctcagggcgcatgcgccgggcttccaggcgccccctaagggactgcgcgcgaagggccggggggccgcacccaggccgacttcctcccgtcgtggccagtcaatgggagggcggtgggcgtctccctgggcggcacagccactggcgggcctgcatctccagcccccccamccccccgccttccctgcccaagcctcctccgagaagcccttggagcttgtgccgggtagctaggcatccgggcacacgcgggctgcgtggcctttggaattgtgggcatggcagccctgtgccctgacatcctcagtgtggcaagccatgaacatctctatgtgtcatgaacacaggaaacatctctcttcgttaggcaggccaggtagatggtacggaggtaatacagaagatgcagagaactctctctggttgctggggctagggcggcaggggtgtcctgggggaagtgatcggggcgggcacgtgggaggaaagtcgcctgccggtgctgaggtggaattgatc

SEQ ID NO: 699062 - DNA, 665 bp, Homo sapiens
tccaccccggccgccccctcctgcacagcctccatcctgaaggcggtgccctccttggcactcgcacacaccaaggcctgtgctgcccgacccacgccacagaaaccctgccgcagcctctctggcacccggtaggtcagcgagccctcagggcgcatgcgccgggcttccaggcgccccctaagggactgcgcgcgaagggccggggggccgcacccaggccgacttcctcccgtcgtggccagtcaatgggagggcggtgggcgtctccctgggcggcacagccactggcgggcctgcatctccagcccccccacccccccgccttccctgcccaagcctcctccgagaagcccttggagcttgtgccgggtagctaggcatccgggcacacgcgggctgcgtggcctttggaattgtgggcatggcagccctgtgccctgacatcctcagtgtggcaagccatgaacatctctatgtgtcatgaacacaggaaacatctctcttcgttaggcaggccaggtagatggtacggaggtaatacagmagatgcagagaactctctctggttgctggggctagggcggcaggggtgtcctgggggaagtgatcggggcgggcacgtgggaggaaagtcgcctgccggtgctgaggtggaattgatc

SEQ ID NO: 699063 - DNA, 614 bp, Homo sapiens
aaccctaagatataggtactatcataccgcatcttacagataagaaacttaggcacaaagaggtttagtagtttagatgagataaccctgaygagcagagattcgaacccagcctccatgctattaaccaggacatcatattgcctttcatacatgctcttcaaaggcaacacagtaatcgattatcacactcactcacatctgattgtcacatttttcagatctgctctcctagcagagaatgaagcctaaggtatccttgtttctcaaagtgtcctccccagaccagctgcatcaaaatgaggggatgaggtgcaaatgcctggaccctgcccttggagcactgattcataatctcaagtcccaagaatctgcattttaacaagcatccccagaaatttcttaagtatactaatgtatgggaaccactgacactaaagaaatggaataaggggaacgtacaatgttacagtaaaccaggaaaagccagaaagacatgacaacacagtgaggactctggtagccaatggtcagtcaaatgcccaggggccctggccagaagagagttaggttgctgaggagtaagagtgatgctgaatgtggaggcttgagag

SEQ ID NO: 699064 - DNA, 1247 bp, Homo sapiens
tgtcatcattggtccatgaggggctctcttctatttgattttatttattttattatttaatgatcattaattaacacctatgaattcatcatcaaatcaaagaactagaactaacaactacacatttgttccttctctttcccatccacctgtacccctgcatccatatgaggtaaccattctcttaaattttgttatttattatctttttgcctattaaaaaattttaaatacaatctcccaggggaaaaaaaaaacctatttagttttagttctttttaaaatatttctaaggagtaccatgcagaatggatcgttctggtgtttgatttttttttttttcacttaagattcattcatattgttgaatatagctctaagtcattcattttcagtgctatatatttgtctgttccatgaacatatccatttttatccagctgcctcttgagggggacatggtatgccaatggtgctgctataatcatacttctgcatgtccactgggagggtttgtgggcataaattcctctagggattatcattaggactgaattgttcagtcccaaaaaatgatacacccccagcttttctagatatgaccaatggcttttcaaattaataatagcaatttacactgccaccagcattttgaactgtcaaacttcttcaattttgctaatcaagtgggtgtgaaatagtatcttattttagtcttgatttatacctttctgattaccaatgaggttaagcgtcccttcactggtttttggtcatatgagcttcttctgtgaaatgacatgtcattcagcaagggttttttaaaaatgattttttttttcactgagtcataggaattcttaccgattcttaatgttttcattttatttttacatatgtttcaaatatttttctcaatttgtatccttattttcrctttcattattaaaatgtctattagtgaacacaagtattttgactttagtgttcatatttatccattttttatttttagtactttttataatgtcaaagagatattttcctgccaagatcagtaagatatttattgtattttaactagcattactgtggtttaagagtttaaatatcttaggtttttctagcataaaaatattttgcaatatgttcaatcacattaaatatttgcttttaacatttaagtccttaatccagttacatggagttgatttgtttgtgttgcatgatgtaggaatccaatttca

SEQ ID NO: 699065 - DNA, 1414 bp, Homo sapiens
aagcaaataaggatacaaaactcaagtcagtgcatttccttaatgtaaagaatgcaaattttgccaaaatatcgggctaacaggtcttttttgtgagtcagaaaaaaccgtgtttcatttattttgatttgttcctttaaaaaaagttttctagaacctcgggatttatatacattcctttttattcttcaagagacacaaagactacatctttgtgaaagtttaaatgtgtgttcatgtttgccttctcaatgatggacatcctgagtacagtcagtaacttccactgaacgtttcttgggggcaaccttgggcttttcataatggcagtctctagtccattcatcttttaggtatgaaaacctgagacaatccttaaagcttaaactatcatctccttagaaattaccctagtggctctgccagtcagatgtgggtgtatcacaaatcctaggtcacccagcccataatttctttaatatcaaaaaataaaccaggaaaattaacattgtgaacctccatcaataatttaggctggaatgcaaaagtatttcaactgcataagtcatctgttattcactttaaaggcctgaatgcaggatagacttcacctctaaaaactgagtctagttctgagcttgtccttgaygccaagttccagggcctcgcacttgaaaagatcaggtgcaattcaattatgaagtcgtatctgactttttgaagtgtaaatctactgcacttgaaaatggcaagtgtaaaatccattcttaaaaagcacttgacattttcacatacagctttacagccatggaaatatgaggcggctcacaagagatggccaagagtagcttaaaaaaaaaaagagagaaggaaaaaagaaaaaaggttttaatgcttggtcaagagcagaaatctgatttttagctctttgttttgactaggaaattagaactttttttaaagctctgctttgtaaaactcatctctatgagctgattttttttctagtaatgtttaacttccggtttatatgcctgatagtgcatgccttttctcttcatgaggactttgtagcttatctcactgtctttattctgtacttacaggctgaagtcatcatatacataaggggttagcaaactttgtctgaaaaagaccagacagtaaatatttttggttttgtgggccatatggtctccgtcaactctgctgttgtatcatgaaagcagccatagacaatatgtaaacaaatgagcttggctgtctttcaataaaactttatctgtgaacacagaaatttaagttttatataatgctcatgtgccataaaatattactattcttttgattgttcttcaaccatttttttaaaaaataaaagccattcttggttggcgggctttataaaaactga

SEQ ID NO: 699066 - DNA, 615 bp, Homo sapiens
ctgtagctcccattagctctaatgggtcctccccacatacaaactgtcctctcactgacggagaaacagactcctaactaatattcttgtgacatttatatctagagttcagagatggacagagggctgcattaacaggctttggatagtgttatgataccattatgctaatagagatttgtgtcagctcctttttagagggccataattctacctttaaaactctctttcaggtgaagcaaatttttcaatattagtattaactttttgtcattgttgtttttctcaaaggaacaataaccaccatcacagaaaacaaatgactattttacttgcctggcaatagtttgtggaaggcgattttcagtccacttgctttttagagaggcttctacctgatttgccctgagctcagggcacagcgacagtcgtcctccctcgttyggctctgccagtcatgagtgttagaggacacctgtgagggaggtgttcggtggaaagcttccaccgaggagactgaaggcacccaaggagacggaaggcaaagagaagtgcactagaagcatgagattttgtggaaattggaggctgcagcccgcctgaattagaaatcag

SEQ ID NO: 699067 - DNA, 646 bp, Homo sapiens
actttgccattttaatatgaatgctatttttgaggggaaattgtcttgaaagcagcttaaatgtagcagtaaatgaatatgagttggagttaaacattccrtcaaccggctccacgcagcccgcctctcttccagccatttgaaaccatttctgcagaactttgcctagtcagtttcacacaggctagcagcatgagacaggaataactgcttttgtatgcctgtacatgtccctttttccctctatcatccactcgaaggcattttggaattgtgttttttttcttttttaacagcatataaagctaaattgaattcaatgctagtaaaaaaggtggcttatgtcagagacaaggatgtgttctttcaattctaaatggaatagcaaaaccctgaatgcaaagtgttatttcctgtggggcaggagaagattattttcccctgtgacacttcacctgtgtgccactcttgattctctcttacactgctcttctgttctttaatttgtacgtggatgcgtgtgtgtgtgtgtgtgtgtgtctgtctgtctacatctatgtatctgtttatcccttctatctcctttattataaaaacagtaagtgctaaataaatataagctattatacatcagacaatgtttaaa

SEQ ID NO: 699068 - DNA, 646 bp, Homo sapiens
actttgccattttaatatgaatgctatttttgaggggaaattgtcttgaaagcagcttaaatgtagcagtaaatgaatatgagttggagttaaacattccatcaaccggctccacgcagcccgcctctcttccagccatttgaaaccatttctgcagaactttgcctagtcagtttcacacaggctagcagcatgagacaggaataactgcttttgtatgcctgtacatgtycctttttccctctatcatccactcgaaggcattttggaattgtgttttttttcttttttaacagcatataaagctaaattgaattcaatgctagtaaaaaaggtggcttatgtcagagacaaggatgtgttctttcaattctaaatggaatagcaaaaccctgaatgcaaagtgttatttcctgtggggcaggagaagattattttcccctgtgacacttcacctgtgtgccactcttgattctctcttacactgctcttctgttctttaatttgtacgtggatgcgtgtgtgtgtgtgtgtgtgtgtctgtctgtctacatctatgtatctgtttatcccttctatctcctttattataaaaacagtaagtgctaaataaatataagctattatacatcagacaatgtttaaa

SEQ ID NO: 699069 - DNA, 586 bp, Homo sapiens
agtctaaagtaatgcactcaaaccagttaaacagaaatcaaaactgttctgggaagccacggcttctctgactttgagagctctgccaaaaacgatctcaggcaggaaagagatcaaaccatcagtttcccttctggagttgtctggagctaagatatttgaggacaattactgttttggggttcaactcctcctaaggtggctattccaggaayttcagggccagtatttcatcaaacacctgtacttctcccaacgtccctgataatgctccggtcgaactttcctgagggtgtctcagagcagttttcccagatggctgtcagcagggacttctctggcagaatccggaacagaatgacacaaccagagaacttatgaaggttaaatctgttgagctggaagcctcacagctgcagatagatgtgttggcagagccattagctgggaaccagctctggttgataaggttattcccggggagccggcatacagtgagcataacgggacccagcactgggaccaggaaggaggctgtcaccctccctaattagctcaccagacacatggggtacctgtacacgcc

SEQ ID NO: 699070 - DNA, 1674 bp, Homo sapiens
aacatggcaaaaccccatctctactgaaaatacaaaaattatccggctatggtggcgggcgcctgtaatcccagctacttgggaggctgaggcagaagaatcgcttgaacccgggaggtggaagttgcagtgagccgagatcgcgccactgcactccagcctgggtgaccaagtgagactccatctcaaaaaaaaaaaaaaaattccacctagggtttgttaatttcatgctctttcagaaatggcacactgctctgagtaaagggcaaagaaagactaaagaacgttcaaccctgatatttggaaacaggacaccagaatgctttcactttctcttctgtcctgcttcccctcttctcattttattggctaggcgattaggagacttatttctgttccttaaggattattcacatgttcactcccacttcatctcaggcctaaggaatgttggcagaaaaagcagcacacctgttcctccttttccacttcttcccttcctgttcacatcaacatctgaagctgccatcctttgttaactcattgccatgatccctcactgaaggcaatatgctgccaactcacgggtgttgctatggtgactatgatgtcataaggtgaggctatgtgttcsggtgagtgcaaggatgaattttttcttaatctaagatattaacttcacaaatatagaatgctagatattaaagtagaaaggaaactgggttttgcagaaacccaacattagtgtctatttttcttctgagtaatcaagttggactcaacaacctccatatggtctttgcctgctctaagattttgtaattatggaagttgatgaataattacttctctcagacagaagcagcctcactggcctaaggttgcaagggttacgatttaaataggattctcagttgaagagcaagattgtcttccggaaaatctttaagatctgggctcacttccacatagcatccgcgaggtctttcttcctcctagcctcagttctaccatctgttaaatagaaatgaaagcatctagtctcagggagctactgtaaagactgcatgagaaaacatggtcaaagcacttagcacatagtggctctacattgatgttattttctttgctttaaattcattcaaggctatgttacttcacagcattaactcacgcaagtcattctatttcttttaggcataactattttattgttgtttataaaaatgaggaaagttggagaaaataaagatagaggagatacaaaaggtgaaaaaagagagttataattttattaaagtcctcctgattctagactccacgatctagaatctaaagcaaatgattcgaggaaaagaataaatacatgtgtattgttcctttcatttatgcaaacaaatccaattattgccaaatataacaactgataaatggagtaaaatacttgtcttcttagtgagtactgatgagtaggataatgcccagaaaaggtggctgggaacttcaaacctactagaattattggttggactggggatgttgaaattgaagagagagacgttccagggagaggcatgattctcattctcaactctttgaaggcattttatatcctaaaggtagaagacttgcttcatttggccacagaagttaggaaaagtgcccctggatgaa

SEQ ID NO: 699071 - DNA, 2199 bp, Homo sapiens
tactgattgggtattaaataattcaacacccaagagttgtgatcaaacagatctgtaggcatatgtaagtaccactgaggtgaaagtgccaaccaaagcaattagattgaaaattaatgtctggaggtaatcagtggaagaagtggctgtggaccttcccatctgcatcatctttgtttattgctgtagctgggtatcacagaaaaaccaactcatttctcaaagacaaacaaaggatgcttccttcaatgtaggcatttctaaattaaattggaatctataagaagtaattccatgctcagatcttaagctgatttttattaatgttgctggccagtaatgaagataaatagtaggcacatccactgaagccaggaactgcaaatgcaaggttgggagacttgggagtggttaattatagtctctctgcaagggttcaagggggtctggggttacctttttctctaatgatgtcctttactctgacattagcatcattgatgtaggatttggatatttgacattctttttttttttttttttgaaatggagtctcgctttgatgcccaagctggagtgcaatggtgagatctcgactcactgcaacctctgcctcctgggttcaagcgattttccttcgtcagcctcctgagtagctgggattacaggtgcgcaccacaatgcctggctaaattttttgtatttttagtagagatggggtttcactgtgttggccaggctggtcttgaactcctgacctcaggtgatctactttctcttaagtgtccaattgtgacttagaggcatcataatgaatgcttcaaggtgagcccatcttgggcatgttctttacattttacaatgtatattataccagctaatacaaatctcaacaggacccattttagatggtgttttaggtaagggaacctctggtaacttctcataaatagaattttctggataactggtaatttaaatagaaaaaaattgttttgtttcaacctaagtggctggaaaagatctttgcaaaatgtattagtccacttcacagccttgctaagtactaaagctaatttaatatttcttttatgattgatgactctgcagtgcttcagggccactatgaattgttgttgaggtaataagctgcagtatattgaacactgaatctaaactgaccagatattggcttatttcattgtgccttgattctttctctctaaagcagagaacagaaaagaaatttactggtgttatggtcccagttagagctgttactgtgtatgtgtgtcatacattgtggttcttaggacaagtgtgggatgtaaaacatcaaaagttttcaatggtcctgacacatagtctttgatggacacttccacaaacctgttcctgaatgcgatcaactgctaccagccccagtcaatttacaggtaccccagtgcttacacgtcttctgaagttgccatgataccaatcagtaaagaaataagcacaaaagtaattggactttcagtattgctaactgcttcatggtgaaattggcaggcatgacacttgtgctctgaatcctgatcttttaataaagagaaaataataaaaatttaytgacaaattacaccatcactataaaattacattccatataacttgcctacatgcaagtctacagaacttcacaagatttctcattttatttgtggaatattatagaaacacagcacccaggacttttcctgaacttctcttcaggaggttaagggaatctggccccatcactctgtttctgtttttgttttaggatcttttcactttgttcagacaaagaaaccacaattctgaaaaacccttgggtaacaaatacagaaactgtgtaatgggataagactcttcgggaatactatttgtaagagctgaaagactaggtcttgctgtaccattgaaaatataagactggagatgcccatgggaaattaaagaatactgcatggtaatggtgatgggagacgggtgaaggttactcccaatgtccccataacttttctaacctaaagacccaaaatccttaagtttcattttgctaaagtttccacaacagcacaacacactcaagaattggagaacttttggaaatatctcttttgaaagaacaaggaaattactcctttgttatatcaaggaatgagatgtaaaaaa

SEQ ID NO: 699072 - DNA, 2199 bp, Homo sapiens
tactgattgggtattaaataattcaacacccaagagttgtgatcaaacagatctgtaggcatatgtaagtaccactgaggtgaaagtgccaaccaaagcaattagattgaaaattaatgtctggaggtaatcagtggaagaagtggctgtggaccttcccatctgcatcatctttgtttattgctgtagctgggtatcacagaaaaaccaactcatttctcaaagacaaacaaaggatgcttccttcaatgtaggcatttctaaattaaattggaatctataagaagtaattccatgctcagatcttaagctgatttttattaatgttgctggccagtaatgaagataaatagtaggcacatccactgaagccaggaactgcaaatgcaaggttgggagacttgggagtggttaattatagtctctctgcaagggttcaagggggtctggggttacctttttctctaatgatgtcctttactctgacattagcatcattgatgtaggatttggatatttgacattctttttttttttttttttgaaatggagtctcgctttgatgcccaagctggagtgcaatggtgagatctcgactcactgcaacctctgcctcctgggttcaagcgattttccttcgtcagcctcctgagtagctgggattacaggtgcgcaccacaatgcctggctaaattttttgtatttttagtagagatggggtttcactgtgttggccaggctggtcttgaactcctgacctcaggtgatctactttctcttaagtgtccaattgtgacttagaggcatcataatgaatgcttcaaggtgagcccatcttgggcatgttctttacattttacaatgtatattataccagctaatacaaatctcaacaggacccattttagatggtgttttaggtaagggaacctctggtaacttctcataaatagaattttctggataactggtaatttaaatagaaaaaaattgttttgtttcaacctaagtggctggaaaagatctttgcaaaatgtattagtccacttcacagccttgctaagtactaaagctaatttaatatttcttttatgattgatgactctgcagtgcttcagggccactatgaattgttgttgaggtaataagctgcagtatattgaacactgaatctaaactgaccagatattggcttatttcattgtgccttgattctttctctctaaagcagagaacagaaaagaaatttactggtgttatggtcccagttagagctgttactgtgtatgtgtgtcatacattgtggttcttaggacaagtgtgggatgtaaaacatcaaaagttttcaatggtcctgacacatagtctttgatggacacttccacaaacctgttcctgaatgcgatcaactgctaccagccccagtcaatttacaggtaccccagtgcttacacgtcttctgaagttgccatgataccaatcagtaaagaaataagcacaaaagtaattggactttcagtattgctaactgcttcatggtgaaattggcaggcatgacacttgtgctctgaatcctgatcttttaataaagagaaaataataaaaatttattgacaaattacaccatcactataaaattacattccatataacttgcctacatgcaagtctacagaacttcacaagatttctcattttatttgtggaatattatagaaacacagcacccaggacttttcctgaacttctcttcaggaggttaagggaatctggccccatcactctgtttctgtttttgttttaggatcttttcactttgttcagacaaagaaaccacaattctgaaaaacccttgggtaacaaatayagaaactgtgtaatgggataagactcttcgggaatactatttgtaagagctgaaagactaggtcttgctgtaccattgaaaatataagactggagatgcccatgggaaattaaagaatactgcatggtaatggtgatgggagacgggtgaaggttactcccaatgtccccataacttttctaacctaaagacccaaaatccttaagtttcattttgctaaagtttccacaacagcacaacacactcaagaattggagaacttttggaaatatctcttttgaaagaacaaggaaattactcctttgttatatcaaggaatgagatgtaaaaaa

SEQ ID NO: 699073 - DNA, 652 bp, Homo sapiens
tattactagaaaaaaaatggctccaagtgaggcttgtcccagagttcaaaaatgccacaaaagaccaggtggtgctctcctttcactctgccttccatggttttttatttattcttatttatttttagttttagtttttgagatggagtctcactctgccacccaggctggagtgcagtggcgttatctcggttcactgcaacctctgcctcctgggttcaagcaattctcctgcctcagcctccygagtagctgggactacaggcacgagccaccacgccctgctgatttttgtatttttaatagagatggggtttcgccatgttggccagggaactcctgacctcaggtgatccacccgcctcggcttcctaaagtgctgggattacaggcgtaagccaccgcgcctggcctccatgttgtttttccactcatctttaagctctcatggccgtcctgggtcaatgaggttgtgagcaaaatggctgctgcagaccaggcctcttacctcatcctccaggagaactaagagcaactcttgttgccagcgcctctcacaactcctaagactctctcttattggctcacattgggtcatgtgcccatctctgaaccaatcactgcaaccagagagatgggctatggaggcaga

SEQ ID NO: 699074 - DNA, 652 bp, Homo sapiens
tattactagaaaaaaaatggctccaagtgaggcttgtcccagagttcaaaaatgccacaaaagaccaggtggtgctctcctttcactctgccttccatggttttttatttattcttatttatttttagttttagtttttgagatggagtctcactctgccacccaggctggagtgcagtggcgttatctcggttcactgcaacctctgcctcctgggttcaagcaattctcctgcctcagcctcccgagtagctgggactacaggcacgagccaccacgccctgctgayttttgtatttttaatagagatggggtttcgccatgttggccagggaactcctgacctcaggtgatccacccgcctcggcttcctaaagtgctgggattacaggcgtaagccaccgcgcctggcctccatgttgtttttccactcatctttaagctctcatggccgtcctgggtcaatgaggttgtgagcaaaatggctgctgcagaccaggcctcttacctcatcctccaggagaactaagagcaactcttgttgccagcgcctctcacaactcctaagactctctcttattggctcacattgggtcatgtgcccatctctgaaccaatcactgcaaccagagagatgggctatggaggcaga

SEQ ID NO: 699075 - DNA, 652 bp, Homo sapiens
tattactagaaaaaaaatggctccaagtgaggcttgtcccagagttcaaaaatgccacaaaagaccaggtggtgctctcctttcactctgccttccatggttttttatttattcttatttatttttagttttagtttttgagatggagtctcactctgccacccaggctggagtgcagtggcgttatctcggttcactgcaacctctgcctcctgggttcaagcaattctcctgcctcagcctcccgagtagctgggactacaggcacgagccaccacgccctgctgatttttgtatttttartagagatggggtttcgccatgttggccagggaactcctgacctcaggtgatccacccgcctcggcttcctaaagtgctgggattacaggcgtaagccaccgcgcctggcctccatgttgtttttccactcatctttaagctctcatggccgtcctgggtcaatgaggttgtgagcaaaatggctgctgcagaccaggcctcttacctcatcctccaggagaactaagagcaactcttgttgccagcgcctctcacaactcctaagactctctcttattggctcacattgggtcatgtgcccatctctgaaccaatcactgcaaccagagagatgggctatggaggcaga

SEQ ID NO: 699076 - DNA, 652 bp, Homo sapiens
tattactagaaaaaaaatggctccaagtgaggcttgtcccagagttcaaaaatgccacaaaagaccaggtggtgctctcctttcactctgccttccatggttttttatttattcttatttatttttagttttagtttttgagatggagtctcactctgccacccaggctggagtgcagtggcgttatctcggttcactgcaacctctgcctcctgggttcaagcaattctcctgcctcagcctcccgagtagctgggactacaggcacgagccaccacgccctgctgatttttgtatttttaatagagatggggtttcgccatgttggccagggaactcctgacctcaggtgatccacccgcctcggcttcctaaagtkctgggattacaggcgtaagccaccgcgcctggcctccatgttgtttttccactcatctttaagctctcatggccgtcctgggtcaatgaggttgtgagcaaaatggctgctgcagaccaggcctcttacctcatcctccaggagaactaagagcaactcttgttgccagcgcctctcacaactcctaagactctctcttattggctcacattgggtcatgtgcccatctctgaaccaatcactgcaaccagagagatgggctatggaggcaga

SEQ ID NO: 699077 - DNA, 652 bp, Homo sapiens
tattactagaaaaaaaatggctccaagtgaggcttgtcccagagttcaaaaatgccacaaaagaccaggtggtgctctcctttcactctgccttccatggttttttatttattcttatttatttttagttttagtttttgagatggagtctcactctgccacccaggctggagtgcagtggcgttatctcggttcactgcaacctctgcctcctgggttcaagcaattctcctgcctcagcctcccgagtagctgggactacaggcacgagccaccacgccctgctgatttttgtatttttaatagagatggggtttcgccatgttggccagggaactcctgacctcaggtgatccacccgcctcggcttcctaaagtgctgggattacaggcgtaagccacygcgcctggcctccatgttgtttttccactcatctttaagctctcatggccgtcctgggtcaatgaggttgtgagcaaaatggctgctgcagaccaggcctcttacctcatcctccaggagaactaagagcaactcttgttgccagcgcctctcacaactcctaagactctctcttattggctcacattgggtcatgtgcccatctctgaaccaatcactgcaaccagagagatgggctatggaggcaga

SEQ ID NO: 699078 - DNA, 2044 bp, Homo sapiens
attcctatttttctttcccaattgcctctaaattatcttgatgtgcatgcatatttttgaactaaattgtgtcatcaggggagagcattcaatttacattttttgctattattcagtttactargcatttttacaaatgtttttgtatagaacgttatgcaagatcacttatatcttattatgataaggcaacttttatatcaaagaacataaaagagtctgagggctttttaattttaccaaacttaaggcaaagttgttatacatgtaatttgtaattttattggaaaaacagaactttcattggatgaaaatatacattttttttaagatagcaaagcttttacttagcccttgaaatatatctattccctagggcaaccattctctaattttaaatttaaggtctagtacatagttcagtattcagggtctcctataccatagaaattaaatcattttaagaaaacaattttaaaattaatctatgtgttgttattgatgataattattatgtaggtacaaaacttctgtagatttttatgtcaatattttccaaatagttttcatttttaaatctgtgaagacttttgtgttgatgggaaaaacaggaaatttaattttatgctcttctgtttaagtggtttgtttgttgtttgagttacagtgtattcaccaaagcctctgattttaatcccgtccattgtacacagaaacattcaaacatatctcctttcttcacacagcgactaccaactacaccatcaagtgcatttcaaaccataatgaagggactgtagacagtcacacatttcccaagatgaaaaacacttaacatggaaccactttaaatcagcctctgtcttcttcaaatgcgaatactcttatccctccaacctggatgccttggctgtgacatttagagcagagatgacttttcattggctttcaaggtgttgctcctaactacttgcatcagagtaacccataatgcttataagaaattcaaatttcttcacttcattgctgtaacctgaatcagaatctctgcattattttgaatttgcatatttgatgacgttatttgttttcgttcttcacgctaacatttgggaagcactgagaagaggggatatacttggtagaaacgttttatatcaactaccacaaaagggaaactccctactctccttactggttccatgatcaaaatagcagaaaccagaatcatgtaaacatcaatcacaaacatatacaattctgcacttcttctgggaaaactgcaaatagacaaagcttaatttctgaactaaaaaattacattttaattaagtatatttgcttgttaaaaatatttttacacttttggatgcattaaacaaatcttatttaatctactattttagtgagtgttcaacatttcattataatcgcttacatatattttctgtatttttcattaatgttattaaagattagtatttattgagcacttgccacatgcagacactgttcttggcattttacatcaattatcacacttgattctcccaataaacctatctcagcttaacagatggaaaaaagctcaggcttggtaagatccagtacatcacagatagtgatatagtttggccatgtccccacaaatctcatcttgaattcccatgtgttgtgagagggacctggtgggaggtaattgaatgatgggggcaggtctttcctatgctgttctcatgatagtgaataagtctcacaatatctgatggttttaaaaggggagttcccctgcacaagttctctcttctcttgtctgccaccatgtaagatgtgcccttcaccttctgccatgattacaaggcctccctagccacatggaactgtaagtccaacaaacctcttgcttttgtaaattgcctaatctcaggtatgtctttatcagcagtgtgaacatggactaatacagacagtgaatggcagagttaagaatttaaccaaaatctgtatgatttcatgtgctatggttcaaatgcttgccctctct

SEQ ID NO: 699079 - DNA, 2044 bp, Homo sapiens
attcctatttttctttcccaattgcctctaaattatcttgatgtgcatgcatatttttgaactaaattgtgtcatcaggggagagcattcaatttacattttttgctattattcagtttactaagcatttttacaaatgtttttgtatagaacgttatgcaagatcacttatatcttattatgataaggcaacttttatatcaaagaacataaaagagtctgagggctttttaattttaccaaacttaaggcaaagttgttatacatgtaatttgtaattttattggaaaaacagawctttcattggatgaaaatatacattttttttaagatagcaaagcttttacttagcccttgaaatatatctattccctagggcaaccattctctaattttaaatttaaggtctagtacatagttcagtattcagggtctcctataccatagaaattaaatcattttaagaaaacaattttaaaattaatctatgtgttgttattgatgataattattatgtaggtacaaaacttctgtagatttttatgtcaatattttccaaatagttttcatttttaaatctgtgaagacttttgtgttgatgggaaaaacaggaaatttaattttatgctcttctgtttaagtggtttgtttgttgtttgagttacagtgtattcaccaaagcctctgattttaatcccgtccattgtacacagaaacattcaaacatatctcctttcttcacacagcgactaccaactacaccatcaagtgcatttcaaaccataatgaagggactgtagacagtcacacatttcccaagatgaaaaacacttaacatggaaccactttaaatcagcctctgtcttcttcaaatgcgaatactcttatccctccaacctggatgccttggctgtgacatttagagcagagatgacttttcattggctttcaaggtgttgctcctaactacttgcatcagagtaacccataatgcttataagaaattcaaatttcttcacttcattgctgtaacctgaatcagaatctctgcattattttgaatttgcatatttgatgacgttatttgttttcgttcttcacgctaacatttgggaagcactgagaagaggggatatacttggtagaaacgttttatatcaactaccacaaaagggaaactccctactctccttactggttccatgatcaaaatagcagaaaccagaatcatgtaaacatcaatcacaaacatatacaattctgcacttcttctgggaaaactgcaaatagacaaagcttaatttctgaactaaaaaattacattttaattaagtatatttgcttgttaaaaatatttttacacttttggatgcattaaacaaatcttatttaatctactattttagtgagtgttcaacatttcattataatcgcttacatatattttctgtatttttcattaatgttattaaagattagtatttattgagcacttgccacatgcagacactgttcttggcattttacatcaattatcacacttgattctcccaataaacctatctcagcttaacagatggaaaaaagctcaggcttggtaagatccagtacatcacagatagtgatatagtttggccatgtccccacaaatctcatcttgaattcccatgtgttgtgagagggacctggtgggaggtaattgaatgatgggggcaggtctttcctatgctgttctcatgatagtgaataagtctcacaatatctgatggttttaaaaggggagttcccctgcacaagttctctcttctcttgtctgccaccatgtaagatgtgcccttcaccttctgccatgattacaaggcctccctagccacatggaactgtaagtccaacaaacctcttgcttttgtaaattgcctaatctcaggtatgtctttatcagcagtgtgaacatggactaatacagacagtgaatggcagagttaagaatttaaccaaaatctgtatgatttcatgtgctatggttcaaatgcttgccctctct

SEQ ID NO: 699080 - DNA, 649 bp, Homo sapiens
ttggactttttcatttttcataactgatgaactcattttatgaataattgcatattccattacattgcaaatgcatgcacccatggtgaccttgaacaatgctttgcagttgtattgcctaagagaaagaagattgttttgtaatacttctgcttccctttgagaaataagattccttttgactccacttgatgaaagaaagcatcctgttcctaacacaacacttgtcaatatctttgctgcttcatctagtacagcacttccttctgttatattataacagtgataattttatttcagacaaaagtaatttcatggttacaaagtgaaaagtatttcagtcaagatatctttattctgtgtgctaactcaaaatgtacataattatgtatttttgaaatcaaactaaaagtagttatgtaaaataaattagtgtgtttaccttctctcattaaataaggaagacaatctcaaatattcatttcagtgaagtgtgatgaagggcagactttttatagcatggctttttatttttggctttctgacatccatttcccctttctagcagtgccctaatttcaaaataagaaattagctcttcttcgttggtattgggctgrtggattgtaatcggaagttctttctccac

SEQ ID NO: 699081 - DNA, 681 bp, Homo sapiens
ttttttacagctgcagcttccagtcttcagctctgctttggtatctcctcatttccaagttgactttctgttttcagttgattctgtgaacctcctttgatattgtaataaattatatgttgtctgactttttcagagtcattttctgatgcctataaccgaggaactttttctgatatatgcacctattgatatggtgtactttttggacaactctagaatacaagataaagttcttaataaaaaaaaatcaaactgtagaaattcacagataaagagagtaaactttaaccactaacaatgagacaaaaatgacctccaaatagtaaaagtttgaaaatgtttctttggctttaagttctctgcaaaatgactcaattaattatcaactgtggccagcaatgtagcgtgtttcttcttcaacaagtaaatctaggtcctgagatatataatattactaggaactctcctgggaatagtaatgcaattaaggtcataattaaagcattctttcatcttttgggtccaacgsgtaaagcaggaaacaaagactttaatgagaacccagaggaaaagagcaaattattaaaagaatgagggaatagttacataagaaaagactagaagaattaaaaattttcagagcagcgaagtaaggtcctgttaaatcctggttttaaa

SEQ ID NO: 699082 - DNA, 675 bp, Homo sapiens
tttcctgggaaaataacaaagtcaagatggtctgatactgatagttgagtattcaaattctcaagttgcaaatgacaaaactcttcttttggggagtcttttgcagctattgacatccaaaccaaaattctaggttgcccaccaaatcttatttcaaggcaaaccattgtatagtgggatgcagaaagcaaccaaagaaaaaaaagaaaaagcaagataagtctactggaatatgtgtatttctaattccagagtgtagtcaatgacagtgagggaaaataataggrttgcataaaatccaactgtaggtgtaaatcgcaacgcattcttgaggtgtctttccaattcttaactgctaataccttgaaaaacaaaaaacgaataccaagtcccattttgtaaagtcattctgtgataccttgctaagaaaggccaagaaaggacaaactaggctataaatattggcttctgaaaagttcctttataccagaagaatgaatagcattacttaaccaatagggttgtttctacaaacatatttagatcactttttgagccaggtattatacaccccagtgaacttcactcagaaatttaggggagcaagtgtttgagatgtatggtcccactcacactatggatatagaggacactcacgacatgtggtcatccatt

SEQ ID NO: 699083 - DNA, 631 bp, Homo sapiens
gggagctaggagagggatagcattaggaaaaatacctaaaaatacccaatgtagatgacgagttgatgggttcagcaaaccaccattgcacgtgtatacctatgtaacaaacctgcaggttttgcacatgtatcccagaacttaaagaataaaaaaaaaaaaaaattaaagcaatcacatgcctatccaagtatataccattctatgactttctgaaaaggaaaaaaaaaaacccttaaaaattaaatatttaatcctttaattttataaatgaagctataataatgaagtctcatacagatgctaacctaatccatcttggaaaaaggtatctgtgattattaataatacaatggacttctaaaaaaaaaaagaaagataatgtggctgtcatcatatgagtctccatgtgatttcttgaacaatttcatctaaatacaacatttcaatcaagtctcatgcattgatctgtgcataatagaatccawcacagctattttcttcttgaaaacttccatcagagaaagaaatttaggaaacttctctggctgagcgtcattcaaagatgaaaattagtgttttttgttttgttttgtttaaaaaaggattcagtatttttaagaaagaatcg

SEQ ID NO: 699084 - DNA, 1043 bp, Homo sapiens
tgggagacacagcgagactcagtctcaaaaaaaatataaataaataaaagaaatgacacctaaatgaacgtgcatttctggagaagatcctggaacaggcagaaaaggacaccagtggaaacactgctgagataggaatgaggcctgcaggctttataccagtgttcatttcctgggtcgcctcattgcattgtggttatgtaaaatgttatcatccggagactctgggtgaaaggtatgtgggaactctctgtacttttattgtaactcttctgtgggtctaaaattagttcaaagtagaaaaatgaaaacagaaacagcccccaggtggctcgactgtgaggaaatggaccttctcacccatttgctggtgtaagtgtaaatccttgcacaccctggagtcagtcattctgcttctgggcatttatgtcaggttcacccgtccaggtgggaaaggccttgctgggctccttaatcctgcagcatagtgtatgataacaatttttttgtttgttttagagtcggagtctcactgtgtcgcccaggctggagtgcagtggctcgatcttggctcactgcaagctccgcctcccaggttcacaccgttctcctgcctcagcctcctgagtagctgggactacaggcgcccgccaccatgcccagctaatttttgtatttttagtagagacggggtttcaccgtgttagccaggatggtctcgatctcctgaccttgtgatccacccgcctcggcctcccaaagtgctgggattacaggtgtgagtcactgtgcccagcctatgataacaatwaaaaagccaagagagaccctctgacactataatctcacaaattccagcatttctgtcagcagctgaaatagagtaaggaagtcttgttttttgtttttgttttgagacagggtttcactctgtcacccagactgaagtacagtagcaggatcatggcttactgtggcctggaatcccagcgatcaaacagtcctcccacctcagcctcccaagtagctgggactacaggcgc

SEQ ID NO: 699085 - DNA, 1043 bp, Homo sapiens
tgggagacacagcgagactcagtctcaaaaaaaatataaataaataaaagaaatgacacctaaatgaacgtgcatttctggagaagatcctggaacaggcagaaaaggacaccagtggaaacactgctgagataggaatgaggcctgcaggctttataccagtgttcatttcctgggtcgcctcattgcattgtggttatgtaaaatgttatcatccggagactctgggtgaaaggtatgtgggaactctctgtacttttattgtaactcttctgtgggtctaaaattagttcaaagtagaaaaatgaaaacagaaacagcccccaggtggctcgactgtgaggaaatggaccttctcacccatttgctggtgtaagtgtaaatccttgcacaccctggagtcagtcattctgcttctgggcatttatgtcaggttcacccgtccaggtgggaaaggccttgctgggctccttaatcctgcagcatagtgtatgataacaatttttttgtttgttttagagtcggagtctcactgtgtcgcccaggctggagtgcagtggctcgatcttggctcactgcaagctccgcctcccaggttcacaccgttctcctgcctcagcctcctgagtagctgggactacaggcgcccgccaccatgcccagctaatttttgtatttttagtagagacggggtttcaccgtgttagccaggatggtctcgatctcctgaccttgtgatccacccgcctcggcctcccaaagtgctgggattacaggtgtgagtcactgtgcccagcctatgataacaattmaaaagccaagagagaccctctgacactataatctcacaaattccagcatttctgtcagcagctgaaatagagtaaggaagtcttgttttttgtttttgttttgagacagggtttcactctgtcacccagactgaagtacagtagcaggatcatggcttactgtggcctggaatcccagcgatcaaacagtcctcccacctcagcctcccaagtagctgggactacaggcgc

SEQ ID NO: 699086 - DNA, 1461 bp, Homo sapiens
ctctaaattttggtcacattggtttcaaacactatagatttttctctgcaatattcactcataatctttcattctatttgaagttaaatttagattccataaacattatagtatgcattttattcttcaaagcacctgtgtgcccacatatgcaggtaagtgtatccatgtgttgttccatttgtgtgtggatcttcgtgttctctgtaggaatgtctgtttaattcataattaaagaataatacatatgctacatatgcgcatagctcagataaaacaacagggaaggagaagaagatggtacattgattaatggtctaaaagtctaaagcttggcagcatcactgacagaaataaaaatgtggcagaggcggttttaaaagaggcctaggtgtctaacactgtgattactaagactgaattgactagaatattgccaagtgaaggatgtttccccttagtttcccttatgtccatgttatattaacttactattctttttttaaatgtatccacacaacttaggttctatactcagaaactagatagctgctatttaatatccaaccaccatttgattggatcacttctataggttatcaaaacaatgttattattcttttgcaatgtagtaaacatttggctgctaaaattattagggttttaaagttattaaaaagccagcgctcctcttctgtaacttatattgaagtttaaagtccactatggcacatatgtacctatgtaacaaacctgcatgttctgcacaagtatcccagaacttaaagtataattaaaataaataaataaataaataaatagaagtgtttaaaagactatgacactctcccttcctatttctttaagcctagttttccatttcattgataagttttcagcatttcatcccccaatcccctaacagtttgcaatggcactaacaaaagtttgaatttaagagtaattttattgcttacaaatgtagatcattttctcatctaaagacatgtaaaagccccggggtcaggaatcacaaattaagaaagaaaataaaatacttagggcaaactattaatatataagttagacagaaaaattatataagtaacaagtcaggaaaaggatttgyttttctcttgaagttcaggaaaacaaacccaaatatgtgtcagccaaaataaaaaataaatgagagctgagggagagttttcaaaaccagaatgatcagtttaaagtacagtatattgacataggcctgttacacaaaatcaattaatattatcattattattgttgtcattattttgcccacaattaagcctaccaatcatataataagtgacattatggtgtggttcttttaattcaatcatttacacagatctctaccataagaatgtcaaactgattaaacccaaaccagagcaaaccagtattttcagctgcagataatgtagaaaa

SEQ ID NO: 699087 - DNA, 1867 bp, Homo sapiens
cttaattgatatactagatgctccggatgagctatttaatttcactaaaccttgattttcttcttggtaaaatgagacacatgtggagggactggggattaatcctaactctgaccgctgcctagctgtattatcctccacaagacattttactttcagcaagacatttacctctctatgaacttaatttgctcatctgtaaagtggagacaccagtgacaaaaacacaagctaataagagtatgccacacaacaggcattataatgaaaattattgtcattattattgctattactcattaaaaagtgcgactttaaaaacatatgaagctttaaagttcccactggtatctaacatgaaaagcaatttttacaaatttctcaacaaattttattaacaataacggctaacactttctgagcccttaaacacggtttttaaaaagtataaaacaatgtgattataagaataagacaaacacccatgaagtcggttgtattattgttatccccattttacagatgaagaaacagaagcaaacagtcgtgacgtgacactcagagctgggatataaacccaaacagtcggaccacaaagtctatgtctctcttgaacacatttactacattaacttatttttgtactgaatagagtgaggtgtgtatacatttaaaaattagttttcaagctctaaactatatctattcttgagctggtctttacccattcttactccctccagactgaaaatgagtcaaactatttggaaatggacctatatctgcaaatgagtctttatatacaccggcatggaagactaagataaatatgttaagagtataaaggttacagagtaacaatgataggaaaaggatactcctttgtcatatcttacaaaatgaaaacataagtacccaccttattagaagtggagacaatgactaataatgactatttaaagatcaggaaaacctatgtggctgtcccccagtatccatgggggactggttccaggaccttccttggattatgctcaaatccttgatatgaaatggcacagtgtttgyatataacctaggcacatatttctgtatacttcaaatcctttctaaattacttataatatctaatacaatgtaaatgccatgcaaatagttgttagactgtattgtttagggattataaaaaaatctacatgttcagtacagatggtttttttaagaaaaatattttcaatctgtgtttggttgaatccatgaattcagagggctgactgcacaaggctaatgaatatgtgatactctagtccctcatacttcattctctacatacatgccaacaagattcaattacaaggtaaattggatcatactactacctgttcctcctctgtttaaaatcgtacaatcctggtgtgtgatgttccccttcctgtgtccagaggtggggggagggaggaggggggagggatagcattaggaaatatacctaatgtaaatgatgagttaatgggtgcagcacaccaacatggcgcatgtatacatatgtaacaaacctgcacattgtgcacatgtatcctaaaacttaaagtataataaaaataaataaataaaaataaaaaggaaaaaacaatagagagagaataaataaggtaaaaaaaaaaaaatcctgcaatcagagtaggctccttaccgtgaccctaaaaactgtggcttctgcccacctctccaactctttttatttatttatttatttttattttttttagtggcagggtcttgcttgttctgtttcccaggcctgagtgcagtggtgcgatcagagctcattgcagctccacctcctgggctcaagcaacactcccac

SEQ ID NO: 699088 - DNA, 1867 bp, Homo sapiens
cttaattgatatactagatgctccggatgagctatttaatttcactaaaccttgattttcttcttggtaaaatgagacacatgtggagggactggggattaatcctaactctgaccgctgcctagctgtattatcctccacaagacattttactttcagcaagacatttacctctctatgaacttaatttgctcatctgtaaagtggagacaccagtgacaaaaacacaagctaataagagtatgccacacaacaggcattataatgaaaattattgtcattattattgctattactcattaaaaagtgcgactttaaaaacatatgaagctttaaagttcccactggtatctaacatgaaaagcaatttttacaaatttctcaacaaattttattaacaataacggctaacactttctgagcccttaaacacggtttttaaaaagtataaaacaatgtgattataagaataagacaaacacccatgaagtcggttgtattattgttatccccattttacagatgaagaaacagaagcaaacagtcgtgacgtgacactcagagctgggatataaacccaaacagtcggaccacaaagtctatgtctctcttgaacacatttactacattaacttatttttgtactgaatagagtgaggtgtgtatacatttaaaaattagttttcaagctctaaactatatctattcttgagctggtctttacccattcttactccctccagactgaaaatgagtcaaactatttggaaatggacctatatctgcaaatgagtctttatatacaccggcatggaagactaagataaatatgttaagagtataaaggttacagagtaacaatgataggaaaaggatactcctttgtcatatcttacaaaatgaaaacataagtacccaccttattagaagtggagacaatgactaataatgactatttaaagatcaggaaaacctatgtggctgtcccccagtatccatgggggactggttccaggaccttccttggattatgctcaaatccttgatatgaaatggcacagtgtttgcatataacctaggcacatatttctgtatacttcaaatcctttctaaattacttataatatctaatacaatgtaaatgccatgyaaatagttgttagactgtattgtttagggattataaaaaaatctacatgttcagtacagatggtttttttaagaaaaatattttcaatctgtgtttggttgaatccatgaattcagagggctgactgcacaaggctaatgaatatgtgatactctagtccctcatacttcattctctacatacatgccaacaagattcaattacaaggtaaattggatcatactactacctgttcctcctctgtttaaaatcgtacaatcctggtgtgtgatgttccccttcctgtgtccagaggtggggggagggaggaggggggagggatagcattaggaaatatacctaatgtaaatgatgagttaatgggtgcagcacaccaacatggcgcatgtatacatatgtaacaaacctgcacattgtgcacatgtatcctaaaacttaaagtataataaaaataaataaataaaaataaaaaggaaaaaacaatagagagagaataaataaggtaaaaaaaaaaaaatcctgcaatcagagtaggctccttaccgtgaccctaaaaactgtggcttctgcccacctctccaactctttttatttatttatttatttttattttttttagtggcagggtcttgcttgttctgtttcccaggcctgagtgcagtggtgcgatcagagctcattgcagctccacctcctgggctcaagcaacactcccac

SEQ ID NO: 699089 - DNA, 1390 bp, Homo sapiens
tgacctcgtgatccacccgcctcggcctcccaaagttctgggattacaggtgtgacccggccaagctggggtttcaccatgttggccaggctggtctcgaacccctgacctcagatgatccacccacctctgcctcccaaagtgctgggattacaggcgtgcaccacagcacctggcccaacgtggtgatttctaagtagggagctgagggagtaaggagccagccggtggctgtctgagrgagactgtccctggcagagtgaactgctaatgccagtaccaggtcctgggccaaacagaaagaaacgggctctcactccagaactgcagcttgaccactatatatataatatatatactttatatatattatagctatatatttttttgagatggagtcttgctctgttgctcagactggagtgcagtggcacgatcatagctcactccagactcaacctcctgggcttacgccatcctcctgcctcagcctccccagtagctgagactacaggtgcatgaccaccacacttggctaatttttaaattttttgtagagacgcggtgtcactgtgttgcccaggctggtctccaactcctggcctcaagcaatcctcccacctcagccttccaaaatgctgggatcacaggtgtgagccatggtgacttggcttcatattttgaataggccaaaacaaaactccgaaatccccttactcctatccccacgaccccacacagcaggtttctctcgctctgcagcaacccacttacctctcggaaatcatcccaggcctgttcggagtgcacgcagccccgttagcctccctggctgctcctgtaaccagcccagctctgcctgagaggttccgctattccctccgtctggaatacccaccactctctcccaccccgcgcttgcatccggcaatactgtatcagcctcagggcctctgctgtcccgctttctgctctcagagcctttgtcactgggctggaagagcagttgggaaaattcggtgataaatgcatagcccggggctgggaccatcaaggggacccagtaagttggctccagaaagaggacttgaagcttcgtttgcattgcacgttatttaatattgaggaaaatgtaattagcccgtatctaagaattggggtgacagcgctaaagattgaacccacccacctcccactcctcacctccagccataagccacttccggacaaggctaaaaatgcgtaaaacaatgcaactactcgccacctatccctgcccaagttccagcctctgagcctcaagccccacgccctcctaaatatccccgcccccgctgggaccccaaattgcctatagctctgcaagtccgcccttcccggcagcgggacc

SEQ ID NO: 699090 - DNA, 1585 bp, Homo sapiens
tttagtagagacaaagtttcaccatgttggccaggctggtctcaaactcctgacctcaggtgatctgcccacctcggcctcccaaagtgctgagcttataggcatgagccactgcacctagcctaaatactcatatttaaacaggcaaattttaccaaaggaagaattgggacaggacggtgtctttcttttattgcatttttcctgcacttatttttttttaaattacttactcatttttaattgacaagaatggtatatgctgtattatgtaaaacctgatcttttgaaattacgtgtatattttaaaacattgaactaattaacatttgtatttcctcacatacttattttttgtggtgagaacacttaaaatctcagtgattttcaataacacaatacattgttactatggtcaccatgttgtacaacagatctctggaacttattcctcctgacgaactgaaattttgtacccttcgaccaatatctcctcaatcccccacccctagcctctggtaaccaccattctactcggtgcttttatgaattcgattgttttagattccacatatatgtgagatcatgagayatttgtctttctgggcctgacttatttcactttataaaatgtcctgtaggctcatccatgtcacaaatgacaggatttcctgctctgagaagcagccctgcccatcctccttcccagggagaatctaggggtggggatagggaaacagaggaaccctccttccgctccttgcatttcatgggtttggaaatcccggagtggtggaaacctatgccatgtctcccagggggatccagaggcaggatccctcctacagaagcccctgtagctgcaggaggcttccaggcaagaagtcccgagttcccctacacactccagggagcagccgatcatcgtcctgtgtggccaaagtcagttccggtaggtgctgccggttccttacccagtgtccactcaacccctcccatgattttctcctggattcagtgagaaacattcgcttatccagacccctttgcagccagagaacccttgcgagtgctggcaaatgggctaaaaatggaaacacatgatgggccttctggaaaagacgttccctaataaaaagcgaaggcgttcagtgatgtgtctgctctttgttctacccttgccttcctgcctcgaatgagaatatcaagaggcccctggcacacagggacttgcaatataaaatacgaaacctccttgggaagagtaggacaaaaaccacatgctgtgcgtggcagagcagaaagagaggagccagtcatctccctgctcagttaggattgcttttggctgcatgtaatagatacttgacaacagtggcttagccaaacaggaatttatttttctgtcataaggaaaattccagagggagacagatcaggcagctgcagcctcaactggtggcataaagcctggggagagggacttttagtggggcctttgctcatttacaggccagctggggccatattacccaaaacaaaaagacaaaaacagtaattggcaagtgaatgtgagtttcacaat

SEQ ID NO: 699091 - DNA, 1585 bp, Homo sapiens
tttagtagagacaaagtttcaccatgttggccaggctggtctcaaactcctgacctcaggtgatctgcccacctcggcctcccaaagtgctgagcttataggcatgagccactgcacctagcctaaatactcatatttaaacaggcaaattttaccaaaggaagaattgggacaggacggtgtctttcttttattgcatttttcctgcacttatttttttttaaattacttactcatttttaattgacaagaatggtatatgctgtattatgtaaaacctgatcttttgaaattacgtgtatattttaaaacattgaactaattaacatttgtatttcctcacatacttattttttgtggtgagaacacttaaaatctcagtgattttcaataacacaatacattgttactatggtcaccatgttgtacaacagatctctggaacttattcctcctgacgaactgaaattttgtacccttcgaccaatatctcctcaatcccccacccctagcctctggtaaccaccattctactcggtgcttttatgaattcgattgttttagattccacatatatgtgagatcatgagacatttgtctttctgggcctgacttatttcactttataaaatgtcctgtaggctcatccatgtcacaaatgacaggatttcctgctctgagaagcagccctgcccatcctccttcccagggagaatctaggggtggggatagggaaacagaggaaccctccttccgctccttgcatttcatgggtttggaartcccggagtggtggaaacctatgccatgtctcccagggggatccagaggcaggatccctcctacagaagcccctgtagctgcaggaggcttccaggcaagaagtcccgagttcccctacacactccagggagcagccgatcatcgtcctgtgtggccaaagtcagttccggtaggtgctgccggttccttacccagtgtccactcaacccctcccatgattttctcctggattcagtgagaaacattcgcttatccagacccctttgcagccagagaacccttgcgagtgctggcaaatgggctaaaaatggaaacacatgatgggccttctggaaaagacgttccctaataaaaagcgaaggcgttcagtgatgtgtctgctctttgttctacccttgccttcctgcctcgaatgagaatatcaagaggcccctggcacacagggacttgcaatataaaatacgaaacctccttgggaagagtaggacaaaaaccacatgctgtgcgtggcagagcagaaagagaggagccagtcatctccctgctcagttaggattgcttttggctgcatgtaatagatacttgacaacagtggcttagccaaacaggaatttatttttctgtcataaggaaaattccagagggagacagatcaggcagctgcagcctcaactggtggcataaagcctggggagagggacttttagtggggcctttgctcatttacaggccagctggggccatattacccaaaacaaaaagacaaaaacagtaattggcaagtgaatgtgagtttcacaat

SEQ ID NO: 699092 - DNA, 1585 bp, Homo sapiens
tttagtagagacaaagtttcaccatgttggccaggctggtctcaaactcctgacctcaggtgatctgcccacctcggcctcccaaagtgctgagcttataggcatgagccactgcacctagcctaaatactcatatttaaacaggcaaattttaccaaaggaagaattgggacaggacggtgtctttcttttattgcatttttcctgcacttatttttttttaaattacttactcatttttaattgacaagaatggtatatgctgtattatgtaaaacctgatcttttgaaattacgtgtatattttaaaacattgaactaattaacatttgtatttcctcacatacttattttttgtggtgagaacacttaaaatctcagtgattttcaataacacaatacattgttactatggtcaccatgttgtacaacagatctctggaacttattcctcctgacgaactgaaattttgtacccttcgaccaatatctcctcaatcccccacccctagcctctggtaaccaccattctactcggtgcttttatgaattcgattgttttagattccacatatatgtgagatcatgagacatttgtctttctgggcctgacttatttcactttataaaatgtcctgtaggctcatccatgtcacaaatgacaggatttcctgctctgagaagcagccctgcccatcctccttcccagggagaatctaggggtggggatagggaaacagaggaaccctccttccgctccttgcatttcatgggtttggaaatcccggagtggtggaaacctatgccatgtctcccagggggatccagaggcaggatccctcctacagaagcccctgtagctgcaggaggcttccaggcaagaagtcccgagttcccctacacactccagggagcagccgatcatcgtcctgtgtggccaaagtcagttccggtaggtgctgccggttccttacccagtgtccactcaacccctcccatgattttctcctggattcagtgagaaacattcgcttatccagacccctttgcagccagagaacccttgcgagtgctggcaaatgggctaaaaatggaaacacatgatgggccttctggaaaagacgttccctaataaaaagcgaaggcgttcagtgatgtgtctgctctttgttctacccttgccttcctgcctcgaatgagaatatcaagaggcccctggcacacagggacttgcaatataaaatacgaaacctccttgggaagagtaggacaaaaaccacatgctgtgygtggcagagcagaaagagaggagccagtcatctccctgctcagttaggattgcttttggctgcatgtaatagatacttgacaacagtggcttagccaaacaggaatttatttttctgtcataaggaaaattccagagggagacagatcaggcagctgcagcctcaactggtggcataaagcctggggagagggacttttagtggggcctttgctcatttacaggccagctggggccatattacccaaaacaaaaagacaaaaacagtaattggcaagtgaatgtgagtttcacaat

SEQ ID NO: 699093 - DNA, 1734 bp, Homo sapiens
atactgtgcctgacagaagtaactgcttcattaatatttattagcttttcatccagcacatctcagtataggaacataacccacatccacaaacaagaaagaagacagccttgggccagcatgaaccagcatgagtgatctgtccccagaaacctgattaaaggccaacgccctcccacctcacatkgttcagctctccccataccatccaaagatgcttttcatttcatagagtgttacaaagaggggcttggaagcagggactctgaagcccaaagttttctcggaagcctaatttttaaagggaaaaaacaaaaaatcatttgtaaataattttatattcaacaaaactcaacacttactggtcacctattgaatgcaaagcactgtcctgggcatagttgaagaaataaatatgtcttagatatcagagctcaaaggccttagagtaaaacagtagtgcctgtagagctttattttaaaacacagctttccaagaaatgatctacataaaaaggaaacattcacaggaactgcttaagaaattctagctgcttccaccaggacctggtagcaagatcttcaatcaaccaaagaattttctctgaattataaagtatacaaatgtcttttagaagacacttaagtaatacaactgaaatacatacaacaattccattaacacaactagaaaagctaagtatttaagactagaaataacgtgactgttcaatcagaaaatgggatgagatggaggagaaggtaagggttaggaggtgctagatatcctccatttattaaaacgtgcacatactggcagccttctccagtttgcttgtggccacactgccagggtcatctggaaatgcccaagagcaaaggtaagatatacttctaaagttcccttgagatactatgcctttcaaacactaagtttttctaaccacagaaggacaattaaaggtagtgggttagggaaagaggtaatgacagttactcaaataagggctccctgagaaaacagagagtgactccctgcactaactcaaaggtttactgaataagcaaccagactggatctttagtcagcagtgcaggcaccaagaaatcagctcctcttatattacttgtggttccacggttgtattcacagcttatattttttttaaagaacaacagaagataaaatttggaaatattcttagaggtttcccaatacccacatcttctgtaccacatccaaacattcctggaataccttcagtaacataagacctaatatttacatttttgactaggcatggtgggtcatgcctgtaatcccagcactttgggaggctgaggcagaaggactacttgaggccaggagttcaagaccagcctgggaaacatagcaagaccccatttctacaaaatatttttatttaattagctgggtgtggtggcgtgcacctgtagtctcactaacttgggaagctgaggcgaggggctcaccggagcccaggagttcaaggttgcagtgagctgtaatcaaaccactgtactctaacctgagtatcagactgagacactatctctaaaaaacaaaaaaatttacatttgggaaacccctgcaagaatgctctctctgaaacagaaccatagtattttcctctatgccttcccctactagtcctggttctatactaggaaaggaaaaacctaactaatccctcctagaaagcacagtccata

SEQ ID NO: 699094 - DNA, 1734 bp, Homo sapiens
atactgtgcctgacagaagtaactgcttcattaatatttattagcttttcatccagcacatctcagtataggaacataacccacatccacaaacaagaaagaagacagccttgggccagcatgaaccagcatgagtgatctgtccccagaaacctgattaaaggccaacgccctcccacctcacattgttcagctctccccataccatccaaagatgcttttcatttcatagagtgttacaaagaggggcttggaagcagggactctgaagcccaaagttttctcggaagcctaatttttaaagggaaaaaacaaaaaatcatttgtaaataattttatattcaacaaaactcaacacttactggtcacctattgratgcaaagcactgtcctgggcatagttgaagaaataaatatgtcttagatatcagagctcaaaggccttagagtaaaacagtagtgcctgtagagctttattttaaaacacagctttccaagaaatgatctacataaaaaggaaacattcacaggaactgcttaagaaattctagctgcttccaccaggacctggtagcaagatcttcaatcaaccaaagaattttctctgaattataaagtatacaaatgtcttttagaagacacttaagtaatacaactgaaatacatacaacaattccattaacacaactagaaaagctaagtatttaagactagaaataacgtgactgttcaatcagaaaatgggatgagatggaggagaaggtaagggttaggaggtgctagatatcctccatttattaaaacgtgcacatactggcagccttctccagtttgcttgtggccacactgccagggtcatctggaaatgcccaagagcaaaggtaagatatacttctaaagttcccttgagatactatgcctttcaaacactaagtttttctaaccacagaaggacaattaaaggtagtgggttagggaaagaggtaatgacagttactcaaataagggctccctgagaaaacagagagtgactccctgcactaactcaaaggtttactgaataagcaaccagactggatctttagtcagcagtgcaggcaccaagaaatcagctcctcttatattacttgtggttccacggttgtattcacagcttatattttttttaaagaacaacagaagataaaatttggaaatattcttagaggtttcccaatacccacatcttctgtaccacatccaaacattcctggaataccttcagtaacataagacctaatatttacatttttgactaggcatggtgggtcatgcctgtaatcccagcactttgggaggctgaggcagaaggactacttgaggccaggagttcaagaccagcctgggaaacatagcaagaccccatttctacaaaatatttttatttaattagctgggtgtggtggcgtgcacctgtagtctcactaacttgggaagctgaggcgaggggctcaccggagcccaggagttcaaggttgcagtgagctgtaatcaaaccactgtactctaacctgagtatcagactgagacactatctctaaaaaacaaaaaaatttacatttgggaaacccctgcaagaatgctctctctgaaacagaaccatagtattttcctctatgccttcccctactagtcctggttctatactaggaaaggaaaaacctaactaatccctcctagaaagcacagtccata

SEQ ID NO: 699095 - DNA, 1451 bp, Homo sapiens
gtagcatattaatcaaggaattctcactgcactgcagaatagctacacagagcaaatggaccccatgccgtgacattagcttgtaagagacctgctgaagtcttagcagcagtagtacaatcatcttagctccaattaatattgagattttccactcggggggggggaagaagagagagagaggatcaaagtgtgtctagaggtggtggcttaagaggtaagaagaaatgaagagtctataacaactttttattatgtaacaggtttatattttcagagactagagattatctttatttttttcaaagatctacctttatttataaattactatatagattttttggtacaaatcctgaataaaccagaccactctttgttcattccctctataaacaggtactgactgcttaccatttataaagtaaaataactatttaattttttcagactgtcttggagaaaaatgacaaaaactatccattataagcattaagaatcaaagacaaagactgatcataaactaatcatcttatcaacagtcacaagagttgtgtacatgactacatgcctgtgtaattgtttgtaaatatacacccaccaatgctttcctccaccaccaaccaaccagtagcactaatttaagaacttccttaaggaaacctgggcagtctctagtattgctataatatggggagggaaattatctggtatataaaaaaactttttgggatcaatgaatggcaattttcaaaggcctgttgattcattcgtctaccatgatctaggatagtggttcacaagagaaactgtccatcagaattacctgaagaattttttgaaaataagatgattgtagtccatattctgcaaggaaagcatgagcaaatgaagagtggcagaacacgccaccccaaaacatgctatttaggcctaaggattattttaaagctaaaggcacttgaaaaatagaaacaaaagagataggagaaaagaaacattatcaccagaaacacctgagatgggaaaaaactctcatgtgaaagatgatctccctatagtaggaaagaagaaattttctcgtttctagacatggggagtccagaaaaatttgtaccaacagatcttactaactcttatcttcctttagccacatcatttattttagttacttttccacaacggccactctgttcaacctactaaataaggattcaagatttgccactttttgggtcttcactttcctgtgggggctcctatatatgtgtcaaaatccatatgcttttcttctgttaatctattttacatcaatttaatactcagcctcagctagagaccctaacagggtaaagataaaaaaaactgcctcccttacacaagcactaggagagaaaggcaggagggcagaaggataagaaagaaatctgtwaaaaaaaaaaaaaaaaaaa

SEQ ID NO: 699096 - DNA, 599 bp, Homo sapiens
cccacaatgatatacctatctctcctctctattattcaaatcttttatacatttatatatgtgtgtgtgtgtgtgtgtgtgtgtgtgtgtgtgtgtgtrtatatatatatatatgctggtttgcagcatatatctttttgtgcataatttttgtcttcttcagctatacagtgaataactgaggggtaaaacctggattttccttactgctccctcatattccaagatactgggagggtgttatgtgcttagtaagtcctcaagacttgactacgtttcactaataaaaatcatttcagtttctagctagtttatgcatcagtttatgtattagtaaaggagttgattgataagacatatatatctcatacatatgtcagatatatctcatatattatcttttatatatatatctttcatttgatcacattttcttgaggggcttttctgtatttacctcttcaacattacagtcaattatttggtctctttaaaaaaagggttacaattcctctacagtgcattaactcctatgagaaaataatgttttctaattagttttactctcctatatgctattatatcagtataactctcga

SEQ ID NO: 699097 - DNA, 599 bp, Homo sapiens
cccacaatgatatacctatctctcctctctattattcaaatcttttatacatttatatatgtgtgtgtgtgtgtgtgtgtgtgtgtgtgtgtgtgtgtatrtatatatatatatgctggtttgcagcatatatctttttgtgcataatttttgtcttcttcagctatacagtgaataactgaggggtaaaacctggattttccttactgctccctcatattccaagatactgggagggtgttatgtgcttagtaagtcctcaagacttgactacgtttcactaataaaaatcatttcagtttctagctagtttatgcatcagtttatgtattagtaaaggagttgattgataagacatatatatctcatacatatgtcagatatatctcatatattatcttttatatatatatctttcatttgatcacattttcttgaggggcttttctgtatttacctcttcaacattacagtcaattatttggtctctttaaaaaaagggttacaattcctctacagtgcattaactcctatgagaaaataatgttttctaattagttttactctcctatatgctattatatcagtataactctcga

SEQ ID NO: 699098 - DNA, 599 bp, Homo sapiens
cccacaatgatatacctatctctcctctctattattcaaatcttttatacatttatatatgtgtgtgtgtgtgtgtgtgtgtgtgtgtgtgtgtgtgtatatatatatatatatgctggtttgcagcatatatctttttgtgcataatttttgtcttcttcagctatacagtgaataactgaggggtaaaacctggattttccttactgctccctcatattccaagatactgggagggtgttatgtgcttagtaagtcctcaagacttgactacgtttcactaataaaaatcatttcagtttctagctagtttatgcatcagtttatgtattagtaaaggagttgattgataagacatatatatctcatacatatgtcagatatatctcatatattatcttttatatatatatctttcatttgatcacattttcttgaggggcttttctgtatttacctcttcaacattacagtcaattatttggtctctttaaaaaaagggttacaattcctctacagtgcattaactcctawgagaaaataatgttttctaattagttttactctcctatatgctattatatcagtataactctcga

SEQ ID NO: 699099 - DNA, 1203 bp, Homo sapiens
tgactctcccgaatacccatcagaacgcacctgtgtgctctgctcccagttcgctctgcttccagcctttgcccttaagctgatctctgactccttcttgaagtcaatcagaccccgccctgcagggagggacaaggtgaggcctgagctggcctaggaggggcctatggcttgggaggtgcctctgtgggcagctacagtggcgagagtgggtttgaggaagctggctgtgcagcacacttgtcctgagtctgtttccagacaagtgccgccttccacaagaatttgccttggcttctctgtgacgagccatgcaatgccacgatctgttaatttaggtggcatattttagaggcagagataaggacaaggggccatttcctagccggtagtcttacctgaagctgacagatggaccagggcaggggctgatagaggctggcacccacagcaaaacagagaattcaaccgctcctagaacaagacaccagaggcagaaccgtttgggaggagcagccactcaagacgagttgcaaactttggcggctttttaacgatctttgagaccctgaccagattcagaaaggaggaaggacttggctgggagaaagctggccagggtagctaaggctatggcacagagcggagaggggagaggacactggggcaggtagtgcccatgcagtgggcggacagtgctaacgmccacttagtcaggttgagaagggcgaacgtggtgaccggggtaactcctagttggaaaggaaagaatagagtcaggaaaagttcgtggctcaggagtgccaaggggtcatcatcccccattaccaaggtttggttgctcagggattgcacaccgctttgtggttataggggttttgtatttctcatcatcatccttcctgctgcccgcaatgcaagccatttcagtgtgcactggcagctagatgaaggaaggtgaacacacttagtcaacttgaagcttgcttgcaattccagaaggtctttggtgtttctgaggaaggggatttgccttccatgttaaaatgatgattgatacaaagacaatgaatgctaacgtctttcaccctcagtgttcaagaggactgtgagttatgtattctcagttatgggctcaccaactccgcagagaattggggggatttggattagaagagagtttcaggaacaacctgattttga

SEQ ID NO: 699100 - DNA, 1203 bp, Homo sapiens
tgactctcccgaatacccatcagaacgcacctgtgtgctctgctcccagttcgctctgcttccagcctttgcccttaagctgatctctgactccttcttgaagtcaatcagaccccgccctgcagggagggacaaggtgaggcctgagctggcctaggaggggcctatggcttgggaggtgcctctgtgggcagctacagtggcgagagtgggtttgaggaagctggctgtgcagcacacttgtcctgagtctgtttccagacaagtgccgccttccacaagaatttgccttggcttctctgtgacgagccatgcaatgccacgatctgttaatttaggtggcatattttagaggcagagataaggacaaggggccatttcctagccggtagtcttacctgaagctgacagatggaccagggcaggggctgatagaggctggcacccacagcaaaacagagaattcaaccgctcctagaacaagacaccagaggcagaaccgtttgggaggagcagccactcaagacgagttgcaaactttggcggctttttaacgatctttgagaccctgaccagattcagaaaggaggaaggacttggctgggagaaagctggccagggtagctaaggctatggcacagagcggagaggggagaggacactggggcaggtagtgcccatgcagtgggcggacagtgctaacgcccacttagtcaggttgagaagggcgaacgtggtgaccggggtaactcctagttggaaaggaaagaatagagtcaggaaaagttcgtggctcaggagtgccaaggggtcatcatcccccattaccaaggtttggttgctcagggattgcacaccgctttgtggttataggggttttgtatttctcatcatcatccttcctgctgcccgcaatgcaagccatttcagtgtgcactggcagctagatgaaggaaggtgaacacacttagtcaacttgaagcttgcttgcaattccagaaggtctttggtgtttctgaggaaggggatttgccttccatgttaaaatgatgattgatacaaagacaatgaatgctaaygtctttcaccctcagtgttcaagaggactgtgagttatgtattctcagttatgggctcaccaactccgcagagaattggggggatttggattagaagagagtttcaggaacaacctgattttga

SEQ ID NO: 699101 - DNA, 650 bp, Homo sapiens
atgaaccaaatccaatgagattaaatcaattaataataatatgcaaatttgtattaaaattaaaagaattacttgcacatttgagaacaggagagacatgatttttatcagcaataataaacattattaattttaattgtgatcagctaattgagattaattgcaatacatcatgctttataatgtgactkccaaaaggaaaatatgattgtaatcttatactacatctatcaatgtcttttatacataagagtatagagtaagcccgtagttttcaaagccaacctatgaagcagtgacatcttatgcaagtttgctgctttctgccacagtgatccttggtcagcgggcacaaattgttttacaaacgccccctaggtctaaaagtagtttggatcacaatgaacacagaaacaccttcatcccttcagaaatacctatcaattacttccaatacagaatgaaaaattgacaaaggaaatatgtggattgtaaaaatgccagttagcttgcaactacatgaaagaaaaatgccatttttattacattaggtcattgtttcacatgagttttggtatagcaaaatgttgaaccaagggaaaagagacatgaattaatgaagtcttaagatatcaagaatttgaaagaaa

SEQ ID NO: 699102 - DNA, 650 bp, Homo sapiens
atgaaccaaatccaatgagattaaatcaattaataataatatgcaaatttgtattaaaattaaaagaattacttgcacatttgagaacaggagagacatgatttttatcagcaataataaacattattaattttaattgtgatcagctaattgagattaattgcaatacatcatgctttataatgtgactgccaaaaggaaaatatgattgtaatcttatactacatctatcaatgtcttttatacataagagtatagagtaagcccgtagttttcaaagccaacctatgaagcagtgacatcttatgcaagtttgctgctttctgccacagtgatccttggtcagcgggcacaaattgttttacaaaygccccctaggtctaaaagtagtttggatcacaatgaacacagaaacaccttcatcccttcagaaatacctatcaattacttccaatacagaatgaaaaattgacaaaggaaatatgtggattgtaaaaatgccagttagcttgcaactacatgaaagaaaaatgccatttttattacattaggtcattgtttcacatgagttttggtatagcaaaatgttgaaccaagggaaaagagacatgaattaatgaagtcttaagatatcaagaatttgaaagaaa

SEQ ID NO: 699103 - DNA, 650 bp, Homo sapiens
atgaaccaaatccaatgagattaaatcaattaataataatatgcaaatttgtattaaaattaaaagaattacttgcacatttgagaacaggagagacatgatttttatcagcaataataaacattattaattttaattgtgatcagctaattgagattaattgcaatacatcatgctttataatgtgactgccaaaaggaaaatatgattgtaatcttatactacatctatcaatgtcttttatacataagagtatagagtaagcccgtagttttcaaagccaacctatgaagcagtgacatcttatgcaagtttgctgctttctgccacagtgatccttggtcagcgggcacaaattgttttacaaacgcccmctaggtctaaaagtagtttggatcacaatgaacacagaaacaccttcatcccttcagaaatacctatcaattacttccaatacagaatgaaaaattgacaaaggaaatatgtggattgtaaaaatgccagttagcttgcaactacatgaaagaaaaatgccatttttattacattaggtcattgtttcacatgagttttggtatagcaaaatgttgaaccaagggaaaagagacatgaattaatgaagtcttaagatatcaagaatttgaaagaaa

SEQ ID NO: 699104 - DNA, 1827 bp, Homo sapiens
tgagaaacattgtcaacgctgactaattttaagatgaaatttagactcctgggcactggcccagacactgattaatgtgcatttttacataccagcttaataaaattccaatggcctgtaaagtatcattgctccctttatttktacagagtgacacagaaacatggtagatgaagaaaggattctgatgtcaagatatatgtggatgactggggcggtgcctcacacctgtaatcccagcactttgggaagctaaggcaggcagataacatggtcaagagatcaagactgtcctgaccaacatggtgaaaccccgtctgtactaaaaatacaaaaattcactaggcgtggtggtgcatgccggtagtcccagctactcaggaggccgaggcaggggaatcgcttgaacccaggaggcagaggttgcagtgagccaagatcacggcactgcactccagcctggcgacagagcgagactccatctcaaaaaaaaagaaaagaaaaaagaaatatgtggaagaaaattagataaactgagtgatattcctgttagtttcatcatcagtagagctataagacagctacgaatctttctttacttaactacttgatgtacataataatattctcctattgactatgccaaattctctccatttccatgctaaaccatcccaattcctctgatgtttactctaagttcatattttccagccctctttatgtctttttgcctgaacactagaccccctccaaatttacccccaaatcttgccatcatttctaggagcatgtttcataaatgcaactgtttctcttccaggataccaaaacctcttattcatacctttctttcttcagctgaacaaattagttcttactgtataactactgactccactgtagaagacactgttgggagaaacagagtccagaaaataaagatcccatgtccaggaagcttacagtccacttgcagatacaaatatatcccaagacagaatgaaataaccttcaagaaatatgttattgcaggacatagaatgacatctatctcattgtcaataacatagtattgttatcggactaagggacaatgagatagaggtcaaggatcactgtttgtggagaggtggcatttgagctcctattgaaaaaggagtaagactttagtcaggtaaggagtgatccctaagggaaggcatggtggtgaaaatcagccttctaacattacaaggtgctatgcaacagcttttttgcaatcacaatttttcagcaagatgactggtggaagcttacgtttatgcttgccttgccccaggtcaatgggccttgcattttctcagtccactagtggtgaggtcagtgaattctgcctcaattccataggctagaaatatgtctatatggattttttttttacctctcttttttcccatgtatggaagtaggtatggtagatgaatctgttcagaaatttggacatagtgacataaagataaattgaatattcagaaagtttagatgatccagcatgaataggttagagttgttgaaaaattgaacatggtgattaaaatcatacctatctgttcagtttctctcaggcatctatcctttggccacatttcccaagggtgttgggaaagtgtgcctgaagcatatcttccatgaatcatccctttctgatttccatatcttgtttcctgttcctcaaaagcccttctaccttccccaacacctcaacagctgcttttttcctttaagttatttatctcccttatgggtacaactgaaaatgacatgctgtctgtgttgtctattcca

SEQ ID NO: 699105 - DNA, 1827 bp, Homo sapiens
tgagaaacattgtcaacgctgactaattttaagatgaaatttagactcctgggcactggcccagacactgattaatgtgcatttttacataccagcttaataaaattccaatggcctgtaaagtatcattgctccctttatttttacagagtgacacagaaacatggtagatgaagaaaggattctgatgtcaagatatatgtggatgactggggcggtgcctcacacctgtaatcccagcactttgggaagctaaggcaggcagataacatggtcaagagatcaagactgtcctgaccaacatggtgaaaccccgtctgtactaaaaatacaaaaattcactaggcgtggtggtgcatgccggtagtcccagctactcaggaggccgaggcaggggaatcgcttgaacccaggaggcagaggttgcagtgagccaagatcayggcactgcactccagcctggcgacagagcgagactccatctcaaaaaaaaagaaaagaaaaaagaaatatgtggaagaaaattagataaactgagtgatattcctgttagtttcatcatcagtagagctataagacagctacgaatctttctttacttaactacttgatgtacataataatattctcctattgactatgccaaattctctccatttccatgctaaaccatcccaattcctctgatgtttactctaagttcatattttccagccctctttatgtctttttgcctgaacactagaccccctccaaatttacccccaaatcttgccatcatttctaggagcatgtttcataaatgcaactgtttctcttccaggataccaaaacctcttattcatacctttctttcttcagctgaacaaattagttcttactgtataactactgactccactgtagaagacactgttgggagaaacagagtccagaaaataaagatcccatgtccaggaagcttacagtccacttgcagatacaaatatatcccaagacagaatgaaataaccttcaagaaatatgttattgcaggacatagaatgacatctatctcattgtcaataacatagtattgttatcggactaagggacaatgagatagaggtcaaggatcactgtttgtggagaggtggcatttgagctcctattgaaaaaggagtaagactttagtcaggtaaggagtgatccctaagggaaggcatggtggtgaaaatcagccttctaacattacaaggtgctatgcaacagcttttttgcaatcacaatttttcagcaagatgactggtggaagcttacgtttatgcttgccttgccccaggtcaatgggccttgcattttctcagtccactagtggtgaggtcagtgaattctgcctcaattccataggctagaaatatgtctatatggattttttttttacctctcttttttcccatgtatggaagtaggtatggtagatgaatctgttcagaaatttggacatagtgacataaagataaattgaatattcagaaagtttagatgatccagcatgaataggttagagttgttgaaaaattgaacatggtgattaaaatcatacctatctgttcagtttctctcaggcatctatcctttggccacatttcccaagggtgttgggaaagtgtgcctgaagcatatcttccatgaatcatccctttctgatttccatatcttgtttcctgttcctcaaaagcccttctaccttccccaacacctcaacagctgcttttttcctttaagttatttatctcccttatgggtacaactgaaaatgacatgctgtctgtgttgtctattcca

SEQ ID NO: 699106 - DNA, 1827 bp, Homo sapiens
tgagaaacattgtcaacgctgactaattttaagatgaaatttagactcctgggcactggcccagacactgattaatgtgcatttttacataccagcttaataaaattccaatggcctgtaaagtatcattgctccctttatttttacagagtgacacagaaacatggtagatgaagaaaggattctgatgtcaagatatatgtggatgactggggcggtgcctcacacctgtaatcccagcactttgggaagctaaggcaggcagataacatggtcaagagatcaagactgtcctgaccaacatggtgaaaccccgtctgtactaaaaatacaaaaattcactaggcgtggtggtgcatgccggtagtcccagctactcaggaggccgaggcaggggaatcgcttgaacccaggaggcagaggttgcagtgagccaagatcacggcactgcactccagcctggcgacagagcgagactccatctcaaaaaaaaagaaaagaaaaaagaaatatgtggaagaaaattagataaactgagtgatattcctgttagtttcatcatcagtagagctataagacagctacgaatctttctttacttaactacttgatgtacataataatattctcctattgactatgccaaattctctccatttccatgctaaaccatcccaattcctctgatgtttactctaagttcatattttccagccctctttatgtctttttgcctgaacactagaccccctccaaatttacccccaaatcttgccatcatttctaggagcatgtttcataaatgcaactgtttctcttccaggataccaaaacctcttattcatacctttctttcttcagctgaacaaattagttcttactgtataactactgactccactgtagaagacactgttgggagaaacagagtccagaaaataaagatcccatgtccaggaagcttacagtccacttgcagatacaaatatatcccaagacagaatgaaataaccttcaagaaatatgttattgcaggacatagaatgacatctatctcattgtcaataacatagtattgttatcggactaagggacaatgagatagaggtcaaggatcactgtttgtggagaggtggcatttgagctcctattgaaaaaggagtaagactttagtcaggtaaggagtgatccctaagggaaggcatggtggtgaaaatcagccttctaacattacaaggtgctatgcaacagcttttttgcaatcacaatttttcagcaagatgactggtggaagcttacgtttatgcttgccttgccccaggtcaatgggccttgcattttctcagtccactagtggtgaggtcagtgaattctgcctcaattccataggctagaaatatgtctatatggattttttttttacctctcttttttcccatgtatggaagtaggtatggtagatgaatctgttcagaaatttggacatagtgacataaagataaattsaatattcagaaagtttagatgatccagcatgaataggttagagttgttgaaaaattgaacatggtgattaaaatcatacctatctgttcagtttctctcaggcatctatcctttggccacatttcccaagggtgttgggaaagtgtgcctgaagcatatcttccatgaatcatccctttctgatttccatatcttgtttcctgttcctcaaaagcccttctaccttccccaacacctcaacagctgcttttttcctttaagttatttatctcccttatgggtacaactgaaaatgacatgctgtctgtgttgtctattcca

SEQ ID NO: 699107 - DNA, 1827 bp, Homo sapiens
tgagaaacattgtcaacgctgactaattttaagatgaaatttagactcctgggcactggcccagacactgattaatgtgcatttttacataccagcttaataaaattccaatggcctgtaaagtatcattgctccctttatttttacagagtgacacagaaacatggtagatgaagaaaggattctgatgtcaagatatatgtggatgactggggcggtgcctcacacctgtaatcccagcactttgggaagctaaggcaggcagataacatggtcaagagatcaagactgtcctgaccaacatggtgaaaccccgtctgtactaaaaatacaaaaattcactaggcgtggtggtgcatgccggtagtcccagctactcaggaggccgaggcaggggaatcgcttgaacccaggaggcagaggttgcagtgagccaagatcacggcactgcactccagcctggcgacagagcgagactccatctcaaaaaaaaagaaaagaaaaaagaaatatgtggaagaaaattagataaactgagtgatattcctgttagtttcatcatcagtagagctataagacagctacgaatctttctttacttaactacttgatgtacataataatattctcctattgactatgccaaattctctccatttccatgctaaaccatcccaattcctctgatgtttactctaagttcatattttccagccctctttatgtctttttgcctgaacactagaccccctccaaatttacccccaaatcttgccatcatttctaggagcatgtttcataaatgcaactgtttctcttccaggataccaaaacctcttattcatacctttctttcttcagctgaacaaattagttcttactgtataactactgactccactgtagaagacactgttgggagaaacagagtccagaaaataaagatcccatgtccaggaagcttacagtccacttgcagatacaaatatatcccaagacagaatgaaataaccttcaagaaatatgttattgcaggacatagaatgacatctatctcattgtcaataacatagtattgttatcggactaagggacaatgagatagaggtcaaggatcactgtttgtggagaggtggcatttgagctcctattgaaaaaggagtaagactttagtcaggtaaggagtgatccctaagggaaggcatggtggtgaaaatcagccttctaacattacaaggtgctatgcaacagcttttttgcaatcacaatttttcagcaagatgactggtggaagcttacgtttatgcttgccttgccccaggtcaatgggccttgcattttctcagtccactagtggtgaggtcagtgaattctgcctcaattccataggctagaaatatgtctatatggattttttttttacctctcttttttcccatgtatggaagtaggtatggtagatgaatctgttcagaaatttggacatagtgacataaagataaattgaatattcagaaagtttagatgatccagcatgaataggttagagttgttgaaaaattgaacatggtgattaaaatcatacctatctgttcagtttctctcaggcatctatcctttggccacatttcccaagggtgttgggaaagtgtgcctgaagcatatcttccatgaatcatccctttctgatttccatatcttgtttcctgttcctcaaaagcccttctaccttccccaacacctcaacagctgcttttttcctttaagttrtttatctcccttatgggtacaactgaaaatgacatgctgtctgtgttgtctattcca

SEQ ID NO: 699108 - DNA, 1001 bp, Homo sapiens
tacacacacacacacacccctttcgcctgaagaggtgtctgtgtgttggcgggggtggggggcgttctcttttgtgtgatatacttgctgaatttgcaaaagcagcaccatattatgttattttattaacaaccccttaataaagtaactagaaacagcaaaataaaataaaatgtgagaaatcagaaaatggaaaagctctacctattaaaagttacatgatgttgtttgtattgagagaaaaataaaagtttctcatgatggaagcagaaactttaaaaaaaaagcatacagaatataatggaaacctaytcaaggcttttaatatgttcattattatcttgtgtttggtggctcaggaaatcaaattataaaatccaagatcctgtactacttgtatattatttttacctacatagttaccatttctggtgttcttcgttccttccagtagatccaaattaccatctggtataattttcctttaggtaaaaaacttcctataccattttttatagtacctatctactggaaaataattaccttcagtttttgtttttttgtgtctttttttaaaatcttcattttaaaagaacagtttcactggtatcaaattccatcttgacaggtatttgtcattcagcattttgaaaatgtgaaaatgtcttccagtctccattgtttttttacaagaagtcagttgataatcacatttgttggtcccctggatgtaatgtgtcatttttctttttgttgcttctcagattttctgttcattcttggcttttagcagcttgacaatgatgtggctatgtatgttttggtgttttggtttttgtttatttagcatattcaccctgcttgagattcttagctccttggttgacttaatgtttttcatctaatttgagattatctctctgttttcacatatagactatttttcatcatccacaagctccttgatgtccctttgcagtcattatttttttggtagaagg

SEQ ID NO: 699109 - DNA, 1001 bp, Homo sapiens
tacacacacacacacacccctttcgcctgaagaggtgtctgtgtgttggcgggggtggggggcgttctcttttgtgtgatatacttgctgaatttgcaaaagcagcaccatattatgttattttattaacaaccccttaataaagtaactagaaacagcaaaataaaataaaatgtgagaaatcagaaaatggaaaagctctacctattaaaagttacatgatgttgtttgtattgagagaaaaataaaagtttctcatgatggaagcagaaactttaaaaaaaaagcatacagaatataatggaaacctattcaaggcttttaatatgttcattattatcttgtgtttggtggctcaggaaatcaaattataaaatccaagatcctgtactacttgtatattatttttacctacatagttaccatttctggtgttcttcgttccttccagtagatccaaattaccatctggtataattttcctttaggtaaaaaacttcctataccattttttatagtacmtatctactggaaaataattaccttcagtttttgtttttttgtgtctttttttaaaatcttcattttaaaagaacagtttcactggtatcaaattccatcttgacaggtatttgtcattcagcattttgaaaatgtgaaaatgtcttccagtctccattgtttttttacaagaagtcagttgataatcacatttgttggtcccctggatgtaatgtgtcatttttctttttgttgcttctcagattttctgttcattcttggcttttagcagcttgacaatgatgtggctatgtatgttttggtgttttggtttttgtttatttagcatattcaccctgcttgagattcttagctccttggttgacttaatgtttttcatctaatttgagattatctctctgttttcacatatagactatttttcatcatccacaagctccttgatgtccctttgcagtcattatttttttggtagaagg

SEQ ID NO: 699110 - DNA, 1001 bp, Homo sapiens
tacacacacacacacacccctttcgcctgaagaggtgtctgtgtgttggcgggggtggggggcgttctcttttgtgtgatatacttgctgaatttgcaaaagcagcaccatattatgttattttattaacaaccccttaataaagtaactagaaacagcaaaataaaataaaatgtgagaaatcagaaaatggaaaagctctacctattaaaagttacatgatgttgtttgtattgagagaaaaataaaagtttctcatgatggaagcagaaactttaaaaaaaaagcatacagaatataatggaaacctattcaaggcttttaatatgttcattattatcttgtgtttggtggctcaggaaatcaaattataaaatccaagatcctgtactacttgtatattatttttacctacatagttaccatttctggtgttcttcgttccttccagtagatccaaattaccatctggtataattttcctttaggtaaaaaacttcctataccattttttatagtacctatctactggaaaataattaycttcagtttttgtttttttgtgtctttttttaaaatcttcattttaaaagaacagtttcactggtatcaaattccatcttgacaggtatttgtcattcagcattttgaaaatgtgaaaatgtcttccagtctccattgtttttttacaagaagtcagttgataatcacatttgttggtcccctggatgtaatgtgtcatttttctttttgttgcttctcagattttctgttcattcttggcttttagcagcttgacaatgatgtggctatgtatgttttggtgttttggtttttgtttatttagcatattcaccctgcttgagattcttagctccttggttgacttaatgtttttcatctaatttgagattatctctctgttttcacatatagactatttttcatcatccacaagctccttgatgtccctttgcagtcattatttttttggtagaagg

SEQ ID NO: 699111 - DNA, 1001 bp, Homo sapiens
tacacacacacacacacccctttcgcctgaagaggtgtctgtgtgttggcgggggtggggggcgttctcttttgtgtgatatacttgctgaatttgcaaaagcagcaccatattatgttattttattaacaaccccttaataaagtaactagaaacagcaaaataaaataaaatgtgagaaatcagaaaatggaaaagctctacctattaaaagttacatgatgttgtttgtattgagagaaaaataaaagtttctcatgatggaagcagaaactttaaaaaaaaagcatacagaatataatggaaacctattcaaggcttttaatatgttcattattatcttgtgtttggtggctcaggaaatcaaattataaaatccaagatcctgtactacttgtatattatttttacctacatagttaccatttctggtgttcttcgttccttccagtagatccaaattaccatctggtataattttcctttaggtaaaaaacttcctataccattttttatagtacctatctactggaaaataattaccttcagtttttgtttttttgtgtctttttttaaaatcttcattttaaargaacagtttcactggtatcaaattccatcttgacaggtatttgtcattcagcattttgaaaatgtgaaaatgtcttccagtctccattgtttttttacaagaagtcagttgataatcacatttgttggtcccctggatgtaatgtgtcatttttctttttgttgcttctcagattttctgttcattcttggcttttagcagcttgacaatgatgtggctatgtatgttttggtgttttggtttttgtttatttagcatattcaccctgcttgagattcttagctccttggttgacttaatgtttttcatctaatttgagattatctctctgttttcacatatagactatttttcatcatccacaagctccttgatgtccctttgcagtcattatttttttggtagaagg

SEQ ID NO: 699112 - DNA, 1001 bp, Homo sapiens
tacacacacacacacacccctttcgcctgaagaggtgtctgtgtgttggcgggggtggggggcgttctcttttgtgtgatatacttgctgaatttgcaaaagcagcaccatattatgttattttattaacaaccccttaataaagtaactagaaacagcaaaataaaataaaatgtgagaaatcagaaaatggaaaagctctacctattaaaagttacatgatgttgtttgtattgagagaaaaataaaagtttctcatgatggaagcagaaactttaaaaaaaaagcatacagaatataatggaaacctattcaaggcttttaatatgttcattattatcttgtgtttggtggctcaggaaatcaaattataaaatccaagatcctgtactacttgtatattatttttacctacatagttaccatttctggtgttcttcgttccttccagtagatccaaattaccatctggtataattttcctttaggtaaaaaacttcctataccattttttatagtacctatctactggaaaataattaccttcagtttttgtttttttgtgtctttttttaaaatcttcattttaaaagaacagtttcactggtatcaaattccatcttgacaggtatttgtcattcagcattttgaaaatgtgaaaatgtcttccagtctccattgtttttttacaagaagtcagttgataatcacatttgttggtcccctgratgtaatgtgtcatttttctttttgttgcttctcagattttctgttcattcttggcttttagcagcttgacaatgatgtggctatgtatgttttggtgttttggtttttgtttatttagcatattcaccctgcttgagattcttagctccttggttgacttaatgtttttcatctaatttgagattatctctctgttttcacatatagactatttttcatcatccacaagctccttgatgtccctttgcagtcattatttttttggtagaagg

SEQ ID NO: 699113 - DNA, 1315 bp, Homo sapiens
tacaggggtgagccatcacgctcggccatatctattaaaaaattttaagacaatcatacacaccagcctcactgcttagagaaccctgtccagtgtgcctgaccccttttccctccctccttctcctctcacccccaagatagttatttgaaaatggcttgaaatacaaacaataaaaccttagatcaaaaaaaatctcaaaatataatacattaacagacaatgatatagctctaccaaacattcacacgcaggcaacagaataagcctttgggtttaccaaggacattttacagtcaaagggccacctgccctccttccttccctgactacattctcagggaagcttttccttgcagacacttcgttgcaaggtcagctttctctctcagcacgttggcttcgtcggcgcttctgtgggcctgtgcgttctttagcaagaagtggctgatgaaaagcttcaaaccctcacgtaacacccccagctttgggttgtcagatactctggaaaggaatcgtataaacacatgtcagggctgagctggcctctcctagatctcaatcctgggtatctcgcatagtgagacataaccagtttyttttaaaaataaaattctcaattaagaacttcttaacatattttattattaacaatcattgttagtttgctagcagacaagtttctattccccagatctaatgcataccagcttaaaaataaaaccgaaaagattaagctacacgtatagtacaaccttgtgtttgtaaatcaacacaagtgaaaacaatctcttcatttctcttccatgtctcgtcggaaagggtggggcacataccttgtgaaaattaaactgaggtcttcaacttctgtttccattaataggatacttaatacttttcgtaaaaaacggactctgggtttgtccaattcactgaattcaactacctaatggtcaggacatggagaaaaataaagttacactgatttagccaactttttcaatgatttgtaatatagttaattagagtaaaaattaatctccccccttcccccactctacccgatttaagaagctatttccagagctaagaaatgaacacctgttggcaaggatgtgggccttgggaattcctacacactgctggcagaggtgtggccggccacagccaccgttgagaacaactcagcagtgtaagtggaattcccgggtcatacaccttatgaatcagaaattcagtatctagaactgaaccataaattacctccattcccaaaagtacccatcccctaattaaaactatatatatatatata

SEQ ID NO: 699114 - DNA, 2457 bp, Homo sapiens
tgagcaactaattttaaaaaactacagaaattaaccgtactagtcttctattttggatagtattaattacaatctttcattttgattcctaaattcacaaaaacctgtattaccctataaaataaatactagtgtagttatcaacaaagaattctgaaggagataatgttgatttgcttactatactgacattttactgacaatgatataacacagtgatgtctgaagggcaggggagaatggyataaaaatcactcatggttcacaacctattattgaaactgaggttagtatttatattacatggtatggcaatactagaaaagatttccttgtggagtatacagtttaagacctctgctgtacagctatacctccatgcttgcttccagtggccatgacactttattcaaatatgtaagttttattaagactgagttcttaaaaagaaaaaaccaagaaccttagatacaactagtgaagtattgagacctgtccatatttaaaaccaagcacacgataccacttaaaaggttccccagaaagcctctatcctgaaatgcttgaaagtgagcagtgctgactctcgattattaccgattgcattaaatatgacacttgttttctttcttttggctataaggagaaaatgtcattttgtatatgagtgagcacagaggagacagaatgtgggaaagaacagaatgggataataattttttactaaatactccagttctcagctttataagtcaacagacaaaatgaatcagctaaacctaaaatctttgtgaatagtataaaatgtcttttaaattaaatgcatatatttttatgttttactttttcaagacaaaagcaggatattagtacaatataagatttatagaggagcaaatttcttgagataggaaacccttaaaagcagtatttaaagtacttaaatactgtcacatatgtttaataatcataatacttaattgtgagaactgggagctcatgttactactaaaaccaaataaaaattcaatacatatttgttaactcagtttaaggatgtttaccttaatactgacacagtatgtatggtaacactgaccacactgagaacaggcaagtaatcttccttctgctccttggccaaaactgccacaaactacacatgtatcctgaagttaagaaaacagaacatattttaaatggagactaagctaaaaacctacaaattttactttaaaaataccttcttaactaatatagctctatagctaaatattggatcacttctgtgtatatgagataaagcagaaatgtgcaaggaggaattcaatgaggaagacagtaaattgtcaagttcaaacctgattcaaagtgaatttgtcactgctagaaaacaacacaaccatatcgagcacagagttttcttcatcatccttatttgatgaaatatctgcagtagacacctataaaaagcaaaatacacaaaatacgaagttatatttttcacttgttttacacttaagtggaaagcttcagaaaattcataatcaaaacatatatttttgctaaggtctagaataacaattccaaatattaatgctaagatactacagcaaaatggagtcatgacattttattattcaactcattctctctttagaggtagaattcctttagaccaagaagtaatgagaaaatataataaacctgtcttagtaagacttgattatgcagaattctaatcaagaaactataaatgataatattataggtatgtacaccacaaatctatcactattttaatgacacacacttgggatctgcaatgtagttagtctgaactgagatgtcctgcaaacataaaatacagcacataattacatattacatgttgaaatggtaatattttagatatatcggtcaaaatggaaggcattaaaattaatttcgcctgttcactataacctttattttgtttcgagaggagtttcactcttgttgaccaggctggagtgtaatggcgcgatctcggctcgttgcaacctctgcctcctggttcaagctgttctccctgactcagcctcccaagtagctgggattacagttgtccaccaccatgcccagctaatttctgtatttttagtagagacggggtttcaccatattggtcaggctggtctcttaactcctgacctcaaatgatccactgcacccagctcactgtaactttttaatgtggctactaggaagttttaaattgcatatgtggttctcattatatttctattagcaccgctttagaatattattttgaataacatccaaatttcagtatcagccaaatgattatcaaccaatattgttcagtctggacttagttctatttgactaaatcaactaagtagccactggtttgttaataatttctagagtgatatgaaacaaaataaagctctg

SEQ ID NO: 699115 - DNA, 1991 bp, Homo sapiens
ggacataactgcgtttctttcaattcttcaccattgctttgacggtattcaagtgtaccttgcagcagcagcagaacacgcctttggtagatagaagcgtgaccttacccccaaagatgtccaygtcctaatccttggaacctatgaatatgttaccttacatggtatgagggattttgcaggtgtgattaagttaaggactttgagatgaggagattatcctggcttatgtgggtgagtccagtgtaatcacaagggtccttgcaagagggagacaggacggtcagagtcagagctggagatatgacattggaagtggaggtagaagtgacacatgggaggaagaggccaccagctgctggaaactggaaaagtcaaggaagaaactgctcccttagagcttccaaaaggaatacagccctgctgatgcctggatttttagccttaggactcgttttggatttctgacctctagaaccgtaaaatcgtacatttgtgttttcataaactacaaagtttgtagtaatttgtctcagcagcaatagaaaaccaacacagcacccttctacctgtcctgtggaatatcccaaagttccaacctgctaaggctcctcctcctttgtgacccagtgcctttaaacaaaggcaatggatgcccttgacccacttctgggaggatgtgtgctgtgagataggtttctgctgctggggatggtttgtcacggaatcatccccacactcttggctgtgcttctgactgctgaccccgctggcttgaagctgactggtgagatggtggtggtggggcaatctgtagcaatggcattgagctattttattttttcatgcattctgcttctgctcatctgtgtggacagagaggcccctggagtggataatactgcctgggagttaactcatgagctggctttttctggcactggtggtggcaatgagtggagggtaggaccccacattgtggtaataaccactaatatttactgatcacccatagtgaggtcacctcatttgttcttgtcagtgaagccatgagaagggtcttattatcatacccattttgcagctgagggtagtgaagctcacagagttcaacagctcagacagcaagtaagcaaggagctgggactcaaacctggtgtcctcatgccagtgccccagcctttcactgaagcgctttgctgcctcccacatggggcagcatggcatggaataggcactccatggatgttgcctgactggatgaatgttaatgtttactggccatttggataggccaggagcagcttcacgaacctccatccagaagcagcaaggtgggctggagggtggccagagaacccagctggccagcaaggcattttctcttgaaggtgcaaggatcacatggagctggcattgttatttgttattaggctcccacatctggactgctgggcaggtccaatgaaaatcacgttgaatttgccagcatcatctatgcaagggagctgcaggcaagtgagaggtggggacggtgatctgtcaatgtctctctctcccctggggcttccccaccccatctttggatgctctacatggcccagctggtgattcaggatggatgttggatgccggcttgttaatttccttttttccttcctggatatggaagagagatggaggtagagtgtgaggatggagataaacttagcatgaagctgcagggggagcccatatggccttggcctgcctggagattaccagtgtccttattagactggcagcttgtgtggatgctttttgccttttactttcttttacgtcttgcttttgtgagaaagaggagaatttaccaccagtgagcctcatgctgtacaatgaagagaaagcaagtgacctcagctgtctctcccctccctctgtccccaggagtgtcttgtaagcttgagtggtcttctccacccagccagtccacatggggcaatgctgcc

SEQ ID NO: 699116 - DNA, 1991 bp, Homo sapiens
ggacataactgcgtttctttcaattcttcaccattgctttgacggtattcaagtgtaccttgcagcagcagcagaacacgcctttggtagatagaagcgtgaccttacccccaaagatgtccatgtcctaatccttggaacctatgaatatgttaccttacatggtatgagggattttgcaggtgtgattaagttaaggactttgagrtgaggagattatcctggcttatgtgggtgagtccagtgtaatcacaagggtccttgcaagagggagacaggacggtcagagtcagagctggagatatgacattggaagtggaggtagaagtgacacatgggaggaagaggccaccagctgctggaaactggaaaagtcaaggaagaaactgctcccttagagcttccaaaaggaatacagccctgctgatgcctggatttttagccttaggactcgttttggatttctgacctctagaaccgtaaaatcgtacatttgtgttttcataaactacaaagtttgtagtaatttgtctcagcagcaatagaaaaccaacacagcacccttctacctgtcctgtggaatatcccaaagttccaacctgctaaggctcctcctcctttgtgacccagtgcctttaaacaaaggcaatggatgcccttgacccacttctgggaggatgtgtgctgtgagataggtttctgctgctggggatggtttgtcacggaatcatccccacactcttggctgtgcttctgactgctgaccccgctggcttgaagctgactggtgagatggtggtggtggggcaatctgtagcaatggcattgagctattttattttttcatgcattctgcttctgctcatctgtgtggacagagaggcccctggagtggataatactgcctgggagttaactcatgagctggctttttctggcactggtggtggcaatgagtggagggtaggaccccacattgtggtaataaccactaatatttactgatcacccatagtgaggtcacctcatttgttcttgtcagtgaagccatgagaagggtcttattatcatacccattttgcagctgagggtagtgaagctcacagagttcaacagctcagacagcaagtaagcaaggagctgggactcaaacctggtgtcctcatgccagtgccccagcctttcactgaagcgctttgctgcctcccacatggggcagcatggcatggaataggcactccatggatgttgcctgactggatgaatgttaatgtttactggccatttggataggccaggagcagcttcacgaacctccatccagaagcagcaaggtgggctggagggtggccagagaacccagctggccagcaaggcattttctcttgaaggtgcaaggatcacatggagctggcattgttatttgttattaggctcccacatctggactgctgggcaggtccaatgaaaatcacgttgaatttgccagcatcatctatgcaagggagctgcaggcaagtgagaggtggggacggtgatctgtcaatgtctctctctcccctggggcttccccaccccatctttggatgctctacatggcccagctggtgattcaggatggatgttggatgccggcttgttaatttccttttttccttcctggatatggaagagagatggaggtagagtgtgaggatggagataaacttagcatgaagctgcagggggagcccatatggccttggcctgcctggagattaccagtgtccttattagactggcagcttgtgtggatgctttttgccttttactttcttttacgtcttgcttttgtgagaaagaggagaatttaccaccagtgagcctcatgctgtacaatgaagagaaagcaagtgacctcagctgtctctcccctccctctgtccccaggagtgtcttgtaagcttgagtggtcttctccacccagccagtccacatggggcaatgctgcc

SEQ ID NO: 699117 - DNA, 1991 bp, Homo sapiens
ggacataactgcgtttctttcaattcttcaccattgctttgacggtattcaagtgtaccttgcagcagcagcagaacacgcctttggtagatagaagcgtgaccttacccccaaagatgtccatgtcctaatccttggaacctatgaatatgttaccttacatggtatgagggattttgcaggtgtgattaagttaaggactttgagatgaggagattatcctggcttatgtgggtgagtccagtgtaatcacaagggtccttgcaagagggagacaggacggtcagagtcagagctggagatatgacrttggaagtggaggtagaagtgacacatgggaggaagaggccaccagctgctggaaactggaaaagtcaaggaagaaactgctcccttagagcttccaaaaggaatacagccctgctgatgcctggatttttagccttaggactcgttttggatttctgacctctagaaccgtaaaatcgtacatttgtgttttcataaactacaaagtttgtagtaatttgtctcagcagcaatagaaaaccaacacagcacccttctacctgtcctgtggaatatcccaaagttccaacctgctaaggctcctcctcctttgtgacccagtgcctttaaacaaaggcaatggatgcccttgacccacttctgggaggatgtgtgctgtgagataggtttctgctgctggggatggtttgtcacggaatcatccccacactcttggctgtgcttctgactgctgaccccgctggcttgaagctgactggtgagatggtggtggtggggcaatctgtagcaatggcattgagctattttattttttcatgcattctgcttctgctcatctgtgtggacagagaggcccctggagtggataatactgcctgggagttaactcatgagctggctttttctggcactggtggtggcaatgagtggagggtaggaccccacattgtggtaataaccactaatatttactgatcacccatagtgaggtcacctcatttgttcttgtcagtgaagccatgagaagggtcttattatcatacccattttgcagctgagggtagtgaagctcacagagttcaacagctcagacagcaagtaagcaaggagctgggactcaaacctggtgtcctcatgccagtgccccagcctttcactgaagcgctttgctgcctcccacatggggcagcatggcatggaataggcactccatggatgttgcctgactggatgaatgttaatgtttactggccatttggataggccaggagcagcttcacgaacctccatccagaagcagcaaggtgggctggagggtggccagagaacccagctggccagcaaggcattttctcttgaaggtgcaaggatcacatggagctggcattgttatttgttattaggctcccacatctggactgctgggcaggtccaatgaaaatcacgttgaatttgccagcatcatctatgcaagggagctgcaggcaagtgagaggtggggacggtgatctgtcaatgtctctctctcccctggggcttccccaccccatctttggatgctctacatggcccagctggtgattcaggatggatgttggatgccggcttgttaatttccttttttccttcctggatatggaagagagatggaggtagagtgtgaggatggagataaacttagcatgaagctgcagggggagcccatatggccttggcctgcctggagattaccagtgtccttattagactggcagcttgtgtggatgctttttgccttttactttcttttacgtcttgcttttgtgagaaagaggagaatttaccaccagtgagcctcatgctgtacaatgaagagaaagcaagtgacctcagctgtctctcccctccctctgtccccaggagtgtcttgtaagcttgagtggtcttctccacccagccagtccacatggggcaatgctgcc

SEQ ID NO: 699118 - DNA, 1297 bp, Homo sapiens
gggctctgaaaaatcacatttggagcctggttggcagtcactttggagaagtctcatctttcccattctgagtcttctttggccccctggagtccatctccacagataggctcaaggagggttgctggaaatctcatgtagaaacactcagctctcagagctggkctggcttctcaattcagatgggatcacagaagtacctccatcactcacaaagccccctagaactaggcagccagcactgctgcaaccagaatgctgtctggggagcctggggagcccagcaatttgtttcccttgcctttcctatttctgattgcagccttgagtagcctgaagtcagttgttgataagaacatcattctaccctgccttgtgccagcttcctctagcctaagacatcaatcatcccttggggatccagccccctcagtttggtgcatgcaggtgatggctgggactgtcccatgtgtgatccaacccagggtacactggtcaccactccacagatgagtcatttgctgccagcctttccctgctccatctgacgccttcaactttaatgtaaatgtcactcctgggatcccatcattgtgggatttttttttttttttttggcagaaataccatgttggaaaggacatttgtcctctgctgtttaaattgctttctacgggttagggagaactagtcattgattttcttctagagagcatagcaagccctgtgacgattttggctaattaacttttggagaagtgcttcttgaatttatcagggaggatgaaatctcttttctcctcttatatcttgaaaaaggctttaaattttggttccgaatctctgccaacacctggtctgtttaaaaggacttccctggagatgatggtagaggggctgttgaatgtcatgtttttgcagcttcgatctttaatacagttgttccagtccacagaaagtcttttctgtttacataagacaggtatcattcacacaaagattatatttagaaatatacattttcccccagcatgcttgtaactaataacattgcatgttatgaaagtagaaagtatttaagatgaaattaattttcgcccagtgtgccactttgtttgacattctcgatccagttggtgtggagcaccagtgttggccaacctcactttgcatttttagcaagttcagtttcttgttcctcttgtctggattgacgctgttggaagtgagttactagcatattaggacaagtccaatttggaatcctactgtgtagatttcttttgtattggtttcc

SEQ ID NO: 699119 - DNA, 1297 bp, Homo sapiens
gggctctgaaaaatcacatttggagcctggttggcagtcactttggagaagtctcatctttcccattctgagtcttctttggccccctggagtccatctccacagataggctcaaggagggttgctggaaatctcatgtagaaacactcagctctcagagctgggctggcttctcaattcagatgggatcacagaagkacctccatcactcacaaagccccctagaactaggcagccagcactgctgcaaccagaatgctgtctggggagcctggggagcccagcaatttgtttcccttgcctttcctatttctgattgcagccttgagtagcctgaagtcagttgttgataagaacatcattctaccctgccttgtgccagcttcctctagcctaagacatcaatcatcccttggggatccagccccctcagtttggtgcatgcaggtgatggctgggactgtcccatgtgtgatccaacccagggtacactggtcaccactccacagatgagtcatttgctgccagcctttccctgctccatctgacgccttcaactttaatgtaaatgtcactcctgggatcccatcattgtgggatttttttttttttttttggcagaaataccatgttggaaaggacatttgtcctctgctgtttaaattgctttctacgggttagggagaactagtcattgattttcttctagagagcatagcaagccctgtgacgattttggctaattaacttttggagaagtgcttcttgaatttatcagggaggatgaaatctcttttctcctcttatatcttgaaaaaggctttaaattttggttccgaatctctgccaacacctggtctgtttaaaaggacttccctggagatgatggtagaggggctgttgaatgtcatgtttttgcagcttcgatctttaatacagttgttccagtccacagaaagtcttttctgtttacataagacaggtatcattcacacaaagattatatttagaaatatacattttcccccagcatgcttgtaactaataacattgcatgttatgaaagtagaaagtatttaagatgaaattaattttcgcccagtgtgccactttgtttgacattctcgatccagttggtgtggagcaccagtgttggccaacctcactttgcatttttagcaagttcagtttcttgttcctcttgtctggattgacgctgttggaagtgagttactagcatattaggacaagtccaatttggaatcctactgtgtagatttcttttgtattggtttcc

SEQ ID NO: 699120 - DNA, 590 bp, Homo sapiens
ccagctagtttttgtatttttagtagagacggggtttcaccatgttggtcaggctgtctcgaactcctgatctcatgatctgcctgcctgggcctcccatagtgctgggattacaggcgtgagccactgcacctggcctattattattgatattactgttattactacagctacagtgacactagtcttctaggctgcaaagaacagaataaagacctttttattagggagacagctacaggaatgtgatttttctggctctgcctggatatgtttttaaaaatgtttcatttggaaaaatttcaccttcatataaaactgaagacaatagtaaaacacatccccatgtagccctgcttcaacaatgttcaactcatggtcaatcgtgtttcatctatacgcactccttacttttctccctgacctcattttattttgaagcaaatccacaaaagcacgtgatttcatctgtaaatattttgttatgtatctctaaatggtaaagaacttaaacaaacaaacamactcacaatcactatcagagctcaaataattagcaataagactttaatatcatcaaatatttggcc

SEQ ID NO: 699121 - DNA, 3479 bp, Homo sapiens
tgaggtgtctttccatttattcataatcaatctatcagtatatctccatatgtgtgtatgtacacgtacacacacacacacacacacacacacacacacgcacgcacaagaacaaaataggaaagtgaagaaagaccagagttaggtctaaccaaagacggagaaatgagacttacaggagctgccgagtttttgaccgtgacactgggggtggttgctcgcagggccccactcactccatggtagtatttgaagcagatcttagtttcagctgaaagacaaacaaaaaatgagactgagaagtagggtgtaacccagggagagacagctatggccacagaggacatctctaagaactgcaacataattcccccacgagcaagccaggccacactcgacaatgatgctcctcatgtggcctcaaggacaggtctgacttcttaaaactgtgacatgaaaaattgttctggccttaacatttttgtatccaagttaagtccattatttagacttctcagcatccatcctaccccattagaggtcattgatttaaaacacttagttctaagatgtgaggtgggtggatgcctatcacctgtctgtttcttctgtaatgtcctattatttaattcattgtgattaatatcttggtaatttgcagaaagactttgagaagttattgaagtacataggagagaggcatattttctaaactcctgtacccatcaatgataacctctttgcatcacaatttgtttccttcaaagttctatagatgtagctggcagtggtagcacgcatctgtagttcccagctacttgggaggctgaggcaggaggatcacttgagctcaggactttaatgctgcagagagttataatcacatcagtgcactccagcctgggtaatagggtgagactccatttaaaaaaaaaaaaaaagaaagttctataaatggttaagcagaatgtaaagagtttagggggatcacactgggtttgaatttcagctccattatttacaatctgtgagacaatgaataagtccctgtaccccctgttaaaataggacttcataagacgttggttaagcaaataaaagtgcttcgattcaattaagtgctcagtaaatgttagtgattgtgatgatgtgatgactaaatgacaacatcagtccttttccttctggcatttagttccctagaggacaagatctgtagccaacatgagtttagttcatttgaaggtgatttgctttccccaattcactgtttataggatttgttttcttaaaatttaaaaaaattaccaggctatgtcttggtcccttatattttgtttgaaacaatatgagaaatctccaatttgagatattttttctcaaatatggaaatttgccttcaattatcattttaaaaataatgtctacaattttattagcatgcatttgaaatgtgctcagaatggaaaatacgaaaaatgaagataagtataaatgaaataacaatcttctgagatttttgcataattgagactataaactatagaataatacattttgcttttttaaaaaattgacattatgaaataagcatggccaactatcatttaaaactcctcaaacaacattacttattatacagaacaactgaatagattyacacattgcaaatatttcctatatttggaaattcaggcttttctctgaaaatcaattactttttacaaattattttttaagttcaaattttctccctaggacaatggagcaaaaatcgctagatacctacccggcatccattctacctttcctccttaataacagaatctcagttttattttgattgataatgtccagctaaagtactacattttgcagcctccctggcagaataacacctatgcagtttaccattgttattttaggatctctgttatatgtagctaaacataaacctaactgatatgtaaaggtttcctcaatgctgtagatacgaatattacagtagtcttctttaggttaaaagatatgggccgggcacggtggctcacgcctgtaatcccaacactttgggaggccgaggtgggtggatcatttgtggtcaggagtttgagatcagcctggccaacatggtgaaacctcatctctactaaaaatacaaaaattagctgggcgtggtggtgcactcctgcaatcccagctacttcggaaggctgaagcaggagaattgctggaacccgggaggtggaggtggcagtgagccaagatcacgccattgcactccagcctgggcaacagagcaagactcagtctcaaaaaaaaaaaaaaaaaaaaaaaagaatatattttaaggatcctcccttcctggggccaaattgctttccaaataacactttacacttctatcaggaaatgtgactctgaccatctcatagaacgcttgttagcactgagcatcatcacttaaaaataggcttaaaatagaatccgattattatttttgtttcatttatttgattattagtagggttaaactttttcattaaattttaatcagctatttaaatttttttgaagccatttaattgcagttgctcaggttttccattacctgggtgatgcctggatgctaaccagtccctctgttagtggatgtgttcttacttcagatatgcctgtactttgagtttccttcctgagtcactttctcgatagttctttcacatgtctgttgattgtcttttcaagctcttggtggacaatcttataacccagttctgtacttattctccaagacacctcaaagttgtccccatgttaggtctacacactcagatccaatactgtgttggcctgagaggcaagtttcccataagtcagggatcagggaaggactctgaataaagcagtaagccatctatctagttaatcacaatgagttagtgttgcctagtgcatgagttactctgcctgtaggtgccggtgggatcagcatggaggggccaaatggcctcaccttcatctcagttgggtggaaaggaattttaggtaccaggaatcccaaacgggcactactagatttccatttaaagaaaaaattatttcaatgcctttgagcaaaaaggtcagggaaattacatacaatcttgcattgaactctattgctagatgaaaagatcagtgcatattttgagccaagaattcatggaacacttcaaactctgtactcttctttgtttcttccatttatagttttttattgatacataatagatgtacatattttcaggatacatgtgatgattgaatacattcatataatttgtaaagatcaaatgaatgtaattgggatatacatcatcttaattatttgtctttttttgtgctagagacatttgaattattgtagccatttggaaacatattataaatacatataaatatataaaaacatattataaattacaaattataaatta

SEQ ID NO: 699122 - DNA, 3479 bp, Homo sapiens
tgaggtgtctttccatttattcataatcaatctatcagtatatctccatatgtgtgtatgtacacgtacacacacacacacacacacacacacacacacgcacgcacaagaacaaaataggaaagtgaagaaagaccagagttaggtctaaccaaagacggagaaatgagacttacaggagctgccgagtttttgaccgtgacactgggggtggttgctcgcagggccccactcactccatggtagtatttgaagcagatcttagtttcagctgaaagacaaacaaaaaatgagactgagaagtagggtgtaacccagggagagacagctatggccacagaggacatctctaagaactgcaacataattcccccacgagcaagccaggccacactcgacaatgatgctcctcatgtggcctcaaggacaggtctgacttcttaaaactgtgacatgaaaaattgttctggccttaacatttttgtatccaagttaagtccattatttagacttctcagcatccatcctaccccattagaggtcattgatttaaaacacttagttctaagatgtgaggtgggtggatgcctatcacctgtctgtttcttctgtaatgtcctattatttaattcattgtgattaatatcttggtaatttgcagaaagactttgagaagttattgaagtacataggagagaggcatattttctaaactcctgtacccatcaatgataacctctttgcatcacaatttgtttccttcaaagttctatagatgtagctggcagtggtagcacgcatctgtagttcccagctacttgggaggctgaggcaggaggatcacttgagctcaggactttaatgctgcagagagttataatcacatcagtgcactccagcctgggtaatagggtgagactccatttaaaaaaaaaaaaaaagaaagttctataaatggttaagcagaatgtaaagagtttagggggatcacactgggtttgaatttcagctccattatttacaatctgtgagacaatgaataagtccctgtaccccctgttaaaataggacttcataagacgttggttaagcaaataaaagtgcttcgattcaattaagtgctcagtaaatgttagtgattgtgatgatgtgatgactaaatgacaacatcagtccttttccttctggcatttagttccctagaggacaagatctgtagccaacatgagtttagttcatttgaaggtgatttgctttccccaattcactgtttataggatttgttttcttaaaatttaaaaaaattaccaggctatgtcttggtcccttatattttgtttgaaacaatatgagaaatctccaatttgagatattttttctcaaatatggaaatttgccttcaattatcattttaaaaataatgtctacaattttattagcatgcatttgaaatgtgctcagaatggaaaatacgaaaaatgaagataagtataaatgaaataacaatcttctgagatttttgcataattgagactataaactatagaataatacattttgcttttttaaaaaattgacattatgaaataagcatggccaactatcatttaaaactcctcaaacaacattacttattatacagaacaactgaatagatttacacattgcaaatatttcctatatttggaaattcaggcttttctctgaaaatcaattactttttacaaattattttttaagttcaaattttctccctaggacaatggagcaaaaatcgctagatacctacccgrcatccattctacctttcctccttaataacagaatctcagttttattttgattgataatgtccagctaaagtactacattttgcagcctccctggcagaataacacctatgcagtttaccattgttattttaggatctctgttatatgtagctaaacataaacctaactgatatgtaaaggtttcctcaatgctgtagatacgaatattacagtagtcttctttaggttaaaagatatgggccgggcacggtggctcacgcctgtaatcccaacactttgggaggccgaggtgggtggatcatttgtggtcaggagtttgagatcagcctggccaacatggtgaaacctcatctctactaaaaatacaaaaattagctgggcgtggtggtgcactcctgcaatcccagctacttcggaaggctgaagcaggagaattgctggaacccgggaggtggaggtggcagtgagccaagatcacgccattgcactccagcctgggcaacagagcaagactcagtctcaaaaaaaaaaaaaaaaaaaaaaaagaatatattttaaggatcctcccttcctggggccaaattgctttccaaataacactttacacttctatcaggaaatgtgactctgaccatctcatagaacgcttgttagcactgagcatcatcacttaaaaataggcttaaaatagaatccgattattatttttgtttcatttatttgattattagtagggttaaactttttcattaaattttaatcagctatttaaatttttttgaagccatttaattgcagttgctcaggttttccattacctgggtgatgcctggatgctaaccagtccctctgttagtggatgtgttcttacttcagatatgcctgtactttgagtttccttcctgagtcactttctcgatagttctttcacatgtctgttgattgtcttttcaagctcttggtggacaatcttataacccagttctgtacttattctccaagacacctcaaagttgtccccatgttaggtctacacactcagatccaatactgtgttggcctgagaggcaagtttcccataagtcagggatcagggaaggactctgaataaagcagtaagccatctatctagttaatcacaatgagttagtgttgcctagtgcatgagttactctgcctgtaggtgccggtgggatcagcatggaggggccaaatggcctcaccttcatctcagttgggtggaaaggaattttaggtaccaggaatcccaaacgggcactactagatttccatttaaagaaaaaattatttcaatgcctttgagcaaaaaggtcagggaaattacatacaatcttgcattgaactctattgctagatgaaaagatcagtgcatattttgagccaagaattcatggaacacttcaaactctgtactcttctttgtttcttccatttatagttttttattgatacataatagatgtacatattttcaggatacatgtgatgattgaatacattcatataatttgtaaagatcaaatgaatgtaattgggatatacatcatcttaattatttgtctttttttgtgctagagacatttgaattattgtagccatttggaaacatattataaatacatataaatatataaaaacatattataaattacaaattataaatta

SEQ ID NO: 699123 - DNA, 597 bp, Homo sapiens
gaaatgaccacttctcattactcgtttcttagacagcttttacaaaaataggagattcaaattagcaatatcctttgggatatgttatacagtattttaggaagatgaacttagaaaaagcgaagttattcatataatgatgttttgtcctttcaggcatctaattgagaaaagatttctccacacaaatcgatacttttgcatgtgttaggccaaagtacccatgttagcacattcctgacttaaaaaaaatcatattaactcatgatggtgttctcaactagtatgccaaggacaaacttcaattaaagtgaaacagcaatggagatgccataataaattttttgataatgattatttcttcagaataactaacatttcarttgtgcctacaaagtgctagtcaccaaaattttgaaagacaatttttattttcaaaaaatctaagactccaaggattagatgacttaggtgaggtcacccagatgacaaagagaaaggatcagaataagccctaaatttgtatgaacattaactcactatgtcatagtgtttccctgttgtcaaatctccatcttcagaacagaccactagtct

SEQ ID NO: 699124 - DNA, 995 bp, Homo sapiens
tcaaaccctgaaagccaaattccatgggggaagagcgccttcgttatcagtttaccaaggaacccttggacaagtacacatgtccttgtaccccagcgtttggaacacatcagtagaccagacgcatgataaatattttttacaaaaccattctacaagcaagtcgggatttaaaaaatgcatttgtaaagtgtttttcttcagttggatcaaccatatgttaaagtaagcttcaccgatggcaacagttttcatctgaggcttattttagcttaataaaagagtgtgtgggtggtaagcagaaccttgtgcagagctgctagaaaatcgcgactaatggcttttgcctttctgccttgttgatctaagatggcttgatttttgcctgggttgtggatgggtgaagccaagtcaccatttctgcaggacttaagctaggctctggagaagcactcctttgggcacgtgcagaatgcccttggatatcggtccgtctaattgcatgtaattgctayattggcctcttctctgtttctggaacatcaaggttgttccagcctcagagcccttgcacttgctgactctcttgcccagctgaccattcccctggcccttcacatggcaggtgtttttaaaccttcaggtcttctgctcatacctctaccccacctcaagtgctctgccatctcactgtttcctttattacacttgccccccacctgaaattaccttgctcatttgtttgtttccatgtctgttgtccatctccctcttagaatggaagctccatgaagtcaaagtcttcatctgtctgatgtgaggtcatatgggcagcactcagctcagtacctagtacacagtaggcactccttaaacatctgctgaatttcaatgtataacttggacttcaaatacaaagtttcataagtaatgagataggacatgaagctttaaaataagtcttgagctagaaaggctgcttaaatactttaaac

SEQ ID NO: 699125 - DNA, 918 bp, Homo sapiens
actgtgatttatttcaccacatcccttgtactggacactcactctttctttcctccaagatgacaggaataagcatcctgtggtacccttgtttactatttgaaacaactgcaatgggtggctttttacatgtgacttttttgaacttgtcttgttacttctgtaggctaattcctagcatagtatcgaccacttaccacaaaaaagatttcagaataattacgtggccacagacaatcataccttagaagaatacagttgtgattagcatttaacctggctctctgcttccaggattagtaaatgctggttggctggctgcttctaaggagccatcagggtagaaaaagtctgaagcgtggtgttatgtgacatggtgggttcaacmatagaaatatactcaatatgtgggacagagagaagttgcaactacttaagtccatgtaagcatcaggtgctcctatggagttagccaggtgaagaggtgataagcagtttatgcttattatgaggtgtcctaagcacaaagtggccaaagatggggctagagaatgtcagagcaatagctgaacagagaaggcccgcctgatgtatattattgagagtaataagacctacctctggatttgataccacaggtgatgaggggatctggacaggctctgagtgaaggatgatttgtattttagaagatcccttctgaccagaggatggaggatggttggatgggagaaaatgttggggacagagacacgttggaaggagggtgcagttgtccaggtgtgagatgatggaggtctaaacacatgcagtggtcaaatagatagaatggaagggctggatggaaggatgtttaaatttggagtttcaacctagatatggagccaagcttacaggagtacacctctaaaactccat

SEQ ID NO: 699126 - DNA, 1070 bp, Homo sapiens
cccaactcgacctcccaaagtactgggattacaggcgtaagccaccgcgccaggccaggaaatattcttatatggtatagtctcagactttgacaatagcagataaaagagagactgatggaaagggaaagtggtgttgccacttatcttttctgttaactcttacactcacttcaccttggcttcagtcaactcttctagcagttcaaagtatttctaagtaaatgttcttaaatagcacagatacctgtgcaccttgatttaagaaaattggatatgccaaagtcagacatataacacatccaatttaggccgtaattttcctgcattatatattcacattccaaatgcctctttttaataggagatgaacttcgtgaaatgtaggtttatacgtgatgctaatttacagggtaaagataatttaaaaattagtattagaaacctgaatttttatattccagaaaggcattatcccaggcactgtgggtatataaaaaacaggggagggggccactgycctcaaatagaaaaataatagtgactgcaagaaaaatactgcaagtacactacacagataactataatgcaagacagtgtgaatttggggaaaatcattttctgctgaggaaatcgggaaaattaattgggagagatgttacttgaatgagacataagtaacataagtaggattttaattagtagatatgttggatggcattctaagtcaaaagaataaggaaagcaagagcaaacaaaaccgtttccatgacatagaggttgatccaggggagagctagcaaccaagctaagatagcttcaggatcatcgaaagtctccaaagctgtgataagcatttttgcttcattgggtaaacagtgaggagttgccaaaggttttggggaaatgaagtgtcaagattccagtgattcttaggaacatcatcctcttggtgttggcaagatgtggtagcagcagcaggaggtaacaaggactggattaatccaggcaggaggtccttgagggcacagcagatgtgcgtgagaaggcagtgagagtgtcggcagtag

SEQ ID NO: 699127 - DNA, 3086 bp, Homo sapiens
ttttgagccctccaaactgttccaacctctgttcgttatccagttccaaagtcacttccacatcttcaggtatctttatagcagtgcccaaatcctagtatcaattttctgtattagtccattttcacactgctacaaagaactgagactgggtaatttatgaagaaaagaggtttaattgactcacagttttgcaggcttaacaggaagcatgactgggaggccccaggaaacttacaatcatggcagaaggtgaaggggaagcaagacacatcttcccatccatggtggaacaggagagagagaagggggaagtgccacacatttttaaaccatcagatctcatgaaaactcactcactatcacaagaacagcaaggggaattccacccccatgattcagtcacctcccaccagggccctcccccagtatgtggggattacaatttgtgatgagatttgggtggggacacagagccaaaccatattaatgatattagagccctcatgatctaatcacctcttacggttcccacttcttaacacagttgcattgaggattaactttccaacacatgaatatcgtgggacacgttcaaaccatagtggatcttgtattttccaatgactacctactctccacccaaatgttagaatatcccccatcactttctattattgtacactaccttttttctctacactacttctcaatccttatgatttattattactgtttttgttattgttttacttgtttatgcatgcttgtttcccctgggcacatgcctggcatgttttaggcaccagtacaagtgtgttgaatagatagatggatgaatctctaatgttttccaactatagcaccctaattgagactggaaagattctgtcaagaataattcttgggtcttgatttcaccaaacagtagtattgacacagatacttataaccctctggaaacagaataggacaaaataataaaatatttttttctgcttttgtgtcaaatattatttgaatggatccataatgcagcttaaaattctgaaaataatacagaactggtaaacatttgaaacaggaaaactaaagtgataaagagaatgaaggtgtttccatatgaagatttttttaaagttttgattttaggcagaacattgagagattctatggcaaaatttgctaaaaccatggatggattaattcagattattttttcaacaaagcactgcttaaaagagttttaaagagattgtttcaagccaaataaaaggaagtacaggaatacctcatttatcagatattgtccaggaataaaatgttccgcaagtcagtttccaaaaaactaaaatgtaatctcaatatatgtgccaaagcttaccattttgaaggatatttttctagcacgctctacttactcctctactcttttaaacgaaaaatgctaaagacatcaactcagagtcatcattgagaatgttttgataccacataaaagattccctacaataaaatctaccccacattgttatcccagttttctctcctttttatagttcttccgtctcctcccttttctttcagttgttactttatgcttttggcagctgcttttaatttgttgactgagtttatacaacaagtagcatgagcaagggactaagggcagctcctaaataatacacaccattgccactggaactctgatctctgggcaagtgaggtattacggtagtcatagaaatagtaaaatatcataaaacacatgaaaatgatgatgttaatgaggacacttatgactcttcctgccactataaagattacttgtaggccaggtatggtggctcctgcctgtaatttcagcactttgggagccaaagtggccaggtcacttgagctcaggagtctgagaccagcctggtcaacatggcaaaatcccatctctactaaaaatacaaaaattagccacatgtggtagtgtgcacctgtactgcaatctactctggaggctgaggtgggaggattgcttgaacccaggaggtggaggttgagacaccactgcattccagcctgggtgacacagtgagaccccgtctcaaaaaaaaaaaaaattaattgtacagagtttgtcctttgctagatggactgtggccctcacctaacatggtgatatttaatattgttaatatcatactgaggatatgattcatatttagaatgaccacaggttccagtttcaatgcttatttttcagtataattcttaacattacttttattctcaaaatttgtctagttttgaaaataaattttatatttaccctctatataatgcattttaaataattcacaaagcagtagtaattttttcattcagtttcttattctgcccagaatgcagcagactggaattagaaattaaaactcagagaagatactttttaaatgatgtcatcagaaacacacttaatggaaattatgattaatgtattaagcaaaatgaaatgtcaattaaggaaatttctcctaatatctcttctaggagaaattttgtgtcgatatggggcttcaaacatacgtgttgagtgagtaattagatgtattcatctacatttgaaatggataaatgactgaaatttgttcttttgaaaagagctttatagacatagaatacaaaacagtgttatgagcggctcatctaattttaataattmagaaaaattttcttttatatttgtgaatcaaaatacaaagcttctcttgtgtttatttaaattaacatgtcttttggcttagggaaaccagacgaaacacatttttaaaaattaaaagtaattaatcccaactcgttttttaaaacatgctgagaggttattgaaagttagaaaattcttctggatgaggtttcatttaatgttgtttcttttatctatgttaaataaggatctgttctaaagaaatgtaatcctaagatattaacagctattagcttgaggttaaacttgtgctacacacacacagtggatttgtctacatctaggatatattgaatagtccatcattataaactatttttaagtttat

SEQ ID NO: 699128 - DNA, 1111 bp, Homo sapiens
ccaggatggtctckatctcctgaccttgtgatcggactgccttggcctcccaaagtactgggattacaggcatgagccaccgcgcctggccaacagaagcgttatttttagcagtaaccttaatatcatgaaacaactattttattatacttttagactgtattggttaagaatttgaaataggagtagaatgaataattggcctctgatccgttatgtcttcttgttcctgagtgactcagtggtccaaagtccagtcatcctcggttataaaacacgaagtcggaattgaatggaatttgggaagctagaattaccttacataacctaacatggtaaattacacagagatattttttactgaattcacaaacaaaaaacacgtaaaaaggggaagaaacattgtttctactgcttgacacaaggggttttaaagtcacattataagaagagcttgtggaaaagaaaatattattgtaaccattttttaataagcttccacaacaagaataaataaaataacaacaaggagacacaaatttttttcaaagaaagatttcagtaaataaatataaaaggatggctaaaaattactattttgcaccctcttatttaacatggttcagacaagagtcattaaagaatcctcaaaaacctcacagtgaatgcatgttggggaaaaatgttcagatgatgacaatttttgactccaaagttccttcatagctgaatgtgggaaaacatactttgtattgaagaaagctggtagtaacgaagtgcataggattctatgtcaggaagttttgcaatcttattctccacactctgaccattttaccaatatcatttgcaaaaaaatggctttaggtcctcaacatgggagaccaaagactggctcccagggtcttccactgtaactaccagtgcccttgcacactacctgggatcagagaattggcttgacttgagtttactaccttcaccactggtccccatgcatgccccccagaatctgatgattggcctgcctggcattccagtccccaagaaaaccttgccacagccaccaaaaataactgtagtataagccactgagaaactcagaaacaca

SEQ ID NO: 699129 - DNA, 1111 bp, Homo sapiens
ccaggatggtctcgatctcctgaccttgtgatcggactgccttggcctcccaaagtactgggattacaggcatgagccaccgcgcctggccaacagaagcgttatttttagcagtaaccttaatatcatgaaacaactattttattatacttttagactgtattggttaagaatttgaaataggagtagaatgaataattggcctctgatccgttatgtcttcttgttcctgagtgactcagtggtccaaagtccagtcatcctcggttataaaacacgaagtcggaattgaatggaatttgggaagctagaattaccttacataacctaacatggtaaattacacagwgatattttttactgaattcacaaacaaaaaacacgtaaaaaggggaagaaacattgtttctactgcttgacacaaggggttttaaagtcacattataagaagagcttgtggaaaagaaaatattattgtaaccattttttaataagcttccacaacaagaataaataaaataacaacaaggagacacaaatttttttcaaagaaagatttcagtaaataaatataaaaggatggctaaaaattactattttgcaccctcttatttaacatggttcagacaagagtcattaaagaatcctcaaaaacctcacagtgaatgcatgttggggaaaaatgttcagatgatgacaatttttgactccaaagttccttcatagctgaatgtgggaaaacatactttgtattgaagaaagctggtagtaacgaagtgcataggattctatgtcaggaagttttgcaatcttattctccacactctgaccattttaccaatatcatttgcaaaaaaatggctttaggtcctcaacatgggagaccaaagactggctcccagggtcttccactgtaactaccagtgcccttgcacactacctgggatcagagaattggcttgacttgagtttactaccttcaccactggtccccatgcatgccccccagaatctgatgattggcctgcctggcattccagtccccaagaaaaccttgccacagccaccaaaaataactgtagtataagccactgagaaactcagaaacaca

SEQ ID NO: 699130 - DNA, 596 bp, Homo sapiens
taaaattttataaaatgatttattcaaggtcagtcaaatttcatctagaacaaaaggtaaaatcatcatttgagaaaaatttgaggacataggtagtgctttaaaattctagttgcctcacacaatatccattcttctccttttcttaaataaatagaccgatattttatttggaaggaatcactagtacttctagcctatgtgttaaaagggtacagacttgactgggcatggtagctcacgccagtaatcctagcacaggattataggctgggaggccaaggcgggaggatcacctgaggtcacgagtttgagaccagcctggccaacatgatgaaaccccatctctactgaaaatmcaaaaaaaaaaaaaaaaaaaaaatttgctgggcgtggtggtgcatgcctgtaatcccagctgcctgggaggctgaagcagaggaattgctggaacctgggaggtggaggctgcagtgagtcgagattgtgccactgcactccagcttgggccacagagcaagactctgtctcaacaacaacaaaccaaaagtgtacagactcagtgtgtgtatatcatatatatatatatatatata

SEQ ID NO: 699131 - DNA, 1366 bp, Homo sapiens
gaaaatttgaatgaataatcaacatttcattttaaaataaatcaaagatactggataggaaaacaacacacaaaaaaaccccacaaaaaccaaaaaaccctgatggatgaggcttacataggtgtgcatcctacctgtaaattaccgcacaggagaacttgggacagacaaatggcttttacttggaagcaytaatgaacattcaattatcctgttgcatattggctgacttaactcagccaaattagaatacattttatattgactattttgacatttgttttatttggcaagtaaaacaaaactgatccgatttccttgcagccattgtaaaccataaactgtacagcagaggtgataaaatacataagccttataaacatctggttctgacgcactaccctccaaacccaccaggctgccggtggctcggtgttctcggctgtcttgcttcaggtgcaagtgactttgctctcacagtcaccagcaggcttctgagagctctctctgctttatctgagagaactggtgttctttctttaaccacagaaagtcaaaacctgcctgaggtggtgcccatttctgggcccttctagaccacatgatgtcagcagggagcagctgtaacaacttcagggcaactgctcctgtgggggctttccagcctctgcaaggagcccacacttgagctgctccaagtacaagtgatgggcctcagcacaggtgatggaggaccccgacacacaggtgatggacttagctgactccccagcacaggtgacacacctgatatagccttgagcacaggagacagtgaccctcagcagtgccctccagggcggagctgacagcgctctggctcagaagtgaggaacaagtgctgatgggcagtgcgaacctcacactcttgaacccaacagagactcaactgttcaccctgcaactctgggaggcttattagagattcctatctttttatgccaaatgaaactgaaaactacttctaaagtttcaggcaattccaggggtagttaagtttaaataccactcttggtttgtgaaactgtcatgagaaggaccagattgtctttatagggggatgtcccagaggacagagtcctcagggctttggagcctcattacagcacattcttccaagtgagacggaggcttggcacagaggaacagagtacagagagctggtggtatgtcccggagggcaggctgtattgtggatggcccaggaagacctactggtgactcttctgtccggttcctgacagattttgttcatctctattcacccacgtggaagcttggagatccattctcatttacgttatgtcaatccctaagtgttgctgcc

SEQ ID NO: 699132 - DNA, 1351 bp, Homo sapiens
gagcaggaacaccagggaggaagttctgacactgaaccaggcgagggacgctggtggcccggatgagggcagtggcagtaagaatggagtggctggggaaggccaagggacatttagatggaagaatcaagagacctggccactggctgcagaggggcaaggcggaatcaagggtgaccccaggatcctggcctaaagagctgggagaatgaaatgccaggtactgacggggcgtgggggccagcggaaaagcagcagagatgaactcgtgggtcccgctgagcatgtgtctggtttgaggggcttgggccacagccaaggggaggcaactggtcaacactggttagaacattatgaccgagaatgtgagatgggtgtgtgagggctgccgggtggagatccagaaatgaggcctggcgggcggggatgtgagggtgagtttggaagtaaccagcatggtgataattgagaccatgagagaagatgaaatattctggaacatggtgagagaggcagacctgggacagagctgaggaatgttaacgttccaagctggcaaaaacaatgggaagatcagaatgtactctgtgatattggatcaaaatcagatgtatcattataaagtcggttttaatatgtagttgtagacagatacataagcgcacatctgtgtgtgtgtacacttatatgtatatgtgtacatatatttctctctacacacatgtgtgcatacatttctctctgctgaggcaacggcagttcagaggcaatgggcactcctcatacccagactctgctttctagcatctcctctaaaagagacaggagctgtttggagaagtggctgattcagtgctgggcaggaagggaaaaggccaggaacatcttgttgtgccagaaagtaaagaggttctcaaagaatcatgggaacacagcagaagggcatgagagccagcctgaaggggttcccattggctaaatatgaatccatttgagcatcaaaataaaaaatgacaactatgagtaagaataccctagtccataccaatataaagaaataaactggctgaggataagggaaacctcttccttatatactggagaaatggcagagttawaaaaatcaatggatgctaaaagtggcaggtgaaaatctgatgaggaacaagttattcacgtaggcctacagtattccccacaaattacctactaattacaaaggtaaaagcagtaagtttacagtgaagaaacctgctacacagcaccttcgccaggtgatcgaagctaacttcaccagtactgggtcacaccagcaccgtgggcctcccaacaggatgcactgagagtgaga

SEQ ID NO: 699133 - DNA, 1351 bp, Homo sapiens
gagcaggaacaccagggaggaagttctgacactgaaccaggcgagggacgctggtggcccggatgagggcagtggcagtaagaatggagtggctggggaaggccaagggacatttagatggaagaatcaagagacctggccactggctgcagaggggcaaggcggaatcaagggtgaccccaggatcctggcctaaagagctgggagaatgaaatgccaggtactgacggggcgtgggggccagcggaaaagcagcagagatgaactcgtgggtcccgctgagcatgtgtctggtttgaggggcttgggccacagccaaggggaggcaactggtcaacactggttagaacattatgaccgagaatgtgagatgggtgtgtgagggctgccgggtggagatccagaaatgaggcctggcgggcggggatgtgagggtgagtttggaagtaaccagcatggtgataattgagaccatgagagaagatgaaatattctggaacatggtgagagaggcagacctgggacagagctgaggaatgttaacgttccaagctggcaaaaacaatgggaagatcagaatgtactctgtgatattggatcaaaatcagatgtatcattataaagtcggttttaatatgtagttgtagacagatacataagcgcacatctgtgtgtgtgtacacttatatgtatatgtgtacatatatttctctctacacacatgtgtgcatacatttctctctgctgaggcaacggcagttcagaggcaatgggcactcctcatacccagactctgctttctagcatctcctctaaaagagacaggagctgtttggagaagtggctgattcagtgctgggcaggaagggaaaaggccaggaacatcttgttgtgccagaaagtaaagaggttctcaaagaatcatgggaacacagcagaagggcatgagagccagcctgaaggggttcccattggctaaatatgaatccatttgagcatcaaaataaaaaatgacaactatgagtaagaataccctagtccataccaatataaagaaataaactggctgaggataagggaaacctcttccttatatactggagaaatggcagagttataaaaatcaatggatgctaaaagtggcaggtgaaaatctgatgaggaacaagttattcacgtaggcctacagtattccccacaaattacctactaattacaaaggtaaaagcagtaagtttacagtgaagaaacctgctacacagcaccttcgccaggtgatcgaagctaacttcaccagtactggrtcacaccagcaccgtgggcctcccaacaggatgcactgagagtgaga

SEQ ID NO: 699134 - DNA, 2057 bp, Homo sapiens
cattcctaatcaaaattcaaaatgctgcaatggcatttcctttgagggtcatgttggtgctcaaaaagttttggattctagaacattttaaattttggatcatcagattagggatgctccgcctgtatatcattccaacttgcagttactggtacatattgtgggctccttatatgcccccttttttcttcttttttggggtcagaacatttaagctgaaagggaataagagtagtctaacccagccgggcgtggtggctcacacctgtaatcccagcactttgggaagccaaggcaggcagatcacctgaggtcaggagttcaagagtagcctggccaacatggtgaaaccccgtctctactaaaaatacaaaaaattagctggacatggtggtgggcacctgtaatctcagctactcaaggaggctgaggcaggagaattgcttgaacccaggaggcggaggttgcattgagccaagatcacgccactgcactccagcctgaatgactgagtgaaactctgtcttagaaaaaaaaaaaaagtagtctaatccaacttcttattttgcagctgaaaaaactgagggtcagcaaatttaaataaaatctgaaatgaaaacttatgtttcgtgactcacaatccaatgtgatctctgctaggtattctgattctatctttgcttgactgatacaagataatgatgaaatgtataacaatgtattaatactgatacattgacagacaagccaggctgattgttgaaatttaaatttacagtaataaaatattaatgcagagatttcccttttcttaaagatgaatccaataaagaaacagctaacctacaagaaagaagtataagcaatgtaagtgttaaatttcttatcaagatatgttgtttagaaatcaacttaaatgctcagctgaccacccttttgactttaattttattgcttctaggatgatggtgaagaaaaaatagtaacaagtgtgcgtcggagaggaagaaaacccaaacgttctctcactgtatcagatgatgctggtatgtttctagcaaattcttaataagtcttattgtttcaaaaccacctttttaaagagtttttctttgaatgaggaaaaatccaatgggtacagctaatattaatattatataaatatgtgtgaaataggtctaatcccgtgtcagaaatggtacatcccagatgcttttctgagtacatgtcaattttttatgaacgctggctgtgaactgcatatgtaaactatccaaaatgtgtttgagattaagttaaacagttgtgaattgcaagtgctgaaacaaaaaggaagtggaaaaccatttctctgcctccaagtccctaatatcctaagttctaaactccatgactctctctcttggaagtatctttgggaattgtaaaatccaggtgttacccttctatttgaacagaatcctcagagccagaaagaaaacgccagaaatcagtttctgatccagtggaggacaagaaagagcaggagtctgatgaggaagaggaagaagaggaagaggacgagccttcaggagccaccacaagatccaccaccagatcagaggctcagaggtaatgggggcagcacagagctgccagagaccttcaccagcttctccatctgaaaaytgctctgggttttctgggattctctttgaactgaatcattcatgctgcagtggaagttcttccctttcatttttattgttagcagtgggcacatagttcttggagaacacattttctgtcctaaaccattttgggggattgcctcaaagtctttaccaggttttaaatgcctatttggtggaacccattcaattccttacaaatatattttttgagcatctgccatccttcagatgtcgtattgagcaccattcatgaatatggacatacataaaacatcatccctgctctcagcatacttaattcaacccagaaagcaggaggaaccaggcccacgcaccgtcatcacatgcatctcaccagtgctatgcaataggttgatcatagga

SEQ ID NO: 699135 - DNA, 1378 bp, Homo sapiens
tataatagtatcttgtgtttacataaagaactaaaatcggggctgggcacagtggctcacacctgtaatcccagcactttgggaggctgaggccggcggatcacgaggtcaggagttcgagaccagcctggccaatatggtgaaaccccatctctactaaaaatataaaaaattagctgggtgtggtggcacgtgccagtaatcccagctacttgggaagctgaggcaggagaatcgcttgaactcgggaggtggaggttgcagtgagccgagatcacgccattgcactccagcctgggtgacasagtgagactccccgtctcaaaaaaaaaaaacaaaaaaaaacaaaaacttaaaatcaatctgtttctaattcctccagacttaacacagtattagccatttgtgccatggtttgatttctcaaagaatcagattttagagccaaaggactctagaagctcacacggctaaagttataaggtggtctcatatttgtttttttaggtggagcagctcacataaatagaaaagaagtcacagaatccaaattgctgctgctaggagagggtgagggtgctggagcccaacacccatgcatttgggtatagcatccatcccaccagaattactgcttccctttaaaacagttgtggaaagtagggctcaactcagagaaagttccataggccttctagccatcttcgagtgagtgtctagaaattgctctcagatttgccttttataaattctttaaaaataaatcttatttgatttatatggttctgtaatcacctggattatcaaagctcttccttcatgcactttataatataaacttttgatttacaaatgagttgttttctctctagtttagattccttggcattggttgatcagtcccagggctctggtgtcttcataattttacaaattgtctgagttgggtgggctctcagtggtcatgtagtaccaatagccagtcagtgcctgagtcactgcacctgcagctcctctgaaagggtcttcctgcttttgcatggacctcagtggcagggaaagccacatcctccttagcattctctgacttgtgttcagtagaagccggcctccctgtggcttctactcttgattctagttcgactttcagaaccttctgtctaattttgccttacatatttgagggcagcttccaggtcttctctgcttgcttattgagccccttcatcatccctgtttgtgctcatcagttacctttatcctcttttagaagcaaatgtgcagctgggcgcagtggctcatgcctgtaatcccagctactcaggaggctgaggcaggaagattgcttgaggctgggagttcgagaccagcctaagca

SEQ ID NO: 699136 - DNA, 1067 bp, Homo sapiens
attgcagtaagcaggttattgcattgtttatataattattaccctgttttactggtttacaatttgttaaagaaaagtcactatcaaagctaagtcttcatttagatatatattgtttttagttgaaaccccccacagcgccccgacttttttttttttttttttggcaacagggtctcactatatattgcccaggctggactcaaactcctgagctcaagcagtcctcccatctccaccttcctagtatctgagactatagggatgagccaccaaacccagctaaattttttatagtttatagagatgaagtcttgccatgttgctcaggctgctgtcaaattcctggccttgagtgatcttgccttttgcattggccacccaaagtgttgggattacagatgtgagccactgaatctggactggttgctaattttttaatctacggtaataataataagtaccttaatgaatttctgtggtagatcaggcatcttaattctgctaactgcatcatatccagatactgttacgtctgttgcacatagatgaagatacagaagctttaagaagttaaatagcttacctgaagttatttaggaaatggccaaagtaggaatttgagtatggtttgcttarattccgagtattgctctttctgttaaacacctgcaataaccattctcaaaacatttgacatcagtactcctttacattcttcaaagttattgaggatcccaaagtttttgtttctgggggttgtatctttcagtatatactatatttgaaattaaaactgagaaatttttaaaaaacatgaatacataagcatatattgtattggctgttaaagaataaggcacgtaacattttagtattattctgagaattatttaaagctcatagactccctcaaaagggttgaggggagggggtacccagaccgtatattgagaaccactaatctgtaagaagactagtgagtttggcattggacaaattcatctctccattctttttcagtttaatgttctgttagtcttctgattacaatgaatactactcta

SEQ ID NO: 699137 - DNA, 2790 bp, Homo sapiens
aaactagtttttttgggttttgttgtttggttggttggttggttggttttttttttgagacggagtctcgctctacgctctgtcgccccggctggagtgcagcggcgcaatctcagctcactgcaacctctgcctcccagattcaagcgatgctcctgcctcagcctcctgagtagctgagattataggcacgtgccaccacgcccggctaatttttgtccgaagtagccgggactacaggcgcaagctaccacgccctgctaattttgtatttttagtagagatggggtttcgccatatttgcaggctgctctcgaactcctcatctcaagtgatccatctgctttggcctcccaaagtgctgggattacaggcgtgagccaccatgcccggcctaaaactagttttttaccgtcttactttggttatggaagaagagatggtgtggtccctggtcatttcttgtttgcatgctagtcaccttgttatccctaggcatataccgtcaggaaggagcattgtttggtgatgcgggccatcaggacaggttgcccagcctctgaactcctgtactggagaagtggccttagggttcatgctttggggatgagtcagggattcctattggagagttcatttctttctttctttctttctttcttttttttttgagatgtaacacctcgctgtgtcgcccaggttggagtgcagtggctcaatctcggctcactgcatcctccacctcccaggttcaagcgattctcctgcctcagcctcctgagtagctgagattacaggcgcatgccaccacgcctggctaatttttgtatttttagtagagatgggatttcaccatattggccagactggtcttgaactttcatctgactgactttgtgatctgcccgcctcagcctcccaaagtgctaggattacaggcatgagccaccgagagttcatttctccaagagtaaatgagtttcctttttcttccatgatacctaggtatagctaggtgattctacattagagatttgatgactaaggctattcttttatagggctttttttttttttaatttcctgacttgataagcaatagctgtaattaagacagccggtagttggtgctgctttttcccctgactggaaggctggagaggaactatgttctcctggcatggaaagagaaaaaaaagattagcttatagattctattatttttaaattctgatgtcgattaaaaatgcattttaaattcttaacattttatgactgagccttagagataatgtagctgatataactgttccatcataaaataatgtttattccaaatttggaaattaatagaataataataatgccttacacttagaccacagttcaaatgaacactccacttgcctgactggtgatgatgctcttttcgctctatccagctgtcctacagtcctgtcatttaaaggctacctctgttaatattttttggttttgttttgttttgttgttttgttctgtttttgagacagggtctcactctgtcacccaggctggagtgcatggttgcgatcctggctcacggcagcgtcggtctccctgggctcaggtgatcctcccacttcagcctccagagtagctggggctatgggcccaccccaccaagccctgctgatttttgtattttttgtagagacagggtttccccatgttgcccaggctggtctcaaactcctgggctcaagcaatccacctgcctcagcctcaaagtgctggggttacaggtgtgagccaccgtagccggcctactacttggtaactatcttatatcttaattttgtttctttatgtttgagtatttaggtcattctactttctgctgttacatatagtaattctgtgattaacatttttgctgaaactgacatttttcactgttgcataagatagcttcccaggagtactaggtagacgtatataaacatttaatacatgttcataaacttgaaaaagttttgtcagtttatacaactgtcataatgtatgagtgttcatattataattttcttgatctttatttgatggttgaaaactgatatcttgttttaacttgaatttcttgattactattgaggatagaaattttccacctgtcattactattctatgagtgtctattcctggccttggttgtgccccatactgttaaagaggagacagctaaggtacccagactgtgcagaactatgttgcctagatggttatttgcatgttgaaaacatgctaattttgctaataaattagcaaatagctaatttgtggctgatccagaatttgatctcaattatctctacttttaatatttacaaaatgagagataaatgtataaagtagggtggtgcacattcatgtttgacagacctaggttttaactccacacagactccctctgatggctgggggttggggaggtggtcctggaccatactttgagaaccagtgagctaatacatggtaaatgataaaggtaatgctgggaaagttaggtagaggtctttttgtgaaggatcttacatctatgctatacttagattttattctacagaccgataatagcaattctggacagtctgcattgtaactcctagagacatggagaaagtagggaggtgttaagaaaatagacatgctggtccactccagcgtcattcccccayctcaccttctccagcctgctccttgagttgtactctgaaccttcacttacttagataggttctggtagaaaag

SEQ ID NO: 699138 - DNA, 3806 bp, Homo sapiens
tgtctcattctcatccgtttcccttaggtacccatttcccttccccacagacacatactttgttaatagtttttcttccagagatgatatatgcatatgtacaagcaaatgcaaatgtttttatttctttttaacaccagtagtaatatattacatatatacatactgcactgtgtatataatgtacactattgtttcctgctttttacatttatacttaatatgtatttttcagatactgtcatcttactatatataaaaagctaactcatttgtttttcagctctctcatatttgatggtatgaataaaacaaatttagccagttttgtattaagaggtttctttgattgtagttttttgctgttactaacaatgctgcagtggttgggcgcgtggctcacacctgtaatctcagcactttggaaggctgaggcgggtggatcacctaaggtcaggagttcaagaccagcctggataacatagtgaaacgctgtctctactaaaaatatgaaaattagctggacctggtggcacgcatctgtaattccagctactcaggaggctgaggcacaagaattgcttgaacctgggaagccgaggttgcagtgggccgagatcgcaccactgcactccagcctgggcaacagagtgagatcctgtctcaaaacaaacaaacaaagtgctgtggtatgtaactttgaatataaatcatttcatgtgtgtcccatttttatctggaggacaaagttgtagaagtacaattcagagacagggtcttgcattgttaagcaggctggtcttgaactcctggcttcaagcagtcctcccaaagtgctaggattacaagtgtgagccaccatgctcggcccccacttgcttttgaatacagtttttcctctgacacatgtatatatttggagaactctattaccacaggaaatcacaagaaatagcatcataaatgtggggaattttactttgacattgtgccagtgcagaataagattctagtaaatctttatcataaagaaaaaaatgtattcctgttgtaggtctctagtattgtgatgataaaatttagtcgtttttcaaagaaaaagaaaggtttataggcagttttagttccttaaatatcagtatcacaagtagcaaaaattaatgagaaagttaaattttatcagatttatttttcattttatttgtatttaataatttgttgaatggtaaaaccagaatgcttttaatatgtcttgaggcctgaaagaaagttcctttgaaattaaatttcagcaatgtagttgtgtagaatttgaacaattcacaatactgactttcagtgcttctgaaagcaggaagtgtattactgacacgcagaaatattccagcccaaagaacatccctactgccatatgtggtaagaatttgtcactaacccacaaactagttctgtaatgcagtgaataagcagaattggtctttgttggacatttccaattcaatatgaaagaactttgttttgcagtgtcttgtaagtaattattagcttatgccttgggagaaagcctggcacatcatgggtgcgtgctcatggtttattgagagaagaaaattcttttaggcatgtttttaaaacttggttattgtgacccttagttaaaacactgaaattactcgaatatgttaaagactgagttaaatattctgactcagcttattaatgatatctttaaattatattacttttattctgttttccctctttgctgctcatgtgaaataaatatgaatcttatgtttgcacttatgctataaaagaaattatccttggggttaattattaagggatggggaaattaagagctaagagacaggaaaatgagttgtgaggaattggggtcaccagatttcattaaaaatttgaaaatatcactgtttctctaaactttaatttttatttgttgtattttaagcggttaagaagattgtctaccaaatatagaacagaaaagatatatcccacagccactggagaaaaagaagaaaatgttaaaaagaacagatacaaggacatactgccatgtaagttggaaatgcccttgataaaatacatagaaatgctaattagccttttgtaacctaactagttttattcttcctgagtttcactgttaaggaagtagtaattaacctatctttcaaagtacatggaaagataataattcataattgtgctttttgtttttccttctgatcctaatttttgtttaatttttttcctgtaagtatcacagttgctctaatactaaattacttttaaatactgtaaatccaagtgaaaatatcttctgtcaactctctgttcaaagatgttatttcattaaaataatagacaactgaatacattttataaaatgctaacaatgttgatttttcatatatctatacataagaaccttaattgattaattatgcatgagaaaatgaagcataggatgactcaaacatctgtgtgtctactattctcagcagtctgaatatgtgcctctaagtatatgtcttagactgattgcattacattctaatgatattttatttatttatttatttatttrtttgtttgtttgtttgtttagaggtgggggttctcactgtgttccccaggctggtctcaaactcctgagctcatacgatcctcccacctcagcctccccaagtgttgtgattacaggtgtgagccactgcgccctgtctgtattcttaaatagcacagttttctggcaagataactttaactctgaaagtatacttaaggtgtgccatcactttatccagtaaaagctatacgtcatacttgctatcttttaaagctgccgtcgtttttctttcttcataagtattttgaaatatctacattccatcacatcatttcctcaattcttattcagtcttaaaggttgttctctctaaaatgcctttaaagttcttggtgacttttttttttttttttgtgacagtcttgctctgtagcccaggctggagtgcggtggtgggatcttggctcactgcaacctctgcctcccaggttcaagcgactcttgtaccttagcctcctgagagctgggacagctctaatacaggtgcctgccaccatacccagctaattttttgtattttagtagagacagggtttcaccatgttgcccagggcccagtggctttttaattgccagatttggtggtctttttttactgtttattctaacaggaagaatattgattattcaagaatgttgaactattttgatgccattgatcaatccctatttttgaaattttcttcttccatgataactcttttaaaacacctcttccctctcatctctttccctcttttctccactaacttctttgcctcaatttaatccttcatccttttgttgttctacattattatcagctgtgggatatgtggatagcctgtgttggcagaattaacaagtggcaacataacataatggtatagtgttctgattctggaagttgaaatcctgactccaccagttgctagctatatgaccttggactgatcctctctgtgccttggttttgtcatccttaaaatggagattataataatactttttaggattatttgcacaataggttaatattaaatgcttaaaagtgtacccagtggccaggcgcggtggctcacgcctataatcccagcactttgggaggccgagactggtggatcacgaggtcaggagttcgcgaccagcctgaccaacatggtgaaacccc

SEQ ID NO: 699139 - DNA, 645 bp, Homo sapiens
ggtggcttataaacaacagaaatttgcttgtcataattctagagactcggaagtccaagatcaaggtgctggcaaatttggcatttctgatgagggtccactttctggttcatagatggctgtcattttactgtgtcttcacatggcagaaggaactaaggagtctctcgtgtctctttatttttttatttttttattttttgtgatgaagtgttctgttgcccaggctggagtgcagtggtgcaatctcagctcactgcaacctccacctcctggattcaagcaattctcgtgcctcagcctcccaaatacctgggaccacaggtgtgcaccaccacacatggctaattttttgtattttcattagagaaggggttataccatgttggccaggctggccttgaactccttgcctcccacagtgctaggattgcagtgtgagccaccttgattttgtgcctcagcctcccaagtagctgggaccacatgtgcgtgccaccatacctggctaatttttatatttttagtagagwtgaggtttcaccaggttgctggtcttgaactcctgacttcaggtgatctgcctgccttggccccccaaagtgctgggattacaggcatgagccactgcacccagccctcgta

SEQ ID NO: 699140 - DNA, 1230 bp, Homo sapiens
gttctgtcaagcattcccagaggaactgagccacacgcagcctagctgtgatcaactcagtgctctgcccacctctggctactgtcctcaccgtgtctctcaccatttcatgctctgggtttctgggatcacttccacagtatcatctacctaagacatatagcacttgggtttggaatttaggaagtctaaactaaaacaccgtaatttcccttcatattgaaaaggagaggaccttaactcttctttcactggcatggtcaagatgtaagtgccarattacttacgtcacaaataaatcgaggcacatttttgcatttctaattgaaattacaactacataataagctctgttcattaatttacattccaaagttatttttgttaatacgtgaaagacagcttagcaaacttttctctagaagatatgggatgtttacaggttaactttgtaacagtgattctgtaatttaatccttccagcaccagtactggccaaagcctcttctcttcctctatacagaaaagttgcaaattattctagacatcccctaagaaaaacaactcagaaattgttgcagtaggctgcatttcattgacacattttcagatttgaaggataactcaggctagaagcagacagcctcattcatggtgattgccaaatttccaggacactaaatcaaatccgctattctgagaatcaccagatgaacaaggcctgaagtggaaacaaaccccctgaggagtttcaccaggagtcaagccaaagaaattcaccatgggtcagcagagatgttaggcagtgcccagtaacaccgggtaaccataagcagagagctatgaaggagagacaggccatgtccctcttcaagttttttccctaatgcagtggtcttccctgtaggtttaacacccatgatgacctgtgcctcaaccacaggattagagctgttgagatgcaaagacactgaggtgactatcagaacagagacagaacccccagataagtctgtacgcaccccattccttcattccccccacaaataccttgcaaggctgctgacacagctagtagaaccaaagatgcatccttggttcaatagatttaaggaattcaacaatagttccacatcaagtagcatgcatcaataaggaacaagccgcacccctcaggacacatgtaaagaaaaaaaaaagtatcaatcttctggagtagagagttttcat

SEQ ID NO: 699141 - DNA, 1230 bp, Homo sapiens
gttctgtcaagcattcccagaggaactgagccacacgcagcctagctgtgatcaactcagtgctctgcccacctctggctactgtcctcaccgtgtctctcaccatttcatgctctgggtttctgggatcacttccacagtatcatctacctaagacatatagcacttgggtttggaatttaggaagtctaaactaaaacaccgtaatttcccttcatattgaaaaggagaggaccttaactcttctttcactggcatggtcaagatgtaagtgccagattacttacgtcacaaataaatcgaggcacatttttgcatttctaattgaaattacaactacataataagctctgttcattaatttacattccaaagttatttttgttaatacgtgaaagacagcttagcaaacttttctctagaagatatgggatgtttacaggttaactttgtaacagtgattctgtaatttaatccttccagcaccagtactggccaaagcctcttctcttcctctatacagaaaagttgcaaattattctagacatcccctaagaaaaacaactcagaaattgttgcagtaggctgcatttcattgacacattttcagatttgaaggataactcaggctagaagcagacagcctcattcatggtgattgccaaatttccaggacactaaatcaaatccgctattctgagaatcaccagatgaacaaggcctgaagtggaaacaaaccccctgaggagtttcaccaggagtcaagccaaagaaattcaccatgggtcagcagagatgttaggcagtgcccagtaacaccgggtarccataagcagagagctatgaaggagagacaggccatgtccctcttcaagttttttccctaatgcagtggtcttccctgtaggtttaacacccatgatgacctgtgcctcaaccacaggattagagctgttgagatgcaaagacactgaggtgactatcagaacagagacagaacccccagataagtctgtacgcaccccattccttcattccccccacaaataccttgcaaggctgctgacacagctagtagaaccaaagatgcatccttggttcaatagatttaaggaattcaacaatagttccacatcaagtagcatgcatcaataaggaacaagccgcacccctcaggacacatgtaaagaaaaaaaaaagtatcaatcttctggagtagagagttttcat

SEQ ID NO: 699142 - DNA, 632 bp, Homo sapiens
cctctaagttttagacctcctggaccttgagatatcacaggttttatagccaattatatattttttaaatgtaaacactaatggagacttctgtttggtagcagacatttctaataaattcagaaatttcctccatgtcattcctaagctatagtcacatcatatctacttcagyacatcttgggtttgagttcataattttttttttttttttttttttttttgagacagagtctcgctctttcgcccaggctggagtgcagtggcgcgatctctgctcactgcaagctccacctcccgggttcacgccattctcctgcctcagcctcccaagtagctgggattacaggtgcccgccaccacgcctggctaagtttttatattttcagtagagacggggtttcaccgtgttagccaggatggtctcgatctcctgacctcgtgatctgcctgcctcggcctcccaaagtgctgggattacaggcgtgagccaccgcgcccggcccattatattttaaggtgaataatttctatcttgaacagcattttttattgtaacaagtgtaatgactggattatttggatgtgtcagctgctatattaaatagtcacatgttgggtattttcatcca

SEQ ID NO: 699143 - DNA, 1454 bp, Homo sapiens
tgaagatatgtatatagaaatatataacatataacatgaagatatgtatatagaaatatataacatataacatgaagatatgtatatakaaatatataacatataacatgaagatatgtatatataaatatataacataacatgaatatatatgttatatataaatatataacatataacatgaatatatatgttatatccattaaaataaattctaaaagattcactaggtaaattttcaattctttaaagtgccctgtttcttagtgtagtttaataacatccaatttataaaactcttggtttctctcctacatgatagtgctcccagagaactttgaacatagctccattattgctttctatccaagcattgtacttgtctgtttagctagcagtcttcaccattaaactgtgatcttcttgaggtcatgttttcttactcaccttcatacaaatttacatgtaaatatataacatatatatgaatatgaatatatgaataattaaaaattcacttagtgtatcttttaaaattaatttttttcatatgtataacatatagatgtataaatttaaaattgattagttcatttgttaaaagatttctgtcaaatacaaggaataatttcaacagatctattgtataacatagtgactacagttaaaacaatgtattctatgaatatatgttatatatgtttatatataaatccagatatatatgactgtttatatatatatatcttcagattttgatatgtttgcttaagcttgaatatcaatcttctccaaggtgtatttctttaaatgtttagagcaaaaatgagtttcataatctagtaaggttcagatataaagcatatcctattgtctgcatgtaatgcatagtgcacattagtagagattcttaaaaatcctcatgtgtttaactttggtaactctgtttcctaacttacttgaccactgaaacatcttctttctgtaacaattattaacatcccaagaacttgtattccaagatatacacttttttttttttggagatgaagtcttgctctgtcccccaggctggaatgcagtggtgcaatctcagctcactgcagcctcagccttctgggctcaagcgattttcctgcctcagcttcccaagtaactgggactacaggcacgcaccagcatgccaggctaatttttatattttttggttgaattgggatttcgtcatgttggccaggctagtctcaaactcctgacctcaagcgatcctcctgctttggcatcccaaagtgctgggattacaggtgtgagccactgtgtgcgtggcctccaaggactacactttgaaagatgttcttttctaaaattacatgacttgaaagtcagtggaaattgccagacaagtttaggcaattaaacacagtgagttgcaatgccttaataagggctctccc

SEQ ID NO: 699144 - DNA, 1454 bp, Homo sapiens
tgaagatatgtatatagaaatatataacatataacatgaagatatgtatatagaaatatataacatataacatgaagatatgtatatataaatatataacatataacatgaagatatgtatatakaaatatataacataacatgaatatatatgttatatataaatatataacatataacatgaatatatatgttatatccattaaaataaattctaaaagattcactaggtaaattttcaattctttaaagtgccctgtttcttagtgtagtttaataacatccaatttataaaactcttggtttctctcctacatgatagtgctcccagagaactttgaacatagctccattattgctttctatccaagcattgtacttgtctgtttagctagcagtcttcaccattaaactgtgatcttcttgaggtcatgttttcttactcaccttcatacaaatttacatgtaaatatataacatatatatgaatatgaatatatgaataattaaaaattcacttagtgtatcttttaaaattaatttttttcatatgtataacatatagatgtataaatttaaaattgattagttcatttgttaaaagatttctgtcaaatacaaggaataatttcaacagatctattgtataacatagtgactacagttaaaacaatgtattctatgaatatatgttatatatgtttatatataaatccagatatatatgactgtttatatatatatatcttcagattttgatatgtttgcttaagcttgaatatcaatcttctccaaggtgtatttctttaaatgtttagagcaaaaatgagtttcataatctagtaaggttcagatataaagcatatcctattgtctgcatgtaatgcatagtgcacattagtagagattcttaaaaatcctcatgtgtttaactttggtaactctgtttcctaacttacttgaccactgaaacatcttctttctgtaacaattattaacatcccaagaacttgtattccaagatatacacttttttttttttggagatgaagtcttgctctgtcccccaggctggaatgcagtggtgcaatctcagctcactgcagcctcagccttctgggctcaagcgattttcctgcctcagcttcccaagtaactgggactacaggcacgcaccagcatgccaggctaatttttatattttttggttgaattgggatttcgtcatgttggccaggctagtctcaaactcctgacctcaagcgatcctcctgctttggcatcccaaagtgctgggattacaggtgtgagccactgtgtgcgtggcctccaaggactacactttgaaagatgttcttttctaaaattacatgacttgaaagtcagtggaaattgccagacaagtttaggcaattaaacacagtgagttgcaatgccttaataagggctctccc

SEQ ID NO: 699145 - DNA, 1454 bp, Homo sapiens
tgaagatatgtatatagaaatatataacatataacatgaagatatgtatatagaaatatataacatataacatgaagatatgtatatataaatatataacatataacatgaagatatgtatatataaatatataacataacatgaatatatatgttatatataaatatataacatataacatgaatatatatgttatatccattaaaataaattctaaaagattcactaggtaaattttcaattctttaaagtgccctgtttcttagtgtagtttaataacatccaatttataaaactcttggtttctctcctacatgatagtgctcccagagaactttgaacatagctccattattgctttctatccaagcattgtacttgtctgtttagctagcagtcttcaccattaaactgtgatcttcttgaggtcatgttttcttactcaccttcatacaaatttacatgtaaatatataacatatatatgaatatgaatatatgaataattaaaaattcacttagtgtatcttttaaaattaatttttttcatatgtataacatatagatgtataaatttaaaattgattagttcatttgttaaaagatttctgtcaaatacaaggaataatttcaacagatctattgtataacatagtgactacagttaaaacaatgtattctatgaatatatgttatatatgtttatatataaatycagatatatatgactgtttatatatatatatcttcagattttgatatgtttgcttaagcttgaatatcaatcttctccaaggtgtatttctttaaatgtttagagcaaaaatgagtttcataatctagtaaggttcagatataaagcatatcctattgtctgcatgtaatgcatagtgcacattagtagagattcttaaaaatcctcatgtgtttaactttggtaactctgtttcctaacttacttgaccactgaaacatcttctttctgtaacaattattaacatcccaagaacttgtattccaagatatacacttttttttttttggagatgaagtcttgctctgtcccccaggctggaatgcagtggtgcaatctcagctcactgcagcctcagccttctgggctcaagcgattttcctgcctcagcttcccaagtaactgggactacaggcacgcaccagcatgccaggctaatttttatattttttggttgaattgggatttcgtcatgttggccaggctagtctcaaactcctgacctcaagcgatcctcctgctttggcatcccaaagtgctgggattacaggtgtgagccactgtgtgcgtggcctccaaggactacactttgaaagatgttcttttctaaaattacatgacttgaaagtcagtggaaattgccagacaagtttaggcaattaaacacagtgagttgcaatgccttaataagggctctccc

SEQ ID NO: 699146 - DNA, 1435 bp, Homo sapiens
ctaaacggaattgctatattgaatttttactttttttcatccccaatttttccaaaatggcagtaagtgatggtggacaatgatgcttgcagggatagagggggagtcataagtcaaatctgccttggttagtagctttgttagcttgaaatagtttcccaacagcctctgttttaaaaaggatcacagatcgacaatctacattttatttttgtcttagaaagttttgccatcacctttctactatggtaattgagagtcatagtgattttttgtattctcctgatacattgatatgggagaaagcttagatatcaatgggccaggagagtcagaaccatccagaaactttgcaatactcctgggaagggctctatgtaacaatttgccaagagcctatgagaaaagattcttaaatgaaaacttaaagagaaaaatttctagattgaagtaaaaccctcattggcagacttgctcatcctgcctctcctgataatgyacccacgctttaatatggatattgatgatcatgataataaatggctggactgagagagaattgtgaaaataccacaataggggaatataatatttagtaaaaattaactcttaatgctggtcttaatatattcattatttgtttttataatggcattggatgccatcatgttaaaaaatgtttcctgaaaacaatagacactgtggtctactagagggtatagggagggaggtgggttaaaaggctacctaccaggtactatctatgctaactaccagagggtcaggatccatattccaaactgtggcatcatgtaatattccaatgtaacaaatctacacacatacctccactatctaaaataaaagttgtggctgggcgtggtggctcacacctataatcccagcactttggaaggccgaggtgggtggaccgcccgaggtcaggagtttgagatctgtctggccaacatggtgaaaccccgtctctactaaaaatacaaaaaaaaaaaaaaaatgctgggcatggtggtgcatgcctgtaatcccagctatttgagatgctgaggcaggagaatcacctgagcccagaaggtgggagattgcagtgaattgagattgtgccaccgtactccagcctgggcaacagagtgagattctgtctcaaataaagtaaaatgaaaaataaaataaataaaatgttgtaatttttaaatgtttcctaaaattcttatagccatgtatgcttttattttctgtatattatcccagtgccctacagaagtgacaactttacttgacatggatgttgtaagggagttctagtgtgacaacagacaaaccccagtagaacatgcatgtaatatattctacagacagatggccacagacagatagtccgattgtaaaatggaaagaaacactcatttttgcaaaa

SEQ ID NO: 699147 - DNA, 1435 bp, Homo sapiens
ctaaacggaattgctatattgaatttttactttttttcatccccaatttttccaaaatggcagtaagtgatggtggacaatgatgcttgcagggatagagggggagtcataagtcaaatctgccttggttagtagctttgttagcttgaaatagtttcccaacagcctctgttttaaaaaggatcacagatcgacaatctacattttatttttgtcttagaaagttttgccatcacctttctactatggtaattgagagtcatagtgattttttgtattctcctgatacattgatatgggagaaagcttagatatcaatgggccaggagagtcagaaccatccagaaactttgcaatactcctgggaagggctctatgtaacaatttgccaagagcctatgagaaaagattcttaaatgaaaacttaaagagaaaaatttctagattgaagtaaaaccctcattggcagacttgctcatcctgcctctcctgataatgcacccacgctttaatatggatattgatgatcatgataataaatggctggactgagagagaattgtgaaaataccacaataggggaatataatatttagtaaaaattaactcttaatgctggtcttaatatattcattatttgtttttataatggcattggatgccatcatgttaaaaaatgtttcctgaaaacaatagacactgtggtctactagagggtatagggagggaggtgggttaaaaggctacctaccaggtactatctatgctaactaccagagggtcaggatccatattccaaactgtggcatcatgtaatattccaatgtaacaaatctacacacatacctccactatctaaaataaaagttgtggctgggcgtggtggctcacacctataatcccagcactttggaaggccgaggtgggtggaccgcccgaggtcaggagtttgagatctgtctggccaacatggtgaaaccccgtctctactaaaaatacaaaaaaaaaaaaaaaatgctgggcatggtggtgcatgcctgtaatcccagctatttgagatgctgaggcaggagaatcacctgagcccagaaggtgggagattgcagtgaattgagattgtgccaccgtactccagcctgggcaacagagtgagattctgtctcaaataaagtaaaatgaaaaataaaataaataaaatgttgtaatttttaaatgtttcctaaaattcttatagcsatgtatgcttttattttctgtatattatcccagtgccctacagaagtgacaactttacttgacatggatgttgtaagggagttctagtgtgacaacagacaaaccccagtagaacatgcatgtaatatattctacagacagatggccacagacagatagtccgattgtaaaatggaaagaaacactcatttttgcaaaa

SEQ ID NO: 699148 - DNA, 1310 bp, Homo sapiens
tattatttctttgttattgttaagaattcactcttgtattttttgtttatttattttgagacgaatatcggccataagcactggacttagccagcagcttgccaagtctaaggacgaacagaaggctctcactttgccacatctaagagctacatggctcttgtccattacagtaccattaaggtccagcagagagatgcaatcgtgattcattgtgrcctcaatctccctggtctcacctgggtggccttctcatctcagactcccaattccatcagactactcggacattctctgttttttttctagccctactttcagtttattttcacagtacttacagtgacttgctgttgttttcctcctttgttctttactctattttcctacgccccttcctgcgcgatgaagctaaccttttagagtttttttgacacattacatactgggtttgacaaatatatatagagagagagatcttaagtgtgatattaattacctttaactttgtttactcccacttatttggctgtttattgttctattattgtttattatatttttgttattgttatgttgtttgtttgtttggagaaagggtctcactctgtcacccagaatgactgcagcctcaaccctttggacttgagtaatcctcacgcctccaatgcctcccctttccccagtacctgagactacagacacaagccaccacaccagttgacttttgtattttttacttctactttttttattattattattttcatgtcttgagacagagtcttgctccatcggccaggctagagtgagcaatggtgtgatcttggctcaccacaacctctgcctaatgggttcaagtggttcttctgcctcagcctcctgagcagctaggactacaggcatgtcccactacaccaggctaatttttgtatttttaaatgtttgatggggaagtatgtgtaaagacagggttagaggttctgccatgttgcccaggctggtctcaacttcctctttttttttctcttctaatccaactttcagtttgtttccacagtacttagagtgacttgctattgttttaggttttacgttcttctctattttcctatgctcctttttgcatgctgaagtttacctttcagattttttctttttgtcacactccagccagagtgtgagagaaagagagaagattttaattgtgataattatcttttacctttgttcactcccacttatttattggtcttattattgtttgttattatttctttgttattgttaaatatttactgttgtgtttt

SEQ ID NO: 699149 - DNA, 1310 bp, Homo sapiens
tattatttctttgttattgttaagaattcactcttgtattttttgtttatttattttgagacgaatatcggccataagcactggacttagccagcagcttgccaagtctaaggacgaacagaaggctctcactttgccacatctaagagctacatggctcttgtccattacagtaccattaaggtccagcagagagatgcaatcgtgattcattgtgacctcaatctccctggtctcacctgggtggccttctcatctcagactcccaattccatcagactactcggacattctctgttttttttctagccctactttcagtttattttcacagtacttacagtgacttgctgttgttttcctcctttgttctttactctattttcctacgccccttcctgcgcgatgaagctaaccttttagagtttttttgacacattacatactgggtttgacaaatatatatakagagagagatcttaagtgtgatattaattacctttaactttgtttactcccacttatttggctgtttattgttctattattgtttattatatttttgttattgttatgttgtttgtttgtttggagaaagggtctcactctgtcacccagaatgactgcagcctcaaccctttggacttgagtaatcctcacgcctccaatgcctcccctttccccagtacctgagactacagacacaagccaccacaccagttgacttttgtattttttacttctactttttttattattattattttcatgtcttgagacagagtcttgctccatcggccaggctagagtgagcaatggtgtgatcttggctcaccacaacctctgcctaatgggttcaagtggttcttctgcctcagcctcctgagcagctaggactacaggcatgtcccactacaccaggctaatttttgtatttttaaatgtttgatggggaagtatgtgtaaagacagggttagaggttctgccatgttgcccaggctggtctcaacttcctctttttttttctcttctaatccaactttcagtttgtttccacagtacttagagtgacttgctattgttttaggttttacgttcttctctattttcctatgctcctttttgcatgctgaagtttacctttcagattttttctttttgtcacactccagccagagtgtgagagaaagagagaagattttaattgtgataattatcttttacctttgttcactcccacttatttattggtcttattattgtttgttattatttctttgttattgttaaatatttactgttgtgtttt

SEQ ID NO: 699150 - DNA, 1310 bp, Homo sapiens
tattatttctttgttattgttaagaattcactcttgtattttttgtttatttattttgagacgaatatcggccataagcactggacttagccagcagcttgccaagtctaaggacgaacagaaggctctcactttgccacatctaagagctacatggctcttgtccattacagtaccattaaggtccagcagagagatgcaatcgtgattcattgtgacctcaatctccctggtctcacctgggtggccttctcatctcagactcccaattccatcagactactcggacattctctgttttttttctagccctactttcagtttattttcacagtacttacagtgacttgctgttgttttcctcctttgttctttactctattttcctacgccccttcctgcgcgatgaagctaaccttttagagtttttttgacacattacatactgggtttgacaaatatatatagagagagagatcttaagtgtgatattaattacctttaactttgtttactcccacttatttggctgtttattgttctattattgtttattatatttttgttattgttatgttktttgtttgtttggagaaagggtctcactctgtcacccagaatgactgcagcctcaaccctttggacttgagtaatcctcacgcctccaatgcctcccctttccccagtacctgagactacagacacaagccaccacaccagttgacttttgtattttttacttctactttttttattattattattttcatgtcttgagacagagtcttgctccatcggccaggctagagtgagcaatggtgtgatcttggctcaccacaacctctgcctaatgggttcaagtggttcttctgcctcagcctcctgagcagctaggactacaggcatgtcccactacaccaggctaatttttgtatttttaaatgtttgatggggaagtatgtgtaaagacagggttagaggttctgccatgttgcccaggctggtctcaacttcctctttttttttctcttctaatccaactttcagtttgtttccacagtacttagagtgacttgctattgttttaggttttacgttcttctctattttcctatgctcctttttgcatgctgaagtttacctttcagattttttctttttgtcacactccagccagagtgtgagagaaagagagaagattttaattgtgataattatcttttacctttgttcactcccacttatttattggtcttattattgtttgttattatttctttgttattgttaaatatttactgttgtgtttt

SEQ ID NO: 699151 - DNA, 1310 bp, Homo sapiens
tattatttctttgttattgttaagaattcactcttgtattttttgtttatttattttgagacgaatatcggccataagcactggacttagccagcagcttgccaagtctaaggacgaacagaaggctctcactttgccacatctaagagctacatggctcttgtccattacagtaccattaaggtccagcagagagatgcaatcgtgattcattgtgacctcaatctccctggtctcacctgggtggccttctcatctcagactcccaattccatcagactactcggacattctctgttttttttctagccctactttcagtttattttcacagtacttacagtgacttgctgttgttttcctcctttgttctttactctattttcctacgccccttcctgcgcgatgaagctaaccttttagagtttttttgacacattacatactgggtttgacaaatatatatagagagagagatcttaagtgtgatattaattacctttaactttgtttactcccacttatttggctgtttattgttctattattgtttattatatttttgttattgttatgttgtttgtttgtttggagaaagggtctcactctgtcacccagaatgactgcagcctcaaccctttggacttgagtaatcctcacgcctccaatgcctcccctttccccagtacctgagactacagacacaagccaccacaccagttgacttttgtattttttacttctactttttttattattattattttcatgtcttgagacagagtcttgctccatcggccaggctagagtgagcaatggtgtgatcttggctcaccacaacctctgcctaatgggttcaagtggttcttctgcctcagcctcctgagcagctaggactacaggcatgtcccactacaccaggctaatttttgtatttttaaatgtttgatgrggaagtatgtgtaaagacagggttagaggttctgccatgttgcccaggctggtctcaacttcctctttttttttctcttctaatccaactttcagtttgtttccacagtacttagagtgacttgctattgttttaggttttacgttcttctctattttcctatgctcctttttgcatgctgaagtttacctttcagattttttctttttgtcacactccagccagagtgtgagagaaagagagaagattttaattgtgataattatcttttacctttgttcactcccacttatttattggtcttattattgtttgttattatttctttgttattgttaaatatttactgttgtgtttt

SEQ ID NO: 699152 - DNA, 1310 bp, Homo sapiens
tattatttctttgttattgttaagaattcactcttgtattttttgtttatttattttgagacgaatatcggccataagcactggacttagccagcagcttgccaagtctaaggacgaacagaaggctctcactttgccacatctaagagctacatggctcttgtccattacagtaccattaaggtccagcagagagatgcaatcgtgattcattgtgacctcaatctccctggtctcacctgggtggccttctcatctcagactcccaattccatcagactactcggacattctctgttttttttctagccctactttcagtttattttcacagtacttacagtgacttgctgttgttttcctcctttgttctttactctattttcctacgccccttcctgcgcgatgaagctaaccttttagagtttttttgacacattacatactgggtttgacaaatatatatagagagagagatcttaagtgtgatattaattacctttaactttgtttactcccacttatttggctgtttattgttctattattgtttattatatttttgttattgttatgttgtttgtttgtttggagaaagggtctcactctgtcacccagaatgactgcagcctcaaccctttggacttgagtaatcctcacgcctccaatgcctcccctttccccagtacctgagactacagacacaagccaccacaccagttgacttttgtattttttacttctactttttttattattattattttcatgtcttgagacagagtcttgctccatcggccaggctagagtgagcaatggtgtgatcttggctcaccacaacctctgcctaatgggttcaagtggttcttctgcctcagcctcctgagcagctaggactacaggcatgtcccactacaccaggctaatttttgtatttttaaatgtttgatggggaagtatgtgtaaagacagggttagaggttctgccatgttgcccaggctggtctcaacttcctctttttttttytcttctaatccaactttcagtttgtttccacagtacttagagtgacttgctattgttttaggttttacgttcttctctattttcctatgctcctttttgcatgctgaagtttacctttcagattttttctttttgtcacactccagccagagtgtgagagaaagagagaagattttaattgtgataattatcttttacctttgttcactcccacttatttattggtcttattattgtttgttattatttctttgttattgttaaatatttactgttgtgtttt

SEQ ID NO: 699153 - DNA, 531 bp, Homo sapiens
gtaaaaatgaatacatagcctcatcccagtagaatttaaattctatgcaaacaggaaatggagttctcctaccacaccayagtatcctcagaatataaactgggtttggcaacatagtagatctgtataaataaacgaacccagacttatatccccttgtggatttttcaggccatttgtctttcttattcactcttgttgtcactacgttagtctgctgctgtttattaatagtatctaggggaagaaggccagagaatatcaaggtaaggtccacagcctttaaagggccacttgtcagggtataagatttcatgggttatctcttaattttgaatttcattttttaaaaattataaacttgcttattttccattagcttaaagcagccacttacatgtaattggaattaagctggattttaaaatttacctggggttcgctcacgcctgtaatcctagcacgttgggaggccagggtggatcagttgagcccaggagttcgagaccaccctgggcaacatggtgaagc

SEQ ID NO: 699154 - DNA, 531 bp, Homo sapiens
gtaaaaatgaatacatagcctcatcccagtagaatttaaattctatgcaaacaggaaatggagttctcctaccacaccatagtatcctcagaatataaactgggtttggcaacatagtagatctgtataaataaacgaacccagacttatatccccttgtggatttttcaggccatttgtctttcttattcactcttgttgtcactacgttagtctgctgctgtttattaatagtatctaggggaagaaggccagagaatatcaaggtaaggtccacagcctttaaagggccacttgtcagggtataagatttcatgggttatctcttaattttgaatttcattttttaaaaattataaacttgcttattttccattagcttaaagcagccacttacatgtaattggaattaagctggattttaaaatttacctggggttcgctcacgcctgtaatcctagcacgttgggaggccagggtggatcagttgagcccaggagttcgagaccascctgggcaacatggtgaagc

SEQ ID NO: 699155 - DNA, 624 bp, Homo sapiens
tgaaaccccgtcttaactaaaaatacaaaaattagccaggcatggtggtgcatgcttgtaatcccagctactcaggaggctgaggcaggagaatcgcttgaacctgggaggcggaggttgcagtgagccgatatcttgccactgcaggccagcctgggtgacagaatgagactccatctcaaaataaataaataaataaataaataaataaataaataaatataattgaaggcaaatttaagcatattttttcaaaaaagaaaaagagggagatggagtaggagaaataaaaaagaaggaagaggaggaggaggaggaagaaagagcctgcatttctaattgtcataattaaatttccataagcagatactattttttttaaaaaaaacctaattagaattttacgggtctgataagaaagaaaatgctaaaaaaaatatgratactcagtgtgttcctattttgtttgaaagcctagaaaaaaacaatatcagagactattctacttagattttttggacaaagaaatcttaagatttttaactcgggaacatttaattcctcacaatttcatgtctgctgttctttcctaaaatcattattgtgaagcagacatgactatat

SEQ ID NO: 699156 - DNA, 624 bp, Homo sapiens
tgaaaccccgtcttaactaaaaatacaaaaattagccaggcatggtggtgcatgcttgtaatcccagctactcaggaggctgaggcaggagaatcgcttgaacctgggaggcggaggttgcagtgagccgatatcttgccactgcaggccagcctgggtgacagaatgagactccatctcaaaataaataaataaataaataaataaataaataaataaatataattgaaggcaaatttaagcatattttttcaaaaaagaaaaagagggagatggagtaggagaaataaaaaagaaggaagaggaggaggaggaggaagaaagagcctgcatttctaattgtcataattaaatttccataagcagatactattttttttaaaaaaaacctaattagaattttacgggtctgataagaaagaaaatgctaaaaaaaatatgaatactcartgtgttcctattttgtttgaaagcctagaaaaaaacaatatcagagactattctacttagattttttggacaaagaaatcttaagatttttaactcgggaacatttaattcctcacaatttcatgtctgctgttctttcctaaaatcattattgtgaagcagacatgactatat

SEQ ID NO: 699157 - DNA, 641 bp, Homo sapiens
tctcagcctcccaacatgctgggattacaagtatgagccactaaataaataatttaaataagtcttgctatctactggatacccctaccttaattttctttttcaagaattgtctgaattatttttgaatacttaattcatgtgtaatttaggactgttttgtcaatttgaaaataaatttctttaagattctggttagaattatattgaatatgtgaattaatttgagmataatcaatgtctttgaaaattaatttttgcatatctatatagttcaaatccttcactaaagtattatagttatgtaatttcacaatatataacatcatgaaacacttttctgagacttagtcataatcaaaatatagttcttatttgtaataagaaagggaatttttttaattccacattttaatggaccagtgctggtgaataggtgtaattttagcccatatatattgatattgtactcagcaagcttatcaaatttgtgttatttcaaaagttttcctgttgatttttaaattatctaggtggaattactactattagtatataatttctttaaatttccatccaaatttctatgtaacaatatttttgtcaaagtgtattagttaaatgacctaacgaaattgtca

SEQ ID NO: 699158 - DNA, 642 bp, Homo sapiens
acacagaggtttgagatggtttccacattggagtttcttttccttttctgtttattatgagaacattgcctggctactactctgttcccagaaggagaatgagaaaataatggagtcagtttgtccttgcctgatccagcctactttgtccaaactctaactaattccaagatgcagaacttggcccatctcatatcaccagagccatccagcaaacccagcttagaaaaactgaatccaaagacatgtgagatatcaatatgtaatgtagtgttggagaggtttctctggcagaaaaacctaactgatataggtactctgcaaaaccaagcgtgtgggaaatatgtccacccttgttgtgtcaggaatagaggagccaaaagaaaaatagataaggaatggcaaagttttgtcatgcaaggtagataattaaaggtagaggctgggcgcggtggctcacgcctgtaatcccagcactttgggaggctgaggtgggcagatcaagagatcaggggatcgagaccatcctggctaacacggtgaaaccccgtctctacaaaaaatacaaaaaattagccaggcstggtggcgggcacctgtagtcccagctacttgggaggctgaggcaggagaatggtgtga

SEQ ID NO: 699159 - DNA, 1527 bp, Homo sapiens
acaataaaattaaaacaaaataaatgtgtaaattaaaaaattaatattccagaccataaaaacatgcagcatggaaatgactgtcattagataagaacaggttaaacttttaattttatatgaaatgaacataaagataccaattttaaacccagcacatgaaaatttgatatcaatagaaacaggaaaggaaaaagatctgcaataaagcattaaaatagagtaaaaagaagaaatgagaagatagaaaacaatgcaatcacaattgtattgagtgtaaaaatgtttctcaatagtaattttgagattacattattaaataaagtgtcaaaaatgaaatatttgttttctacaagagacatttaaaaataaaatgcagaagtgttgaaaatgcagaggtggaaaacacacaatttagaaatgataaatgcttgaagtgatggatcctaaatatcttgacttttattacacattatatacatgaaacaaaatatcacatataccttacaaagttgaacaaatattatgtatcaaaataaaataaaataaaatgtaacaaaattagggaatttaccaagggtgaaataaaatttaaagcaaaaattttcatggcaaacttttttaatatcagtaaaaataaccataaaaaagtaatgaccatgaataaaaatgcaattatcaacattgcttcaaattaaatgcaactacaaataaaataattatgagcataaagaaataaatcagtaattgtaagtgtaggtttactaatttaactattggaaattgtcatatattaaagacgtaaacaagtaatatcattaatattgttcatctaatgcatatacatttaactttaacacatcaaactcatttaaagaaaatcattcacaaaaatggatcatgtattgggccaaatgaatcttatcctaggccaaatatcatacacatatgctgtctgactcaaataaaataagatatcaatacaaaagttacctttaaaaatctcattattgttaaatatctcttgcattaaaaggaaagtgtaaagaatattttgaaattatttgaattgaatacaatataagaaccatgtgccaacatttgtggaatacatataagttgatatttgggcagaaaacatacaattttgaatacctttactaaaaaaaaaaagaaagattggacaaagctagtgaaacaaacaacttttgccttcaaaagtatggcaaaccattatcctaagcaaattaacacagaaaccgaaaaccaactatcacrtgctcttgcttataagcgggagctaaacattggttcacacagacgtaaaaatgggaacaatagacactggcgactaagtggagagggagggatggcaggggtcagggggcaaggactgtcaaactacctattgagtaccatgctcactacctgggtgatgggttcaattataccccaaacctcagcatcaaggaatataacctactaacaaacctgcacctgtaccccttaatctaaaatagaagttaa

SEQ ID NO: 699160 - DNA, 2000 bp, Homo sapiens
acactggctggcacccaccacagaacatctggagtttgttagacagccttagtttatttttttcactggccctggccccttcctctgatgcagcctctccaagtgctgctttgccatgaatgagtcaaggagacaagttaccctgtagggggtgggggggcggtggttagagggggtaagtaaattgggaccatattagaaggtgacccccaaatctatatatccctcattgcttcacctctttctgacaataggaatcacatgtgaacgccaagagcctatcaggcagtggcagctccatttgctggaaagcctggtcaatgctgactgcttccctgttaggaaatagcctttagactgaggcacattccagcaattcatggactagaagctttaaattaaaacaacattgatgccatatcctctttccaaaaggcctctcccttgtccaaaagttagtacacactcttggaggaattaaagaatcaaatgcctttggcaagactccttccttcttgctcacagcatccagatacgctttgaaagggcaggaatgtaaaagggaggcaggagatgactgtaggaaggactcctgagaactgttattatttttctcttcatacaggacacatcgctacagaaaattcaaggcatgtggtttgatataaagacactgagaattgtttagctacttccttctaaggttataagctcagagattaattaatttccttttctttwctttcttttcttctttttcttttgagacggactctcgtcctcttgtcaggctagagtgctgtggcgtgatctcagctcactgcaagctccacctcctggattcaagtgattctcctgcctcagcctcccaagtatctgggactacagaggtgcaccaccacatccagctaatttttgtatttttagtggagacggggtttcaccatgttggccaggatggtctcgatttcctgacctcatgatccacccgccttggcctcccaaagtgctgggattacaggcgtgagccaccgtgcccggccaatttccttaattttcacataatgaaaacatatgttctttggaggccactaatcaaaaaccactgtaaatgaggtatggtattctggtctgctagatattcaattctatttggtgtcttaagtgaagagatcaagaactgcttaaatcataggcctatgtattcaagcctaactacttaagataagtgatattgctgaatatataaactcccacagcagtgaactcctttctccaataatatcctccaatttgctattatcagctttgatgagccaaatttcagttttcaactactggacggatgtctttcataataagcacattcttcctatcttacataacaggtagtcaaaatattagatgatgtcctcttcttgctaaaaagtattttaggaccctggaaaagttttatttcacttgtgaataagcaatgggttactttttgctggtcaactatccatcctgcagaaaaaagacatcttttggtattttctcagcaaagtgtgcaacataaatacatataaagactatttctaagcagttttaatttgatccacagagaaaataactttgttgtttaaatattgattcttgttaatataaacattatgccaaaataccatcaattgatgactgacctccaaaaatagaagaaaataaatttctttacttgaaaagctctttctcggtctcattacttgagggcaaagagcacacctgggcagccaaaatgtacagacaacgtgactgggaatgcaggagacagccacggaggctgggacgcggatgctgcgcccagccaggagcactcaacgaggagcactgccgttcaagcagggctccgatgtaaacatccagcactctccttatcttccaagggaaatgtttttctccatttctttattgtggtaaaatatgtctaacataaaagttaccattttaacgatttttaagtt

SEQ ID NO: 699161 - DNA, 2000 bp, Homo sapiens
acactggctggcacccaccacagaacatctggagtttgttagacagccttagtttatttttttcactggccctggccccttcctctgatgcagcctctccaagtgctgctttgccatgaatgagtcaaggagacaagttaccctgtagggggtgggggggcggtggttagagggggtaagtaaattgggaccatattagaaggtgacccccaaatctatatatccctcattgcttcacctctttctgacaataggaatcacatgtgaacgccaagagcctatcaggcagtggcagctccatttgctggaaagcctggtcaatgctgactgcttccctgttaggaaatagcctttagactgaggcacattccagcaattcatggactagaagctttaaattaaaacaacattgatgccatatcctctttccaaaaggcctctcccttgtccaaaagttagtacacactcttggaggaattaaagaatcaaatgcctttggcaagactccttccttcttgctcacagcatccagatacgctttgaaagggcaggaatgtaaaagggaggcaggagatgactgtaggaaggactcctgagaactgttattatttttctcttcatacaggacacatcgctacagaaaattcaaggcatgtggtttgatataaagacactgagaattgtttagctacttccttctaaggttataagctcagagattaattaatttccttttcttttytttcttttcttctttttcttttgagacggactctcgtcctcttgtcaggctagagtgctgtggcgtgatctcagctcactgcaagctccacctcctggattcaagtgattctcctgcctcagcctcccaagtatctgggactacagaggtgcaccaccacatccagctaatttttgtatttttagtggagacggggtttcaccatgttggccaggatggtctcgatttcctgacctcatgatccacccgccttggcctcccaaagtgctgggattacaggcgtgagccaccgtgcccggccaatttccttaattttcacataatgaaaacatatgttctttggaggccactaatcaaaaaccactgtaaatgaggtatggtattctggtctgctagatattcaattctatttggtgtcttaagtgaagagatcaagaactgcttaaatcataggcctatgtattcaagcctaactacttaagataagtgatattgctgaatatataaactcccacagcagtgaactcctttctccaataatatcctccaatttgctattatcagctttgatgagccaaatttcagttttcaactactggacggatgtctttcataataagcacattcttcctatcttacataacaggtagtcaaaatattagatgatgtcctcttcttgctaaaaagtattttaggaccctggaaaagttttatttcacttgtgaataagcaatgggttactttttgctggtcaactatccatcctgcagaaaaaagacatcttttggtattttctcagcaaagtgtgcaacataaatacatataaagactatttctaagcagttttaatttgatccacagagaaaataactttgttgtttaaatattgattcttgttaatataaacattatgccaaaataccatcaattgatgactgacctccaaaaatagaagaaaataaatttctttacttgaaaagctctttctcggtctcattacttgagggcaaagagcacacctgggcagccaaaatgtacagacaacgtgactgggaatgcaggagacagccacggaggctgggacgcggatgctgcgcccagccaggagcactcaacgaggagcactgccgttcaagcagggctccgatgtaaacatccagcactctccttatcttccaagggaaatgtttttctccatttctttattgtggtaaaatatgtctaacataaaagttaccattttaacgatttttaagtt

SEQ ID NO: 699162 - DNA, 2000 bp, Homo sapiens
acactggctggcacccaccacagaacatctggagtttgttagacagccttagtttatttttttcactggccctggccccttcctctgatgcagcctctccaagtgctgctttgccatgaatgagtcaaggagacaagttaccctgtagggggtgggggggcggtggttagagggggtaagtaaattgggaccatattagaaggtgacccccaaatctatatatccctcattgcttcacctctttctgacaataggaatcacatgtgaacgccaagagcctatcaggcagtggcagctccatttgctggaaagcctggtcaatgctgactgcttccctgttaggaaatagcctttagactgaggcacattccagcaattcatggactagaagctttaaattaaaacaacattgatgccatatcctctttccaaaaggcctctcccttgtccaaaagttagtacacactcttggaggaattaaagaatcaaatgcctttggcaagactccttccttcttgctcacagcatccagatacgctttgaaagggcaggaatgtaaaagggaggcaggagatgactgtaggaaggactcctgagaactgttattatttttctcttcatacaggacacatcgctacagaaaattcaaggcatgtggtttgatataaagacactgagaattgtttagctacttccttctaaggttataagctcagagattaattaatttccttttcttttctttcttttcttctttttcttttgagacrgactctcgtcctcttgtcaggctagagtgctgtggcgtgatctcagctcactgcaagctccacctcctggattcaagtgattctcctgcctcagcctcccaagtatctgggactacagaggtgcaccaccacatccagctaatttttgtatttttagtggagacggggtttcaccatgttggccaggatggtctcgatttcctgacctcatgatccacccgccttggcctcccaaagtgctgggattacaggcgtgagccaccgtgcccggccaatttccttaattttcacataatgaaaacatatgttctttggaggccactaatcaaaaaccactgtaaatgaggtatggtattctggtctgctagatattcaattctatttggtgtcttaagtgaagagatcaagaactgcttaaatcataggcctatgtattcaagcctaactacttaagataagtgatattgctgaatatataaactcccacagcagtgaactcctttctccaataatatcctccaatttgctattatcagctttgatgagccaaatttcagttttcaactactggacggatgtctttcataataagcacattcttcctatcttacataacaggtagtcaaaatattagatgatgtcctcttcttgctaaaaagtattttaggaccctggaaaagttttatttcacttgtgaataagcaatgggttactttttgctggtcaactatccatcctgcagaaaaaagacatcttttggtattttctcagcaaagtgtgcaacataaatacatataaagactatttctaagcagttttaatttgatccacagagaaaataactttgttgtttaaatattgattcttgttaatataaacattatgccaaaataccatcaattgatgactgacctccaaaaatagaagaaaataaatttctttacttgaaaagctctttctcggtctcattacttgagggcaaagagcacacctgggcagccaaaatgtacagacaacgtgactgggaatgcaggagacagccacggaggctgggacgcggatgctgcgcccagccaggagcactcaacgaggagcactgccgttcaagcagggctccgatgtaaacatccagcactctccttatcttccaagggaaatgtttttctccatttctttattgtggtaaaatatgtctaacataaaagttaccattttaacgatttttaagtt

SEQ ID NO: 699163 - DNA, 2000 bp, Homo sapiens
acactggctggcacccaccacagaacatctggagtttgttagacagccttagtttatttttttcactggccctggccccttcctctgatgcagcctctccaagtgctgctttgccatgaatgagtcaaggagacaagttaccctgtagggggtgggggggcggtggttagagggggtaagtaaattgggaccatattagaaggtgacccccaaatctatatatccctcattgcttcacctctttctgacaataggaatcacatgtgaacgccaagagcctatcaggcagtggcagctccatttgctggaaagcctggtcaatgctgactgcttccctgttaggaaatagcctttagactgaggcacattccagcaattcatggactagaagctttaaattaaaacaacattgatgccatatcctctttccaaaaggcctctcccttgtccaaaagttagtacacactcttggaggaattaaagaatcaaatgcctttggcaagactccttccttcttgctcacagcatccagatacgctttgaaagggcaggaatgtaaaagggaggcaggagatgactgtaggaaggactcctgagaactgttattatttttctcttcatacaggacacatcgctacagaaaattcaaggcatgtggtttgatataaagacactgagaattgtttagctacttccttctaaggttataagctcagagattaattaatttccttttcttttctttcttttcttctttttcttttgagacggactctcgtcctcttgtcaggctagagtgctgtggcgtgatctcagctcactgcaagctccacctcctggattcaagtgattctcctgcctcagcctcccaagtatctgggactacagaggtgcaccaccacatccagctaatttttgtatttttagtggagacggggtttcaccatgttggccaggatggtctcgatttcctgacctcatgatccacccgccttggcctcccaaagtgctgggattacaggcgtgagccaccgtgcccggccaatttccttaattttcacataatgaaaacatatgttcttyggaggccactaatcaaaaaccactgtaaatgaggtatggtattctggtctgctagatattcaattctatttggtgtcttaagtgaagagatcaagaactgcttaaatcataggcctatgtattcaagcctaactacttaagataagtgatattgctgaatatataaactcccacagcagtgaactcctttctccaataatatcctccaatttgctattatcagctttgatgagccaaatttcagttttcaactactggacggatgtctttcataataagcacattcttcctatcttacataacaggtagtcaaaatattagatgatgtcctcttcttgctaaaaagtattttaggaccctggaaaagttttatttcacttgtgaataagcaatgggttactttttgctggtcaactatccatcctgcagaaaaaagacatcttttggtattttctcagcaaagtgtgcaacataaatacatataaagactatttctaagcagttttaatttgatccacagagaaaataactttgttgtttaaatattgattcttgttaatataaacattatgccaaaataccatcaattgatgactgacctccaaaaatagaagaaaataaatttctttacttgaaaagctctttctcggtctcattacttgagggcaaagagcacacctgggcagccaaaatgtacagacaacgtgactgggaatgcaggagacagccacggaggctgggacgcggatgctgcgcccagccaggagcactcaacgaggagcactgccgttcaagcagggctccgatgtaaacatccagcactctccttatcttccaagggaaatgtttttctccatttctttattgtggtaaaatatgtctaacataaaagttaccattttaacgatttttaagtt

SEQ ID NO: 699164 - DNA, 2000 bp, Homo sapiens
acactggctggcacccaccacagaacatctggagtttgttagacagccttagtttatttttttcactggccctggccccttcctctgatgcagcctctccaagtgctgctttgccatgaatgagtcaaggagacaagttaccctgtagggggtgggggggcggtggttagagggggtaagtaaattgggaccatattagaaggtgacccccaaatctatatatccctcattgcttcacctctttctgacaataggaatcacatgtgaacgccaagagcctatcaggcagtggcagctccatttgctggaaagcctggtcaatgctgactgcttccctgttaggaaatagcctttagactgaggcacattccagcaattcatggactagaagctttaaattaaaacaacattgatgccatatcctctttccaaaaggcctctcccttgtccaaaagttagtacacactcttggaggaattaaagaatcaaatgcctttggcaagactccttccttcttgctcacagcatccagatacgctttgaaagggcaggaatgtaaaagggaggcaggagatgactgtaggaaggactcctgagaactgttattatttttctcttcatacaggacacatcgctacagaaaattcaaggcatgtggtttgatataaagacactgagaattgtttagctacttccttctaaggttataagctcagagattaattaatttccttttcttttctttcttttcttctttttcttttgagacggactctcgtcctcttgtcaggctagagtgctgtggcgtgatctcagctcactgcaagctccacctcctggattcaagtgattctcctgcctcagcctcccaagtatctgggactacagaggtgcaccaccacatccagctaatttttgtatttttagtggagacggggtttcaccatgttggccaggatggtctcgatttcctgacctcatgatccacccgccttggcctcccaaagtgctgggattacaggcgtgagccaccgtgcccggccaatttccttaattttcacataatgaaaacatatgttctttggaggccactaatcaaaaaccactgtaaatgaggtatggtattctggtctgctagatattcaattctatttggtgtcttaagtgaagagatcaagaactgcttaaatcataggcctatgtattcaagcctaactacttaagataastgatattgctgaatatataaactcccacagcagtgaactcctttctccaataatatcctccaatttgctattatcagctttgatgagccaaatttcagttttcaactactggacggatgtctttcataataagcacattcttcctatcttacataacaggtagtcaaaatattagatgatgtcctcttcttgctaaaaagtattttaggaccctggaaaagttttatttcacttgtgaataagcaatgggttactttttgctggtcaactatccatcctgcagaaaaaagacatcttttggtattttctcagcaaagtgtgcaacataaatacatataaagactatttctaagcagttttaatttgatccacagagaaaataactttgttgtttaaatattgattcttgttaatataaacattatgccaaaataccatcaattgatgactgacctccaaaaatagaagaaaataaatttctttacttgaaaagctctttctcggtctcattacttgagggcaaagagcacacctgggcagccaaaatgtacagacaacgtgactgggaatgcaggagacagccacggaggctgggacgcggatgctgcgcccagccaggagcactcaacgaggagcactgccgttcaagcagggctccgatgtaaacatccagcactctccttatcttccaagggaaatgtttttctccatttctttattgtggtaaaatatgtctaacataaaagttaccattttaacgatttttaagtt

SEQ ID NO: 699165 - DNA, 598 bp, Homo sapiens
tgtcacttgcttcatattccattaacatccagagatgctaaaaagtgaaaaaaaaaaaaaaaaagaagaagaagaagaagagaactaggctacaagaaattttaaraagagacactggcctaatgggtcacatgtacatccctggaccagcatggtgcagaagcgactgatgggggtgttgtgtgggggagaatctggtttccaaggacaaagtgaagaaattggggaaaaggaaaagagcaaatattgtgtatttattcaacagaccattcgggtcattgaaaatcatgtttttgaagacaaattaatgatgcagagaaaatgcttactatttaatgttaaagaagcagaaaagaggataaaaacagggcttgtctatgtctaaaagggttatgggtatttttcatttttttgtgtgtgtatctttgtattcttcaagttctctgcaatcaaatactttaacaaacagaaaactaaaacactgctattctagaaggaacaaaggataatcactattctatctggtttatttggggtatctcttatcacttcctagaaaggttttttgttttttgtttttatttttgttatttttttt

SEQ ID NO: 699166 - DNA, 673 bp, Homo sapiens
tctgtcacccaagctggagtgcagtggcacaatcttggctcactgcaacctccacctcttaggttcaggtgattctcttgcctcagcctccagagtagctgggactacaggygctcgctgccatgcctggctagttttttatatttttttagtagagacgaggtttcaccagcccaggctggtgttgaactcctgagctcagtcagtccttcctccttggcttcccaaactgttgggattacaggcgtgagccaccacacccagcacatgtgtgcatacatactttttacaaaattggaagaagtataattcatttgctaaatattttcacttatgccatgaaatcagattttatctttgtgtataaaaatacctgctctgctggggcttctagttgaaaactaatgaattttaaaaattaatttagtatttagccacctattcttttttctaattgtttcttgtagcttttgctttgattggaataattttactctaggaataaagttgtgtcatctgcaaaaatgaatcatatgtacacatctgattttcttacatttgtatctcctttttctcttcaaattacattgccctctaccattgatgggaacctgggtaataaaaaaaaaagaaaaaaaagaaacaaattgcattgtgtaccacctccaaagca

SEQ ID NO: 699167 - DNA, 1710 bp, Homo sapiens
taattccccagaaatcattaccaatgatgataacagcaaatgtttatatagcatttagcacaaaccaggcacttctctgtgtatgtgtgtatatgtgtgtgtgtgtgtatacattaacatatttagaatctcacaacaatcaatgacttaggtactatcatcataacaattgtacagatggaaaactgaaacagaggttgtttgcccaagatcacataattgttaagttgcagagtgaggattcaaatccaggcaatatgacttcactaagttatattccctcttacttattaaatcacattaaaaagccaaattcataaaagatgcttaatgtatgctacttggcaattatttcctcaccaggaatcacaaaagggccaacattactaaaacaagtattggcttctgctgcactgctttttttccccagatcacaaagaagtatgaaaagggagtgatctcacagtttaaaagatctaacaaaggtcaaaattcccctgcattagctttgtaggtcaacagatggcacgtgtatgtctataaagatgatccattaatgaaacataaactaggcagctccatgacattaaaatgggagtcttcctacatcaccactcagttttcttgggtcttccttaggccaagttaggatcattagaggcctatgtcctgaaagactgccctttcctcatatgtaattctaaataatagtaaaacagaaaattgatgtttccagtaataagagctatcaattatacaactttcactatgcagtgcttcatatatattaaatcatttaattttcacaaaaatctcaatgcttatgtttacagccatagtatatgctataataccataatatatacaatactttatagcagaggtcactgaggcacaaagatgttaaataatctgcataggtcaggtgcggtggctcacgcctgtaatcccagcactttgggagaccgaagcgggcggatcacaaggtcaggagatcgagaccatcccggctaacacagtgaaaccccacctctactaaaaatacaaaaaattgcctgggcgtggtggtgggcgcctgtagccccagctacttgggaggctgaggcaggagaatggcgtgaacccaggaggcggagcttgcagtgagccgagatagcgccactgcactccagcctgggtgacagagtgagactccatctcaaaaaaaaaaaaaaaaaaaaaatttgcataaggccctgttgctgagtgacttgggacgggacctgaattcaaacccagagagtttggcccctaatttatgttcttaactaccacatgatgcagcccattttactcatttccctaccttcctccaagatctttgggaaatataacattctgcattagaaaaatgcctctgttttgctggcctctaagtatgtgtttggaaatttttgggggtgtaatttagcattggtttcactcagattcctgccattaaatgcgtcttgttttacattctttcctatacttagaaaaagatgctcttttcctgacttagactaaatgactatttggtcaccagagctggaaaatgaaagaacttaaaacctctgtaayacatttttgacaaagctttttagaatgaggagacatgctaattaccttttcatattcttcttcagagggattgtatttccttagccactctgcaagtggtttatctttaaa

SEQ ID NO: 699168 - DNA, 2139 bp, Homo sapiens
tagtaatgaaggtagctacctcatacctatgaccagattagtccttcaattaattaaacatataaataattatattctttaatggaatgcatttttcttgatagataaatatccacccaactacaaggtgtaggaggaaaaaacagaaagggtaagaagaatataaatcacagagcaatgggaacctgtgctctgtgatgtcagggttttctccattcttgtagaaaagatagtccaagtcatcaggttatgatcaagttcacactattattattataaatgatcgaccctgagggttttaatgtcccaatggtagactctccttcttagaagctgaaatgtcccctcatacaccgccctggaattttttggctgcttctcctgagaaagaaactgaaggtgatggtcggcagagatatgggcctggtcactgcagaagcagatacactatgagctcctgaaaggccctgtcagtttctgcaaggagagatgctttttaattttaaaaaatgtcatcaaatgacgagcagttaaacaatttgctattacaaatctttgtagggaggaactagggtggtggtttctaatctgttagggaatgaagtaggaaaagacacgggcaaggataccacccagaacccgggtactgcactcaggcaatgcagcaactactgcagcatgttgtaattagcaaaccccaaggtgtggccacttcgaggcccaattaagaaaaaaaacacaaactcgaaaatgtttcatcttgtggatggaaaagaggttttgtactgcacctctttcaggatgccttcctaaccatcccccaaccctgcaaggagcagtaaaatcacttttgcaaatgttttctgtctcaggcctgcagagaaatgacataatctgcaaatgagaggttcaggcaggtgacccaaggcagtgaggagaaaatgtggtacaaacttctggcaattgtccaaagcatcgaagcatctgaaataactgtaggttttcctctgtcagccataaaaatgggtgagatgagactaaaagatgcaagcctcctttgaatccagagagaaaacacctagaaacagagagtagatctcctagccccgttttactgcattcaggggaaattcagaaaaaatcatgtgggtctcactgaaaactgtttcctaggtttgatgtggaaattgatgcctttaatctccgagttgtgatggcagttggcctggtgcgtgcccccacggtgtgaagaaaacttaaaaagtgatgctcttaaaaagatgtcaacatatcaacaaactcttataaaacaatatgttgatgggttgagtgtaaacaaatgagaaacagaaggatttagatttcctttsaaatacaccctagcttaagcatgaaggaggaaaacattgagttgtcaaaataggcttgaggttttgctgaacccagaaattctggagaatagtctgagatgtttttgccaaaccctaaatgctgcaggggtaaactttccctctaaccaattagataattgccatttcattctgtagatttctcaattgtttcttctttttcttttctttctttcttttttgcaaacaaaataattacactaatattttcataattaaataattacttcaacccctgaattaaaaactgcactgctgttcctgcggatacagtaggctgccagctgttttaaataacccttgagaacggtcaggttaaggactcaatttatgaccttataaattaacacaaggaaacctactccataatgcaacagacaattctatttataatgcttaattaatcccctccagtctctaacagaacccacttgtgacctttcatttcaacctcacccaaatgcaagtctcctgagatgagaagtgttaatatgtgaatgcggatagaatttgccggcattgtgggcaagtattaaattgctgacagtctggactggttggttcctgatagctcactcatcaaagtaagaaggaaatgtcaaggtgggcagcactgatgaaactcttcatcgaaatcctgagctggagagaggcagaaagaaagaaaacgtccatatctaacattgcccagaaatgcttgctctgaatttcagtcttggcagatgagaca

SEQ ID NO: 699169 - DNA, 649 bp, Homo sapiens
ctaccaaaggtcagatgtgggatttgaagccagagctctctgactccagaaatttaatttttagccttttctaagggtttaatttaaaagctgctccccaaacaawtctattgtttttatgtttatgttaaaactcatggggaaaagtctgcataccctctaaactgataacaatggatatattttgggttttgggggatgggaacctagattgtgtgtgcacgtggggattagttgggtgggctatcaaagataccttttaactttatctataatcttttcatttctgacaaggagaagatattctatgttgcatgtatatttaaaatttttttaaaaagaaaaaaaagatggctataaaacaacatggatgaacctggaggacgttattctaagtaaaaaaagccacacacagaaagagataatggatgatctcacttaaatctggaaatttaaaaagtcaaacacacagaaacagagagtagaatagtggttgctatgggctaggggtggggaaaatagggagatattgatcaaagggtacaaattttcaactagaagatgaacaagatctggggatctaatgtggagcatgggttgtgatggatctgtgaattagtttgattatgataatctttacacaacacat

SEQ ID NO: 699170 - DNA, 1286 bp, Homo sapiens
caggagttcaagaccagcctggccaacatgggggaaaccccatctctactaaaaatataaaaattagccatatgtggtggtgcacccctgtaatcccagctactccagtgggtgaggcacgagaattgcttgaacccggaaggaagaggttgcagtgaacccagatcatgccactgcactccagcctgggagacacaatgagactctgtctcaaaagaaaaaaaaataataataacaaaacgaaataccctgtgtaaattgttaagaaactatgagaggccaggcgcagtggctcacacctgtaatcccagcacttcgggaggctgaggcgggcagatcacgaggtcaggagatcgagaccatcctggctaacacggtgaaaccctgtctctactaaaaatacaaaaaaatttagccgggtgtggtggtgggcgcctgtagtcccagctactctggagctcaggaggctgaggtaggataaaggcatgaacctgggaggyggagcttgcagtgagccgagatggcgccactgcgctccagcctgggcgacagagcgagactctgtctcaaaaaaaaaaagaaaaaaaaaaaaaaaaaacaactatgagattatctggaaagtaatgacaaaagtggctgcagaaaaataatcaagacagctgaaaactagaatcagtctgtcaagaacatctagtttcttgatacattagagaacaacagagtttccacttgataagggaaaattttttgacagaaagacctgctgaaaatttaaaaaatttggttcataatgtcatagaatgtggtttgggagaaattttctgaaattgtcaatagagctgaaagcttgttataaaccattactaatttatggtgccataaaactagccacccttcccaatgataactacgaaactatgatttcagtttcaaaatacaaaataatttaatgagttaattttttagggataatataacttgaaaagttgtgttttagtatctatggatagcgatagaggaacagtagaaaagctatcagattcagacctctgcttgagttagaactacagcactcattagatgtatgactttggataagccatttacacttaattattttaggacaaattttaaaaaatgaaataataataataatatgtaaactatcattgtgaagactaaattgggctgtaagttaaagtactttgtaaacatcgtaatagtaatgctacttgttttaactgtctcccactgtgatttctgacacaagtaatgtataacgtgta

SEQ ID NO: 699171 - DNA, 1286 bp, Homo sapiens
caggagttcaagaccagcctggccaacatgggggaaaccccatctctactaaaaatataaaaattagccatatgtggtggtgcacccctgtaatcccagctactccagtgggtgaggcacgagaattgcttgaacccggaaggaagaggttgcagtgaacccagatcatgccactgcactccagcctgggagacacaatgagactctgtctcaaaagaaaaaaaaataataataacaaaacgaaataccctgtgtaaattgttaagaaactatgagaggccaggcgcagtggctcacacctgtaatcccagcacttcgggaggctgaggcgggcagatcacgaggtcaggagatcgagaccatcctggctaacacggtgaaaccctgtctctactaaaaatacaaaaaaatttagccgggtgtggtggtgggcgcctgtagtcccagctactctggagctcaggaggctgaggtaggataaaggcatgaacctgggaggcggagcttgcagtgagccgagatggcgccactgcgctccagcctgggcgacagagcgagactctgtctcaaaaaaaaaaaraaaaaaaaaaaaaaaaaacaactatgagattatctggaaagtaatgacaaaagtggctgcagaaaaataatcaagacagctgaaaactagaatcagtctgtcaagaacatctagtttcttgatacattagagaacaacagagtttccacttgataagggaaaattttttgacagaaagacctgctgaaaatttaaaaaatttggttcataatgtcatagaatgtggtttgggagaaattttctgaaattgtcaatagagctgaaagcttgttataaaccattactaatttatggtgccataaaactagccacccttcccaatgataactacgaaactatgatttcagtttcaaaatacaaaataatttaatgagttaattttttagggataatataacttgaaaagttgtgttttagtatctatggatagcgatagaggaacagtagaaaagctatcagattcagacctctgcttgagttagaactacagcactcattagatgtatgactttggataagccatttacacttaattattttaggacaaattttaaaaaatgaaataataataataatatgtaaactatcattgtgaagactaaattgggctgtaagttaaagtactttgtaaacatcgtaatagtaatgctacttgttttaactgtctcccactgtgatttctgacacaagtaatgtataacgtgta

SEQ ID NO: 699172 - DNA, 608 bp, Homo sapiens
caggggcaggtggtgagagcccggagcccctgtcgggggcgtggggaggggacagcagccaacactgccccacgcacttctgggcgtgccctgcagagtcaagactggggcaagagtgacgagaggctgctacaagccgtggaaaacaacgatgcacctcgggtggccgccctcatcgcccgcaaggggctggtgcccacgaagctagaccccgagggcaagtccgcgtgagtgcccgcgacccgggagtgagatggctgaggggtggcaaccttgcggctgaacccttgtctctcacctccaggttccacctggcggccatgcggggtgcggccagctgtctggaggtgatgatagctcatggcagcaatgtcatgagcrcggacggggcaggtactgccagctgggccccggggagggaggaggaactaagcccaggtgcccagcctgagggtccagccagaccctgctcccaggtctcaatgttccccgctgaaaaaaggggaggctccctctggtgctcctcccctgcccccagggagacacacaggggcatgttaggatggggtggccaaagatagagactgtggctggcaccgagcaaagcc

SEQ ID NO: 699173 - DNA, 608 bp, Homo sapiens
caggggcaggtggtgagagcccggagcccctgtcgggggcgtggggaggggacagcagccaacactgccccacgcacttctgggcgtgccctgcagagtcaagactggggcaagagtgacgagaggctgctacaagccgtggaaaacaacgatgcacctcgggtggccgccctcatcgcccgcaaggggctggtgcccacgaagctagaccccgagggcaagtccgcgtgagtgcccgcgacccgggagtgagatggctgaggggtggcaaccttgcggctgaacccttgtctctcacctccaggttccacctggcggccatgcggggtgcggccagctgtctggaggtgatgatagctcatggcagcaatgtcatgagcgcggacggggcaggtactgccagctgggccccggggagggaggaggaactragcccaggtgcccagcctgagggtccagccagaccctgctcccaggtctcaatgttccccgctgaaaaaaggggaggctccctctggtgctcctcccctgcccccagggagacacacaggggcatgttaggatggggtggccaaagatagagactgtggctggcaccgagcaaagcc

SEQ ID NO: 699174 - DNA, 2786 bp, Homo sapiens
ggaaacagaaaaccaagattgtttgccataaatggaaggtaaccataaaagtaaacacaatgaaaatagatgttattcatttctagctggatccagttgcctgagatcttctgtctcttagctacaaaggggaaattaacaagcgctagtgtgttaaggatattccagccccagaagtctttgctgcttcaactgagattgaaagaaaattgagaataactaactcatcacgtaatttaatgctttttaacatccgtacagtaccttcagaaatcacctcaagtgcaaccaaaagtcacacccatcagtggtcccatcccacatttgggaagcacagttggagggaatgccaattccgagttactaagcaagagcaagttccacagcctaagagcaatactgggtccaagaagaacagacccagcacaggtcccacggctcatttcttgtctttcactttctgcaagaaccaaattgttttgacccacagaattaagataaggaaacaacaacaacaacaacaacaaaatcacactacttagatacacacactattgaaaatgagtttttttttaaaagatctatcatgccaactcaactttcaaaagacaggtagtctctaaacacaacagtatagaaacaacacacttcccttgctccttcagctgcagaagcagtgactgctccccgaggtctgcccaaatgggcccaaggccctggcagggaacgcgggaagaatgcttttctattgcagctcattagcagttctgcagcctttatgaggaggagacatctgctgaggaaatacatctgtgccacggcactggccatttcagaatagaaagtctgttctgtaattccagaactttaatagaaatacagaatactaattatattctcatttttttggcttcagatggctgctctgaaattatcagctgtcaagcccggcactgagaaaaaccagcctgggttagaaggttatataatttcctgatcatgtaacctgtcatttctggataaagcccattcaaataagatgatgaagatggagaaccacctacccagtgatccccgatgcaggtggctcgggaacccaggacatgagagttttagagttgtaagtaaatgttcaggaatggagtggggatacaggcagatgggctgctcctcagctcgcaggactgggccgccctagccggattggagaatctaagccacaggtgcaccacagtagatggcacagtgcaggctaggcaatgaagccagtgattttgccaagagcctgcttgatgaaaagtggagatgtggacccagacaggaagccaggcgggagtgaccgctatgctttccctgagagaagcaaggtgcgctcacaaaggcttgcaggcacccgagtgagggatacacatctgatggtgcacaggggaaagtcaggccatctcacgtgaatgggtgctgcaggtggtgggtgacttctcaggggcagcatcacttagggaccaagagcgtgggcagctagggccaaatctctgccctgccacttattagctgtatggctttggataaattacccaacttcgcagtttattcatctgtaaaacagggaaaataacagtgccgaacccatagggttgctgtggaactaagtgaattgatatacgcaaagcattagaagagaacccaggacaaagtaagtcttatatacttgctattattactaatggtagtgttaaagaagcatttgctatctttatcatcttcgccgtcaccaccactactcccactttcattcagttctctctgaccccagaagcagggctgtttcctcagggtaacagaccccattaggctacagtgaaacagtcagcaactaggtgttccaaagtaatttgcaattaaaaaaaaataactcaatgcaatccttgatccattggatccactgatccaacagatcaatgcaatccgttcagagaacggtccagatgctttccttctgttttttgagatggagtctccctctgtcacccaggctggagtgcagtggcgcaatcttggctcactgcaacttccgcctcccgggttcaagtgagtctcctgcgtcagcctcctgagtagctggaactacaagcacccaccatcacacctggctaattttwgtatttttagtagagacggggtttcaccacgttggccaggctggtctcaaacccccgacctcaagtgatccacccaccttggcctcccaaagtgctcggattacaggcctgagccactgcacccagtccctccaggtggtttcttaatccagagaatatatgtagcataaatggtggggtggaatgataaacacctgtgactcactgccttgcataaaagctagatcggtggcaacactgctgaacctacccagcgtgtgcccctttcccacctcccccacccccaatgtggatttttaatttcactctgagggtgctctagctgggcaatgggtcaaagtaaggtcatgcagaggttctgaaggattcatccacgggcacatacaccaaaagctttgttgaggacacagctgtatccctgttgcctgaggaccagacttgtcagcactgacccacagtgactctgcccatcaaagggttcatgtctatacagagacactgtttagtaatgcataaaagtcaagtgtctccatatttaaggacaacatggccctccaaatgatctgttttgctttaggaaataattctctgtttttattactttttctccccccctctaagagcacc

SEQ ID NO: 699175 - DNA, 642 bp, Homo sapiens
gatggtcttgatctcctgacctcatgatccacctgcctcagcctcccaaagtactgggattacaggcgtgagccaccatgcctggccattttattttatatatatatgtttttgagacacagtctcactctgtcacccaggctgagtgtagtggtgagatcacagctcactgcagcctccacctmctgggctgaagtgatcctcccacctcagactcctgagtagctggaggtacaggcatgagccaccatgcaaggctaacttttttttttttttgtagagacaaggtctcactatgttgcccaggctggttttgaactcttggactcaagtgatcctcctgccttgccctcccaaagtgctgggattataggcatgatctactgcacctggcccactggaggattttaaatagtgcagtgacatgacatgatttatgtttttaaaagcttgccttggcatcgctgaggagatttaataatatcttgaacgtttttacgttctaagaacaagattcaaaaacccctaagacttctttctttttttctttaattattattttttaaaattatattttaagttctagggtgcatgtgcacaacatgcaggtttgttacataggtatacatgtgccatgttggt

SEQ ID NO: 699176 - DNA, 1184 bp, Homo sapiens
tgtggaaaattttaacatgtactaatggggggatatccctgtaatttatgtaggaaaagtgttttctgaaatgtatttcttattgtgttaaaagagatgagtgattcatatttaaatctttgtattaaataagggaaataacttatgtttcttcttcacacctttttttttttttttaraaaagcaacattcattcttcaggtgagtgtatcttgaactatttgaaactttagaataaggtaaggaattaagcacttgcatatttacatatatataggccatcttgatttgtgaatgtttaccttgatctcctttggaataatattttctatgtgagtttcttagtaacaggattactggccagagtaggatgcagtttggttgcacctttgttaggtaccaccatagaggcaccagtcatcatgttattcagctctagcagcaggtggcattactctttacttcaacttctattgttctatagatttgttttgtgctttccatactgcagattttacttcttttagctttactgatcataactggcgttgtatcatgtcagaaatgcatctttctagttcactgggaactggaatgctgttaagccaggaaaggccttctttagaatgactttaggcctatctttttccaaaaggaattaggatggagctggtttcactcacttcctttaggctattggtctctttcttctctgtggtgcaagagagttactaagagacctgtacagagatagtttctgctgctgattttgtcaccctgcattataactagcactgaagtcttttccatgttttttatcgggaagttgctttttatgcatacatttttaggtctatatctttaaaaacacatccatcccaattattaaggagtgcttgtacctctttcattaggaaataagttgatttttccccccacatttaaagatgaaggaaaatgaggcagtttttttttctctgtggcagcttaattttcttctactgggatggggtgaggaattgttacttatacttaacaaaagtcattctgaactaaacttaatttcctcgttcttcacagtcatggccagtccaggaggtcttagtgctgtgcgaaccagcaacttcgcccttgttggatcttacacattatcattgtcttcagtaggaaatactaagtttgtt

SEQ ID NO: 699177 - DNA, 1146 bp, Homo sapiens
ttttttttagttctgaaattttcatttggattttttttatggtttcaatttctctgctgaagttctccattttctcactaatttttctccatcttttcatctaaatattttaatgttgtataaatgtttttgttttctaattctaacgtttagatcatctgtggatctgctattgacaggatttttttccccttgataagctccgtgttttcctactttttcacatgtcttgtaattttttaactgtaggccagatattatattataaaagaacagtagagactgaaataggtaataccttgttcttttgtctttcagacagtatagattagggactggtctcttatgtaatcagaaacagctgaaattaggctatggatagatttggttcaagttttgttttaaatgctttgagaatggtttcaggccccacttttgagcagaactttgagatctaagtactgcacgtctacaagatttctctctgctttttagacatgtcttcaaccatcacttctcagcaaaattcctgttggggagaattggcaggtagggagagctagctctgcctctgcttcttgagatgcctgtctacctcagcctgggctcaaccattgaargctcaactggtttctccttttccctgcaaaatttgttgcttatggcaaggttgctcctctgctaagttgctaagaatattttcttacatgtttaggttccttttctttaaaaatacttctttttggccaggcacagtggctcatgcctgtaatcccagcactttgggaggccgaggcggctggatcacttgaggtcaggagctcaagacctgcctggtcaacatgatgaaaccccatctctattaaaaatacaaaaattagccaggtgtagtggtgcatgcctgtaaccccaggattacaggagaggctgaggcacgagaattgcttgaacctgggaggcggaggttgcagtgagccaagattgtgccactgcagcctgggtaacagaatgagactctgtctcaaaaacaaaacaaaacaaaacacttgtttttgttgtgtaaatggacatgcatgaaaaatcacctatagcaacagaaagcgtatcattggtttcctggagatgggaatacatggaggcaggatt

SEQ ID NO: 699178 - DNA, 673 bp, Homo sapiens
atccagcactactgccttgcctacctttagcatatagctagcatccctaaggacaaacgcctgatggcagggaggcrccacttcaagcgtgtctcacggcccagcagtgggcttggagttttgatgtttatcatggttattgaccaaggcttatgatcataagttaactcttttctaatcctgttagaaaacttgatctcctgaataaagattaaatgccagtcttgcatattaagataggtttaacttaatatgttatcattaattttttaaaatatataaggtatggtaattttgtattattaattctccaacacttgaggcatttctgttgtttaaggagcatttgattagggacactatactttttaaaagtcttaaagtaggtagaggtatttaatttagggttgatatctgaatgtttttaaatgcttgtagatgatgttgaagtaaatttctgatatgaataatcagtgatttttattattaagataaaagacatgataaaaaaacatacaaataggttttgagatatgaaatatgtcaacatactacagttagtgtacagaatcagcatttcattgttaggacattttcctcaactttctaaagccagcatttcaactgacttttccagaccatatttgaagatgttagtggttttggtgcctgg

SEQ ID NO: 699179 - DNA, 899 bp, Homo sapiens
gggtgtcctataccatcaggttacccaggccgcacactacctgtataaaacacctgttggaaacaccatcctttaccaagtgtaattagtgtaagttagcatcaattaaccaaactggggataattttcctctgttttatttggagatgcacctcactaagtggctgtggattagcatccataaaaggtggttaaaggtaattcatttactggtttatttagtcatttttttccctagcaagagtacatgggggtatggaatggagggagaagaattctgacctctttggttgtttgttcctgtaggaactggctgtctgcagatactaaagaagagcgggatctctggatgcaaaaactcaatcaagttcttgttgatattcgcctctggcaacctgatgcttgctacaaacctattggaaagccttaaacygggaaatttccatgctatctagaggtttttgatgtcatcttaagaaacacacttaagagcatcagatttactgattgcattttatgctttaagtacgaaagggtttgtgccaatattcactacgtattatgcagtatttatatcttttgtatgtaaaactttaactgatttctgtcattcatcaatgagtagaagtaaatacattatagttgattttgctaaatcttaatttaaaagcctcattttcctagaaatctaattattcagttattcatgacaatatttttttaaaagtaagaaattctgagttgtcttcttggagctgtaggtcttgaagcagcaacgtctttcaggggttggagacagaaacccattctccaatctcagtagttttttcgaaaggctgtgatcatttattgatcgtgatatgacttgttactagggtactgaaaaaaatgtctaaggc

SEQ ID NO: 699180 - DNA, 1085 bp, Homo sapiens
tttttgtcttaatgctgtgagccaaaatcaaaacattaaattatttcgcctaagcgaaataattggctctttgctttttaccaagagccaggcatctcctcccttctctttatttcctgaaaataattattgttccaatcattgttaagtaagtctttgacctgacttagccaaggggtggaaaaaaggaggcataggagcattgcatttgggaggcataaaagggagaacaaacattgtagggaaacaccgaggaagtaaaactacgaatcaaaatagaatatgaaactaaaagtagagtgtggatgtgtaccaatcatcatgggcaatgatgaagatggattaagtttgttaatatatgaccttttcacgaaaacaagttatatataaaactatgagtggttgtacttcttacaaaatatgtaatagcagcatttgtgtccaagtttcagttgcatgtcagatttgatgagtattaagatgtcaagaaccttgtgaacaataattttggacattaagtcttaatctatttaaaagataaaagatacagcatttactatgtgccaggcactgtgctagatgtttataattattattgctaaagctactgaaattcatgccttcaactcctccttggttttgagcacctcctgtgctggattatgctagataccatgagaatttatggacataaagcataaaaaggttcctattctttagaagcattatttgtgaacaagaagattgaaatattaaatgtcaacaaaaggcatatgaggatacaagcagtgttatcagaagggaaagggaggcttgactgctgtgggatgagayggtctagaaaggcttttaaggcagtaagacatgaaagggtatattgcatccatatacacagggtccactatgaatctggtttcttcgtccatacccatgtatgcacatacttggaatatcttcatgtagatgaccccaaagtacctcaaactaaacatactcacaactaaatccattatccttctccggaacccaactctgctcctgggttctgtcagttggttctctcttgttaatatctcttgaatttg

SEQ ID NO: 699181 - DNA, 1085 bp, Homo sapiens
tttttgtcttaatgctgtgagccaaaatcaaaacattaaattatttcgcctaagcgaaataattggctctttgctttttaccaagagccaggcatctcctcccttctctttatttcctgaaaataattattgttccaatcattgttaagtaagtctttgacctgacttagccaaggggtggaaaaaaggaggcataggagcattgcatttgggaggcataaaagggagaacaaacattgtagggaaacaccgaggaagtaaaactacgaatcaaaatagaatatgaaactaaaagtagagtgtggatgtgtaccaatcatcatgggcaatgatgaagatggattaagtttgttaatatatgaccttttcacgaaaacaagttatatataaaactatgagtggttgtacttcttacaaaatatgtaatagcagcatttgtgtccaagtttcagttgcatgtcagatttgatgagtattaagatgtcaagaaccttgtgaacaataattttggacattaagtcttaatctatttaaaagataaaagatacagcatttactatgtgccaggcactgtgctagatgtttataattattattgctaaagctactgaaattcatgccttcaactcctccttggttttgagcacctcctgtgctggattatgctagataccatgagaatttatggacataaagcataaaaaggttcctattctttagaagcattatttgtgaacaagaagattgaaatattaaatgtcaacaaaaggcatatgaggatacaagcagtgttatcagaagggaaagggaggcttgactgctgtgggatgagatggtctagaaaggcttttaaggcagtaagacatgaaagggkatattgcatccatatacacagggtccactatgaatctggtttcttcgtccatacccatgtatgcacatacttggaatatcttcatgtagatgaccccaaagtacctcaaactaaacatactcacaactaaatccattatccttctccggaacccaactctgctcctgggttctgtcagttggttctctcttgttaatatctcttgaatttg

SEQ ID NO: 699182 - DNA, 1085 bp, Homo sapiens
tttttgtcttaatgctgtgagccaaaatcaaaacattaaattatttcgcctaagcgaaataattggctctttgctttttaccaagagccaggcatctcctcccttctctttatttcctgaaaataattattgttccaatcattgttaagtaagtctttgacctgacttagccaaggggtggaaaaaaggaggcataggagcattgcatttgggaggcataaaagggagaacaaacattgtagggaaacaccgaggaagtaaaactacgaatcaaaatagaatatgaaactaaaagtagagtgtggatgtgtaccaatcatcatgggcaatgatgaagatggattaagtttgttaatatatgaccttttcacgaaaacaagttatatataaaactatgagtggttgtacttcttacaaaatatgtaatagcagcatttgtgtccaagtttcagttgcatgtcagatttgatgagtattaagatgtcaagaaccttgtgaacaataattttggacattaagtcttaatctatttaaaagataaaagatacagcatttactatgtgccaggcactgtgctagatgtttataattattattgctaaagctactgaaattcatgccttcaactcctccttggttttgagcacctcctgtgctggattatgctagataccatgagaatttatggacataaagcataaaaaggttcctattctttagaagcattatttgtgaacaagaagattgaaatattaaatgtcaacaaaaggcatatgaggatacaagcagtgttatcagaagggaaagggaggcttgactgctgtgggatgagatggtctagaaaggcttttaaggcagtaagacatgaaagggtatattgcatccatatacacagggtccactatgaatctggtttcttcgyccatacccatgtatgcacatacttggaatatcttcatgtagatgaccccaaagtacctcaaactaaacatactcacaactaaatccattatccttctccggaacccaactctgctcctgggttctgtcagttggttctctcttgttaatatctcttgaatttg

SEQ ID NO: 699183 - DNA, 798 bp, Homo sapiens
taattgattaatagtattgttgcttggtattataaatacatactcatggcaaacacttttctttcaattttgcctcaattttgtttatgatgttctttgaggggcagaaatacttgatttttttctctagttaaaactattgagactctttccttttatgatttcttcagttgcttttttaatattaaaaacttttccaagtcagagattagataaatattcatttgcgttgtgtgatttttaaatttaactttttaatctttatgaaattgatttttgcataaagtactaaacaaaattacttatatttgctttccaaagtataaacttttccagcataagtaattcatcttatccctcactgattttcaaggattcctgtattacacaagcttttgtatatatgaggttctctactatgttcagttaatctttcactgatgcttgtgtcagtattacactgttttagttattgtagctttacagtaaagattaacaccgggtacggcaagtcctcctttattattatttatttttrtgcatactattttaaaactgtaagtgcttattgggctataccagtaagtatctagagcagtggtttttaagctcctaatttggcccactacctatttttgtaaataaagttttattggaacacagcgatatttatttctgtgttatctattgtgtcatttgcagtacagtggtgcagttgagtagttgtgttaaagactgtatagaccacaaagcctaatctgctttgctgcctcctgatctagaagatttagactagga

SEQ ID NO: 699184 - DNA, 613 bp, Homo sapiens
gtgtgcatgggagtggctgttgccacattgtgttaaatgggatggaggctgggtagggcaggaactgtgctccagtcttctccaaggacaggtcattgtgtcattcactggttcccattcctcccctaaagccctggctgatgattttcgcacgctttacttaataacttcctccctacytggagcccggtggaatccacaaagccataagcacacaccagcctggtaggttggggcaggtgggaaggagctctgggaggctggggcatcagaacttcaccctctctggtcagagctgtgggctcctgagcttctccctctgcctgctgtggacttatgtaacacattcacaggacttcattttccagtagattgaaagcaaagccgctgttgattttctccaaaatgatctatttggaagtgcaattgcctggaattacatggtggcgcgagaggttagaccttgctgtaaataactttcctctcagccacacaggggctcagctggaagcagtgtctgggctttagatgacggtgtttggggtgtgtgtgtgtgtgtgtgagtgtgaatacatgtgtgcatggtcttggggcctttgctcaccttgctacc

SEQ ID NO: 699185 - DNA, 1227 bp, Homo sapiens
ttttcacactgtcacagggggctactttctcgtcaggagcaggtggcactaagagatacagaacagataaaaatgaggctggctatgtacacagatgaagtataatgaaaaaggttcatggattaggtctgagattctatccctgttgggtcaataattagttggtatgtgactaatgtattgggaagatgcccggtggtctatgatattgggattttttttttctttttgattctttgggcctctgaagataattcagcagtttaccagaggagtacccattctgcctgctccttccctctctaacttcctttctccctccctccacaaatatttatttgtaccttgtttgtaactgaagataagcacctctgaaatcaggcctgttggcatatgtctaaatactctttaactgagagacatatattcaaagaaacgtttttatatgtccataaactgacacatagattgtcaaatccctaataacaaggttcaaattagaatcctgacactaatgttttcaaatgttctaatacaggtcaccgtttttcctggtacaactcttgtgagtcttatgtgtgtgcatgtgttcgcatgcaactgtgtgagatgctttgttaattaacattgtgaagctaagtgctcagtgaaaaaagtactagagaattgcatattgtcmttacagaattgtttgtaaatacaatcaagtaaaagctgtattgaaagaggtaggccttgttcagagccatgttactaatctcaagtctaggggtttgctctgagtgtcttggtgtcttggtggccacatggatgttcctttactctgcttattttcaacacaagaaaggttcttgcaaagatgccttggatgaaaaattctgctgccatggctggtatgcaactcattttgcatggatgttctctcggttctaacctagtttgtgttcaggtaattctggtaatgggacatttgcctctcccctgggggaccatttttagtgtctgtccatccaaccagttagtcagagaaaagagccctgatgtaagtagagaaagaggtatttgtagaactgtgggaaaaagaaaaacataacacactgacctgttttaagagtgcagggtgggttcaaggcttttttaaatttggtttcccaagatgttggggtcactataagcttcgagaatggctgaggtccaaatcctaaaaattactttcatctcagaaaa

SEQ ID NO: 699186 - DNA, 1227 bp, Homo sapiens
ttttcacactgtcacagggggctactttctcgtcaggagcaggtggcactaagagatacagaacagataaaaatgaggctggctatgtacacagatgaagtataatgaaaaaggttcatggattaggtctgagattctatccctgttgggtcaataattagttggtatgtgactaatgtattgggaagatgcccggtggtctatgatattgggattttttttttctttttgattctttgggcctctgaagataattcagcagtttaccagaggagtacccattctgcctgctccttccctctctaacttcctttctccctccctccacaaatatttatttgtaccttgtttgtaactgaagataagcacctctgaaatcaggcctgttggcatatgtctaaatactctttaactgagagacatatattcaaagaaacgtttttatatgtccataaactgacacatagattgtcaaatccctaataacaaggttcaaattagaatcctgacactaatgttttcaaatgttctaatacaggtcaccgtttttcctggtacaactcttgtgagtcttatgtgtgtgcatgtgttcgcatgcaactgtgtgagatgctttgttaattaacattgtgaagctaagtgctcagtgaaaaaagtactagagaattgcatattgtccttacagaattgtttgtaaatacaatcaagtaaaagctgtattgaaagaggtaggccttgttcagagccatgttactaatctcaagtctaggggtttgctctgagtgtcttggtgtcttggtggccacatggatgttcctttactctgcttattttcaacacaagaaaggttcttgcaaagatgccttggatgaaaaattctgctgccatggctggtatgcaactcattttgcatggatgttctctcggttctaacctagtttgtgttcaggtaattctggtaatgggacatttgcctctcccctgggggaccatttttagtgtctgtccatccaaccagttagtcagagaamagagccctgatgtaagtagagaaagaggtatttgtagaactgtgggaaaaagaaaaacataacacactgacctgttttaagagtgcagggtgggttcaaggcttttttaaatttggtttcccaagatgttggggtcactataagcttcgagaatggctgaggtccaaatcctaaaaattactttcatctcagaaaa

SEQ ID NO: 699187 - DNA, 613 bp, Homo sapiens
ttgagcattttttatgatccagctactgtgctaggtgatggggttacaataagatacagtcccagccttcaaaaacttatgtgctcaaacgttattctccaaatctttattctgtttctcatctatcattaatgggaatagacagctcattttttattgttcttggaggctagagagtacaggcaaatgcagatgatcaagcctttcttattgccccactcctagttgattccctctccctttcttttacttatgacatgcaacttccacaaaggcagtttatgttagttatctatggctgcataacaaattactsttgaacttagcagctaaagacaaaaacatttattatttcacagtttccatggaggaggaactcaggcatacccttgctgcgtcctgtaactcagaatctctcagaaggttatcattgaggtgtcccctaaggctgcagtcatcctaagggtcgactggcaaaaggtctgcttccaagctttctcccggttgttggcaggatttagttcctcactggctattggccagatccctccctcattgcctcaccgtgtggacctttccatagagcggcccatggcatggcagcttgctttac

SEQ ID NO: 699188 - DNA, 1185 bp, Homo sapiens
aaaaaaaaaaaaaaaagcctgacatgttggcacgtagctgtagtcccagctcctcgaaaggctgagatgggaggatcacaggacaggaggtcgaggctgcagtaagctatgattacaccactacactccaacctgggcaacagagccagaccctggcaaaaaaaaagaaaaaaacccagaataaagaacagaggtcagaattcagtcctcagaattcagtcctcagttctcccttacctgaggtctgcatgccaggggatccatttggtgggggtctgggtttctgaaaaacaactcagggatatatgttaagatgttacctttagtctctggagggaaccaaacatctcgcaactctaacttccctggctattgttttaagctactattaccttcttgtttaccaagttgctccttacttctcagggctagctgggtgcctggaatttcccttgcaggaactcaagatttcgctttatttccatgcttgtaggggagtagggggaaggaggcccctaaaaggggtccctgcttcatctcaatgttggcttttttggtaagttttcagatcaggggatgtagaacgttcacaaataaaacaatccacactcgctttagggataaattatgaatggttcatacrttaaaactccaaagatgccaaagcacctaccctattttaaagcatagtagctatcgtgatacaagccagttttgcaatgtcaaattcattctgagtagaaggttggaaacgaagacttagaaaaaaggaacaggttgaaaccaaaacaatcctacccaaacgaaaacttcttttaaacagaatcaagtgatccaatgactctgtggccttaaatcaatgttaattaatttctcaaatcctaataaacaggtatcataatggcactgtatttgtatgtgtgtacaatttaccctgccttcatctttttttttttttttttttttgagacagactctcgctctgttgcccaggctgaaatgcaatggtgcaatctcagctcactgcaacctctgcctcctgggttcaagcaattctcctgcctcagtctctgagtagctgggattataggtgtgtgccaccactcccacctaatttttgtatttttagtagagacgggtttcaccatgtcgaccaggctggtcttgaactcctggcctcaagtg

SEQ ID NO: 699189 - DNA, 1484 bp, Homo sapiens
attctttctctgctgtttttacaagaaaaaaagcccaatgaaatgtaaaccttgttttcttcagttattggtcctaggagtattcagagtaaataaaaaaaaaataccttacgtatacttctataaaatcttttatttgagcaattaaaaaaagctatcttctttcagtcttatcaaggagagcaaattcctcctagaagtcttatttctacttctaatgacaattgctttattatgtgacattcaaaggaaaaacttgaagtcatatttctagtaaagtatttaatttcagaaataatttaaactgttacttcaaagcaaatatytgctattcctgacataaagtttttacccaagcttggtaataaagttatcataagaataatatggattattctcaggatggaatagaatgtcttgattaggaagaaacacacataagaaattcatttttttggaagaaagaaaatctgtgctgtttatctggcaatggaagtcagatcaaaatatatctatatgacatttgaatggggtcacgtgggaagacaagatctgtctgtatgaatatttttagcttctgaatttgacataagaataggatcaggaaaatgaattctgtgttacatgactaagatgcatattagaactcaggcaagatgattcctgtagttggtctactgggaaattaccctctgcctacagctttcaaatacatatatatactatgtgtgtgcatgtgtgtaaatttccaactgagtacatcagcacataaaatacacttgtccaaggtaaaaaagacaaacagttattaatagggcaaaaataaaatggggttatatccaaccatggcataatacttctcattagaaaaaagtgtggcgagctaattaagacccagtgatagttagaaagtctgagaacatttatctttaaaaatggagtggtaactaactaaaagaaggacccagaacctcctaatacaaatatcagttatattccctgagatttaaaaatataataattcttatttctaattcaaaggcctagagtgtaagtagggataacttaacctttttttttttttttaagcctctgtgagaaataacgcagctgtttggcccgtggtattctctttaaaggaaagaagttacaaagacaagaagaaaaaagtggaagagaaaaataaggagaaaaaatattcaaacagtacataactaaaaaaaaaatttttcacaaacagcaaggggaatcttgaaacaaaatagatttgttttaaaatgcaaagaaagagccttacccgggatgaattgctcagttctcttttgttggttgagttcacttccttccatttctgctaactttgaccagctgctaacaagcaaaagagcttcatagaggccatctacacgtgttctcttctgggttatcgcgatgctgacaaagtgcacctaccgcaaattagaagagcacaaagatttctgtgg

SEQ ID NO: 699190 - DNA, 610 bp, Homo sapiens
atgaaacactgatcaaaaactgaagtaggaggtttactatggtaagtctttgtgttcccctaaaatttgtacgttgaaatccaagcccacaaagtgatggtattaggataagaagcctctgggaattgatttatccacgagggtggagctctcatgaatggaattagttcccttttaaagagaccagggaaagaccactcaccccttctgccatgtgaggtttgggtraacagatgactgcctatgaaccaggaagtgggccatcacaaaacactgaatttgccaatgtcttaatctgggacttcctagcctccagaactataagaaatacattcctattgtttataagccacccagtttacaggattttgttatggaagcccaaatggactaagatagaagctaagttagaaaaattttgtgactgccatttgtaagatatggagacacataagccagcctggctgaatcatgctatttttgccaaaatgtgacattaaattatattaaaataaaaacattgaattttgtgaaaaatgtcattagagtttccattttgccaatttcaggtttatctgccataattcagcaactgttaacattagcataa

SEQ ID NO: 699191 - DNA, 1315 bp, Homo sapiens
cttttatttaaactaattcccctgcttaacagctattacacatctgcatttcataagaccaaatctaaatacatagtatggcattcaaaaacatttcaaattgtacttttgaaaaattcaaagaaaaatgattcacttaatccattcattgaatacttattgagtagataatgtacaaagagtaagctatgataaacaaaagaaaatagaaccttgccccaaagtttatagtttagtagagaacagaagcaaatcgtacctaataagtactgatttagggtaaagaaaattatgggaacatgttgggagaaggactaacttagacctttgctaaggaaatacactttattcctttagatatttgccctcacaggattctcttcctgaagtggttycctcacttttgtacttgatcaactccaactcatcactcatgatgtaaaaatctccctctcttagtagtcttctcagtccacttgcccgttctcaccccagaatccaaagaactgttgcccttatatctgttcctacagcattttacatttgatttttctacagcatctattatgttgttttataatttaatggtgagtgccttttaatttgtcacatctctatttcaaaaatgaggaaattaagtcttagagagatggtgtaacttgttcaatgtaatgtggttagagtcaaagtcaaaaattaaacccagttatctgactccaaaaggctatactctttccactcgattatgaagcttttctaatgccacaaatttgggccttgtcccaaaacactcagtattgggtaaaggagtctttatcttttttttagaatttgtacttcaagagaagttttcatgctcaatcaattaagtcttttatccatcttttataatgtgattaccagttggatgccagagggcctgggaaagtggtctaaagctctggtctcagacactaacaactttgtatactactactctggactcaaaaacaatgtactttggtaattacactaaggaactgagaagatttggcaagctcaaagttccacctactttctttgagaaggtgataggaaaatacactttataaaatactttattatttgttttggcaactgaaagtaactgaatcactcagcaggaatgaggtttatcaaaacactaagtagtaaaggaaaaattatacaataagattccttttctctggcctccatagacagaagtgaagagggagtagtccatcagctccacaaacatagataaaaccacccattccctggcctccacaatgaagaggtaccccagaacttgctg

SEQ ID NO: 699192 - DNA, 1841 bp, Homo sapiens
tctcctgtacacatttgacattttccagtgtggagagtgttttgtcaaaagtgtaaagcattgtgagagtaatataaaagcagataatgcccatttgtagtcctatcccttaagggcatgacacaatgctttaaaattctgagacacagctttattctaacaatgcagtgaaatacttcaacagttaaaatgtctgagaaaaatcaaaccccaaagtaacaggccaatagggagtttatttgacaaccctagtaaccagaatgtcagaaatagagaagtgttcagatcacttccaagctcagcttttttcagcatatactggcatcctattcaaggagaaaaggaaactgcataaatgtctcaccaacctgacttaccagaatatctgtggtcatgttaaatacctaaaggcaatgtattctttttgtttggtattttttcttttttgttttttggagaaagggtctcaactctgtcacccaggctggagtgcagtggtgcaatcaaggctcactgcagcctcaaactcctatgctcaagcgatcctcctgcctcagcctccagagtagctggaaccacaggtgtgcgtcaccacgcccagttaactttttcaatttttgtagagatggggtttcaccaagttgtccaggctggtcttgaattcctgggctcaagcaatcctcctgccttgacctcccaaaatgctgagattacaggcatgaaccactacacccatcctgaaggcaatgtattctttttagatagcctataggatagtgcttcttaacactgctgtcaaaccatctcttgagctgatgagaaattcctaaaatttgtaagtgttagtaggaattttataagagatagtaatcgatagagcaggtaatatataccatgcttatgacactttgctctgtcattctagatacttatcacagataagggaaaaatcctacctggggtctctaccatggctctatgcattgtgtgaacaccctctaaactgactgttgtgtattatctgaaccactcagtggttcctaacctcttcaayataaaagatacttttcttatttattctgtacatgaattccacatttggataaatattttctccagcaatgagaatttattaggttcctgatattctgaaaattgatttcaattctctacttttactcatataaatccctaaaatagatcacagaatgcaaacattgcgcttaggtttctactactggttccaaaattgattatagttaggtaagattctctacccataaaatgaaaattgcagataaaaaaaactattctatcataacttaccattttgacaacagttctccccatgtttcaagaattttttctgcacattctttggatacatcaccagatccactcaggagaggttcatcattatctataataaacaaaacacacaaaaacggtaacagagatggctatgctagccagaagaacactggaatgttaagagtcaaatttgaaagactttactgggagcataaagtcataatttctctcttttagtatttatggataggtacaaagaaaataaaaatagttctaggtaaaatgctgtaacctctttaattctcttttgttttccacataggtccataattatgtcaattgcaaaaaaaaaaaaaaaaaaaggagctatttaattataaaactataggattcaaaatatggtattttctctcattttccaaagcaaacagctttatgcatgaaaatatatgtcttatttaaaacacttaaaaaatttcaaactacctaactgtccaacaataggagtagagaatggttgaagaaattat

SEQ ID NO: 699193 - DNA, 632 bp, Homo sapiens
ggctgtaattttaaaaacatcaagtcatcttgcaaccataaaattttaaagtgagaaagggttttagagtctagccacctcatttaataaatgaggaaactactgacagatgtaaagaaacttggaaayggggacactgttaatagtaacaataattaaactaaagctaagttttgacttctattccatggttctttccaccactcaaaggattatcattatatttaaaaattaaaatcagtcacttctaaccctacaaaagattagacttcagacacagaccttatttctccccttccaatgtatgcagataactttactgggaaaacttgacttgaaaaggcttaagatttttagattattaatataagtaaatcaaccaactaaaacaagcaaatacaatcagcaaaacaaatatagctacaaatccagctgactaagctttggccatatatatatatatatatatatatatatatatatatatattttttttttttttttttttttttttttgagacggagtttcgttctcgttgcccaggctggagtgcagtggcaggatctcggctcactgcaacctctgcctgccgggttcaagcgattctcctgcctcagcctcccaagtagct

SEQ ID NO: 699194 - DNA, 669 bp, Homo sapiens
ggtagtaataacaccatttagcgcgccaggtccctgcattacacttcagatgcctcatcttatttaatgtctacaacctcgagttatgtatctatctgraccaattttacagatgaggaaaccgagattcagacaagttcagtgatttgctccaatggcacagaagttggtcagggtcagatgggaagctagaaaataaaattctaataactcgtcagcctgagagtggccgggtagagaaggccggagccaccaggcctgcctttctcatagctccccagaaaagctgcagctggccgggaccggcggtggcctcaggacccagcccccagcctgccctgtgctaatgggggtaaagctcggccggcgccatcctgcaagccctgtctgataatagctctgattaaatggccgggcagccaaaggaaggcccccgccgccgccagcgacaccgtcaccgcgccgaccaagcagggacctgcagcggcggggcttctaactcggcgtctgtgtcccgaccccactgcagcggctggagcccagagcactgtcctgggtgagaggctggagcgccgcgggcagagcaaaggttttggttctgcctccgccacagtcaaccgcttgcagggaccctgatagcgttggcttgggaggggtctttagaagtca

SEQ ID NO: 699195 - DNA, 669 bp, Homo sapiens
ggtagtaataacaccatttagcgcgccaggtccctgcattacacttcagatgcctcatcttatttaatgtctacaacctcgagttatgtatctatctggaccaattttacagatgaggaaaccgagattcagacaagttcagtgatttsctccaatggcacagaagttggtcagggtcagatgggaagctagaaaataaaattctaataactcgtcagcctgagagtggccgggtagagaaggccggagccaccaggcctgcctttctcatagctccccagaaaagctgcagctggccgggaccggcggtggcctcaggacccagcccccagcctgccctgtgctaatgggggtaaagctcggccggcgccatcctgcaagccctgtctgataatagctctgattaaatggccgggcagccaaaggaaggcccccgccgccgccagcgacaccgtcaccgcgccgaccaagcagggacctgcagcggcggggcttctaactcggcgtctgtgtcccgaccccactgcagcggctggagcccagagcactgtcctgggtgagaggctggagcgccgcgggcagagcaaaggttttggttctgcctccgccacagtcaaccgcttgcagggaccctgatagcgttggcttgggaggggtctttagaagtca

SEQ ID NO: 699196 - DNA, 1403 bp, Homo sapiens
gctcttaacacttttttctaagacctgacagaagtgacaaatcattatagccatgtctaaattatcttctcagaatttcacacagaccaagtggaaacctttcaacattgtacttcagaaaattgaaaccagcttgataaatttgtttattttcctctargtgtgccctggttttcgtaacacagacagtttgtaagtgtgctaatgaatggtaactaccccatctgattctcaatcttcatactcactctgccaagaaattagttttgtgaatcttcaacatttgtttttctaccacctgaagctagccatgggacctggtttaaagttcgttcatgccattttttttccaaattcacttactttcataactgaaaatgacctcaaagaatgattaataccctgtgggggtccatgacataaatccgatccagtgtgcctgatgcaagctctctcagaaggaatgttacagctatattgccgtggaaacctggtgacactgagcagaccaccagatataaaatcttcaaaaggcataactacttaacttggactcaaatttatgtttacttgacttgttaccaacaaaatggagtgaactattttccctagaaattgcataatgcgttgcaaaactaccaagaataataatagaacaatgaatgataggtcatttttatttcttgggtctctttatgttttttcctatcttagggaaaggtagtatagtaagggcaatgaatgatgggggaaagtaggtatcaaaaatctcttaaatgtgtgtctacacaaggtactgggccaaaatggtaggttttgttcaaaacattcgtaagggaaatctttaatatagttgaaagaattattttgtaggaatcctgtatacataaatgaactaatattaaatcaattcagtacttctgtccgacaaactaaataaattatgaattaggaaacatttatggttatggtgacacagggagcttatcatagtggttaagaacatgagttctggagtttagtcatagagatcaaaaccctgagtgaccatgggaaagttaatctcatatgcctcagtttcttcaattgtaagttgaagataataatagaagctatcaaatagggttagtagctatctaatatggttataatgaaaattaaatgacttatttttttaaaaaggcttggaagagttgctagcaaatgctcgataagaattcttttagattcatataaatgattgtatcaatataaaatattaactgaatgtaaatatagtcatgtggtaagtgctgaatttacagagctaatttcacagttgactgttcaaaaacacaatcttaccaatgtgacatggtatatgcatacacaggattaaacttacagccaatgaagctgcaaga

SEQ ID NO: 699197 - DNA, 1403 bp, Homo sapiens
gctcttaacacttttttctaagacctgacagaagtgacaaatcattatagccatgtctaaattatcttctcagaatttcacacagaccaagtggaaacctttcaacattgtacttcagaaaattgaaaccagcttgataaatttgtttattttcctctaagtgtgccctggttttcgtaacacagacagtttgtaagtgtgctaatgaatggtaactaccccatctgattctcaatcttcatactcactctgccaagaaattagttttgtgaatcttcaacatttgtttttctaccacctgaagctagccatgggacctggtttaaagttcgttcatgccattttttttccaaattcacttactttcataactgaaaatgacctcaaagaatgattaataccctgtgggggtccatgacataaatccgatccagtgtgcctgatgcaagctctctcagaaggaatgttacagctatattgccgtggaaacctggtgacactgagcagaccaccagatataaaatcttcaaaaggcataactacttaacttggactcaaatttatgtttacttgacttgttaccaacaaaatgsagtgaactattttccctagaaattgcataatgcgttgcaaaactaccaagaataataatagaacaatgaatgataggtcatttttatttcttgggtctctttatgttttttcctatcttagggaaaggtagtatagtaagggcaatgaatgatgggggaaagtaggtatcaaaaatctcttaaatgtgtgtctacacaaggtactgggccaaaatggtaggttttgttcaaaacattcgtaagggaaatctttaatatagttgaaagaattattttgtaggaatcctgtatacataaatgaactaatattaaatcaattcagtacttctgtccgacaaactaaataaattatgaattaggaaacatttatggttatggtgacacagggagcttatcatagtggttaagaacatgagttctggagtttagtcatagagatcaaaaccctgagtgaccatgggaaagttaatctcatatgcctcagtttcttcaattgtaagttgaagataataatagaagctatcaaatagggttagtagctatctaatatggttataatgaaaattaaatgacttatttttttaaaaaggcttggaagagttgctagcaaatgctcgataagaattcttttagattcatataaatgattgtatcaatataaaatattaactgaatgtaaatatagtcatgtggtaagtgctgaatttacagagctaatttcacagttgactgttcaaaaacacaatcttaccaatgtgacatggtatatgcatacacaggattaaacttacagccaatgaagctgcaaga

SEQ ID NO: 699198 - DNA, 1628 bp, Homo sapiens
tctgtcatagtcactcagcatatttttaaaaagggaagtcctggtcaatatgtcacctagaatcctagggaaagaaagaagctggctgtgttgggagggatatggtatctaagttaccccatgtcatcacctaaaaatttcaaggaatttggtcttacagtatatgacaaccagaaccggccttataatttgttwatagcattatttacagttcatatttcaaagctaaaaaagattaattaagctaaaatttcacagagaggcagaactggaactagaatctggatttcctggctccctgttcagtgctttttcttcctcatctcccaaatctgccccagcgcaagtttgttttgattagccttcttcagatctaaattattaattcctgaaaatcagacacagaatattccagaaaaaaagttctatagtggccagattaaaaagtgtgataaaccccactgaatttgagaagagtgctaagtaactgagacatgccatgacataagcctctgccatcagggcttcccactttgttctgaattgtaaaactcaatacctccctaaaatggtccaaacgctgaatggaaaattctattaattataattgaaaatggcatcacttacaaccatcttaataatgcacacaccccaaagacaatatgtaatgattagccttgagtccagcacacacctagataacagtattgggttacagttcatatgattttcttttttgtttcatttaaaaatattttatatggcataaggctattggatttttggaatcttaaatctacaaagatgttctttcagctttaaaaacattttctatttcattcataaagatcatgtttatttggcctacttatggccactcaaaaatgctgttttaaaggaaaatatttttaaagttgactagagtttagaatttacaacacagataaaatattctctatcttaatatgttactaaactggataatttatgcaattaaaatattgtacaaaggaattgctctatgcctcatcatggttttatttttcttaacacgatcttaaaatgcttctttaactcatttcaattctagaagtaataaggatcaaccacatttttaaagacattaatcttcctgaaggtgattacagaacaaatttgagtttggaatttgattgtgggagtgagttcctgtctagttcctcctgtgtcagaactaaaaaactgtggctttattattctgttcaaagtgaattctcaccttatcaaacacatgcataataatatctatgcctaaaaatgttaccactactggatgagataaatcaattttatattatttaatattttaatcacttcttcctcattatgattagcagagtaatgactttggataacagtgctttatcagatgtgtatgttgcaaatacatcctccaagtttgtgcttctcttctcattctcttgatattgtctttcacagagcgtaagtttttaattttaatgaattacaacttctgaattacttctttcatgaatcatgcctttggtgttgtatctacaaacatcactatatcctaactcatctaggctttcttctgtgttattgtctaaaactttctatgacttttg

SEQ ID NO: 699199 - DNA, 2340 bp, Homo sapiens
attacattgttggatgcaattactaggatgttgaggattttagaatcaatatttgttagatatttgtctgtagtttccttgtaatgtcttctgttttggcattagggtaatgctggcctcaaagtatgagttaggaagcatttcttatgcttctgtcttctggaagagattagagaatttgtaaaatttttttcttaaaagtttggtagaattctccagtgaactcatctggtactggtgctttctacagaatattatttatttattcaatttatataatataggcctattcagattatctagttcttctactgtgagttttggctaattgtgtttttcaataaattggtcaatttcgtctatgttatcaaatttgagggaatagagttgctcatagtatcatcttttgaatgaacatggaatttgaagtgatcgctcttctttcgtgcctaatactagtaatttgtgtctcctctcttcttagccttgcttagtgatttaattaaacttttttttaaaaacctgcatttggttttattgatttttggtttttaatttcataatatcagctctaatccatcatatctaatttaattaatcaatttcaatgtaaaaactttacagcagttttaagttcatagaaaaattgaaaggaaggtaaaaagattttccatttgccctcctggccccaggcatgcatagcctctcccaatatcaaatccccaaccagaatactacatttgttacaattcatgaacctgtattaacacattgtaatcacccaagatatttttatagatggaaattttttaaaaaaatatagctctgataatgattaacactgaatgaaatcacatcgattttatctggtttttgttgtttttaagtttttctctatcaaaactatacctgattattctaaaattcaaattgtacaaaaagtgtaaggtgaacattacaacttaaactattctcactttccaacttcccagtccagaaataaccacaattaatattttgtaggtatccattaatattgtaagcataaacatatgtacatgaatttcttacaaataggattctgctatctatataaatctgtaacttgaaaatctacttaatctctatcatcagaaaatctttactggagtaacatcattgttcatgtcaatagaatgcataacaaactttaatttagctgatgctcagttccccacagctaaattttagctactaaagatacttcagaagaacctagtattgaggatagtaggtgagccaatttgaaactttaatttagttggtcaygcctagaatattggaaaatttgttgactggctttggaatgatgatgttaaatcagatcactgaattatcacaaatgcaaaatctcaaactattcttccccaaatctaaaatgatgtattttacgttaaatctaagttcccttttgaaaaattccctctggtttttcagactaccttaacttcaccattagaatctgagattcagtcaatggtttaggacagtcagagacagagctcgcaagaaaataggacactgtgtcgttgatgaaggaagatccagtaaagaacaccattaacttttagagctgtgaaataatatttgagggtctatttatatgtcaccaaagaaatggaggtaaaagatcagattagtacatttagaaattagtctgtgggcaaacttatgcactcttttcatttttattttgagaggaatgtgcctagggaaagaaacaccggcatctacataatggatggcaccgtggaaatgctgggcttctttctggtgattatttaactttgaagagcagtggaggaactgtgaaatgagtttcatggctaggagctcgccactctcatttaaaaggccactccatatttttttcaaatataactaaactattatcttttgtgaatagatcctttcacatgattcagccaaaaaatggatcaagaggttaaacagtaaaattaaggaaaagcatattttctcatcatatacatgtcctcagactgcccaaattcatttggaaggtttttagcatttgcaaaaatgtactctaggccattgtttttaaaagatagaaacattccagaaatcccctggtagagatcatgttattaaccaattggcgaaatgtttacaagagacgtgggattatttgtataaaaacttacagcccaaaaatttatggcagtaatataaactcatgaacgtccagtgctgcttgggggaattctctgcagtagctagatgactgatgatgtggcagagtgtgataacaagtacagctgtttctataaaaatgtgatc

SEQ ID NO: 699200 - DNA, 2340 bp, Homo sapiens
attacattgttggatgcaattactaggatgttgaggattttagaatcaatatttgttagatatttgtctgtagtttccttgtaatgtcttctgttttggcattagggtaatgctggcctcaaagtatgagttaggaagcatttcttatgcttctgtcttctggaagagattagagaatttgtaaaatttttttcttaaaagtttggtagaattctccagtgaactcatctggtactggtgctttctacagaatattatttatttattcaatttatataatataggcctattcagattatctagttcttctactgtgagttttggctaattgtgtttttcaataaattggtcaatttcgtctatgttatcaaatttgagggaatagagttgctcatagtatcatcttttgaatgaacatggaatttgaagtgatcgctcttctttcgtgcctaatactagtaatttgtgtctcctctcttcttagccttgcttagtgatttaattaaacttttttttaaaaacctgcatttggttttattgatttttggtttttaatttcataatatcagctctaatccatcatatctaatttaattaatcaatttcaatgtaaaaactttacagcagttttaagttcatagaaaaattgaaaggaaggtaaaaagattttccatttgccctcctggccccaggcatgcatagcctctcccaatatcaaatccccaaccagaatactacatttgttacaattcatgaacctgtattaacacattgtaatcacccaagatatttttatagatggaaattttttaaaaaaatatagctctgataatgattaacactgaatgaaatcacatcgattttatctggtttttgttgtttttaagtttttctctatcaaaactatacctgattattctaaaattcaaattgtacaaaaagtgtaaggtgaacattacaacttaaactattctcactttccaacttcccagtccagaaataaccacaattaatattttgtaggtatccattaatattgtaagcataaacatatgtacatgaatttcttacaaataggattctgctatctatataaatctgtaacttgaaaatctacttaatctctatcatcagaaaatctttactggagtaacatcattgttcatgtcaatagaatgcataacaaactttaatttagctgatgctcagttccccacagctaaattttagctactaaagatacttcagaagaacctagtattgaggatagtaggtgagccaatttgaaactttaatttagttggtcacgcctagaatattggaaaatttgttgactggctttggaatgatgatgttaaatcagatcactgaattatcacaaatgcaaaatctcaaactattcttccccaaatctaaaatgatgtattttacgttaaatctaagttcccttttgaaaaattccctctggtttttcagactaccttaacttcaccattagaatctgagattcagtcaatggtttaggacagtcagagacagagctcgcaagaaaataggacactgtgtcgttgatgaaggaagatccagtaaagaacaccattaacttttagagctgtgaaataatatttgagggtctatttatatgtcaccaaagaaatggaggtaaaagatcagattagtacatttagaaattagtctgtgggcaaacttatgcactcttttcatttttattttgagaggaatgtgcctagggaaagaaacaccggcawctacataatggatggcaccgtggaaatgctgggcttctttctggtgattatttaactttgaagagcagtggaggaactgtgaaatgagtttcatggctaggagctcgccactctcatttaaaaggccactccatatttttttcaaatataactaaactattatcttttgtgaatagatcctttcacatgattcagccaaaaaatggatcaagaggttaaacagtaaaattaaggaaaagcatattttctcatcatatacatgtcctcagactgcccaaattcatttggaaggtttttagcatttgcaaaaatgtactctaggccattgtttttaaaagatagaaacattccagaaatcccctggtagagatcatgttattaaccaattggcgaaatgtttacaagagacgtgggattatttgtataaaaacttacagcccaaaaatttatggcagtaatataaactcatgaacgtccagtgctgcttgggggaattctctgcagtagctagatgactgatgatgtggcagagtgtgataacaagtacagctgtttctataaaaatgtgatc

SEQ ID NO: 699201 - DNA, 2737 bp, Homo sapiens
cacaaataaatttagattgaactctctccatctctctgtctcagcgctacatacgaagctcctttgcaagattgttttatgctatgatgtccctttgaagagaatttttgtgagatttccagtacataacaagttgaaattatcttaagagaatcatctcttaattgccttgggaagaatctatattttagatgctcttctctatcatttaatttagaataatgatacatggattcttccttctctattaataaatcttccatttgaaactctttatggctattcctctagactcgaggctaaagcatgctcaagtatctcctaccttaaaaacaaataaacaaaaacctgtttgactttgagctttttctttttcccttttttgttttctttgagtcttggtcttgctctgttgcccaggctggagtgcagtggtgagtggtgtgatcttagctcactgcatccttcaactcctgggcccaagccatcctcccacctcatcctcctgagtagctaggactacaggtacgtgccaccatgctaggctattttttaaaaatctttttgtggagacagggccttgctatgttgcccaggctggtcttgaattcctggcctcaaataatcctcccaactcagcctcccaaaatgctgggaatataggcataagctgctgtgcctggccaaccttctctcattttcttcagactcacacatctagcaaaaatgtttgtatactctcacctcgtgttctctcttcaaaccacagtcattatttaaggtcctcagcatttggctgaaggtactgtatgaccaaatcaaattgatatcttctcgtttttaatatacttatcttccttcctgaattttaatttcataagattcagcctaaatgatctacatctctatttgccaaatgccatgtggaaagtaataaaagaagtataaataaaagagaaaactttctttaacgtttttgttttcctgtagctatattttccattcctcccacttttcacttctgccatagggcaaatcactcagtaacttctcatttccccattcttctttgtcatttccaagtctgaacaagcctacggggtacattcactctctttcctgctgatgctatggtctgatgaaaggacagaaaaacaaagtcaggacacctagtcccaggtgtgctaacaacagcagaaaaacagatgtgactgaaaccagtggtgatgatggcggtggagatggagcacagccctgaagagtatctagaagtttgtctcctccagagaaatgcgcattcattcaaaaaatatgccaggcactctcaggcattgggaataaagccatgggtaaagtatacttgcctatgtggagtttacagtcttgtgggaaatttctgttcataccacacacctcagacttgcagaatcagaaaccggtgagcactaatggagggcttatctcttagaattgtatataaattaatcagaatgttgattcatcaatttgcaaagggaaatgtttgttgcttggaagcaaagtaatcgtgcctgcatgatcaactcattcccactttgtgatctgtacatcaagctaattgaaaaggccaagccataatcagaaatgtatttaattgttttaaattaaagattgccaacacatttattgcctataaaaatgatgccacaacttagatttcttccacataaccagcccttttcctccttagagaacgaaatgtaaccatggtggacatggactcataataaaggaagctatttaggtgaattggcagttartatgatcaggcttagctagacttctgtgcatctatttcataatagagatactcctgtttatagaattgaacattgaaagtctaatggcttacatttcctcagcgctagatagagcttggaagtctactgtcaaaattccctatgtgaggcatcccattgagcatatttgcattttcaaagaagatatcaatcatatcacagtccagtctgataatataagctgacagccattaggtctctttaaggtaactttgcctaacaacagctctgataattatgtatagaatgagaagaatcgatgctcagggcacaatcttattttcctcatctctggagaaagcctcaagttctctatgataacaatataaacttagacacgttcactaaacttatctgggaatcactttttccaccttcaaatggattgtgtgaccacagagtttcctccagttctagggctgaggcaaactgaggttggtaccacagttgagtttacctgggagaggaatttatccacagtagactggagtactgtggctgcaatggaatagaatacagcaaaaattgttgaaaaccagggttgtggccaggaaaaggattccacagccctggtttccaaccctgggtgccttgtctgaagaattttttttttaaagggtcaagccagaaactggacagtgaggaaatgtctgaagatgactatttaaaactaagatagtatatgggagggataaaccagattattattattattatttttgcaatcagtatttgtcaaccaaatcagacctgatgcctgtttttctataacacatattttgttatatgttgtaataaaataattaatcagttgtttgaacttatgtagaatcactgtgcatgttcaatagcaacaaatgcagactcagtgatagaagtgggctaattggtagatataa

SEQ ID NO: 699202 - DNA, 695 bp, Homo sapiens
ccagagagatagaagaactcaatttgcctttgtaggctttaaagatggaagtagggggctttgcctcaaggagtgcaggaggccttgagaatctgtaaaaggcagataaatctccagaaaggaacacagccckatgccttgattttagcctagtaagaaccacattgaacttctgccctacagagctgtaagatagtaattttgtggacttttaagccattaaatgtgtggtactttgttacagcagcaatggaaaacagatacaccacttctctctataggaattgctcatctctgtctctgggactcaggaccacctggattttttccctaacaggtttttgtatctcgaaatagctaatctctaggagaagaacttggcatgttggtaccttttaattcccaaaagaggttcacttcaaattttccaagtccttcctccagaaaccttcaaattcctcaaatcaatagcttccctgcaaggaaaacaacaccacaaaaaatattcacattttggagatcctgctatatagcattttctcagagtttcttcaaattatattcctttaagttaattactagatgggtttatgagttatttagtgaactggaatgctatagaaggcacagaatgggcaaggaatgggggcagtgggcataggattcatgtgtgactcacattaattcccagagat

SEQ ID NO: 699203 - DNA, 546 bp, Homo sapiens
tgcacttcctatgtaggggtattttgcagtgttattagaggcagaatgttaaggaaaatagacatttgcaatgaacatctgttataaagttagaaagagtccggtttagggtatcactaatcccacaccataaaaatatctggttgaacggtcatcgctaatattattcatggagattcaagctaaatacagttagttcatcctactaggactcatttgactagaacctatcctttgcatctaaatgttgtaaataaacctttaataaatagttatcaatacaatatagaatagtatattcagaatgcagaaagatcctttcaggctataagagcatgtttaataaaattcagctatgagatatgagatggagtaagtaacaacagcagcgacatccaccaaagcctcagacaaacaaatmattcatgcacatatatgtgaaagtatctccttcccatacctcccaacagaaattattatttaattaaatgggcaaaaccttgaattaaattgatcttatatactgtactctatggccaagaaaac

SEQ ID NO: 699204 - DNA, 2863 bp, Homo sapiens
tgggtttgcattgtagagaacagatcaagtgtgtcagaaaagtaggcactggctagggaggaggaaatcattaactatttcaggccactaatatgaaatggtattcactgaagaaataaaatagcaaattacatttataaagaattaatgttcctttaaaaatatctggccatttgattatttgcctcagagaaaatgacscccctccccaggtttgtaaatttaagagtgctagtgagcttgaaagagccttatgatgtttactttttctctcctttaccaaagagaaaagggacttacttgggaagataatatcatcactttttgatttttttgatgccatgtcatcttattgatgttttaaaagacttggaacaacatgaagcactttaatggagagataaatattttttaaacaagttattattttttctttggccttttatctgttgtactacttagtgtaaatacaatttaaaaatcataagttgaaattttttaatttagatttagttctccttaagaaattcaacaagaaggaaatataaactctaaatagacctttcttatacataggccatactgcggtgtgtttattttctataaaataaatgtcacttttagcttctgttaacccacatcattccagaacatttcctaatgattctttttaaaaaacatttttttgttctgtaaatctattactgtgaaagtagttccttcctggcttcctgctgtgtttctctgctattgcattattggtacttactgtgtcacaatgatctgtctttacaaattaattttgtctttttcttctgaattttttcaatgctcttgattttttttcaatttatactaacattttaattatcaattcctttctaaagaggcattcatactgtttgcaaaatttaattacagtgccttccttccttaatacattaaacctataagtcttcttagatttttgtattttctgttagctcaaattaataagggagaatgaaaacattcttacattgatctaaattattttcctcttcttttctattttttgagcagcaaattgaacattatttatttttatcatatttgagattcttgactataaaaacatgtccttctacctctcctaatataagggtagtctatagttttaagaaagtatacacttacatatcccacatttatttgtcttctctgtgtccatttattcagccagacatctattgagtgcctatcacaggttggacactgtgttaggttatgtttatttgttattgtttctttacaagagcaacttaaaaaattatctttctaatgccgctcacaaaaaatatattgaaactaactctcttactctgatctcaacgatatctcttacataggtaattgaactgtagtgtatttatgaaataatagacaggacaaccaaataaacactagtagttctgataattctaaaactatccagtgaaattgtctatgtgtttgtttatgtgtacaaatcatcaagatttgtgaaaaaaaactacagaaaacttgattatctttactggcaataatttagttttaaatggcagactgagaacaagtgaatgtaagctgtaacttaatatcatttagttatgcaccaacttggtcaaatcattaattttatctaacatcaaaaagaaaagctggatgcatgaaaaattcttgatagatatgttaaaattatttcatttactgaaaattaactcttttcaaataaagtttagtttttagatctttatagattatgagaaaagaatcaggagaaagaggaaagaaataaaaaatggaagtctaaaccaatttctggttcggtttagtctccttcactgaacaaatatttacaaaacacctgctctgagccaagcagaatgctggggatgcaggaggactcacttgaatcatgagtgatgatattgccttactttatgctagatttaagtttgggatgccctatggaaatactatgaaactatgttgttagctaaatagcatgaaataccttgtagaaaatgcaagtgaaaaagaacctgggaaagaaggttcactttcaaagacaaactattaagaatatcagtgactgcaggttagacagtaattgtagacaattaagagaagacagaacttctgattagaagagtgattggcaagagagttggccaggcagaaaggtgatgagacctttaggtgggaggcaggagcagagcttggtgtttcttttgtatagtgccccatctctgggttttaggaagcatactatcaaatgtttaaataatgctccaaaagttaggtaactcctcaaggttacgcagccttcaagtggtggtgcctggacttaaacctctaactctgtagctagtgatcttaggaaggtctgcattttagaatttttctgctgaaacaatagaattcccatagctattacaagttcaagtatgagaaggaatgaaaaagaaatactgcctgaagatttccttcatcagagaaacatagggattgaggaataccaagtggtcttgaggatatgcattgcagaccagttcatttatgatttatttattcattcaacaaacactgatttgacatcctccacataccatgagccctgcttctcacacctggcatgggtcttgagagccactctggcaccatgttgcattttattgggttctccaaagtgaaacctatttataggttcatccttgtatccaaccaccaaagttcagataataatttgcctcttgatttgcagccaggggctttccagttagtgagaggggttgatataagggagagtgaagaaccaaaagaggtaatttgtcttcatttc

SEQ ID NO: 699205 - DNA, 2080 bp, Homo sapiens
gggctgctgggctgaggacctgagcagatggtggtcattaatagcaccaacatgtgaccagctgtaattgtgctggaaggactgaagccactgatggttgctccgtactttggttctacttaaaaaatacttttagcaggacataattcattatacaaggcagcattagcaaagaaatatcagactcccagtaagtgccattttcctacccctgtgttttaacaagtattcctggtgtttagaaatacatagtctctcagtcatcgtgtgggtaaaagtgagaagagttgtttttctcagtggatcaagactaagtcttatgagatttgaaatctagaagctctgctaaaattgcatatagcaatgcctgtgaatatgtgaaccgaatgagaaacacatttgtgtcctagagcagaaacttagattcagctctttatacacacaatgacccctcctggttaattgacttgcaatggtagtttcaggtatccagcagtagttctggctacagcagatctgtctacccactgcctctaaagctaatctctccagttaatagcttgcagcctgggcctcattaagtcaaagaacttctgcccatacaataggctgtaatcctctgtattagtatgaggtaatttggctcctaactggggaatttttctcgtctaataagaggagaaattgtttggtacagtagaaatcatatagtttcccagcatttggctcttggagaaagtcagggattctgtatcctgttccttacctctggagggattcttaagttgttttgggtatcttacagcaaacacttttagtgacaaacaagtcaaattaataataataataaaaaacctaacagttgttgactactgcgtgcttaagaagagttctgagccattttcttgcatgaactcataatgcccacaacaactctctaaggcaggtattcttatccacatgttgcatacgaagaaactgaggcccagagtgattaagcttcatttaaaaagcgtgaaatggggcagtgagwcatgaacagtgccggaggaaatgttccaagaagagggaagagcaaattctagaatccttgagtggcaataagcctggcacatcccaagggcaggaagtggaccacaatggtgagaggatgttggcccacacagagcggtaggaaatggagtgaggcaggaccagtatcgtaccagtgctaagataaaagcccaagcagtctaatttggagtccagactcttgatcattgatatgatttggctctgtgtctccacccaaatctcatgttgaattgtaatccctagtgttccaggaaggaccaggttggaggtgattggatcatgagggcagtttccttcttgctgttctcctgatagtgaatgagttctcataagatctgatggttttaaagtgtgctgtttcccccttcgctctctctcaccctcctgcttcactgtggtaagacgtgccttgcttccccttcaccttccaccatgattgtaagtttcctgaggcctccccagccgtgtgaaacgtgagttaataaaatctcttctctttttaaataaattacccagcctcagttagctcttcatagcagtatgaaaatgggctgatacaatcactattcaatatagcttctaaaacatacatttgtattatagcatgctagaccaggctgtgtgagccacttgggcactgcatggatttgggtgagccggggaagatgtcaaccccactgtcagttgttatgcaaaggggagccttgtcttcatcctaagttgaaatcttagggactgtctcttctggacataatagaagtgtgtcctgtgtccataattgtaaataaacttactggcatatagaaacagtgcctggtgagctctttttgaggatagatgctaggtcttctctttcattctcaggacccagcacaatggtggggccactcaaatgtttttgaatgaatacatgccatttttttggaagctgtgagagtttatacatcatttttcacctattgccagacatttgctgtctccatatcttactctatacatgaaagca

SEQ ID NO: 699206 - DNA, 2080 bp, Homo sapiens
gggctgctgggctgaggacctgagcagatggtggtcattaatagcaccaacatgtgaccagctgtaattgtgctggaaggactgaagccactgatggttgctccgtactttggttctacttaaaaaatacttttagcaggacataattcattatacaaggcagcattagcaaagaaatatcagactcccagtaagtgccattttcctacccctgtgttttaacaagtattcctggtgtttagaaatacatagtctctcagtcatcgtgtgggtaaaagtgagaagagttgtttttctcagtggatcaagactaagtcttatgagatttgaaatctagaagctctgctaaaattgcatatagcaatgcctgtgaatatgtgaaccgaatgagaaacacatttgtgtcctagagcagaaacttagattcagctctttatacacacaatgacccctcctggttaattgacttgcaatggtagtttcaggtatccagcagtagttctggctacagcagatctgtctacccactgcctctaaagctaatctctccagttaatagcttgcagcctgggcctcattaagtcaaagaacttctgcccatacaataggctgtaatcctctgtattagtatgaggtaatttggctcctaactggggaatttttctcgtctaataagaggagaaattgtttggtacagtagaaatcatatagtttcccagcatttggctcttggagaaagtcagggattctgtatcctgttccttacctctggagggattcttaagttgttttgggtatcttacagcaaacacttttagtgacaaacaagtcaaattaataataataataaaaaacctaacagttgttgactactgcgtgcttaagaagagttctgagccattttcttgcatgaactcataatgcccacaacaactctctaaggcaggtattcttatccacatgttgcatacgaagaaactgaggcccagagtgattaagcttcatttaaaaagcgtgaaatggggcagtgagtcatgaacagtgccggaggaaatgttccaagaagagggaagagcaaattctagaatccttgagtggcaataagcctggcacatcccaagggcaggaagtggaccacaatggtgagaggatgttggcccacacagagcggtaggaaatggagtgaggcaggaccagtatcgtaccagtgctaagataaaagcccaagcagtctaatttggagtccagactcttgatcattgatatgatttggctctgtgtctccacccaaatctcatgttgaattgtaatccctagtgttccaggaaggaccaggttggaggtgattggatcatgagggcagtttccttcttgctgttctcctgatagtgaatgagttctcataagatctgatggttttaaagtgtgctgtttcccccttcgctctctctcaccctcctgcttcactgtggtaagacgtgccttgcttccccttcaccttccaccatgattgtaagtttcctgaggcctccccagccgtgtgaaacgtgagttaataaaatctcttctctttttaaataaattacccagcctcagttagctcttyatagcagtatgaaaatgggctgatacaatcactattcaatatagcttctaaaacatacatttgtattatagcatgctagaccaggctgtgtgagccacttgggcactgcatggatttgggtgagccggggaagatgtcaaccccactgtcagttgttatgcaaaggggagccttgtcttcatcctaagttgaaatcttagggactgtctcttctggacataatagaagtgtgtcctgtgtccataattgtaaataaacttactggcatatagaaacagtgcctggtgagctctttttgaggatagatgctaggtcttctctttcattctcaggacccagcacaatggtggggccactcaaatgtttttgaatgaatacatgccatttttttggaagctgtgagagtttatacatcatttttcacctattgccagacatttgctgtctccatatcttactctatacatgaaagca

SEQ ID NO: 699207 - DNA, 803 bp, Homo sapiens
ggtgggacgctactgttcacatcacagggaagatgtgaatgggggtggtttggggtggagcgttgaccaggcttttaagagaactgtgggtttatgcctggtaatgataaaggaaagtagatttcaggtgcagaaaacatatccgttgtcatttaagtaaagttagaatcataggtctgagataatttaatagacttttccatttgtcaaagatgtatgtcttatttcccagtgatctstttccttctcaaatatacttgctactacaaatgacattccaagagcccatttcagtcccctgagcgttttgatttttctttcgagcagtagacctgctgtagtttaagctggttgggaaagctgtcgttcaccttgatggattaccgtccccgcagtgagcacccagtctccagaaagttcacggctccctcaccttatgtatctgatttatgtagaaacgtcgataaattagttaggagggcattcttgctgatatcagcaatcccagagcacctgggaggaaagcagagtgaagattttgaaagtcacaggcgatgtcggccactctcctgtgtggcccaggaacctcacacaatgataagataaggaagtttaatggatggtgctgccttctgaaagattaatcgtgccttgaaatctagatattttcatttcaggctgaaaacagtaaattagaaattaataaaaaggagatgatttcatcagctcaacaagtgcttctgatttcaagaagttttccttaaattttttttttcactgctgaaaaaaatcagtgtcttgat

SEQ ID NO: 699208 - DNA, 1067 bp, Homo sapiens
acaatctgaaatgccaagatgaagagactcataaggcaatgcaaactgctaacacagatgagccacactgggcctctttcctgccatttaactcaaaattctaatatatttagcaaaaataatctcaatgatttgcatacaaatctgtgcctatccacaaatatttctcactcagtgttcttccctccagggtttgtcattgcaaggaactgtcgggttccactccttactccttcatcaagcccagtttttatttatctctagagtccgttggtggttattacttaccttattggaaataatgttgccctctaagagctaaagggtgaaataaatgtctagtgaacccatagaagagaaacaatgttaccttaaatacaggaataacagaagcaatgttctgttccccacactgcttcctcttcccagaaacacagaaaaacacctttctttgctgccttaaagctggttgtggaccctatgcttgagtcctcttcctgcacactctgcaggagtgatgctatccctggccagggcagtacagccaggggcatgctccccacactctcatctgtgcagctgagattagagaacgctcagatggcagagtggaagctggaagcatcgtgggtctctgaatcatccctggagaagagccactaagagagatacctgactcaccttggattgtggtacragcaaggaataaatttgtttctggtaatcactgagatgtcacagttttttacagcagcagagcctaccctatcctgactgcttcaacaagccagccctgaaagcacaggggaaggagcgttccaaaagcagaggcagccactacctagccaagacctgtcctcagagaagcaccttagctccaggcgtttttctggctccactgacaaagtcttccaccaggtagaaactggaatggttattgtggccaacttgtttaattcctcaaaccattaagctatcagttcacctagtagccattgttcttatttggtgcttgcaataattcaagtgagagataacgtggcttctgtgatctatggcatcgttaa

SEQ ID NO: 699209 - DNA, 614 bp, Homo sapiens
ccagaggaggatgccagactccctagaccaacattcacatttcagcctcccattccaccaccttttggcagactctgagcttgaatcacatcccaccatgggcttcccacctccaggcctttgcttctgtgaccttctctgccaggacttcttccccgacccccaggtctctacttgatgagctcttccagtgtctatgcacacttcaaggcccgagacttctttctaggcagaacagctgcccctagtgcttaattcctgccagcagaacatttgcacagtggcatagtgacttctggtgggctgtgtctatgctagccactctcacctgctggagttccttgagtaaaggaattgagccttagctatctctggtctgctgggcacacagtaggtggctcaatgcacattcaaaacaaatgcactggaaaacagcttgttttcttaccagaccactctatataggcatgtgggcagacacaygtgcccttttctacacatcggttgctttttttttttttttttttagaatcctacatttcccaatgaaagcaagagggtcatgaaattaatttgtcactctggtgccagcttcaatcagcttactcatgacc

SEQ ID NO: 699210 - DNA, 1420 bp, Homo sapiens
ttccttgtcatctgttctttcccttctttgttcctgttcagcatcaaygagttctcaattttgcattttctatctgggaagaagggagaagtatttctcaagtgttgactgtgtgtcagttactcttctttatgtcacttacagtatcacatgcagaagctggtatgaatagccccattttacagatgagtacactgaggttcatggtcaagtcacctgccagaggttgtgtaccttggaagtagtcaagctgggattcagttctagggtttttggatttctctttctccactaccaccctccttccttagacttttatactatttgatattgtcatcagtgcttccagtcatattccttgtttttgttccttggttttgtcacatgaaagtttatccaaaattcataattcatgatcaaaactagctaaagacattataaaactgaaaaaggacctcaattcagatggaattgtccctcctacccgcactatatctcagaacttaaaagaaacccaaatttgaggtaggagtagctttggtcattaagtaaaacaggttctcagttcagcccgcattgtgagacttcatttgaggagtcactccagagtagctaatatacaagatttttttttttttttctgtcttgctttgtagctcaggctggagtacagtggtgtaatcatggctcactgcagccttgacctctggacttaggcaatcctcccacctcagccttcaggcttcatataaatatagaagcaccaaattgaaaattgaatctcttctaatagtctccattttctacctgtttaacacagttctaaaggagaaaatagccacagaaatttctggtatttattatgagtagagaatttttaaaaatagcttaattgagatataattcatataccataaaatttacccacttatagtgtacaaagctgggcattatagtgtacaaagctggttccatggcttctatccatctctcctgctgtggtcacttgaggtgggaggatcctttagcccaggagtccagcctgggcaacatagtgagatactgtctctaaaaacaaacaaacaaacaaagtacacagttcaatagtgtttagtatatccagagatatgtgcagccatcaccacagtcaatttgagaacattttcatcacctcgagaagaaaccccatatcgttcagctgtccccctcctattcccacacacttgccgtctccagccctgagtaaccactaatctccttcctggccctgtggatttccatattctggaatttcatgagaattgaatcatagagtgtgcagtcttttgtgactggcttctttcacttagcactatgttttcatgattcatccatgttgtattgtagcatgtaacagtacttttatttttttttacggcga

SEQ ID NO: 699211 - DNA, 1420 bp, Homo sapiens
ttccttgtcatctgttctttcccttctttgttcctgttcagcatcaacgagttctcaattttgcattttctatctgggaagaagggagaagtatttctcaagtgttgactrtgtgtcagttactcttctttatgtcacttacagtatcacatgcagaagctggtatgaatagccccattttacagatgagtacactgaggttcatggtcaagtcacctgccagaggttgtgtaccttggaagtagtcaagctgggattcagttctagggtttttggatttctctttctccactaccaccctccttccttagacttttatactatttgatattgtcatcagtgcttccagtcatattccttgtttttgttccttggttttgtcacatgaaagtttatccaaaattcataattcatgatcaaaactagctaaagacattataaaactgaaaaaggacctcaattcagatggaattgtccctcctacccgcactatatctcagaacttaaaagaaacccaaatttgaggtaggagtagctttggtcattaagtaaaacaggttctcagttcagcccgcattgtgagacttcatttgaggagtcactccagagtagctaatatacaagatttttttttttttttctgtcttgctttgtagctcaggctggagtacagtggtgtaatcatggctcactgcagccttgacctctggacttaggcaatcctcccacctcagccttcaggcttcatataaatatagaagcaccaaattgaaaattgaatctcttctaatagtctccattttctacctgtttaacacagttctaaaggagaaaatagccacagaaatttctggtatttattatgagtagagaatttttaaaaatagcttaattgagatataattcatataccataaaatttacccacttatagtgtacaaagctgggcattatagtgtacaaagctggttccatggcttctatccatctctcctgctgtggtcacttgaggtgggaggatcctttagcccaggagtccagcctgggcaacatagtgagatactgtctctaaaaacaaacaaacaaacaaagtacacagttcaatagtgtttagtatatccagagatatgtgcagccatcaccacagtcaatttgagaacattttcatcacctcgagaagaaaccccatatcgttcagctgtccccctcctattcccacacacttgccgtctccagccctgagtaaccactaatctccttcctggccctgtggatttccatattctggaatttcatgagaattgaatcatagagtgtgcagtcttttgtgactggcttctttcacttagcactatgttttcatgattcatccatgttgtattgtagcatgtaacagtacttttatttttttttacggcga

SEQ ID NO: 699212 - DNA, 1420 bp, Homo sapiens
ttccttgtcatctgttctttcccttctttgttcctgttcagcatcaacgagttctcaattttgcattttctatctgggaagaagggagaagtatttctcaagtgttgactgtgtgtcagttactcttctttatgtcacttacagtatcacatgcagaagctggtatgaatagccccattttacagatgagtacactgaggttcatggtcaagtcacctgccagaggttgtgtaccttggaagtagtcaagctgggattcagttctagggtttttggatttctctttctccactaccaccctccttccttagacttttatactatttgatattgtcatcagtgcttccagtcatattccttgtttttgttccttggttttgtcacatgaaagtttatccaaaattcataattcatgatcaaaactagctaaagacattataaaactgaaaaaggacctcaattcagatggaattgtccctcctacccgcactatatctcagaacttaaaagaaacccaaatttgaggtaggagtagctttggtcattaagtaaaacaggttctcagttcagcccgcattgtgagacttcatttgaggagtcactccagagtagctaatatacaagatttttttttttttttctgtcttgctttgtagctcaggctggagtacagtggtgtaatcatggctcactgcagccttgacctctggacttaggcaatcctcccacctcagccttcaggcttcatataaatatagaagcaccaaattgaaaattgaatctcttctaatagtctccattttctacctgtttaacacagttctaaaggagaaaatagccacagaaatttctggtatttattatgagtagagaatttttaaaaatagcttaattgagatataattcatataccataaaatttacccacttatagtgtacaaagctgggcattatagtgtacaaagctggttccatggcttcyatccatctctcctgctgtggtcacttgaggtgggaggatcctttagcccaggagtccagcctgggcaacatagtgagatactgtctctaaaaacaaacaaacaaacaaagtacacagttcaatagtgtttagtatatccagagatatgtgcagccatcaccacagtcaatttgagaacattttcatcacctcgagaagaaaccccatatcgttcagctgtccccctcctattcccacacacttgccgtctccagccctgagtaaccactaatctccttcctggccctgtggatttccatattctggaatttcatgagaattgaatcatagagtgtgcagtcttttgtgactggcttctttcacttagcactatgttttcatgattcatccatgttgtattgtagcatgtaacagtacttttatttttttttacggcga

SEQ ID NO: 699213 - DNA, 1758 bp, Homo sapiens
caagccatgaaaaggaatttgacctttatcctaagcacaataggggccataaaataattgtgggatggggcaaaggccaggtctgtgttaagaaagagtaggagaatggattgaaggaaggagaacaagtagaggaagggagattgattgcgtggccgcttgtggaaatcacagaaatcatggtagcctaaacttgagtagagtcagtggctttagaaagctgaacgtggaggccagcatacaaaagagccagctagctgactgacatgatgtggggagtgagggaggaagaggaagcagggcaattggtgatgctttttcttccttgacacaaagagtacctaggaggagaaggtgaaaggggtaaaggattagttccattttagttggtgggttaaaggaacttgtgagatgtatctatcaatatatttatctgtgtacctatctgtatatcatattcatgtattctaatcatcctaactactcctctcatttattttttattttgaaataatttcaaacttaaaaggtcacaaaaacagtacaaagtgctttttgtttttttggaatcttttgagagtaaattgacaatatgatgtctcattactttccaatacctgagtgtgcatttcataaaagcaagggcatctcctacatttacgttttgtcccagtgatgtcctttacagcaaaaggatccagtctagaatcacatgttgcatttactcgggatgtctctttaatttccctccatcttgaatggttcctcagtgtttccatgaccttcaatatctagacatttttgaaaatcacaagctaattattttgtaaaatatccctcaatttgagtttgtctgacatgttttgcaattagatgcaggttatgattcaggaatttttgctaggaatatcacaataattatgtgttcttttcattgcagtctatcaggtggtgcacagctcctgttcgttacattactgaaaatgtcaaccatcatcatttactaattttgctatgagatggggaggtagatgcgtagtgtacagatcagctgatggtttacagaagagtaaacattcagaattccctcccaccccccgtaagccttgttcagagaaatattttttacataataactgtagtctttactgttattataatttggattattgcccactgaatttattatcagtttagtgsagaagagaaatactttgctcttgccttagattgaaaggctctccctgttgccactgtgctctggtttccagatgccttgctctcactgggattgatgtgctttctcacagagtgaagagagaacctgacagccataggaggaggaaggtttgcctcactttaagtccggatgtggttaaagcatgggagtgggagaagagaagggatttgactgagacaagttgatttgagtgaagccgctactcttagacaactttgcgtaaaacagctggttagttaatatgtttctcttttattccatgctagtcctccaagccttaaaacaacttattagagattagaatttttaaaatctgttttgcaataaggcacgtgtccagttgaattctaatttcactaaacctgccccctagaaaactgctgaacttatttgaaaacactgagtcatgatgatataaatatatgatggggatttaatgaagtaggtctaatttcaagaatatctaatttatgaaaccaagcagtactgtggaatttgttggtaattagaaatacagg

SEQ ID NO: 699214 - DNA, 1758 bp, Homo sapiens
caagccatgaaaaggaatttgacctttatcctaagcacaataggggccataaaataattgtgggatggggcaaaggccaggtctgtgttaagaaagagtaggagaatggattgaaggaaggagaacaagtagaggaagggagattgattgcgtggccgcttgtggaaatcacagaaatcatggtagcctaaacttgagtagagtcagtggctttagaaagctgaacgtggaggccagcatacaaaagagccagctagctgactgacatgatgtggggagtgagggaggaagaggaagcagggcaattggtgatgctttttcttccttgacacaaagagtacctaggaggagaaggtgaaaggggtaaaggattagttccattttagttggtgggttaaaggaacttgtgagatgtatctatcaatatatttatctgtgtacctatctgtatatcatattcatgtattctaatcatcctaactactcctctcatttattttttattttgaaataatttcaaacttaaaaggtcacaaaaacagtacaaagtgctttttgtttttttggaatcttttgagagtaaattgacaatatgatgtctcattactttccaatacctgagtgtgcatttcataaaagcaagggcatctcctacatttacgttttgtcccagtgatgtcctttacagcaaaaggatccagtctagaatcacatgttgcatttactcgggatgtctctttaatttccctccatcttgaatggttcctcagtgtttccatgaccttcaatatctagacatttttgaaaatcacaagctaattattttgtaaaatatccctcaatttgagtttgtctgacatgttttgcaattagatgcaggttatgattcaggaatttttgctaggaatatcacaataattatgtgttcttttcattgcagtctatcaggtggtgcacagctcctgttcgttacattactgaaaatgtcaaccatcatcatttactaattttgctatgagatggggaggtagatgcgtagtgtacagatcagctgatggtttacagaagagtaaacattcagaattccctcccaccccccgtaagccttgttcagagaaatattttttacataataactgtagtctttactgttattataatttggattattgcccactgaatttattatcagtttagtgcagaagagaaatactttgctcttgccttagattgaaaggctctccctgttgccactgtgctctggtttccagatgccttgctctcactgggattgatgtgctttctcacagagtgaagagagaacctgacagccataggaggaggaaggtttgcctcactttaagtccggatgtggttaaagcatgggagtgggagaagagaagggatttgactgagacaagttgatttgagtgaagccgctactcttagacaactttgcgtaaaacagctggttagttaatatgtttctcttttattccatgctagtcctccaagccttaaaacaacttattagagattagaatttttaaaatctgttttgcaataaggcacgtgtccagttgaattctaatttcactaaacctgccccctagaaaactgctgaacttatttgaaaacactgagtcatgatgatataaatatatgatggggatttaatgaagtaggtctaatttcaagaatatctaatttatgaaaccaagcagtastgtggaatttgttggtaattagaaatacagg

SEQ ID NO: 699215 - DNA, 650 bp, Homo sapiens
gcccaggctggagtgcagttgcrtgatgggctcactgcagcctctgcctcctaggttcaagggatcctcctgcctcagcctccctagtagctgggatgacagccatgcggcaccacacctggataatttttatatttttagaagagatgggctttcaccatgttggccaggctggtctcaaacgcctgacctcaagtgatctgcctgtgggcctcccaaagtgctgggattacaggcatgagctaacacacccggcccaaaaaggcactgcttttctaaaaccaattttattaaaggtatgtgtacatgaagtgacagtaccctcaactgagtgagtggtgctagaaaaggtgctggctggggaaggatctatggattatatatttcaactgccatgtgtttagatgaggaaaccgaggcccagaatgaccaccttcacagcaagctgagactacaagccaggtttccagaataggcagggatgaaagcactggacaaagcctgcctgtccggcactaatcactgggtacgcagtgacgacatgaaccaagggaatgaggagaagggacagcggctgtaaaggatggaaagagtcaaagtgacttcgaggcttcaggtctgggggcttggaagaatggagactgaaatgg

SEQ ID NO: 699216 - DNA, 610 bp, Homo sapiens
agaaccactgcctagtaaatatcaggaaacctctaggaaccttactgaccctatcttacctaattcttgctatcaatctataagatggacattgttagttctgtttcatagaagaggaagtaaaaactgagaaagttaagtaagttgtctttagtggtacagctagaacccacagcyctggaatgtgaactcccatccctctgattccaaaattctttgtagaattcttccaccttcataccctctcatcagactgagtcatagatctggaccgggtcttcaggaagactgtagcttctccatctgtaagagccttcaaaaaagtatatgcagcatttgcaacccagcgcatttacatcttcacctgtgtttttataatgcttgctcaaaagttctatgaagtgaggctctgcccatcctagacccctgtttcagatatttgaaaggactctgttaagtatagcactagtgccaagtggttcaaccactctgaattcctacaacgtattaccgatttttcccttaggttatttatttattcatgtatttactcggccacttaagaaatatttctagtatccactacacgccatcctgtgtactagaccca

SEQ ID NO: 699217 - DNA, 610 bp, Homo sapiens
agaaccactgcctagtaaatatcaggaaacctctaggaaccttactgaccctatcttacctaattcttgctatcaatctataagatggacattgttagttctgtttcatagaagaggaagtaaaaactgagaaagttaagtaagttgtctttagtggtacagctagaacccacagctctggaatgtgaactcccatccctctgattccaaaattctttgtagaattcttccaccttcataccctctcatcagactgagtcatagatctggaccgggtcttcaggaagactgtagcttctccatctgtaagagccttcaaaaaagtatatgcagcatttgcaacccagcgcatttacatcttcacctgtgtttttataatgcttgctcaaaagttctatgaagtgaggctctgmccatcctagacccctgtttcagatatttgaaaggactctgttaagtatagcactagtgccaagtggttcaaccactctgaattcctacaacgtattaccgatttttcccttaggttatttatttattcatgtatttactcggccacttaagaaatatttctagtatccactacacgccatcctgtgtactagaccca

SEQ ID NO: 699218 - DNA, 610 bp, Homo sapiens
agaaccactgcctagtaaatatcaggaaacctctaggaaccttactgaccctatcttacctaattcttgctatcaatctataagatggacattgttagttctgtttcatagaagaggaagtaaaaactgagaaagttaagtaagttgtctttagtggtacagctagaacccacagctctggaatgtgaactcccatccctctgattccaaaattctttgtagaattcttccaccttcataccctctcatcagactgagtcatagatctggaccgggtcttcaggaagactgtagcttctccatctgtaagagccttcaaaaaagtatatgcagcatttgcaacccagcgcatttacatcttcacctgtgtttttataatgcttgctcaaaagttctatgaagtgaggctctgcccatcctagacccctgtttcagatatttgaaaggactctgttaagtatagcactagtgccaagtggttcaaccactctgaattcctacaaygtattaccgatttttcccttaggttatttatttattcatgtatttactcggccacttaagaaatatttctagtatccactacacgccatcctgtgtactagaccca

SEQ ID NO: 699219 - DNA, 1048 bp, Homo sapiens
agagaagtcatttgcaaagtcatcaggcatgaagcccatcttcaaattcaaggcttagcgggcatggtggttcaggcctataacctcagcattttggggggctgcagcaagaggattgcttgagcccatgagttcgagaccagtctgggcaacataataagaccctatctcttagaaaaaaattaattaggctaggcgtggtggctcatgcctgtaatcccagcaccttgggaggctgaggtgggcagatcacctgaggtcaggagttcaagacaagcccagccaacaggacgaaaccccatcactactactaaaaatataaaaattagccaggggtggtggcaggtgtctgtaatcccacctactcagtaggctgaggcaggagaatcccttgaacccgggaggtggctacaatgagccaagatcatgccactgcactgcagcctgggtgacagagcgagactccatctcggaaaaaataaaacataaaaaataataattaaaaaacaaattcaaggcttatgtggttgcagagaacactcttctttgaggacaaatgagaaccagatattcctgttaagtcgggggcacaagtgttggcaatgaatatactgtatctccaaagcagatagatcttagacaaccagaatctctggggaaaggccrcattcatcaacctctgggggaaactggcttcaagtgactcaaaggtgacacccaatgtcgctctgggtaactacacagaaatcctaaacggtgttaaagaagagggagcaaggctgccctttacttccaatgctgtccagccagctccataaggctctgagaggctggctcaggtgagccagggctcaagtgaggagactggccagggcttggctaaaagagcctgtcactcaaaagtaagcccaaagcaagataagctgcattctcagggctgctgtatattttctcagcctgaataagctgctgctgatttagttatccgggttcttctcggattcctgtggctgcatttgaatagcagaaatcctggcaagaggagatg

SEQ ID NO: 699220 - DNA, 999 bp, Homo sapiens
cagagagctccactcctcaacacaggcagtcagcctttatggacagaaaacagaagtgaggtagggaagcaccttgattagttacagatcagcctgcctcgttggaacagtacctgatcccttggccgcctgggattatctgaagctgagctgccgtgattggctgagactcagcaacctgttacagactcacattcccaagttaggctttcacttagttcacwtactaaattaggctgtagtttgttaactaaggactcagtcacagaggcatcctcaggccaaatatagttaaatttaacaacactatctacagcagtaccttctggccgcttctattctctcagatggattgcttgttttgggctcattattggcactatatataataagtattcacttgcatatgtgttggaaaggaaaataccttgggccccccaaattactaagctaaagggaaaagtcaagctgggaaatgcttagggccaacctgcctcccattctattcaaagtcatccctctgctcactgagataaatgcatacctgattgcctcctttggaaaggctaatcagaaactcaacaacacaaccactttgtatcccacctatctgtgacctggaatccccctccccgctttgagtcttcctgcctttgtttcgagttgtcctgcctttccagaccaaaccaacgtatttcttacatgtattgattgatgtcttatgtttccctaaaatgtagaaaaccaagctgtgccccaaccaccttgcgcacatgtcgtcaggacctcctgaggccgtgtcacaggcacacatcctcaaccttggcaaaataaactttctaaattaactgagaccagtcttagattgtatgggttcacatgtgtcaacatctgatccctcttttagaatgtaagctccatgaagggagaaactcgagtttgctcccaacacatcctcacacctaggattatgtctgccatgtagctgggaccgagtaa

SEQ ID NO: 699221 - DNA, 581 bp, Homo sapiens
tgttgttttagaaacacaatgaacttgagtaaatgatatgatctcaaatggggtcaaggtgaatgacagtgtatctttgctgtcattgtagcttcaagcataatcacttctggggctattttggttgattatgcaatatgtacaagagcacagttgcatcagcatttttctttccaaatgtctttaatggccagctggcagtgaagaactgagtaaaccctagacaaaaayggacaattgtaaggagttttaaaaataaataaaacgttacaaaagatgatgggataagggcatgggaattttattaagaaactcaacatcatgcggacacaaagggaatgcttacacactgttggtgggagtgtaaattagttcaacctttgtagaaggcagtgtggcgattcctcaaagaccaaaaaagagaactaccatctgactcagcaatcccattactggggatataccgaaaggaatataaatcattctagtataaagacacatccatgtgtatgttcactgcagcactattcacagtagaaaagacatggaaacaacctaaatgcccattaatgatagagtgg

SEQ ID NO: 699222 - DNA, 882 bp, Homo sapiens
taactcaatatagtctacaggactgagggaatctaggagaaatgaaagctattaccaagtataattcctccttttctcttgtttcaatccctccagtgtcagtggagtcttctaaatccaacaggttgtgttaaaggagtcttaaagaataaaggggtgggcctagtatctatgggacaaaaatgaacatgtatctgcattagtcaatttagcaattcaagaaagtaaatgtatgttatgtgtgtctgtttgtatggagaaatagasgataaatggatagatgaatgtatatatacatatacacacacccacagacacacagagatgtatatatatacacacacatatagatacctatatcgagatagatgatatacagataaatgataaatacccttatatatgtacatatagaaaaatatagataaatacatttatatattcatatagaaacagacagatgacagatgaagacagaaagataaatagtagatgatggatgatacacacacacggacacctatttactgaatacttatgttacatttgtgctaagagcttttcatgtattatcacaatcgatacgagaattagtttattctcttttttgtttgtttgtttttttgacatgcagttttgctcttgttgcccaatctggagcacgatagcataatctcggctcactgcaacctccgccttctgggttcaagtgattctcctgcctcagcctcctgagtagctgggattactggcacccaacaccacagctggctaattttttctatttttagtagagacaggttttcaccatgttggtcaggctggtcttgaactcctgacctcaagtgatctgcccacctcggcctcccaaaatgctgggat

SEQ ID NO: 699223 - DNA, 882 bp, Homo sapiens
taactcaatatagtctacaggactgagggaatctaggagaaatgaaagctattaccaagtataattcctccttttctcttgtttcaatccctccagtgtcagtggagtcttctaaatccaacaggttgtgttaaaggagtcttaaagaataaaggggtgggcctagtatctatgggacaaaaatgaacatgtatctgcattagtcaatttagcaattcaagaaagtaaatgtatgttatgtgtgtctgtttgtatggagaaatagacgataaatggatagatgaatgtatatatacatatacacacacccacagacacacagagatgtatatatatacacayacatatagatacctatatcgagatagatgatatacagataaatgataaatacccttatatatgtacatatagaaaaatatagataaatacatttatatattcatatagaaacagacagatgacagatgaagacagaaagataaatagtagatgatggatgatacacacacacggacacctatttactgaatacttatgttacatttgtgctaagagcttttcatgtattatcacaatcgatacgagaattagtttattctcttttttgtttgtttgtttttttgacatgcagttttgctcttgttgcccaatctggagcacgatagcataatctcggctcactgcaacctccgccttctgggttcaagtgattctcctgcctcagcctcctgagtagctgggattactggcacccaacaccacagctggctaattttttctatttttagtagagacaggttttcaccatgttggtcaggctggtcttgaactcctgacctcaagtgatctgcccacctcggcctcccaaaatgctgggat

SEQ ID NO: 699224 - DNA, 882 bp, Homo sapiens
taactcaatatagtctacaggactgagggaatctaggagaaatgaaagctattaccaagtataattcctccttttctcttgtttcaatccctccagtgtcagtggagtcttctaaatccaacaggttgtgttaaaggagtcttaaagaataaaggggtgggcctagtatctatgggacaaaaatgaacatgtatctgcattagtcaatttagcaattcaagaaagtaaatgtatgttatgtgtgtctgtttgtatggagaaatagacgataaatggatagatgaatgtatatatacatatacacacacccacagacacacagagatgtatatatatacacacacatatagatacctatatcgagatagatgatatacagataaatgataaatacccttatatatgtacatatagaaaaatatasataaatacatttatatattcatatagaaacagacagatgacagatgaagacagaaagataaatagtagatgatggatgatacacacacacggacacctatttactgaatacttatgttacatttgtgctaagagcttttcatgtattatcacaatcgatacgagaattagtttattctcttttttgtttgtttgtttttttgacatgcagttttgctcttgttgcccaatctggagcacgatagcataatctcggctcactgcaacctccgccttctgggttcaagtgattctcctgcctcagcctcctgagtagctgggattactggcacccaacaccacagctggctaattttttctatttttagtagagacaggttttcaccatgttggtcaggctggtcttgaactcctgacctcaagtgatctgcccacctcggcctcccaaaatgctgggat

SEQ ID NO: 699225 - DNA, 636 bp, Homo sapiens
tggataccgggcttaatacctgggtgacgcaataatctgtacaacgaatccccatgacatgactttatctatataagaaaacaacatatgaacccctgaatcttaaataaaaattaaaaaaaaaaaaagaaactcattgtgcaccaaacaggtgatcctggtcctctactgttcctattatctggttttgtctttgcgggaaacagaagcaccaggttgagttcaagaaattatagagaagttagttgatgggaattaaccattaattgtgctcaggtggagcagggatgatagaacaagcaacccagtgttggcttgcaggtccccaacatgggtaagctgaaaccacatgtgattcaccatggtgcagattgcggatggggtggaggggtattgatttcagtttgagacacaacgaatgaagggtgtccaggggtcagtgggagatacgkatgataaaatatgagtctcaagcttggaaaaaaaaagaaaaacactggaactagaaatctcagtttggggagtcaccaagagatgcttgggggccaccagagggagggtgcagaggaagaagaaataagacgtatgcatagtatccacagcctctggtgacatgcatgcatttaactgacacta

SEQ ID NO: 699226 - DNA, 1189 bp, Homo sapiens
tgcccaatactgcccacatggaggattgacctcttcttccatctccttttcactccccattggcaccaatgttgccatgttcactgctcccctcctagaggcaaggtcaacgtcatctccagacatgcccattgctatggagcttccatcttgtttcctgacttcagtctttcctcacactaacccataatccatccaaatacagcctatggcatggtccacaccaagccacactctccctatctctgctttcaacgtgaagctagggcaatgtccagttcttttccctgacctcacactcctccccgcccctctcctcactatatccatctccattcttagttatctgtttctgcagtctactctctaaccaagcaagtatctttacagacccttatgaacaatgtattcattcttgtgctcacacctcggcatggaacattccccatatgcagatgatcctctctatttatctttactaattcataacctctccttcttcaaactcactccaaattcccttgcacagaaaaatcatcccctggaacaacactctaacccagagtcatcagttgtatatttcttcatgaatcagtctataaatgactgagttttagactgatgatgacgaacccaggagttaaaaaaagcacttcaccacatttgatttttttggcattgttttgttgagtttacagatcacagccaaaaaaatgaattcatatacagatataatcatgtcagaaaaaaatatttttcaaatcctctggacaatcctcctacttccgttgcaagaaacacacatccaaggagaatagagaaataataatgccacagcagtacaagattgactttaagtcatagctatttaggtaagaaagaagatgtgggtctgcctgtccttagctctaaggagggtaacacaccctgttgctatgctctgaaaggttcctstcttccttcttctttaggatgtcaaggaaagaagatccaactctcctcctgtctcctactctcacgctcatcaaccatgtcattatcacagacttttaaaaaatttaatgatttacatgaaattatagtgttttaaggaacaagtccacagtctttctccaagttttatttcttgtaagaaaacagacattaacaatttagacccacaagtgtataggggtgaaatattatattc

SEQ ID NO: 699227 - DNA, 606 bp, Homo sapiens
tgtgtttctgcccagcattagagatggcaaaacggtcgagcatatttgcttgagtgttgacagagcttttgggggtgcgccaggatggaagaaaagctgcctgacagggacaagatggaatcattcatctttgccttctgggtggggaactgagttgaagagaaagactggggaaagcctctgcttgcttaggagcagaacgagcacacagttaatgctcattaygttaactaagcttagaacttctatactaactatataagagctgcacatcttccacatagcccagtgagatggatccccgatgctgcctgtgctggcctggagctacattggctaattgaagcacatcttgctgtgtgtctctggaggggaaatcgtctgcaaatactacattggtctagactttccatcctgctgctaatatttattcctgagttgtttgctagaaacaatcagcctaaggagggaggatttttttttttttccaaaaaagaactcatgggcaattagtgaggctataaagttaatgtcagcctgaacgaattttctggacattgtatctagcatttactgtgttaggttatgtaagcccagctgtagaat

SEQ ID NO: 699228 - DNA, 611 bp, Homo sapiens
ttttacaactgaagaaatgaagaattacagaataaatttcttagcagagaaaaagaaaagtatataaatgaagaattagtgtgtcatgcccaagatatgacagctggttaggttatcgggcttggatttgagtccaggtctgtctgatgctaggacccatgctgtaattacatggtgtctggctccttggcaaacatgataagatggaagaggaagagcagaatctgggcttactatgagccaggcacagtgttggatgccacacatgyattatctcttgagcaaagttgcactcaggccacagagactgaggaaacaaaagattaagaaaagacaaatttcacacctgtaatcccagcactttaagaggccgaggcaggtggatcacaaggtcaagagtttgagaccagcctggccatcctagtgaaacttcgtctctactaaaaaatacaaaggttagccaggggtggtggcgggcacccgtagtcccagctactcaggaggctgaggcaggagaattgcttgaacccaggagacggaggttgcagtgagccaagattgagccactgcactccagcctgggtgaaagagtgggtctccatctcaaaaaa

SEQ ID NO: 699229 - DNA, 861 bp, Homo sapiens
taatgatatgagtgtcctgcaaaagccaggggcccttaggcaaacataggcacctgacccaagagccaaaggcaatgaaagaggattcaggggaaggaactgttgcaagtccagctgctgccacttgccaggacaagtcaacagatcaacaacatgtgtgrgccgcatgacggcccatgctccagctcttccttcaggtctctcctgaggcccaactgggagcagccagggaaggggattctaggaaattcagttccacttagcttaattatgaagccaccagagtgtgaatgccggtcagttttagaaaaaaaaacttgaggtttttctcacctgcttctaatttctctttaggggataaggtaatgtgctgggagtgaggaggctatgggtggtgatggtgatgtcactagtggttgaaatagcaatagtgaataatggagctagctccattcactcctattcaaccttgaactggagtttctggccagtgcaataagacaagtaaaataaatgaaatgcataagttcagaaggaaagaagtaaaactgtatctattttcagatggcatgattagttaagagaaaaatccaaaggcatcaataaaacaactagtggaactaacaaatgaatttagcatgatcatatgatcaatgtcagtacacaaaaaaattaattataattttacattctagcagcaattagaaactgaaataagaatcttccacttacagtgacacctaaaatataaactatcccaggctaaatttaatgaaaacaatgtgcaagacctctactgaaaaccataagctactgctgattaaaattaaaaatcacctaaataaatgtagaaatgtatca

SEQ ID NO: 699230 - DNA, 2599 bp, Homo sapiens
atgatggtttccagcttcatccatgtccctacaaaggacatgaactcaccatttttatggctgcatagtactccatggtgtatatgtgccacattttcttaatccagtctatcattgwtggacatttgggttggttccaagtctttgctattgtgaatagtgccacaataaacatacgtgtgcatgcatgtgtctttatagcagcatgatttagaatccaaacattcttatagacaagggctccttctcctgacgtttctgatctcattctaaaacattcacccagtccactgacctgtactgggcgctgtgctgggtgccaggcactgcttttccatattcttttctaaactgctaaaatgggtgattattcctccaggctctttgctgacactggggggaaattcttcttggttttcacacccctcttaggacgtgtcttccactctggctttacttgttcatagattcatgaaatcctcaacagagatccttgcaagtgctgaggagatagtggtgaacaaaatagataagatttctgcttttgtaaagtttacattcttctagggatcgtgtgtccttgatttggaatgcctgcttaggggggtcatgagggtataaccctggtttcctagtttccagggaatgggttgggtcattccttgtgtaacagaatattacccaactggaaccaaaaaattccttcagtgtcccttcaggcattggctttagctagtaggaggatgtagagaaattttgtgcttctgttatatctttctcatggggagctatgcagatccatctgtagggatctagatcggctacaatagtagtggccccagagaaagttgacatcagaacccctgatctacctggcatgccacctttaagggctttaacttcagctctgtgacgttccctaggaaaatcccaagaagaggtgtcccaaaccagtggtataagtaagagcttaggtcttgagtccatcactaaagaccttgggcaagttatttaatctctttaagtctcagtttgctcatctgtaaaataggatggcagtataacccatctactattttaaggattgtacgacattctgcacctaacaccttagcatagtacctaacacataggagattttagtaattattaactactatgagagaggtcaaggaggggagggagaggtgccatccatggtggataagttgtgctagcaagtgtttgtatgtggaacttttctattgttaactcttttacctctgctaatttttgccattaccaccggacccctatgtaggactcatctcctctagggtaaggtgccccgatggatcatgattatcagcatcctttttagacatggatgtaagatacttctttcttggcattctattctattctcgctggttctggattgaatccaaatactaactggggttatgtccgttttatagcaatgccatgttacaacttgtaaaccgtcatattatgtagccacttaaaggatgaagtaggccttaatctgatattatggaaagaagataatatcgactcagctgagatattaatgtatagatagaaaaatggggaaaaggatggtaaaaagtagtataatatgtatttataaagatttagacatatggatgcatggatatattctcaacagacctaagaaactatgaagagtgattattcaaagaaaggatgctgagacttcatggtaggagcatactaccaatttattatatgtgatttttttattatttgttttcataactttttttaataaaaataacgttaaaataaatcttaagcacagcccccaaatatctatacttatctatgggcagtctttgtttatctcttttccacttctccagacgagatgggataaaggagattgtagaagcctggggagtcatagcactcttgttcttgtaacagttagcttttgctggtaacaaacaattccaatatttcgtggcttaaaaaaatcatatgtttgttcacatttccctgggtggaccatgtgggctgtgctcagcaggacatttcttctgatggtttcatctgggtttactcacaccactgaaattgaattgcctagaatgtcttgacacacatacttggtgatttgctgggttgcctcagttttcttatttgtggccttttcggcaggcttgcttaggcttggtcagcaagctaacttgagtctcagggaccccagtgcagcagtgtagcaatctctaactgaggagcatctttcatcccttccatatgttgcattttctgatgtctactggaccaaatcaagacacacagccaatcccagagtgagtgatgtctcgcgatggaggaagcttcacactcacctggaaaaggtatatgcaaatggggatgggataagtttgtggccattgtttgcatctacccaggcctctttaaggcaagccatgcactgaagggaataatgctctacgaggaggatgttccttaagccggaccttcatccctaaatcatctttggcacttgaattcaagatacatgtagtctctccctttttaagagcagccttctatttgcttatacgtatgc

SEQ ID NO: 699231 - DNA, 1083 bp, Homo sapiens
atgccatcgtattgggaagatttttttttgaaagatatttatgaagacatcaacttcagtcaatgaaattagacagttaaaagatggcaaaatatgctttggcttagcataaggaaagcaattctggatgaagctgtttctattaatttagctgacaggaaagtgtgagggtggcttgtaaagttaaatatsacctgttcagaaaccataacttgggttggcattcagtaccggggttaatactaataaccaggttaatctttaggtacagtacctaagaaacagtgaaccataagaagggatattttggtaaaggagactgaattgtgtcttcttctgcttaacccatttttatgccttccatgtgcactgataatgcaacccaaacctttgccttgacctgcaggttttgtggggtatagccccttcctgctcacaaacttctctctctagccacactctttgtttctcttccttgatcccacctaagttcattttggactcggggacttcgctttactcctggctttgggatgttgtccaggttctttaaagaaccagctccttcttatcttttaggcatcaaagaaccattgtccatcctacataagaaaactccttcctgggagtcactagcatttaatacgtttattcatatttactgctctttaaaataatcttatgtgtttgtttgaattgttcaattgcctttttctgccaactggaacgtaggtagcatggggtgactgtctttgtcctgcttactcatctctctcttctcagcatgcagaggaatatctgataaagagcaagtacttgggaaatacctgaggagggaaggaagagaagaaggaagagacagagggagggggggttagtactggcaataagttgataaagctactagccatttggacgacagaggtgtttagatggtttggtgtggggctgaggggcatcggaagctgtgattttgattgtgtctatgaacttggcaatgttaacggtcattgaacatgggtgcacattttgtccaatgcagtgaagaactctgaaggcagctccagtctttcagtggggtgt

SEQ ID NO: 699232 - DNA, 2624 bp, Homo sapiens
tgcctccagctgaaacatttttctcttcgctctgtttggagtccctctccctcccctctctctatctctcactgttcttcatggtacacttcttttttgggggttggcggggggacagagtcttactctgtcgcccagactggagtgtagtggcgtgatctcagctcactgcaacctccgcctcccaggttcaacaattctcttgcctcaaccttccaaacagctgggtctacaggtgtgtgccaccaggcccagctaatttttatattttcattacagacaagccttcaccatgttgaccaggctggtctccagttcatggcctccaattcgtggcctcaagtgatctgttcacctaggcctcccaaagtgctgggattataggcgtctgccaccatgcccacctaattttcgtgttttcagtagagacggggtttcatgatgttgaccaagctggtgttggactcctgacctcaagtgatgcacctgcctcagcctcccaaagtgctgggattacaggcatgtgccactgtgcccagccttcatggcacacttctaattctttccttcttcatgagctttttccagcatgagccaaaatcaatttcttcttctgcatccccactgaaattgttatacttcataaaatactttgtacctacttcagttttagtttctaagaatttatgtctttcttgagaaacagagtactgttttgtgattcttgcttcggcacttcacattgattagaacaatgcctggccctaaatagatatttaattctggtgagttcttcccagacaagtctaaaggagggtgtgaatactcgggcaactcaagttatcatcatttgggtctggctgtgttcacttatgggaatacaagtgtgggcattaatagtttggaggagcacaggagaacagtgagctgactgcagaggaggagatggattttgtttctcttgggggccccaggaattttgcctcctggacccattttatgtgataatggctctgcgttttgggttacagagctcaactctctgagattaacacaaagcaaagggcttccctgtatgtctatatagatctagcccaactcaggataagcagcttctcactaattcagcaaatgttgtgtagcatcagctatgtgttggacacatgtaatgagtaaatacatatgtgactgctgccctcatggttggagctttgctactgggatggtctagtctggggctgcctcttattaccagcggcatctcagactagttattcaacaactgtgtgcctaaattttcctgcctgtaaaatgggaataaagagatacttcacagagctattgtgaaaactaaaggatcgtataattttacgctgtctaacataagtaaccatttagcaaatgacagctattacttgtagctattggctcatgaagtctgcaggctggtagcacacacattcatcaagtgataatatttaaaatgtaaattatgacataattgatctgaaggggaggtgcttggtgttaagaacacttaaaataaggaattctgtaaaagcttgcctgggaatgtgtagctaatatagctacagataagactattaaaagattagagccaaaatgaataatgtatccatgtctgatgattgataataaggcagcagttgtggacagctgagatggtccttttccaaccgggacgtcagagctactgtgattatcatgccaattacatctcacattctgccaaggtggttcttctctctcagtgcgttggtcatttcagagtgggaaaagccttcagctcagtgtccttcaggatccagtctactctttaaatttytgagagttatttggatttcagaaggatttgcctctcatcttctagtcatatcccattaccagtcaattcagaacatctattagttcagcaggagaggaaaggatgaatttccatgcctcccacctttgcttggtaacaggttatgcttttagaaatcacttcatgacctactgcttcctgctgggacaataatgttcttgtgtgtggctaagctatgcccacatttttaaaagttggaacacatctagtaaatatacatacctttgaaagtcctcatttaagctgaattagaccagtgaatagagtaataatgaaagtatttgaaggagggcaaccccttttctttaaaaggaaagagaataactaatatcaggaaaccaatcataccagtgaatcagagcccagttttggggactgaaagactcagggtgaaattgctgtgactccttgggctagtctctgtagttctcagaaactcagtaatgtcatctgtaaaatggaataataatgcccaattcatgtgtttgtagtgaagattgaaggagatactacctgcaaagtattcagatgtttgcctggtctatggtaattgccgaataaatgttacctgttatcccagtgttgtgtgcattgatggcaatgataaacaacaatacttgaggaattttgaggtttgattcatcattcttttaccttctgaaatttggcatccttggaaaatggaaaaagaaacaaaatttgtatattccttttgttgcagaaatgggtaattatgtga

SEQ ID NO: 699233 - DNA, 2624 bp, Homo sapiens
tgcctccagctgaaacatttttctcttcgctctgtttggagtccctctccctcccctctctctatctctcactgttcttcatggtacacttcttttttgggggttggcggggggacagagtcttactctgtcgcccagactggagtgtagtggcgtgatctcagctcactgcaacctccgcctcccaggttcaacaattctcttgcctcaaccttccaaacagctgggtctacaggtgtgtgccaccaggcccagctaatttttatattttcattacagacaagccttcaccatgttgaccaggctggtctccagttcatggcctccaattcgtggcctcaagtgatctgttcacctaggcctcccaaagtgctgggattataggcgtctgccaccatgcccacctaattttcgtgttttcagtagagacggggtttcatgatgttgaccaagctggtgttggactcctgacctcaagtgatgcacctgcctcagcctcccaaagtgctgggattacaggcatgtgccactgtgcccagccttcatggcacacttctaattctttccttcttcatgagctttttccagcatgagccaaaatcaatttcttcttctgcatccccactgaaattgttatacttcataaaatactttgtacctacttcagttttagtttctaagaatttatgtctttcttgagaaacagagtactgttttgtgattcttgcttcggcacttcacattgattagaacaatgcctggccctaaatagatatttaattctggtgagttcttcccagacaagtctaaaggagggtgtgaatactcgggcaactcaagttatcatcatttgggtctggctgtgttcacttatgggaatacaagtgtgggcattaatagtttggaggagcacaggagaacagtgagctgactgcagaggaggagatggattttgtttctcttgggggccccaggaattttgcctcctggacccattttatgtgataatggctctgcgttttgggttacagagctcaactctctgagattaacacaaagcaaagggcttccctgtatgtctatatagatctagcccaactcaggataagcagcttctcactaattcagcaaatgttgtgtagcatcagctatgtgttggacacatgtaatgagtaaatacatatgtgactgctgccctcatggttggagctttgctactgggatggtctagtctggggctgcctcttattaccagcggcatctcagactagttattcaacaactgtgtgcctaaattttcctgcctgtaaaatgggaataaagagatacttcacagagctattgtgaaaactaaaggatcgtataattttacgctgtctaacataagtaaccatttagcaaatgacagctattacttgtagctattggctcatgaagtctgcaggctggtagcacacacattcatcaagtgataatatttaaaatgtaaattatgacataattgatctgaaggggaggtgcttggtgttaagaacacttaaaataaggaattctgtaaaagcttgcctgggaatgtgtagctaatatagctacagataagactattaaaagattagagccaaaatgaataatgtatccatgtctgatgattgataataaggcagcagttgtggacagctgagatggtccttttccaaccgggacgtcagagctactgtgattatcatgccaattacatctcacattctgccaaggtggttcttctctctcagtgcgttggtcatttcagagtgggaaaagccttcagctcagtgtccttcaggatccagtctactctttaaatttttgagagttatttggatttcagaaggatttgcctctcatcttctagtcatatcccattaccagtcaattcagaacatctattagttcagcaggagaggaaaggwtgaatttccatgcctcccacctttgcttggtaacaggttatgcttttagaaatcacttcatgacctactgcttcctgctgggacaataatgttcttgtgtgtggctaagctatgcccacatttttaaaagttggaacacatctagtaaatatacatacctttgaaagtcctcatttaagctgaattagaccagtgaatagagtaataatgaaagtatttgaaggagggcaaccccttttctttaaaaggaaagagaataactaatatcaggaaaccaatcataccagtgaatcagagcccagttttggggactgaaagactcagggtgaaattgctgtgactccttgggctagtctctgtagttctcagaaactcagtaatgtcatctgtaaaatggaataataatgcccaattcatgtgtttgtagtgaagattgaaggagatactacctgcaaagtattcagatgtttgcctggtctatggtaattgccgaataaatgttacctgttatcccagtgttgtgtgcattgatggcaatgataaacaacaatacttgaggaattttgaggtttgattcatcattcttttaccttctgaaatttggcatccttggaaaatggaaaaagaaacaaaatttgtatattccttttgttgcagaaatgggtaattatgtga

SEQ ID NO: 699234 - DNA, 609 bp, Homo sapiens
tgatggcattgagcatcttatgtgtttgttgcttatttgtatattatcttcagagaaatgtctactcaagttctttgcccatttttgaattgagttgtctttttgtctttttgttcttgagctgtaagagttcttcttttctctttttctttttctttttatttatctwtttttttttttgagacagagtctcaccctgtctgtcacccaagctggagtgcagtggcatgatcatagcttactgcagccttgacttcccaagctcaaacaatccttctgcctcagtcttccaagtaactggcacaacaggtgccaccacacctggctaattttttaaaaagcatttttttgttgttgttgagatggagtctccctatgtagcccaggctggttttgaactcctaggatcaagcgattctcccacctcggcctcccaaagtgctgggattacaagtgtgaactgcctcgcctggcccagagttctttatataaataaatgtttctttgtgtcactatttcttcatccacttaaatatttgctcagctcctgtaggtcacacactatcttgtgatcctgggaataccaccagttcctgcctatcaggaact

SEQ ID NO: 699235 - DNA, 788 bp, Homo sapiens
tttacgagatgatctaggcaaagtctaagtaagagaagagggctctggacagaatcctggggccttgacgttagattgggaaagcacctaggggaagggcacacagcaaaggcgattaggaggagtgactgatgaggtgaagaaactgggggagcctgagaatcaagcaaaataatttcaaggaaagtagtagtcatctttgttgaatttttgagagatggtgtaagatggtaagtgaggtgtctattaagatttggtaacaggtttttgttgtttttgacagtcagtttcagtgggataggaactatactggaatagatttgatgagtgaatgggagatgaaraactgaaggcagaaagtacaggtacctcttttgagaagtttggctgtgaagaagtttgcagagatgactgggtagctgggggaacaaacccaaattcagtgttagactttaataggcatactatttaaagcttcatctatcactagttcttttaacctttatttttttgagaaattctaagcatatgcaaaagtagaaaatgaccaaccctgccccatccacaatcctgtctacctcttcctttgcatcattttgaagcaaatcccatataatttcagttataaatatttcattatgtttccaaaagatgaacattaaaaaatgtaagcacaatgccattataacataaaaaattaatgataatttcttattaataaatatccgacttgtgttcacattttcacttttctcaaaaattgtcttagaattttaaaaacagatttt

SEQ ID NO: 699236 - DNA, 744 bp, Homo sapiens
tccatctcttcttcttcctccccagctctcctccccaagtccctctccatcctctctcttctccccgctcctccccatccctcctccccttccatccttcttcccacctctcctacttcttttctccctcctccccccttccctcctgtccctcctcctcgcccctcctttccctccgtctttctttccacccttcctccctccgtctcttctctctccttccctttccctgcctcctccccctcaatcctccctctcgccccagcctccttggccgcggagtcctctgtgagatggaggagctcagttggctccgctcggctccactcggctgggctcggctgaaaaaagccggggggaggtggcgcgcgcgggtttctgggaagcgtagtccggcgcagtccgcgcaggcgcactgccgtcgggcgggcctagcgggcgcsgtcattgtcctggcagagcggcgagccggtgagtgtggctgcggggtcgcgcccaccctctacctgtgccgggggccggaacctggccccggggagggcgcggcctcggggagacggcgtgcaggcccaggtacggggagtgcagggctgggtgctggtccagggcgtgcgggcgcaggagagggcgtgcaggccgggaccgaggtgcgcctggagaggctgagcggccgaggagaggctgaggggaagctgaggggctaaggagaggctgactggaggctgaggggctgaggagaggccg

SEQ ID NO: 699237 - DNA, 1140 bp, Homo sapiens
gttatgtatattattaaatatgyacagctttttatatatcagtcacacctcaatcaagtagtttaaatttttagaaaaggaggaattattagctgggctggctgaaagatacattgggccaaaaggtcaaataatatcatataaggatctacagttgtacataagatatatattaaatatcaacattaaataatagcaagagtcgacatttactgagagcttcctccatcacacgaggcactgtgtttggaccatatttgtacacatttaaccttacgaccctgtggagggggacattgttatcaggaagcctgcctctcatatgaggcttagaaagagaaagacagttgtccaaggaaacacagctcatgaggggcagagccaggattccgttgcagagtgtggttcctgagcctacactctgaaccaccagcccaactgctttctatcaaaggtgacccctcaggcagaggaggctatcttgagcccaagccccagaagggcaccctaggaccatagagggactagccagcgggggtgaggcctccccttgggattcagttggtggtggggacactcagtatgctggagagagccagtgagctctgagtgtcagtaacaatagctggcacttattgagtgcctgctgtatgctatgcattaccattctgagtgtcttacataaataagtgggcaggtggggcctgtagcaaattggagctttcttgccccatcaaagggtcagccaccactcagctccagcctagagtggccagatattctgctgtttaaagagaaactagaaattcattttcttggtaaattgtggatgtgtttttcatgtgagtaacaattaaaaacaattttgaaacccccataggagcaaaatagaaatgtgtacagctggcttcaggcccaggtacatctcatatgctctgtgtgctcagaactcccgttctttccttgtgccttgggggttgtaccactgaatcagttcagaacagcaggtccctctgtaggacacaataggtctctcattactcacatgccatgctgtgaggaagcccaagcagccacaaggaaaagtgatgtggagaaaaagagatgcccaccaaggcctcagctgtgccatccatacca

SEQ ID NO: 699238 - DNA, 1140 bp, Homo sapiens
gttatgtatattattaaatatgcacagctttttatatatcagtcacacctcaatcaagtagtttaaatttttagaaaaggaggaattattagctgggctggctgaaagatacattgggccaaaaggtcaaataatatcatataaggatctayagttgtacataagatatatattaaatatcaacattaaataatagcaagagtcgacatttactgagagcttcctccatcacacgaggcactgtgtttggaccatatttgtacacatttaaccttacgaccctgtggagggggacattgttatcaggaagcctgcctctcatatgaggcttagaaagagaaagacagttgtccaaggaaacacagctcatgaggggcagagccaggattccgttgcagagtgtggttcctgagcctacactctgaaccaccagcccaactgctttctatcaaaggtgacccctcaggcagaggaggctatcttgagcccaagccccagaagggcaccctaggaccatagagggactagccagcgggggtgaggcctccccttgggattcagttggtggtggggacactcagtatgctggagagagccagtgagctctgagtgtcagtaacaatagctggcacttattgagtgcctgctgtatgctatgcattaccattctgagtgtcttacataaataagtgggcaggtggggcctgtagcaaattggagctttcttgccccatcaaagggtcagccaccactcagctccagcctagagtggccagatattctgctgtttaaagagaaactagaaattcattttcttggtaaattgtggatgtgtttttcatgtgagtaacaattaaaaacaattttgaaacccccataggagcaaaatagaaatgtgtacagctggcttcaggcccaggtacatctcatatgctctgtgtgctcagaactcccgttctttccttgtgccttgggggttgtaccactgaatcagttcagaacagcaggtccctctgtaggacacaataggtctctcattactcacatgccatgctgtgaggaagcccaagcagccacaaggaaaagtgatgtggagaaaaagagatgcccaccaaggcctcagctgtgccatccatacca

SEQ ID NO: 699239 - DNA, 1277 bp, Homo sapiens
ttgaactcctgggcccaaacgatcctcctgccttggcctcctggtcttgggattacaagcataagccactgtgccaggcctacactttaaagcactttgcctctttaaagcactttgcctctttcatttcctagcctggagaaaatgtacttctgtggtcactaagaaaacaccttcacaatcaggcaaaaatgtccccagaaaatgctggcttgggctgctgaggaaatgcacaatcaaatcaggccacacaaygtttcagagaccctgaggcagggactccatgtcccagctatgtttgtcacacaccagtaggcagcctctacccaggggtggaagattctagacccagctataggctctggcaaccagggcaggcagctccttccaggaaccggtttctgtggttttctttggtcacttccattaagtcttaaacaccccctggaagaaaatgaaagtgtgacgttgaggaacgtgagatcagatggtggagtagttttctagagccaccataacaaagcatcacagaccagggtcttaaacaatggaaacttatttcttcacagttctcaagaatggaagttcacgatcaagttatggccaaggttggtttcccctgatgcctctctccttggctggcagacgaccatcttccccatgtcttcatatggtcttccctctgtgtgtgtctgtgtcctaatctctcccacactcttttttttttttttttttttttttttaagaatgtcagccatgggccgggtgtggtggcccacacttgtaatcccagcatcttaggaggctgaggcgggtggatcacctgaggtcaggagttccagaccagcctggtcaacatggcgaaacaccatctctactaaaaaaaatagaaaaattagccaggcgtggtggcaaatgcctgtagttccagctactcaggaggctgaggcagcagaatagcttgaacccgggaggtggaggttgcagtgagtggagatcacgccactgcactccagcctgggcgagagactgagactccatctcaaacaaaaaacaaacaaacaaacaaaacaaaaaacaatgtcagtcatattggacttgggacccatgctaatgacctcattttatcttaattccctttctccatctccaagtacagtcacattccaaggaatggggggttaggacgtcaacataaaatttggtggtggggcacaatttggctcatcacaatgggtaaaatggggcattaagctcacatcctgaatctaaaaccc

SEQ ID NO: 699240 - DNA, 1277 bp, Homo sapiens
ttgaactcctgggcccaaacgatcctcctgccttggcctcctggtcttgggattacaagcataagccactgtgccaggcctacactttaaagcactttgcctctttaaagcactttgcctctttcatttcctagcctggagaaaatgtacttctgtggtcactaagaaaacaccttcacaatcaggcaaaaatgtccccagaaaatgctggcttgggctgctgaggaaatgcacaatcaaatcaggccacacaacgtttcagagaccctgaggcagggactccatgtcccagctatgtttgtcacacaccagtaggcagcctctacccaggggtggaagattctagacccagctataggctctggcaaccagggcaggcagctccttccaggaaccggtttctgtggttttctttggtcacttccattaagtcttaaacaccccctggaagaaaatgaaagtgtgacgttgaggaacgtgagatcagatggyggagtagttttctagagccaccataacaaagcatcacagaccagggtcttaaacaatggaaacttatttcttcacagttctcaagaatggaagttcacgatcaagttatggccaaggttggtttcccctgatgcctctctccttggctggcagacgaccatcttccccatgtcttcatatggtcttccctctgtgtgtgtctgtgtcctaatctctcccacactcttttttttttttttttttttttttttaagaatgtcagccatgggccgggtgtggtggcccacacttgtaatcccagcatcttaggaggctgaggcgggtggatcacctgaggtcaggagttccagaccagcctggtcaacatggcgaaacaccatctctactaaaaaaaatagaaaaattagccaggcgtggtggcaaatgcctgtagttccagctactcaggaggctgaggcagcagaatagcttgaacccgggaggtggaggttgcagtgagtggagatcacgccactgcactccagcctgggcgagagactgagactccatctcaaacaaaaaacaaacaaacaaacaaaacaaaaaacaatgtcagtcatattggacttgggacccatgctaatgacctcattttatcttaattccctttctccatctccaagtacagtcacattccaaggaatggggggttaggacgtcaacataaaatttggtggtggggcacaatttggctcatcacaatgggtaaaatggggcattaagctcacatcctgaatctaaaaccc

SEQ ID NO: 699241 - DNA, 1277 bp, Homo sapiens
ttgaactcctgggcccaaacgatcctcctgccttggcctcctggtcttgggattacaagcataagccactgtgccaggcctacactttaaagcactttgcctctttaaagcactttgcctctttcatttcctagcctggagaaaatgtacttctgtggtcactaagaaaacaccttcacaatcaggcaaaaatgtccccagaaaatgctggcttgggctgctgaggaaatgcacaatcaaatcaggccacacaacgtttcagagaccctgaggcagggactccatgtcccagctatgtttgtcacacaccagtaggcagcctctacccaggggtggaagattctagacccagctataggctctggcaaccagggcaggcagctccttccaggaaccggtttctgtggttttctttggtcacttccattaagtcttaaacaccccctggaagaaaatgaaagtgtgacgttgaggaacgtgagatcagatggtggagtagttttctagagccaccataacaaagcaycacagaccagggtcttaaacaatggaaacttatttcttcacagttctcaagaatggaagttcacgatcaagttatggccaaggttggtttcccctgatgcctctctccttggctggcagacgaccatcttccccatgtcttcatatggtcttccctctgtgtgtgtctgtgtcctaatctctcccacactcttttttttttttttttttttttttttaagaatgtcagccatgggccgggtgtggtggcccacacttgtaatcccagcatcttaggaggctgaggcgggtggatcacctgaggtcaggagttccagaccagcctggtcaacatggcgaaacaccatctctactaaaaaaaatagaaaaattagccaggcgtggtggcaaatgcctgtagttccagctactcaggaggctgaggcagcagaatagcttgaacccgggaggtggaggttgcagtgagtggagatcacgccactgcactccagcctgggcgagagactgagactccatctcaaacaaaaaacaaacaaacaaacaaaacaaaaaacaatgtcagtcatattggacttgggacccatgctaatgacctcattttatcttaattccctttctccatctccaagtacagtcacattccaaggaatggggggttaggacgtcaacataaaatttggtggtggggcacaatttggctcatcacaatgggtaaaatggggcattaagctcacatcctgaatctaaaaccc

SEQ ID NO: 699242 - DNA, 1277 bp, Homo sapiens
ttgaactcctgggcccaaacgatcctcctgccttggcctcctggtcttgggattacaagcataagccactgtgccaggcctacactttaaagcactttgcctctttaaagcactttgcctctttcatttcctagcctggagaaaatgtacttctgtggtcactaagaaaacaccttcacaatcaggcaaaaatgtccccagaaaatgctggcttgggctgctgaggaaatgcacaatcaaatcaggccacacaacgtttcagagaccctgaggcagggactccatgtcccagctatgtttgtcacacaccagtaggcagcctctacccaggggtggaagattctagacccagctataggctctggcaaccagggcaggcagctccttccaggaaccggtttctgtggttttctttggtcacttccattaagtcttaaacaccccctggaagaaaatgaaagtgtgacgttgaggaacgtgagatcagatggtggagtagttttctagagccaccataacaaagcatcacagaccagggtcttaaacaatggaaacttatttcttcacagttctcaagaatggaagttcacgatcaagttatggccaaggttggtttcccctgatgcctctctccttggctggcagacgaccatcttccccatgtcttcatatggtcttccctctgtgtgtgtctgtgtcctaatctctcccacactcttttttttttttttttttttttttttaagaatgtcagccatgggccgggtgtggtggcccacacttgtaatcccagcatcttaggaggctgaggcgggtggatcacctgaggwcaggagttccagaccagcctggtcaacatggcgaaacaccatctctactaaaaaaaatagaaaaattagccaggcgtggtggcaaatgcctgtagttccagctactcaggaggctgaggcagcagaatagcttgaacccgggaggtggaggttgcagtgagtggagatcacgccactgcactccagcctgggcgagagactgagactccatctcaaacaaaaaacaaacaaacaaacaaaacaaaaaacaatgtcagtcatattggacttgggacccatgctaatgacctcattttatcttaattccctttctccatctccaagtacagtcacattccaaggaatggggggttaggacgtcaacataaaatttggtggtggggcacaatttggctcatcacaatgggtaaaatggggcattaagctcacatcctgaatctaaaaccc

SEQ ID NO: 699243 - DNA, 2093 bp, Homo sapiens
atacataactagatcttcaagggtaacctaattcaaacctaatattaaaacatgttctcctttcctttctaatttctttctgttttcttttcttcttttctttcgttctttaatattgccagagcaaaatgttttcactgctgtacaactattggaaaaattcaatttcatcaactgaaattttcttagtgaaatgaaaagcttttattattaaacacattcctttcctttgctccgttttctctaaaactagaaacagacttaaaacaatgattaataagtcctccaaatagccaattctgaatctcaatcttaaactgatagttaaatggtatttcccagcctccccgcccccgggaaatactatgccataagaataacaagagattaaagccaatgacatttgattgcataaaacaatcttctgaagaagataaacaaggttcaggtaaatattctggagtcaacagcaactcaaaatgtctgtggatgacaaggtttcaatagtagtagtgatataagttcagagacagtagtaacagattgatgaattgactttacgtttacaaaacacttttattattattataagttctggggtacatgtgcagaacgtgcaggtttgttgcataggtatacacatgccatggtggtttgctgcacccaccaacctgtcatccacattaggtatttttcccaatgctatccctcccctaggcccctatcccccaacaggccctggtgtgtgatgctcccctccctgtgtccatgtgttctcattgttcaactcctgcttatgagtgagaacatgcggtgtttggttttctgttcatstgttagtttgctgaaaaacattaatttttaaaggtatataaattgagtagattttacaccatagtcaataaaatcatcaggatgattgtaacattttccaaaagactttctcttccttctatatcatcatttcaaaataattactaaaggcaatgatcggatatatctaattggtgataaacaatagaaacttgttccttcaagactccattcacccaaagtttcactatgtttttctatctatacataggtaatacacaaataaagctactgtcaatgagttctttagtggttgtttcctaaataattttcctacaatttctcttaagcatatgaatatttgcatttgccattttatctttcatgtgtttagaaaatatttttaaagaagtttcattacaaatattgttttggatattgtggatgtgtattgcacactgttttgtctaaaacatttattttctgtctggaaatcacaccagaatcttgtgcaggcacaagaaaaaaaatatatgaaaaaatattcaatgtatctcctgtctttgtaatatgattgacagtaagcctagaccagattttgtgactagtacgatatgtcaagtatagaatgagaaagtatatttctggtgttgctgcataccaaaaatttgattttatatttctctccaataaatttccaaagtattttatcttttctttaataaatgttgtttaacgttttttggaaatggtaattggtaatttaattaaaacttaaggaggtacagaaataggaacacaaaaagaaacataaactaattgtgtgtttgtttagaatttaaaagcaaattcagccctgacaaatatttgtaaaccatacacagctatgacatttttcacagatgtgattttcggtttcaaaagcctgcatttaaaaatctgtcatttaagatgacatagtgttcactgccgtttgggaagatggcagtaaacaaataggttcttgttgtctttttgttttttgccaaagcaatagcagtctcttttgtgtcactaactaaactgactcccaaacaaagaagtaatttaatgggattcccaaagcacgtcaatccagattaaccctgtggcagctcttcttttatggaacatttagcctctggagtagtgaattgctggccaagaaacttataaaacaaatactatttgtaatataaaagtttactttttttctcagccaatgtttgtttctattggaggtagtatgagataatgggaat

SEQ ID NO: 699244 - DNA, 767 bp, Homo sapiens
cacgtgacataaaagaatcatgtgtggagttttaaaactatgaaatacacttactcacatatgaattgaaaactagtagccatagactgtagtgatttcaaactgaatctttcttttgctcttcaatttaatctttttttttttttttttttttgagacggagtctcattctgttgcccaggctrgagtgcagtggcgcgatctgggctcactgcaacctctgccttccgagttcaagcaattcttctgcctcagcctcctgagtagctgggattacaggtgcccgccaccacaaccggctaattttgtatttttagtagagacggggtttcaccatgttggccaggctagtctcaaactcctgaccttcagtgatctgcccacctcagcctcccaaagtgctgggattacaggcatgaaccaccactcccagcccaatttaaccttacagctattacaacacaagaaaacttctggacaaaagcacttaattaattttaattgcgcatttaaaccagtacaacaaaaaagaatgagcacacctataatgaagttaaaaaagtgagtttgaagggaaacattaatatattcaacacaaaataataaaaactaaggggattatcaatgcatcatgacagatttgtattcactgaattaataaatagaaggaatgacttttaaaaacctatgaaacctatcatgtaaatgtcacataatccaatagatatacttaagcaaaactttgaagcagtttgtaaatacaacaa

SEQ ID NO: 699245 - DNA, 622 bp, Homo sapiens
acgaatatgccccaacatgttatcattaggtataaaccagagaatattctacagtattttaattctactatacttaaataatacataaaagacacaaatacagttttcatttttatgctccactgcaattttatgaggtctaaaaaacataaaagttacatacaagtctttatttatgccaccaagagtaagttttatccttggaaatgcttaaaaacttggcctaatacatactgcccagttattcctcatcctttgattccttaacctatatttttgtgaataaattttaagtcagaaattactgataaagtatcagtcatgagtttcacctgaactcaaaattctcctcttttgagagagctataataagtggaagtttatattttatttcattgctatcatttcattccttaggttctttatggtgtttttaaaaatccataatataattctatgagagttaacataatagactgtaacagctgttatggtctattgtgtaaataagtaattacagaatttacagactatcatgtaaatatrtaattatggactttttaaaatgtgcattatttactcgatagtctatcgtttacatatgtaattatggactttaaaa

SEQ ID NO: 699246 - DNA, 474 bp, Homo sapiens
gtattttcctcagaacatggttctgtgaaattctcccccaaaccctgcaaaaagttttttggcaaatatgtttataagagaaaatgcttttttttttttttgagacagtgtcactctcacccaggctggagtgcggtggtgccgatctcagctcactgcaacctctgcctccaaagttcaagtgattctcctgcctcagcctcctgactagctgggactacagttttataaataaggtaacacttgaaccaggaatctgatggmgagggggagtcagctgtgtgcatgaacagtggaaggcagctccaggcagagggaacagcaagttaaaagtccttgactgaggcaggagcagtctgtcattgaagcaggagaggggaaggagatgaggacagggaggagctgagtgtgtgccggggaatggagggtagggattctatagggtcttgtacagtgaccatccagagactgttg

SEQ ID NO: 699247 - DNA, 606 bp, Homo sapiens
gggccaggcccagtggcttacgcctgtaatcccaacactttgagaggtcgaagtgggacaattgcttgatctaggagttcaagaccagcctgggtaacatagtgagaccgcatctctacaaaaactgtaaattagccagatgtggtggcatgcacctgtggtcctagcaactgggaaggctgaggtaggacaattgcttgagttcaggaggtcaaggctgcatagagccatggttgtgccacagcacttcagactgggtgacagagcaagatcctgtttcaaaaaaaaaaaaagacaaaagataaaaaatgcaatatgtagatattgtttggatcctgatttgaacaaattaactgtaaaatgacattcctgaaagcagtattgaaattcaaatatggtattagrtgattttaagaatttatttttaattttacatgatgattatgttttaaaaacaatcctgacattagagatgtacactaaagtatttataggtagaatagcataatttccaggcttcctttaaaatattacagacatataatgctgggggtagaaaatacaaaagtggtaaaaatattgatcatcgtttaaactgagtgataa

SEQ ID NO: 699248 - DNA, 606 bp, Homo sapiens
gggccaggcccagtggcttacgcctgtaatcccaacactttgagaggtcgaagtgggacaattgcttgatctaggagttcaagaccagcctgggtaacatagtgagaccgcatctctacaaaaactgtaaattagccagatgtggtggcatgcacctgtggtcctagcaactgggaaggctgaggtaggacaattgcttgagttcaggaggtcaaggctgcatagagccatggttgtgccacagcacttcagactgggtgacagagcaagatcctgtttcaaaaaaaaaaaaagacaaaagataaaaaatgcaatatgtagatattgtttggatcctgatttgaacaaattaactgtaaaatgacattcctgaaagcagtattgaaattcaaatatggtattagatgattttaagaatttatttttaattttacatgatgattatgttttaaaaacaatcctgacattagagatgtacactaaagtatttataggtagaatagcataatttccaggcttcctttaaaatattacagacatataatgctggggktagaaaatacaaaagtggtaaaaatattgatcatcgtttaaactgagtgataa

SEQ ID NO: 699249 - DNA, 680 bp, Homo sapiens
tcctttgtaaaaagatggtatgtcttttggtaaaaaataaaagcagcagagtacaattcttttttttttttttttttttgagacggagtttcgctcttgttgcccaggctggagtgcagtggtgcaatcttggctcactgcaacctccacctcccgggttcaagtgattctcctgcttcagcctcccaagcagctagaattacaggcacgtgccaacagacctggctaattttgtatttttagtaaagatggagtttcaccatgttggccaggctggtctcgaattcctgacctcaggtgatcmacctgcctcagcctcccaaagtactgggattacaggtgtgagccaccacgcccagccaattcttaagtcacacttcttcctggagtaccctaacttgaaactgacatgctgagagtgctgtctgctgacagtcaacagaactgcaggcacatggtatctaggtctcctttgtagccttacacacatacctatctgttctttctttatatcatactattatttcataatagtatgctatttgtttacttgtacttgcttttcacaatgaagttgatgttgcaaattccagtgttatcttctgtttccattgtttttaataaagagtaaggttcgaaactggtgagttattcagtttttactgactttaaaagaccat

SEQ ID NO: 699250 - DNA, 640 bp, Homo sapiens
atgcttctacagactggatactttctgtttttctttgcatttatacggttgattggtttcttgagtctgaatggactatgggaaaattccagaaaggacttgaactgatgatgtgattcccctgaaatggagaaccacaactttatatttaattttccactctcagtataacagcatgaatttttaaaagaatgactcaacgttctttttataaagaacaggttgcaaatatagcacaatcaggtcccagagtgaggcaacttgtcatgaatttagtccaagtcttctggctctaggaagtgaaaataagaaggcaaacacatggtttacttacatttactcataaccattctgtggcaaaattattaaataatttgcccaaataagcaagatgtggtagaactaggatttgaaccaaggtggatcagctgcagaggccatacttttagcctacttcaccattttccttctccrtacaatttaagaatgtggagatgatgagtcataccagagtttttgtgcccgcgcttgcttctgccttccttcagtaggcattatcaccgaatatggctaccattttgtatctgttctaaacaagcactttgcatacattatcttagttaattctgtgatgtagata

SEQ ID NO: 699251 - DNA, 640 bp, Homo sapiens
atgcttctacagactggatactttctgtttttctttgcatttatacggttgattggtttcttgagtctgaatggactatgggaaaattccagaaaggacttgaactgatgatgtgattcccctgaaatggagaaccacaactttatatttaattttccactctcagtataacagcatgaatttttaaaagaatgactcaacgttctttttataaagaacaggttgcaaatatagcacaatcaggtcccagagtgaggcaacttgtcatgaatttagtccaagtcttctggctctaggaagtgaaaataagaaggcaaacacatggtttacttacatttactcataaccattctgtggcaaaattattaaataatttgcccaaataagcaagatgtggtagaactaggatttgaaccaaggtggatcagctgcagaggccatacttttagcctacttcaccattttccttctccatacaatttaagaatgtggagatgatgagtcataccagagtttttgtgccygcgcttgcttctgccttccttcagtaggcattatcaccgaatatggctaccattttgtatctgttctaaacaagcactttgcatacattatcttagttaattctgtgatgtagata

SEQ ID NO: 699252 - DNA, 897 bp, Homo sapiens
ttgttttgactttgttttttattagaacaagttggtaggctgcaaaatcattcctagtgtagcacgtgggttttgttcattgcttttacatatattatgactaatwgtataaaggctgacagtcatgagaatagagtcagcaaggaagagggatagggcctatgcttataatgaggttctactctgactagtggaaagacagatgactaaactggttgagtaaaggccctcctaccactatatcatggtatttaccaataatgcactgatatgtaacaacctgaagaactttgctaatatcaacactcaaacgagttctagagaacctgcatcctggatactaaggatagaaagagtgatatcgatttgttcatttactgaatgcccggtactgctctctttcgggtgcttacaatgctgtcacacatagcctacagcattctgctttccacttctgcactaggagaggcaaggttcagcagaaagacggcaggtttgctcttctagaaagtaggactaatgacatgtaaatcacaggattgatgtcaaggttaaactgaatgagaccttgcagaaagatatttagtagctttccctgttctgtagacagaaaaagcctaggcactgttagcagctctggagtcagaaccttgaaagatagtgaagcctaatgacccaatgattttaaaacattttcagaataccagatgatacataaactgcactgcttggttactcctgctcaaggaatggaacaatgatgttggtaatccaccagggcaatgaactgactaaatttgggcttgaaatgcactgtgtggtttttcttccttctaattttcatcttactaattctttctgtcttaaaataatgttaacatgtttactttgaaaaat

SEQ ID NO: 699253 - DNA, 586 bp, Homo sapiens
ttattcttcaaggattttttttaattagcagaagtgaatgccaaggagactttaagccaaatctatcgagattttccccatgtcatggtattaagctattatcaggcctttgcgacctgcatgaactctaacatgttcaatgaaagggagacctgtttacctattccctaaagaactaggtccttgacagcacttagacaagatagaggcttgctggtgtctggagagattctaggaccttcttactgaagaaaattttagtaaaatgattaatttgaatagcaactaaaaagttatatctactaactttatgctgggatcaatgaaacaaaatggaaaaaaagtattccttgttttaaaatctctcaagaaaatacttgtggcaacagttgatttagtgatgtatctgaatatgccrtccaacaaccagaaatagtaatccagctagcaaagaaaaaaatatcccagctggggccaggaaaaatgaccagccatacagaacagaaggggtgaaatccaggcagtccttcattttcatgtttcggtagctttccatgtcagccactgcctggacccagatgacata

SEQ ID NO: 699254 - DNA, 1001 bp, Homo sapiens
gagtgattattgcaaggcacttaaccaatatgcagcagagcctagagtttgaaaacatctctggagatgaaaatatgttccttttctctcctataatatttaagggaaaaagactacaaatccaatttgtacttgtctatgcactggtcctgtttctcctgccttctcatgaaggggactcaagcctttgtgtgtgtgtgtgtgtgtgtgtgtgygtgtgtgtgtgtgtgtgcacgcacgcacgtgtatctctgtgtgtgtactctcaatcagcactctaaaatatattggcactctgaaatatatgtgtatttatgcatgttttataggcacatattactgtataatatactatgtaaattataaaacaaacacacaaaaacataaattcaaaaagcatgaatttttaaaattataagagaaagttctaatatttttctgcactccccagtatattaccttggatactgtattttggagacctgccataaagtatcatacttagtagaaaaacatattttctttcatatacaggaaaaatattgatccacaatcaatattgttcacagggttgcttctcaagctgtggtgttgtctgaatgtcatatcccccaggatgccattcaagacaagcatttgcagttttgagatggctaattctaattaggaaagcagactgccaccacaggttataatctgactaatgtgttcttggaaccgcggagctactgaagttttcgggtatgacgtcagtaaggagtgatgaaaggaggactggattaacagcagataaaagttctaaataatttgacctctgcttaaaatagcgatgggccttgaacaaaacatttaatagtaacgggtcctttgattaaattgcttttgcatgtatttaatattaattccactgatatgatactaaccctaagaaataagcatggctgatactagcccttaattttatatcataaatgagcaaaatcttaaagagagtaaatgac

SEQ ID NO: 699255 - DNA, 1406 bp, Homo sapiens
tcagtcacggtcctggcagaagacagatggcacactcagaaagaagaaactgtggggagaggatgagttctcagtggtaggcagggatgcgagaaactagcaaagccgggggtgcactcccccaggatgaggatggcaggctacccccagggaacttccatccccccgggacctgaacgggtgaaggagaagagcagataatagatgccagaggagaaagtagctgggctaatgggtgtctggtgggggtcatggtctttgatagcagggtgcagctcactcactgcagcccagcacagagggagtcagggggttaactttctyatcctcactctcctcctcccctctctgcttgctctggtgcctccctttggtggagcttggtggaagtccatgagcaggggagcctgtagatgcatccataaatgtcagtctcctggggctaggagcaggcaggaggaggctaaagaggtgctctgcggggcaggtggaatatatccagcacacgtacataatatagactggggagaggaccaacagctgttgcagcagttcccatgtgccttgaatatctagtagatttgtgtgcttaatgccgggcacacaagatgaatgaggcttctggtggccaagtgggtcatgatgggaggttttcttggattgttagttggtttaatatctaaggatctttctttaattaaaaagcctaaacagaaccccagactcttctcggttgtattctgatagtctttattttcaagcacttgatagttactttcccatcattggaagagggtacaaaatcagaagagatccctcccaaagttaagagcccccaccttcctccccgggccactttcgggcaggaagaggacagagctggcctttctgatcagtgagcctcttcgcagcctctctgaccctggtgactcttgggtgctactgttcagattgactcaggcttcagtgatcagagtgaacccttaaaaaaaataaaatcaaaactttgtaagaaagctgcttaccattcaagaataagcaagccgtgagttgtccctaggactgccacatagggaaagacagtggtgctgaaatagacgcacggttttgttgttgtgttggggaaccgctgcactgctggaaaactcaaagtactttcctttctgttgccttaaaaggttgataacagtgccttctgtgtacttacaagtttcattatgtacttaaagggggtaaccaccagaaatgaagttacgtcctcactggggtagatggaccctacgggccatgcagaccctatccggagttgagtgtaatttacggctctgtgtgttttgccaaacaaatccagtgtagataattccagaagaatgacactgggctctagctttctctcattcattttg

SEQ ID NO: 699256 - DNA, 1406 bp, Homo sapiens
tcagtcacggtcctggcagaagacagatggcacactcagaaagaagaaactgtggggagaggatgagttctcagtggtaggcagggatgcgagaaactagcaaagccgggggtgcactcccccaggatgaggatggcaggctacccccagggaacttccatccccccgggacctgaacgggtgaaggagaagagcagataatagatgccagaggagaaagtagctgggctaatgggtgtctggtgggggtcatggtctttgatagcagggtgcagctcactcactgcagcccagcacagagggagtcagggggttaactttcttatcctcactctcctcctcccctctctgcttgctctggtgcctccctttggtggagcttggtggaagtccatgagcaggggagcctgtagatgcatccataaatgtcagtctcctggggctaggagcaggcaggaggaggctaaagaggtgctctgcggggcaggtggaatatatccagcacacgtacataatatagactggggagaggaccaacagctgttgcagcagttcccatgtgccttgaatatctagtagatttgtgtgcttaatgccgggcacacaagatgaatgaggcttctggtggccaagtgggtcatgatgggaggttttcttggattgttagttggtttaatatctaaggatctttctttaattaaaaagcctaaacagaaccccagactcttctcggttgtattctgatagtctttattttcaagcacttgatagttactttcccatcattggaagagggtacaaaatcagaagagatccctcccaaagttaagagcccccaccttcctccccgggccactttcgggcaggaagaggacagagctggcctttctgatcagtgagcctcttcgcagcctctctgaccctggtgactcttgggtgctactgttcagattgactcaggcttcagtgatcagagtgaacccttaaaaaaaataaaatcaaaactttgtaagaaagctgcttaccattcaagaataagcaagccgtgagttgtccctaggactgccacatagggaaagacastggtgctgaaatagacgcacggttttgttgttgtgttggggaaccgctgcactgctggaaaactcaaagtactttcctttctgttgccttaaaaggttgataacagtgccttctgtgtacttacaagtttcattatgtacttaaagggggtaaccaccagaaatgaagttacgtcctcactggggtagatggaccctacgggccatgcagaccctatccggagttgagtgtaatttacggctctgtgtgttttgccaaacaaatccagtgtagataattccagaagaatgacactgggctctagctttctctcattcattttg

SEQ ID NO: 699257 - DNA, 1394 bp, Homo sapiens
ccaggctggtctcaaactcctgggctcaagggattccaccacctgggcctcccaaagtgctggggttataggtgtgagccaccatgctcagccatcttccttaaacttgtggtgagactttgaatgagtcagaggaccaygctgaatttcctccacacagtgtgggagagacctctgtggcctccagcccaggttttgagatctcaaactctggtctcttctgaggaccctgggggattttacggcagtgtgaaaaggcctggagttttccccaggaggcaggacagcagccaggctgccttgctgaagccctaatccctgggcacttttggtctccagggcccaggtcctccaggaatctggtgatgtattcaactggggaaatgaaaaagagttcctgtattagccatatgataattaaattaaggaagtgcctcttgcccagcaaataaaaacaaggcatgattggtgtacctggcctaacttgcttacccaaatctcactgcaccccaggcaaacaaaatgacagcagctccattgattgagccttacacaagtgcccaacactgtactttggggacattttcctagttaagggtcatgacactgcttgaaataggtagtcaccatccccattttacagatggggaactcaagttcagaagtcgggtatacccgaggatactagagtagcagaggctggaattcaaaccctagtctgcttgcaagcaacttttttttattttattttatttttgagattgggtcttgttctgcttgttctgtcgcctaggtagtcaggagtgcagtggctcaatcatggcccacttcagcctcaacctcctgggctcaagcgatctcccatttcagccttctgagtagctgggatcacaggcatgtgctaccatgtccagctaatttttgtattttttttgtagagatggggtcttgctatgttgcccaggctggtcttgaactcctgggctcaacggatactgctgcctcggcctcccaaagtgccgggactataggcgtgagccactgcacctggccttgaagcaacattttaaatctctgctctgaactgcctcccagactaagaagcaagttccactgcagccataaaaacagatgtctaaagctagggaatgtgtgatgggtgttgtaatccatcaagtgacagaacatcgggaagctgcggaatatagagacttaggaagggcaaaatcttatttctgatgaaacctgatacagagaaagctactttagctgtttttctgtggggttgtaaatgataaaattgggttttgacagagagagatacagccgccttcatgctcactataataaccgtttctcctacttgtgattagaaatcaaaggccaactattac

SEQ ID NO: 699258 - DNA, 1394 bp, Homo sapiens
ccaggctggtctcaaactcctgggctcaagggattccaccacctgggcctcccaaagtgctggggttataggtgtgagccaccatgctcagccatcttccttaaacttgtggtgagactttgaatgagtcagaggaccacgctgaatttcctccacacagtgtgggagagacctctgtggcctccagcccrggttttgagatctcaaactctggtctcttctgaggaccctgggggattttacggcagtgtgaaaaggcctggagttttccccaggaggcaggacagcagccaggctgccttgctgaagccctaatccctgggcacttttggtctccagggcccaggtcctccaggaatctggtgatgtattcaactggggaaatgaaaaagagttcctgtattagccatatgataattaaattaaggaagtgcctcttgcccagcaaataaaaacaaggcatgattggtgtacctggcctaacttgcttacccaaatctcactgcaccccaggcaaacaaaatgacagcagctccattgattgagccttacacaagtgcccaacactgtactttggggacattttcctagttaagggtcatgacactgcttgaaataggtagtcaccatccccattttacagatggggaactcaagttcagaagtcgggtatacccgaggatactagagtagcagaggctggaattcaaaccctagtctgcttgcaagcaacttttttttattttattttatttttgagattgggtcttgttctgcttgttctgtcgcctaggtagtcaggagtgcagtggctcaatcatggcccacttcagcctcaacctcctgggctcaagcgatctcccatttcagccttctgagtagctgggatcacaggcatgtgctaccatgtccagctaatttttgtattttttttgtagagatggggtcttgctatgttgcccaggctggtcttgaactcctgggctcaacggatactgctgcctcggcctcccaaagtgccgggactataggcgtgagccactgcacctggccttgaagcaacattttaaatctctgctctgaactgcctcccagactaagaagcaagttccactgcagccataaaaacagatgtctaaagctagggaatgtgtgatgggtgttgtaatccatcaagtgacagaacatcgggaagctgcggaatatagagacttaggaagggcaaaatcttatttctgatgaaacctgatacagagaaagctactttagctgtttttctgtggggttgtaaatgataaaattgggttttgacagagagagatacagccgccttcatgctcactataataaccgtttctcctacttgtgattagaaatcaaaggccaactattac

SEQ ID NO: 699259 - DNA, 1017 bp, Homo sapiens
taaaatcagaactaaagaaatccaatgggtttaacaactatatcactactcctctttccaagaacaattttgatggagtcggaaagaagaagaaaaatacattgctttgaagttaataatcaggtaacatgtagaacaaagtgataatcatctctgttctaaaggagaggacagaattcccaaacatggtatctgtccattttctctattacttaagatcaagataatgcattcctataaaacctttttgggatttcactggtgaaggaacctagtctaaaatcatttgctgtttccaaccaaaggctcttgaaatgaaggatttcttcatgaatgtgtaatttaggtgttttgaatcggaccactgaagaggcataataaattcttgaatgttaagtgatgtttacctttttggttcactgtgaaagaatgtttaaattaattcagcttgctttattccactgaccaacattcatgtatatcttagtgtctagtatgtatctagttaacatcaaagtgctctttaaaaattttcttcaaccagattctcaactgtcactgtcctctaccacccttacattattattctaaattagtgaagtcttgctgcccatataataactgtgtttagacatacacagaatatttcttaaagttctaaactctaagatttccaaacctgaagaagaaaatataaaataggtgttayccttgctataggagttgcccagcaaaagattctatttcccttttctccatagaagcaaaagtcatacagatatgttagagttagtggttcatgttttttctgtaaaagatatattttattcttgttttaccaatctagccagagaaatgttttgaacttgtttccctaagtaaaataaaacttgtaggactaatagtaggaggtcttaggagaaaattggccaatgaaaagcctcatctcccacttctgatataacagccttagtggagaggaccttaaaaagtcaagactaggttagtgcatcaata

SEQ ID NO: 699260 - DNA, 943 bp, Homo sapiens
tttttctcacatcccattagccaaaacttggccacaccttgcaacgatggaggctgggaattatagtctgtaattgggcatgcgcctagctaacactgaatgtaacttctgctgaaaagaaaggtaaagtgaatgtagggagaaattaacattctctgccatactcctcttgtcaatttctgctcacgtctcattggtcagaattacttaacatcatgggatctaaaccactaacagctagggaatgagaccaccaggactggtttaggtcagggttctcaacctcagcaccattgacattttggactggatggttctctttgttgtgggggctgtcctgtgcattgaagaatgtttagccgcacccctgccctctacccgctagatgccagtagcacaataygcttacctctgtggcaacaaaaactgcaaaatattgccgaattacctccagttgaaaatcactaccttacatcaaccacgattttgccctctagcaggaataggatgcccccttccctgaatcaagtttttaaaagatggacgctgccaggtgtggtgggctcactcctgtaatcccagtgcttgaggggctgaaacgggaggatggcttgagtccaggagttcaagaccagcctgggaaatgaagtgagattccatctctgcaaaaaataaaataattagcctggcatggtggtgcacacctgtagtcccagctactcaggagtctgaagtgggaggatcacttgagcccagacgttccaggttgcagtgagctatgatcactacattgcattgcagcctgggtgatggagtgagaccttgtctataaaataaaataaaatgacaaacacaaaatcagggttattctaacaggagtaatgggggcaatggctgctgggcaggcaaccaacagtcatcaatgtacaatgatagaagaaat

SEQ ID NO: 699261 - DNA, 2243 bp, Homo sapiens
gacacaaatagacacttgactttaactcatgagagctgcatcgtggcctgtgccccacaaagccatgggcaaagggtcacctgaagccttggaggcccaacccaatctggtgtgtccagaaggcaggatatgaaatcaaagaagattgttctccagacctaagatataatgttgtttgttctgttcagttttagaattgagacctgttacttctttcttctttctcctttttggaatgggaatgtctatcttatgtctgtctcactgtattttggaagcacacaacttgtttgatttcacagactcacagctggaggggaatttgccccaggatgaatcgtatcttgagtctcactcatatatttgaataagactttggatttagactttaaagttgatgctgggataagacttttggaggctagtggaatggaatgaatgtattttgtatgtgaggacataaattttaggcagtgagtgatacagtgatatgaattaaatgttctcatcctctccaaaattcatgttgaaacttaatccctaatgcaacagtgttggtgggccacctgaatgtgatactattttttgagtgtcattaagtttaatcaaagtccggtgtcagaagatgcgatagactttcttggtcttccttataatagcttttcaatggtttattctcttatagagttctcttctatcacagaatactgaatttgtcttcttgaatctgcaagtgcacaagaaaagtaatcctttgtatctctagacatggcaagcatatcgattgagctgcaggtgctatgaagcaggaagttcctagtacttctgactgttgggtcaatagagacttctacctgtatgttatagctctttggttttggtggtgaaaggatgatctactaccaaggatctttctttcagccaaaataataaagttgcattattcattaagttttgttacgtgtttaattgtgtctccccacaaaaatatattggaattctagccccaagtaactccaaatgtgaccttatttggggatagcatcattagagaggtaatcaaacagacttggagtacaaatcccatttttcactcatagccatagataggtactattgtaaaagctgcagtatttaaaatatgragtcaattagggagggccctaatccaatatgactggtgtcttttaaaaaaggagaaaatttggacatagacagacatacacacagagagaatgccatgtgaagattggagttatgctgtcacaagtcagggacttaccagaagccaggcaatagacctagaacagatcttccttagctccttcagaggcagtgcggccctgccaacaccttgatctcagacttctagcctccagaactgtgagacaatacgtatgtgttaccttagcccctcatttttagtactttgttaagtcagcctcagcaaactaatacaacttcccagactaaagtgtttgcaaataactttttgcatccttgtatctgtcacatttttaatagtttacaaaggacacaacatatgttatcatattactggccctcgggaagtggcactggagattggccttaaaaaataaatgggtgtttaacaggcagaacagtttgaaggtaagaaggggtgaggagaagtttggaagaatagaattccaggcctcagaaacaacagaaacaaagatatgcagaataaatggtgtagactgtatcccagaaacagaatagtacactttgtttggaatgtacatgtaagcacaggggagcaatgagagaaaatattgtaagtttaaattattttcacattgacagtggcctcaaatactaggcagaggattttgagctcagcctggcacttcacaggccacagggaggtgatggttcttgagtagggctgttacatgtcagaaatgtgtttggagaggcacctctgggagcatgtcatgggatggattccttatgcagggaagactggaagcagagactttagttgagaaatggttgcaaaagccaaggcaaatggggatgggggtgatggcaaatggaaaggacaggtagtttaagaggcattactgcaaaggaagagagatatgcaggaactccaggcatatggcacgctaatgtgaaaatgttcttagacaggtggaattctcttgcctgttacatcatacctctgtgcatgggcataaggctgatgtgcagaggttcttcagtcagaaatggaatct

SEQ ID NO: 699262 - DNA, 700 bp, Homo sapiens
tgattttgtatcctcagactttgctgaagttgcttatcagcttaaggagattttgggctgagaggatggggctttctagatacacaatcrtgtcatctacaaaaagggacaatttgatttcctcttttcctaattgaataccctttatttccttctcctgcctgattgccctggccagaacttccaacactatgttgaataggagtggtgagagagggcatccctgtcttgtgccagttttcaaagggaatgcttccagtttttgcccattcagtatgatataattagttcttaaaagtgctttgtttacgttgaagtttaaaaatcaaaaagcaaaaggttcaagttctgtgtcttagctacctcatccataaattaaggcgtaaaagttttaagaaattgtcaaaataatcaagataaaaataatgagatgatgccttaaggtaaaataatgctatctgtaatatacatcattatcatttgttattattaaatatgtatttttggtgaaaatattcttcattagaagccaacttgacacaacagactagtcactgtgcattccataaagcatgataacataaaattatttgtctagtaggttgtatttgtgatattttagaatctcttcccctaaaggatagtagaacaggtggaaacctagaaaataatttatcattcctctctgaaagtgtctatt

SEQ ID NO: 699263 - DNA, 1184 bp, Homo sapiens
gcattttctgtggacattttctttgtctgttaccctactttgggaactaggtcagtcctgaatgtcttgaagcttaccatgtgctataagactgatggtatctcttttcagctgtaattttagatatggcaggaagagttatttccactctctttatgtccccagttctgctttgtgttgaggtgaaaacactaacttttttctaatttctccttatttttcctcttctcctcttctcttcataaaacatgggcaaataagcacttaggttccttttatttctccagtttttgcccatgcagtctctctctctctctgtcctctctctctctcattctctctctctctctccctctgtctctctctgtcacacacacacacacacacacacacacacacacacacattcacacacacgatctggaaatcagtaattcttgtacacactcctactttgacttgcttgcctgcaaacctcataaggcatctccaggctggaggttcaccttcaataaacatagagctgtctatttcacagctatcttttggccatgaaataaaaccttttagaagaaaatacttaaaattggcatggtagaattttagttttctcctatttacctttcaagagacaatgtaatgaagactttctatttaacaaacaaagcctgctatttcaaatgagggyttctagattattctagataaaactagttatctgtggagaatcatctccaactcttaccacattatctggtaactaagtgttctcttgtgcttttctctgatatatatcaaatttcaaccttattttactaaaattgttgagttgacctcccttaggaacttcagcatgcgtgttgcgtaacacatttcacaattactgttgtctctggggaaggaaggggctcataatttatctctcagattctgggagagtcctgctggcaacgtaattgtgaaagttgctaagacaacaccagcctttcctgagagctgaaggccacatagaaaaaacactcaaatgctgcctttcagccttgaggggtcaacagaaaacttcagttatagatgtggtccaggtgatggggattctgaccacagcaacatttaattttcttttcaatgaattatttccacatcatcctgagattcttgtttttactttctctgttcttttcctt

SEQ ID NO: 699264 - DNA, 1478 bp, Homo sapiens
tttgttttggttatgagcattttcccatagatttatacattttaaatacatttttgttatatagttattatttataataatataatacataatatgtaatataatacataatattatgtcctattggccctaaattttaaatcatctcccactctagctatattttattttatatttactttttttctgtttccagaagagagataacacttgctataaaacaatatgccaaggaactttaaaataagttaatttgtatttacaaaaaatctaaaacttccaaacttacttttatactgtattctgattgttgtgatcatttctgtgtaaaaagcctttaaattaggattgaactcaagacaaagaaattgttcttctcttaggaagtgatataaatgatataaatggaagtgatatacataggactcctttgtccaatagtagaatagaaggaacatcttataaaataaattacaaagaattggctgtggaatctggagagataactaaatgagtgtatttatacaccaggaaaaaaagcaattttaagaagtttttaaacagatttaggttctgattatgcaaatgaagaaaattatattgaccaagttaacaaaaatgtcattgcatgtgcaatgtgtaagcatcatgtaagatggtaggaacaaaaagatatatgaaatatgactccagctctcaaataattcacatcctaataggacacacacacacacacacgcacacacacacacgcacacacacacacatgcacagcagtgactagtataaagttttccaatctaataattataatgtggatgttgcagaatggcagaggaatgatcaattcattttgacctatgtttgcagaagaatgtagaagacttctcagaaggaaacagttgaaaattactatcctaggggtaagagatagaatactccacaattaaataattatgaatgaataataggttgtgtgctggaggaataacagaagattcattctatcatttattccacaaaaatttatagaatgcataccacatatcaggcaccatttcagacactgagaacagagctctgaagcagacagccagagcccctgccttccaaagaagtgaaaattttgaggagaagaagggaggtattgaatctggatctcaaatttaatttgggacctagggatataactttgagccatcagcgtatagatttttatttgaaaccacagtactaggtaaaatcatctagcaagtgagggaaagcagacaggggaagaaggagaagatttgagtctaggagstccacattaggtaaaagttagaaagaaatggagaggtgctaaaagagatgagaccaaatagccggttagtccagtagatgattaggaaaaccatgacagtgaggtcttgctgaagacagatggaaactgtttccagaaggagagggtaatcaactgagtcgggttatcaagtgca

SEQ ID NO: 699265 - DNA, 1576 bp, Homo sapiens
ctgaatttgctatatatatgtttattagtgtaaataaatcttcaagattagttgagaactttgacaagttactcagcctctgaattttttttcccttttgtaaaataggataattggagtcattattcctgtcagggtagtggtgaaattcaaatgtatataaaagaatttgaaaaacygtgtgagcattcttcaggtggtatgcatcattttcatgaaaggcattctattagtaccaggatttaggaatataatccttgcgcttaagaagtttagatataggccaggcgcggtggctcacctcagtaatcccagcactttgggaggccgaggcgggcggatcccgaggtcaggagatcgagaccatcctcggtaacacggtgaaaccccgtctctactaaaaatgcaaaaaaattagccgggcgtggtggtgggcacctgtagtcccagctactcgagaggctgaggcaggagaatggcgtgatcccgggaggtggagcttgcagtgaaccaagatctggccactgcactccagcctggacgacagagcaagactccgtctcaaaaaaaaaattatttattgttttgagacggagtttcaatcttgttgcccaggctggagtgcaatggcgcaaatctcctctcaccgccacctccgcctcctgggttcaagtgattctcctgcctcagattcccgagaagttgggattacaggcatgtgccaccactcccggctaattttgtatttttggtagagacggggtttctccatgttggtcaggctggtctcaaactcccgaagtgatccgcccgcctcagcttcccaaagtgttgggattacaggcgtgagccaccgcgcccggcagaaatagattttatacatgtcaaataccagtagatatagcaaattccagatgtgtggcatggatgagagcaacaagatttcagggggatggtgggttgtggttggctatctgggttttggaagactttatagaagagagacctgaaagggatttatcagcaattagatttggaggaacagagggagtgactaggaattttcaagggggagaagaaggaggaatggctcataaatgacaaggacagtaattaataagtaaatacggtgtcaaatcatcctttcttttgaagactaatgacctcaaagggatcaaacccagaaacagtttttatattttttctgggatcaaatacatgggtatctggcctactatatttgtattctagactgtttagtaaaataatacaggaatttgagaaaacctttgcaaaagtgttagtgaaaattacttagggtgagaggaagtgagggatattttattaggggaggtcacaagggcagtgagcaatcagatttttagtaatctgacttaagcagtttctttttgttttaatgaagcttgttatctttataaaagtaattagagaaaatttggaaaataaaggaaagaaagaaaagttctttagtgttttatcacgcaaatacaagctcattcgtttttaacatcttgttccaaactccaaagtcttgctttctcttcaattaaaactt

SEQ ID NO: 699266 - DNA, 629 bp, Homo sapiens
gccaggtggtgttacaggttagaatttatgtacacattctcgtccgtggcagagtataattgaagctcaccctcaagatcagtggaggcaaaacagccgtgaagctacgcatcttaaaatggagcaaacactgcaatttcaacttgaaaacaatctccaattaattacatgtctggttattaaaactccaagctatttgttagagttytgaaggttggttaatagataatacaagttaaccaacaggtttatttatttatttattcagatgcactcttgccctatcacgcaggctggagtgccatggcataaccttggctcactgcagcttttgcctcccaggttcctgtgattctcctgcctcagcctcctgagtagctgggattacaggtgcacgccaccaggcccaggcaaatttttttgtatctttaggagagacagggtttcaccatgttggccaggctggtctggaactcctgacctcgtggtccacctcccctgtactccccaggtgctgaggtgacaggcgtgagccacctcgcacagcccatccaatagttttttctttttccttttttttaaatatatggtttgtttttcttttatatgtaaagatggacccctcattt

SEQ ID NO: 699267 - DNA, 588 bp, Homo sapiens
attctatggaagaatgtggcatgtmttttttttacaatatatcatccacttcatctttgtattcgcatcactgatttaaaagtttcagtgtcccaaggaaacttgtgtcatttaaaaaaatgaggttacttattcaaaatgattagtcacattagtcatatgagttgtttcttgtttgatctgctaacacttacgtaaaatatccccatatgatttataattttatatttactctagaaacgtttctgtaaatgtgatccttgtttgatctcattaaggtttcttgccttattcatttcttattttgccttagacgtgcccctaaaaaatgactcttaatatagtacttcatgttgtttctcagaaatgcttaaatgtgctaattaatttcacagtaacatttttcagtatgatcttttctataggccaaagtaatttttgaaaacagttcagataataaataactctattttaaaattacatgttttttgttatttgggggaagatcttaaatcccttacaagacctcttgcagccaaattgccagttgttcctaccttgaaacttctgctgttatttctgggccca

SEQ ID NO: 699268 - DNA, 588 bp, Homo sapiens
tttcttttgcaggtttggcttcttcgtggcatttgtagaaaactagcaaaatatgagctttgcattcccccggatccagaagccaaatgggcagactagactttgttggcactctggccctcccagcacacctctctgggcccactctcygctgggtagtggcacaatgctttctcctgcctctcccttccttctgcctttctcggttctcttcctcaaaatctacctctgcagtcacttccccagggtttacaataaacgatgggaatggccagtggggaaagggctttgagtcagggccgctcttctgacccctggaagtctttcataagtggggtcaacctgaagttctaagtgtgattcccagagggaaaagcagggttcatttctctggccccaacttcacaccttccatggaagtcttagaggattctgtcaggctcattcaaggacagcaaaaatgcatcgccacattctcctatatagtcatcttgtgaaaatacagcagcagcccactggaaggacccaatagttgtttattttttccttcatgactaaatcaaaagtttctacactgatctaagtaga

SEQ ID NO: 699269 - DNA, 588 bp, Homo sapiens
tttcttttgcaggtttggcttcttcgtggcatttgtagaaaactagcaaaatatgagctttgcattcccccggatccagaagccaaatgggcagactagactttgttggcactctggccctcccagcacacctctctgggcccactctctrctgggtagtggcacaatgctttctcctgcctctcccttccttctgcctttctcggttctcttcctcaaaatctacctctgcagtcacttccccagggtttacaataaacgatgggaatggccagtggggaaagggctttgagtcagggccgctcttctgacccctggaagtctttcataagtggggtcaacctgaagttctaagtgtgattcccagagggaaaagcagggttcatttctctggccccaacttcacaccttccatggaagtcttagaggattctgtcaggctcattcaaggacagcaaaaatgcatcgccacattctcctatatagtcatcttgtgaaaatacagcagcagcccactggaaggacccaatagttgtttattttttccttcatgactaaatcaaaagtttctacactgatctaagtaga

SEQ ID NO: 699270 - DNA, 2029 bp, Homo sapiens
tgtctcctrccaccgggtttttatggtatttgtctttttgagtgtggcttatctcacttcgcataatgttgtctgagtttacccatgttgtagcatgtgtcaggatttccttcctttttaaggcctgataatatttcattgtatgtataccccattttctttattgattaagtgctgttggatacttaagttgcttccactttttggttattgtgaataatgctgctgtgaacatgggtgtgcagacaatctgtctgagtcccctgcaagtcccgtttctttacttattagtaatttaaccagtttttaattgtgctggtatttttttattatttatttttttgagacagattctcgctctgtcacccaggctggagtgcagtggcatgatctcagctcactgcaacctctgcctcctgagttcaagcgattctcctgcctcagcctcctgagtagctgaggattacaggcacgtgccaccacgcccggctaatttttctatttttagtagagacagggtttcaccatgttggtcaggctggtcttgaacacttgtcctcgtgatccgcctgcctcggcctcccaaagtgctgggattacaggtgtgagccactgtgcctggcctgtgctggtattttttaaaaattgtagttgttactctcttattaattctctgggtacaaatttacaccaatattcaatggttggtctatgagtctctttctctatcttactctctctttctctctctctctttccataagccttattagttgtactacagcatttttgaagatgtatcctttttagtaatcagtatagcaataatgattgtatttgatgatgaagccagaaatgggtagaaagaggcacctcctcttctcactgacatcagtaagatataatgatgtattgtcatgggtcattgtgtgtgtctggcaccttctggctctgtgctggggtcagtctgggtgctgtggtcatgacctttgatgcatgtgtgaaacattctgtcaggaggcagctggctggagccagcggcgctgtgaccaacggagatacacaggctgggtgggtcctgcagggattactgtgtgttggaagcgggcgcagggtgggggtgtcctgtgatcccaaaggttatgaatcaacaatcaaattccataacaataaaatttaatcagggcctttgcttcatcaagtaaatagatggtgaaaattaattcttcatcctttttctcttgttctgattcctagtcatctgctgaaatgggtggtttgcattaaaaaaaaattgagctctgaactatgtgaatggctaattacagatatttatttttaaatatgctcagaaaatgagtaaatgaatgcttatgaggcccatggcttacttctggtgtttcattatggaagtgtttaagtattgctgtgggttgatataatttcatatttgggaatgctttattataagttattagtgaatattgatttctacatttaaaaaatacctgtttactggataaccagttgagtcattcgtgggttcaatttgacagacacagtggaaattttgaatagtctgatgctgtaaccagcaccattgagacattcctgccctttgtcagggctcccacagttggtgtctgtaggtgtcagaccctgctcattgtactggcccccacgggacacaaaacacaagcagagcccacacaagggctgggagggtactatccagcgcctgacacagggtggtccccaaaaactatttgctgactggttaatccaatttgcagaagtttcgagaggagtgttgatctgaattctgaaggacagaacatttgtctggttgaaaaatggggattttaaaaatattccaaatgctaagaaaaacaaatcagtgaataattttacttggtcttgaaatgttaaaactaacattattattaaatgagcaaaaattgtggtataacatgttaagcttctttatgttatccatagatactagttttcctaaatcttttgtgaagtt

SEQ ID NO: 699271 - DNA, 2029 bp, Homo sapiens
tgtctcctaccaccgggtttttatggtatttgtctttttgagtgtggcttatytcacttcgcataatgttgtctgagtttacccatgttgtagcatgtgtcaggatttccttcctttttaaggcctgataatatttcattgtatgtataccccattttctttattgattaagtgctgttggatacttaagttgcttccactttttggttattgtgaataatgctgctgtgaacatgggtgtgcagacaatctgtctgagtcccctgcaagtcccgtttctttacttattagtaatttaaccagtttttaattgtgctggtatttttttattatttatttttttgagacagattctcgctctgtcacccaggctggagtgcagtggcatgatctcagctcactgcaacctctgcctcctgagttcaagcgattctcctgcctcagcctcctgagtagctgaggattacaggcacgtgccaccacgcccggctaatttttctatttttagtagagacagggtttcaccatgttggtcaggctggtcttgaacacttgtcctcgtgatccgcctgcctcggcctcccaaagtgctgggattacaggtgtgagccactgtgcctggcctgtgctggtattttttaaaaattgtagttgttactctcttattaattctctgggtacaaatttacaccaatattcaatggttggtctatgagtctctttctctatcttactctctctttctctctctctctttccataagccttattagttgtactacagcatttttgaagatgtatcctttttagtaatcagtatagcaataatgattgtatttgatgatgaagccagaaatgggtagaaagaggcacctcctcttctcactgacatcagtaagatataatgatgtattgtcatgggtcattgtgtgtgtctggcaccttctggctctgtgctggggtcagtctgggtgctgtggtcatgacctttgatgcatgtgtgaaacattctgtcaggaggcagctggctggagccagcggcgctgtgaccaacggagatacacaggctgggtgggtcctgcagggattactgtgtgttggaagcgggcgcagggtgggggtgtcctgtgatcccaaaggttatgaatcaacaatcaaattccataacaataaaatttaatcagggcctttgcttcatcaagtaaatagatggtgaaaattaattcttcatcctttttctcttgttctgattcctagtcatctgctgaaatgggtggtttgcattaaaaaaaaattgagctctgaactatgtgaatggctaattacagatatttatttttaaatatgctcagaaaatgagtaaatgaatgcttatgaggcccatggcttacttctggtgtttcattatggaagtgtttaagtattgctgtgggttgatataatttcatatttgggaatgctttattataagttattagtgaatattgatttctacatttaaaaaatacctgtttactggataaccagttgagtcattcgtgggttcaatttgacagacacagtggaaattttgaatagtctgatgctgtaaccagcaccattgagacattcctgccctttgtcagggctcccacagttggtgtctgtaggtgtcagaccctgctcattgtactggcccccacgggacacaaaacacaagcagagcccacacaagggctgggagggtactatccagcgcctgacacagggtggtccccaaaaactatttgctgactggttaatccaatttgcagaagtttcgagaggagtgttgatctgaattctgaaggacagaacatttgtctggttgaaaaatggggattttaaaaatattccaaatgctaagaaaaacaaatcagtgaataattttacttggtcttgaaatgttaaaactaacattattattaaatgagcaaaaattgtggtataacatgttaagcttctttatgttatccatagatactagttttcctaaatcttttgtgaagtt

SEQ ID NO: 699272 - DNA, 1073 bp, Homo sapiens
ttttwaaaaatttaaaaaattttgttgtggagacaaggtcttgccatgttgcccaggttggtcttgaactcctggcctcaagcgatcctctggcctccacctcccaaactgctgagattatggttgtgagtcaccgcacccagtctgtgtttgccctcttgatcctcagaaacactgaccacttctgtggggtgttttgctcctgttgctccacatgctggctgcactcactaggccttccctgacacttctcaatcttttttttttttttttttttttttgagacaggatctcactctgtcacccaggctggagtgcagtagcaggatctcagctcactgcaacccccacctcccaggttcaagtgattctcctgcttcagcctcccgagtagctgggattataggcgtgcaccaccacgcctggctaatttttgtaattttagtagagacggggttttgccatgttggccagactggtctcgaactcctgacctcaagtgatccacccacctcagcctcccaaggtgctgggatgacaggcgtgagccactgcactcggccatatctccatttttaacaagagggaagccccctcctgctgcttagggcaggccacagttgtccagctagaatcgatggccacgttgtttttcactgcatgtatttttgtggtggtttttcttattatgggctgataccatttctttcatttatggtggtgacagaaatgttccatattaaatggaaagcagggtcaggtgatggtggatatggcagaaaatgtgaaggaggcctgagggaaagaaggtagattctgaattctgatccggcccctgatccggaatggatgctgaggcccagagagggaaaggacgggtctggagtcacacagagtgccaggggcaacaccaattctcaagctcgcagcccagcactccttcctctgagcgttcagctgtgctgggctccaatgcataatgaatggaattctgagctgccgctttcctcccagaaacccctcccatcaagtcccttggggaccctctccccacctcggggtcccttggccca

SEQ ID NO: 699273 - DNA, 1472 bp, Homo sapiens
ggacccggaggggcctggcagccgtgccttcagctctacagctaatcagcattctcactcctacctggtaatttaagattccagagagtggctcctcccggtgcccaagaatagatgctgactgtactcctcccaggcgccccttccccctccaatcccaccaaccctcagagccacccctaaagagatactttgatattttcaacgcagccctgctttgggctgccctggtgctgccacacttcaggctcttctcctttcacaaccttctgtggctcacagaacccttggagccaatggagactgtctcaagagggcactggtggcccgacagcctggcacagggcagtgggacagggcatggccaggtggccactccagacccctggcttttcactgctggctgccttagaacctttcttacattagcagtttgctttgtatgcactttgtttttttctttgggtcttgttttttttttccacttagaaattgcatttcctgacagaaggactcaggttgtctgaagtcactgcacagtgcatctcagcccacatagtgatggttcccctgttcactctacttagcatgtccctaccgagtctcttctccactggatggaggaaaaccaagccgtggcttcccgctcagccctccctgcccctcccttcaaccattccccatgggaaatgtcaacaagtatgaataaagacacctactgagtggccgtgtttgccatctgttttagcagagcctagacaagggccacagacccagccagaagcggaaacttaaaaagtccgaatctctgctccctgcagggcacaggtgatggtgtctgctggaaaggtcagagcttccaaagtaaacagcaagagaacctcagggagagtaagctctagtccctctgtcctgtagaaagagccctgaagaatcagcaattttgttgctttattgtggcatctgttcgaggtttgcttcctctttaagtytgtttcttcattagcaatcatatcagttttaatgctactactaacaatgaacagtaacaataatatccccctcaattaatagagtgctttctatgtgcaaggcacttttcacgtgtcacctattttaacctttccaaccacataaataaaaaaggccattattagttgaatcttattgatgaagagactgatggctcaagagaagtgatttttccagggtcccatagctattagggacctacaaggccaaaggatagcctagcagaggagctttagctctcaaaccagaatctcaccaccctccgccaccctcaaaaacacccccaccaccttcaaaaccgctcctgctaccctccaccacccccaaaaccacgctgggtaaacacagctaagggagaaatactgtgcttgcttctaaacacagctggtattaatggataagctccttactccttcctaccagtctacccactcctaatc

SEQ ID NO: 699274 - DNA, 1472 bp, Homo sapiens
ggacccggaggggcctggcagccgtgccttcagctctacagctaatcagcattctcactcctacctggtaatttaagattccagagagtggctcctcccggtgcccaagaatagatgctgactgtactcctcccaggcgccccttccccctccaatcccaccaaccctcagagccacccctaaagagatactttgatattttcaacgcagccctgctttgggctgccctggtgctgccacacttcaggctcttctcctttcacaaccttctgtggctcacagaacccttggagccaatggagactgtctcaagagggcactggtggcccgacagcctggcacagggcagtgggacagggcatggccaggtggccactccagacccctggcttttcactgctggctgccttagaacctttcttacattagcagtttgctttgtatgcactttgtttttttctttgggtcttgttttttttttccacttagaaattgcatttcctgacagaaggactcaggttgtctgaagtcactgcacagtgcatctcagcccacatagtgatggttcccctgttcactctacttagcatgtccctaccgagtctcttctccactggatggaggaaaaccaagccgtggcttcccgctcagccctccctgcccctcccttcaaccattccccatgggaaatgtcaacaagtatgaataaagacacctactgagtggccgtgtttgccatctgttttagcagagcctagacaagggccacagacccagccagaagcggaaacttaaaaagtccgaatctctgctccctgcagggcacaggtgatggtgtctgctggaaaggtcagagcttccaaagtaaacagcaagagaacctcagggagagtaagctctagtccctctgtcctgtagaaagagccctgaagaatcagcaattttgttgctttattgtggcatctgttcgaggtttgcttcctctttaagtctgtttcttcattagcaatcatatcagttttaatgctactactaacaatgaacagtaacaataatatccccctcaattaatagagtgctttctatgtgcaaggcacttttcacgtgtcacctattttaacctttccaaccacataaataaaaaaggccattattagttgaatcttattgatgaagagactgatggctcaagagaagtgatttttccagggtcccatagctattagggacctacaaggccaaaggatagcctagcagaggagctttagctctcaaaccagaatctcaccaccctccgccaccctcaaaaacacccccaccaccttcaaaaccgctcctgctaccctccaccacccccaaaaccacgctgggtaaacacagstaagggagaaatactgtgcttgcttctaaacacagctggtattaatggataagctccttactccttcctaccagtctacccactcctaatc

SEQ ID NO: 699275 - DNA, 648 bp, Homo sapiens
tttcaaaagcatattgggagatttgctaacacagagcccatattcctccatggcaaaaactggttgaggctgaccagcagccgctatttcagagacagtgagcacacaccagtttgcctcaggcccacctgrtccactgcagaaatggcatatgcaaaggtatgaaacagcgcggcacattaggaagactggagtgaagagtacatatagaagtgatgaggaggaggccagagtaaccaggaggagccaggccctattccaggtagcatttacaggcagaataaaagttgccatacctgttctttagctcatgtggtccattgactccacttgccagaagaagatctcagggtcttgttgttgttgtggttgcagatctttaatggagaggctaggctaggtatttaagttacccctctgcaagaggcttcctatgaacattacccttcgaaaactcacatctccctctctttcctgcaacaggatgagttccacacttaaatgtagcagtcataaataaacctcaggaatcagtgtcccctggacatttcttctgtgtctggaaacccatactatggcacatcttccccactcctttctgcagattcaacactcaatgcaaagatagcctctttcatgaagccatct

SEQ ID NO: 699276 - DNA, 648 bp, Homo sapiens
tttcaaaagcatattgggagatttgctaacacagagcccatattcctccatggcaaaaactggttgaggctgaccagcagccgctatttcagagacagtgagcacacaccagtttgcctcaggcccacctggtccactgcagaaatggcatatgcaaaggtatgaaacagcgcggcacattaggaagactggagtgaagagtacatatagaagtgatgaggaggaggccagagtaaccaggaggagccaggccctattccaggtagcatttacaggcagaataaaagttgccatacctgttctttagctcatgtggtccattgactccacttgccagaagaagatctcagggtcttgttgttgytgtggttgcagatctttaatggagaggctaggctaggtatttaagttacccctctgcaagaggcttcctatgaacattacccttcgaaaactcacatctccctctctttcctgcaacaggatgagttccacacttaaatgtagcagtcataaataaacctcaggaatcagtgtcccctggacatttcttctgtgtctggaaacccatactatggcacatcttccccactcctttctgcagattcaacactcaatgcaaagatagcctctttcatgaagccatct

SEQ ID NO: 699277 - DNA, 1098 bp, Homo sapiens
cattgtacctattaagtaattattcatcatccacctcctttcaccccctcaccttcctgggtcttcattgtctgtcctaaggttgtatttaaatgttcccacctggcctccctgtactatggggaacaatgtattaaaatataagtgtgcaaattatgagtagcagagcattaagagaggagaattttgctcattgaggcttggatggccataattagtaactgactcccaaagcacagtgaattttagaaacaagagtttgttgaggttacagaagcaccttttcctccattgctaagcttgaaggacctggaactgagctcttatgactttcctcatgatgtctatcagttctcaaaatttttctcttttatactgaactacatccagaccctaagaccaaattctccctgtaatagacatgagggtaagggtgaagagcgaaaatgatgtgttcagcagataagtaagtacaggttggagtacagcttcatgggaaggaagagatgtgctagacgtcagactcaggctgaaacgtttttacattattcttaggcatttagcagatggaggcataagracctgcctaatttaggaaatttgatttgaactacctggtctaaccaaggtttccacttcccactactgcatttggtgtagggtcaatgagctgaagtttgtgaacccatgttgcttctgtcttcccttaaatgttatcacatagaggagggagctaccccacaacaggggaaaaaatatctttcaaccccaacatccatcccagacaaataagaacatggataaaataagagactcttaaagactcattttgaaagccttgaattcttaacaaaacctctgaacaagtttctcctaggagaggactgaaatgaagccttttgaaaacaaaaaagaaatggcacatttgacaagggtcagctggccaggctcctgtgatgacagcatttgggagtattaatatataccaagagctgtaaatggttgcaaaaatgcacatggattccttgacataatgtactagctcacaccatctgccactttcagcagtcaaggactgcatacttgaaatgctttcta

SEQ ID NO: 699278 - DNA, 1098 bp, Homo sapiens
cattgtacctattaagtaattattcatcatccacctcctttcaccccctcaccttcctgggtcttcattgtctgtcctaaggttgtatttaaatgttcccacctggcctccctgtactatggggaacaatgtattaaaatataagtgtgcaaattatgagtagcagagcattaagagaggagaattttgctcattgaggcttggatggccataattagtaactgactcccaaagcacagtgaattttagaaacaagagtttgttgaggttacagaagcaccttttcctccattgctaagcttgaaggacctggaactgagctcttatgactttcctcatgatgtctatcagttctcaaaatttttctcttttatactgaactacatccagaccctaagaccaaattctccctgtaatagacatgagggtaagggtgaagagcgaaaatgatgtgttcagcagataagtaagtacaggttggagtacagcttcatgggaaggaagagatgtgctagacgtcagactcaggctgaaacgtttttacattattcttaggcatttagcagatggaggcataagaacctgcctaatttaggaaatttgatttgaactacctggtctaaccaaggtttccacttcccactactgcatttggtgtagggtcaatgagctgaagtttgtgaacccatgttgcttctgtcttcccttaaatgttatcacatagaggagggagctaccccacaacaggggaaaaaatatctttcaaccccaacatccatcccagacaaataagaacayggataaaataagagactcttaaagactcattttgaaagccttgaattcttaacaaaacctctgaacaagtttctcctaggagaggactgaaatgaagccttttgaaaacaaaaaagaaatggcacatttgacaagggtcagctggccaggctcctgtgatgacagcatttgggagtattaatatataccaagagctgtaaatggttgcaaaaatgcacatggattccttgacataatgtactagctcacaccatctgccactttcagcagtcaaggactgcatacttgaaatgctttcta

SEQ ID NO: 699279 - DNA, 1098 bp, Homo sapiens
cattgtacctattaagtaattattcatcatccacctcctttcaccccctcaccttcctgggtcttcattgtctgtcctaaggttgtatttaaatgttcccacctggcctccctgtactatggggaacaatgtattaaaatataagtgtgcaaattatgagtagcagagcattaagagaggagaattttgctcattgaggcttggatggccataattagtaactgactcccaaagcacagtgaattttagaaacaagagtttgttgaggttacagaagcaccttttcctccattgctaagcttgaaggacctggaactgagctcttatgactttcctcatgatgtctatcagttctcaaaatttttctcttttatactgaactacatccagaccctaagaccaaattctccctgtaatagacatgagggtaagggtgaagagcgaaaatgatgtgttcagcagataagtaagtacaggttggagtacagcttcatgggaaggaagagatgtgctagacgtcagactcaggctgaaacgtttttacattattcttaggcatttagcagatggaggcataagaacctgcctaatttaggaaatttgatttgaactacctggtctaaccaaggtttccacttcccactactgcatttggtgtagggtcaatgagctgaagtttgtgaacccatgttgcttctgtcttcccttaaatgttatcacatagaggagggagctaccccacaacaggggaaaaaatatctttcaaccccaacatccatcccagacaaataagaacatggataaaataagagactcttaaaractcattttgaaagccttgaattcttaacaaaacctctgaacaagtttctcctaggagaggactgaaatgaagccttttgaaaacaaaaaagaaatggcacatttgacaagggtcagctggccaggctcctgtgatgacagcatttgggagtattaatatataccaagagctgtaaatggttgcaaaaatgcacatggattccttgacataatgtactagctcacaccatctgccactttcagcagtcaaggactgcatacttgaaatgctttcta

SEQ ID NO: 699280 - DNA, 578 bp, Homo sapiens
ctttgctattgtgaacaatgctgaaataaacctacaagctttttgatataatgatttctttccctttgggtaaatactcagtattgggattgctgtattgaatggtaattctatttttagtcctctttgagaaatcttgtrtaccattttccatagagcttgtactaatttacatcctcaccaacactgtataagcattctcttctccacattcttgaagggcaataatattattagaggaacttcagctggtaaaataaagcagttctaacattcatacttcttataatttgagtatgtaaaataaaattttctctcacagttcttgattatctttgttttcctcaagagtttgagggagtgagaaaaggcttataatgttttcttttacaagaagggatctattttagcataacattaaaaaggcatatctctcacgcttcctctctctttctctttttctttttttttttttatttaaatatgctcttcatgtctttcaactgattggatgaggctcacccagattattgaggataatctcctatacataaagccaatgttaaccacatctacaa

SEQ ID NO: 699281 - DNA, 599 bp, Homo sapiens
ttgctggttgttgggcttaaagaggctgtttctaggaggaggactggggaaraacccaggagattctggtctgagttgatcacccatgccagaggaaacgtagcattcctcacggtcaaggacttggcctttagccacacatacctgactatgccttccacacatccacataagcaagtctttaactgtctcttctccagcttcttagctgtaaaacgggactgttgatagtacttccctgataggacggacggctgtgaggactgtgtgggatgatgacgtccatatagacactttgcatcatggaagcagtcaatgtatccctgaatacattttttccccaagtgtaaaattggcataagacttaaaggattctagcagtataaaaggttatgcagcgaagagtaactctttcctactcttgaccccttagtcacagagggtgtctacagagaagacacttgttgtcaatgtcttgtgtaaaatgccaaagatggtttccatataccaacatggaaatgagatatatatatatatagccatttttgatctacaaaaatgggagtttcatatggttcaatccaagtggtgtgtgtgta

SEQ ID NO: 699282 - DNA, 599 bp, Homo sapiens
ttgctggttgttgggcttaaagaggctgtttctaggaggaggactggggaagaacccaggagattctggtctgagttgatcacccatgccagaggaaacgtagcattcctcacggtcaaggacttggcctttagccacacatacctgactatgccttccacacatccacataagcaagtctttaactgtctcttctccagcttcttagctgtaaaacgggactgttgatagtacttccytgataggacggacggctgtgaggactgtgtgggatgatgacgtccatatagacactttgcatcatggaagcagtcaatgtatccctgaatacattttttccccaagtgtaaaattggcataagacttaaaggattctagcagtataaaaggttatgcagcgaagagtaactctttcctactcttgaccccttagtcacagagggtgtctacagagaagacacttgttgtcaatgtcttgtgtaaaatgccaaagatggtttccatataccaacatggaaatgagatatatatatatatagccatttttgatctacaaaaatgggagtttcatatggttcaatccaagtggtgtgtgtgta

SEQ ID NO: 699283 - DNA, 620 bp, Homo sapiens
tgtctctactaaaaatacaaaaaaaaaaaaaattagctggcgtggtggcactcaccaccacacccggctaatgttttttgtatttttagtagaaacggggtttcaccatgttggccaaggtggtctcaaactcctgacccctgcctgcctcgttctcccacagtgctggcattacaggcataagccacgttgctcagtccatgctcccacattttaatagtccgtgtgctctatttgatgaatagagaggtttccgcaccataggttgaattcgtttgattcatcagaacattcgcgtttaacccgctatgtggtaggcactgtagtaggggttgaaggatatagaattttattcattcattcattcattcattcattcaacaaacatggatcaggcactttcacgagccaggctctatgctgggaatacaaacaaggacaaggagatcccaaaggaggagacagaytcacgaatagatcatctcattacaataacctttctccccgacatgtaggaggggatctagtaaaagtgaccagttgactttagggataagaagtgggttccttggtgcgggactgccctagcctccatggtggctttgtgttgattagaaaat

SEQ ID NO: 699284 - DNA, 1150 bp, Homo sapiens
tggcataattagacaatgtggggtattgctagatgttaaaatttgaaaaaaaatctgaatgtgtgcaacataaaaaacaaaaccccaatgatttatctttatagctccaaaatgtcattattagcttaagaatatatttttgtgtgacaagcaagttgatttgcttattaaattattaattgrtatgtttagagggctacagaccttgtaaaacattggaggaggttttgttttttttttttttaacccccttcttaactcaaaaaagtctaaggagggagaaagaaaaagctgatttttcagctgtttgttttctttttcctcccaacactctgaggtttctacgtgctgttaaaacagggccaagaatccctggcttggattctgtctttccttgggggcagaagtttccctctcaggcctccggggtctttccagtctgcagtcttcaaatatgggctgaccaacccagaaatgatattttttgttgactaactccaggcacatatgttctttcgtggagggatatttttgaaagaaaggctgcacagtttccatttgcaagagaagagtatattttcagaagcttctatgggagggagactgacctttgctctaacacagagagtcttcttcaatctgggattttatggggaacctcatctattttctttcttcttctttcctgctggagctagtttcctctgttctctggttaaacatttttattggatggattttacaatggggaggaacacatacttttttgttgaaagaccatctccagctaatggaatctaatcgggccaagggaataaaatttgggaattcaatttcctcaaactgagtcgacacttcactgctcctgtttcatgcactttgaaatatggcgtgttcatgtttgaaggcacagagagagttgagctcattcttaagtgagacattctaggcaagaaatagctagaactaatattaaaatcgtcaactgtaaacgccccttctaccccaacaaaagacaacagtatgtgaactaaacccctcccttctatacggatgctgcagagaaaccccctgttgtcctttgggaacaatggttggaataagtatgtaatgagtgggggtgaggagaagagtttgaaattaaaaaaaa

SEQ ID NO: 699285 - DNA, 1150 bp, Homo sapiens
tggcataattagacaatgtggggtattgctagatgttaaaatttgaaaaaaaatctgaatgtgtgcaacataaaaaacaaaaccccaatgatttatctttatagctccaaaatgtcattattagcttaagaatatatttttgtgtgacaagcaagttgatttgcttattaaattattaattgatatgtttagagggctacagaccttgtaaaacattggaggaggttttgttttttttttttttaacccccttcttaactcaaaaaagtctaagsagggagaaagaaaaagctgatttttcagctgtttgttttctttttcctcccaacactctgaggtttctacgtgctgttaaaacagggccaagaatccctggcttggattctgtctttccttgggggcagaagtttccctctcaggcctccggggtctttccagtctgcagtcttcaaatatgggctgaccaacccagaaatgatattttttgttgactaactccaggcacatatgttctttcgtggagggatatttttgaaagaaaggctgcacagtttccatttgcaagagaagagtatattttcagaagcttctatgggagggagactgacctttgctctaacacagagagtcttcttcaatctgggattttatggggaacctcatctattttctttcttcttctttcctgctggagctagtttcctctgttctctggttaaacatttttattggatggattttacaatggggaggaacacatacttttttgttgaaagaccatctccagctaatggaatctaatcgggccaagggaataaaatttgggaattcaatttcctcaaactgagtcgacacttcactgctcctgtttcatgcactttgaaatatggcgtgttcatgtttgaaggcacagagagagttgagctcattcttaagtgagacattctaggcaagaaatagctagaactaatattaaaatcgtcaactgtaaacgccccttctaccccaacaaaagacaacagtatgtgaactaaacccctcccttctatacggatgctgcagagaaaccccctgttgtcctttgggaacaatggttggaataagtatgtaatgagtgggggtgaggagaagagtttgaaattaaaaaaaa

SEQ ID NO: 699286 - DNA, 647 bp, Homo sapiens
ggataatacatacagtagcatatgactcataaaaggacatgtgcaaaatataatttggttgtatttttactccacttctctgagagctggattaccatgaaagaaatgtgagcataaggcacctctggtcgaaaggaaaagttcagcatttcacagaggaagaggcagcgtcttatggctgtctcctctctccaggctgctttgtatgttaccaccagtcaggtaatttattagggacaatatctgcttcaaaacacttaacagtgggagaagaagagaagaaaatgctctttcttctcaacaagtgtgtaacatttcaaagaagtttgtaaaattctgaratacttgccaggtctatttaaaaataaatctggtttgaaaaacctagagtagaggcttcctggaagctgtggctatactgtatttaaagtcatcaagtcttgtaaggaaaaacaagagtcaacaatgaaataggaagaaaaaagtgttccaggccagattactatagcaggtacaaaggtcctgtggtagatcagagcatacagagcatgaggaattaaaggaaggccagtgtggccagagcagagctgagaagcctagaggggacagcagggatgacacatggcagccaaatcatgctaggtcat

SEQ ID NO: 699287 - DNA, 647 bp, Homo sapiens
ggataatacatacagtagcatatgactcataaaaggacatgtgcaaaatataatttggttgtatttttactccacttctctgagagctggattaccatgaaagaaatgtgagcataaggcacctctggtcgaaaggaaaagttcagcatttcacagaggaagaggcagcgtcttatggctgtctcctctctccaggctgctttgtatgttaccaccagtcaggtaatttattagggacaatatctgcttcaaaacacttaacagtgggagaagaagagaagaaaatgctctttcttctcaacaagtgtgtaacatttcaaagaagtttgtaaaattctgaaatacttgccaggtctatttwaaaataaatctggtttgaaaaacctagagtagaggcttcctggaagctgtggctatactgtatttaaagtcatcaagtcttgtaaggaaaaacaagagtcaacaatgaaataggaagaaaaaagtgttccaggccagattactatagcaggtacaaaggtcctgtggtagatcagagcatacagagcatgaggaattaaaggaaggccagtgtggccagagcagagctgagaagcctagaggggacagcagggatgacacatggcagccaaatcatgctaggtcat

SEQ ID NO: 699288 - DNA, 600 bp, Homo sapiens
tttgctccaggacttaggctagaagtcagaagccagacttaccgatccctaaatgagactcccacaagtgagagaggagatggtcagggctgagctgctgctacttttrcagaataaatgaagacagttgaataagggactggaccgcaccctgcctgatgtgttcagataaagagaaggctcatgcctctggtgggtgggattatggggaaagcttatcatcattttttcaaatgcttctgaattttacaaagttctagattaggtattaactgctgtgatcatttaagccaaaaatagttgaaaagaagaaagagagaaagaggcaggacagcgatggtaaagtctatgtccatctccagacacccccttagttggaagaatcctttaactccttcactgctgcagaccccataagtacttatttctgggcatccctggtgcaaacattcctagtgaagtccagtgaattttaaaagtcctccagcaaacgacctcaaacctaatagttggtaggcaacgtttttctgttcttctatccaggaattggattgttgtggcatgaatggactgagtattctttcttacagacttggaatc

SEQ ID NO: 699289 - DNA, 641 bp, Homo sapiens
acatgaaacagttgattctgctctttggcccaatctgagagcatctgtccttcaataggaaggtgaagtgtaactcactggatcatgtgacaggattgtcttgtccccatccccaaccaccccccaccaagaaatcaaggaaacagctattgggtatgtatccttttttgtctaatagaataaaccatatcctaagccataagataagaggtgggaataaatgctcatttggcaaattaaggttgaaattgttttgtggggttttttttactgggcatttccccccactgtttgggcataagagaaaataggaacactttgcatctaaactggagggtaatcctgcactatccctcccctctccagactggggaagctgtgaacgttcaaaactgaaacaagactcgggagtgctggtgtggaggaggggaaggaggaaagttagtaggcccagagagaggagatggtgggaagcagagggagtatgttaagggtgggaggtctaaaggctcacatggggaactgctggcctccggaatctccatgtggagacatctcaaaagctgagcagtgaggctmaggccatgatagggtgttaagaacaggatggcaaaaataggagagatgttgttcgactgtcc

SEQ ID NO: 699290 - DNA, 1164 bp, Homo sapiens
gaattttagttgttttcaaagaaagagagttggctgggtgcggtggctgatacctgtaatcccggcactttgggaggccgagacaggctgatcacctgacatcaggagttcaagaccagcctgaccaatatgatgaaaccccgtctctactaaaaawacaaaaattagccgggtatggtggcatgcccctgtaatcccagctacttgggaggctgagacaggagaagcacttgaacttcggaggtggaggttgcagtaagccgagatcatgctgctgcactccagcctgggcaacaagagtgaatctccgacttaaaaaaaaaaaaaaatgaaagcaagcaagaaagagagtctacctttgtacctagttcatcgttttactagaaagtgaagtctggaagtcaatttttaactttgatttgttgaccatggcaacagttcttttttttgcacatgtttcttatgttttagaaaaattatcattgactgttgtagaaagagttacattgacacttagtgattgaagaaagagagataatttaggtaataaattcaattgtctaagtaagagctattgagagtataaactaaacctgggttagatgaaatgaagaagaggaaacaaatcctagagaatcaaacacttttgagtacagagatacaggtgcatcagccctaagaaactaaacactttatcttgaatccacatttctggaaaatatcacgtagtagttaggctatactaaatttagcaggagggctttttggaagtaaattatgtgttgaattgaatcatgataagtgtgagctgtttcaaaggtcttttcttactacagtggcatagactatttagttcaattacagaatcagaattaaccttaccaggtgtcttagcagatacaaagtcttggatctcagctagtggcaaaactgtggagactggatgccaattgaattactcactagcgccaccaagataagaaagtgtgtaatttaccaagtaaatattgattagaggtgttttgtaaaaataataattttttgaagacatttaaagatgctcctcaaagcaaagtgcaccagctatcaggtgaaggtctgtcttacaattgtgtccatcaaaatcggaaataacaagaaaaaaatctacttaatatctgttcc

SEQ ID NO: 699291 - DNA, 1164 bp, Homo sapiens
gaattttagttgttttcaaagaaagagagttggctgggtgcggtggctgatacctgtaatcccggcactttgggaggccgagacaggctgatcacctgacatcaggagttcaagaccagcctgaccaatatgatgaaaccccgtctctactaaaaaaacaaaaattagccgggtatggtggcatgcccctgtaatcccagctacttgggaggctgagacaggagaagcacttgaacttcggaggtggaggttgcagtaagccgagatcatgctgctgcactccagcctgggcaacaagagtgaatctccgacttaaaaaraaaaaaaaatgaaagcaagcaagaaagagagtctacctttgtacctagttcatcgttttactagaaagtgaagtctggaagtcaatttttaactttgatttgttgaccatggcaacagttcttttttttgcacatgtttcttatgttttagaaaaattatcattgactgttgtagaaagagttacattgacacttagtgattgaagaaagagagataatttaggtaataaattcaattgtctaagtaagagctattgagagtataaactaaacctgggttagatgaaatgaagaagaggaaacaaatcctagagaatcaaacacttttgagtacagagatacaggtgcatcagccctaagaaactaaacactttatcttgaatccacatttctggaaaatatcacgtagtagttaggctatactaaatttagcaggagggctttttggaagtaaattatgtgttgaattgaatcatgataagtgtgagctgtttcaaaggtcttttcttactacagtggcatagactatttagttcaattacagaatcagaattaaccttaccaggtgtcttagcagatacaaagtcttggatctcagctagtggcaaaactgtggagactggatgccaattgaattactcactagcgccaccaagataagaaagtgtgtaatttaccaagtaaatattgattagaggtgttttgtaaaaataataattttttgaagacatttaaagatgctcctcaaagcaaagtgcaccagctatcaggtgaaggtctgtcttacaattgtgtccatcaaaatcggaaataacaagaaaaaaatctacttaatatctgttcc

SEQ ID NO: 699292 - DNA, 1164 bp, Homo sapiens
gaattttagttgttttcaaagaaagagagttggctgggtgcggtggctgatacctgtaatcccggcactttgggaggccgagacaggctgatcacctgacatcaggagttcaagaccagcctgaccaatatgatgaaaccccgtctctactaaaaaaacaaaaattagccgggtatggtggcatgcccctgtaatcccagctacttgggaggctgagacaggagaagcacttgaacttcggaggtggaggttgcagtaagccgagatcatgctgctgcactccagcctgggcaacaagagtgaatctccgacttaaaaaaaaaaaaaaatgaaagcaagcaagaaagagagtctacctttgtacctagttcatcgttttactagaaagtgaagtctggaagtcaatttttaactttgatttgttgaccatggcaacagttcttttttttgcacatgtttcttatgttttagaaaaattatcattgactgttgtagaaagagttacattgacacttagtgattgaagaaagagagataatttaggtaataaattcaattgtctaagtaagagctattgagagtataaactaaacctgggttagatgaaatgaagaagaggaaacaaatcctagagaatcaaacacttttgagtacagagatacaggtgcatcagccctaagaaactaaacactttatcttgaatccacatttctggaaaatatcacgtagtagttaggctatactaaatttagcaggagggctttttggaagtaaattatgtgttgaattgaatcatgataagtgtgagctgtttcaaaggtcttttcttactacagtggcatagactatttagttcaattacagaatcagaattaaccttaccaggtgtcttagcagatacaaagtcttggatctcagctagtggcaaaactgtggagactggatgccaattgaattactcactagcrccaccaagataagaaagtgtgtaatttaccaagtaaatattgattagaggtgttttgtaaaaataataattttttgaagacatttaaagatgctcctcaaagcaaagtgcaccagctatcaggtgaaggtctgtcttacaattgtgtccatcaaaatcggaaataacaagaaaaaaatctacttaatatctgttcc

SEQ ID NO: 699293 - DNA, 1164 bp, Homo sapiens
gaattttagttgttttcaaagaaagagagttggctgggtgcggtggctgatacctgtaatcccggcactttgggaggccgagacaggctgatcacctgacatcaggagttcaagaccagcctgaccaatatgatgaaaccccgtctctactaaaaaaacaaaaattagccgggtatggtggcatgcccctgtaatcccagctacttgggaggctgagacaggagaagcacttgaacttcggaggtggaggttgcagtaagccgagatcatgctgctgcactccagcctgggcaacaagagtgaatctccgacttaaaaaaaaaaaaaaatgaaagcaagcaagaaagagagtctacctttgtacctagttcatcgttttactagaaagtgaagtctggaagtcaatttttaactttgatttgttgaccatggcaacagttcttttttttgcacatgtttcttatgttttagaaaaattatcattgactgttgtagaaagagttacattgacacttagtgattgaagaaagagagataatttaggtaataaattcaattgtctaagtaagagctattgagagtataaactaaacctgggttagatgaaatgaagaagaggaaacaaatcctagagaatcaaacacttttgagtacagagatacaggtgcatcagccctaagaaactaaacactttatcttgaatccacatttctggaaaatatcacgtagtagttaggctatactaaatttagcaggagggctttttggaagtaaattatgtgttgaattgaatcatgataagtgtgagctgtttcaaaggtcttttcttactacagtggcatagactatttagttcaattacagaatcagaattaaccttaccaggtgtcttagcagatacaaagtcttggatctcagctagtggcaaaactgtggagactggatgccaattgaattactcactagcgccaccaagataagaaagtgtgtaatttaccaagtaaatattgattagaggtgttttgtaaaaataataattttttgaagacatttaaagatgctcctcaaagcaaagtgcaccagctatcaggtgaaggtctrtcttacaattgtgtccatcaaaatcggaaataacaagaaaaaaatctacttaatatctgttcc

SEQ ID NO: 699294 - DNA, 2997 bp, Homo sapiens
gggggaaaattatctgaacacacaaatcatgtggttttagagtccaaaagtaaagcagatggcattaattgtctatattgaaagtaagtgtgtgtttaatatgctagaataggatttttaaaaacagttatatctttgtctgcagctcgtttttttttggcatatatctctaaaagtttctaatagaagctttgggatatatttttcaaaaaattattttcagcttaaaaaatgtattttctggcagatgcagaactcacattaaattctaaaaagttgaggggagggtgattgtgttttctcaagatctgtgacttgttacttaacaaagaacccattgtaaaatttccaaaaacatcgtagcaatctaagacagaaagaaagtatggcacatagcaatgatcccaatttttaggagcatcgagaattagaagacaaattatataataaagtgtattgattacctagggctgctataacaaattaccataaatttggtggcttgaaacaacaatttattctttcacagttctgaagtccagaagtaaaaaaaaaaaaaaaaaaaatcgaagtgttggacaggtgggtacctttatggaggctctgagggagaatctgtgccatgcccgtctaccagcttctagtggctatcagcagtccttagtgctctttgacttgtagacataacaatagtctctggctccatctctacctggcctcttccctgtgtcttcttttctgtctcctatctggacacctattcttgggtttagggcccatgctaatctagagttttattatatccagaaagaccctcatttcaaataaggttacattctgaggttccaggtggacatatcttgtgggggacacatccagctactacataaggtatgaatgtacatgtaacttttcagaaggagtcagagctgtgaggtgtccaaatgaagccaaaaccttagaaagagagctcttagacctggaaatgatctctgagaaaagtaggactcctccttccattcaacttgtaggaaattatcaccacttaagagaaaaaacaaggaatgtcaaaaaaactaaatggtttagcaagtaatatcatccaggaagtgaccaaagagagccagtatgtgtcactggcttcccacagaagtgctgttttcactccacttcattcagagaaagcagcacttaaaggtggccttaaggggtaggtaaagaggaaagaaaagaagaaacctgaagttattgtaggagaagaaaaatgggctgtatttggtggaattccttgtgtctgaccactttaacatctcagtgaggttataactactactttattgtatccaccgaactatcacctttgcctttactcattttatcactgcccatttagccatgagaaaagtgttaaataaatatttttgagtagcagtgaactaaattgattcaattataggtgggtgccttgggactctgcctaggtgaggttactatatgcataatttatttatcaggggatttgttttgaaagcaagtctatctcagtttcagagttcagcaacgtcgattaattaattgaacattttgaaatatccttgcaccctttcaagaacagatagagggctcttgctgccactagaggcatagtggctcatgcctgtaaccccagcactttaggaggccgaggccggcaggtcacttgagattcagagtttgagaccagcctgaccaacatgatgaaaccccatctctactaaaaatacaaaaattagctgggtgtgtgtggtgggcacctgtaatcccagctactcggaatgctgaggctggagaatcgcttgaatctgggaggcggaggttgcagtcagccaagatcctatcactgcactccagcctaggcaacagaactaggctctgtttcaaaaaaaaaaaaaaaaaagtggataaaggacatgcacatggaatctaagatagtaagcagggaaagcattggaggcttgtgggtcatattgtctctattgcaactactgaacaatgctgctgtaacaggacagaagccatagactatatgtaagccaatggatgtgattgtgtttccgtgtaactttgtttataaagataagtggtcgaccagatcaggtccatggactgtagtttgccaaactatgtggtgggatactttttaaaattttcagtaaatagtacctccggtcccttagtagtgcttcaaccactgacatgatctttttctcctttactggccatagctaggcaatctctacatattattgagcacattagctctactcctacaaacatcttcttggttcagagaagtccccattattcagacttttcctcaggaatctttcttgctctcttggtgttagttttttcctcctttgacgtcttttacaaaccataggtagagttacccttctaaaatatttctcaaaaactacgttcagtaagtgaggattccatggagtactatatgttcaagcagtgaagtgctagaaaaatatgagtaacatagtccatggtggcaagttgcatatctatccacttggtgactgatgcgtattctttggactttagctaccaatgttttctttcaacttaatatatccatcatatttcctactcattgtattatgtgaatttatgttttgaggagatttgtcaaaaaaaaaaaaacaaaacaagagaataacattcagaccagttaacctgttattcttgactctcaaaakcctggctgtagttgaagataagtcaattgaacagacatgcattgagcatgtagcaaagtgttgaagagggtgtgttgttgaagcagatcatttactttcaaatctcagctccgtaattctagctgtgtgccttagatgcatggcttacctaactttttctcacctgaaaatgggaatagtaacagtttcaatctcataggacggttacgaagattaaataattttttgagaggtggtgcaagtactg

SEQ ID NO: 699295 - DNA, 1552 bp, Homo sapiens
attgctaaatttttttcaatgggcaagattaaagtttggtatctaaggatgcacatttgagtgacaaaactataaagaaacatgggctgggtgcagtggctcatggctatcatcccagcactttaggaagctgaggcggaaggattgtttgaagccagggatttgagaccagccggggcaacaaagtgagcatccctacaaaaaaatttttaaacattacccaggcatggtggtgcatgcctgtagtcccagctactcaggaggctaaggagggaagatcatttgaggccaggctgtagtaagctatgatagtactgctgcactccaaccccagccgacatagcaagaccctgtctctaaaaaaaaagaatgcgattaccacaaaagtcaagacagttttttgagagaagggaagaaaattgtaattgggaggcattttgggggtggccggctatacaccaaaagttcctcccaattacatccttgagcaaaataaatcagtaatctattatccaaaagtaacactgacatatacaaacatatgtaaggacaaagaagtataaagtaaattgtgcaaattaaaatataatatcagcatgacatcaaaaagaaagttaagacaaattcagtatgccaagaacgtaagagcaggcagggtgcagtgggtcacacctataatcccagcactttgggaggccgaggtaggcagatcacctgagatcaggagttcaagaccagcctggccaatatggcaaaacttcatctctactaaaaatacaaaagttagccgggcgtggtgatgcatgcctgtagtcccagctactcaggaggctgagacaggagaatcacttgagcccggggggtgaaggttgcaatgagctgagatcacgccactgcactccagcctgggtgacagagcgagactccatctcaaaaagaaaaaaaaaaaaagaatgtaagagcatatgaagtgcattttaccaaacacctccatttattatataactttacagtttctgcttacttgattgagcaagttacttgtaaacccaattctgcaataagagcaaactctcttcatgtaaacaaggtgggaacctgataatttattcactggcaggcacaattctggtctttcatcatacactgtttttgatatcagtttaatctagatgtctgctggccatattctcttatctttccattttcttatactggcatttagtattttctttaaaaattattttaacgtaaaaacagtttcaaaatgcattgcacgtatttcttagtttataagaatttactcagcttcagaacaactggcaaagctgttctcaagggaatgctcatgtggcaactgagacacttctggctgcttcaagaaattttataccatttcccaaagtgtactccaaggatcggatcctaaaagacactctggaaaaaatatattttttttgttccaggtgccrtggctcacacctgtaatcccaccactttgggaggccgaggtgggtagatcacctgaggtcaggagttcaagaccagcttg

SEQ ID NO: 699296 - DNA, 427 bp, Homo sapiens
aaacatttcatgtttttaaaaaatcaactttttttttacattaaagatacatactaaccttttagtcttcttaattaatagtttctgcaactcctgtgctggatacactaaatcttctgtaagtttattactaaaaaccccttgttaaaaaccaaagttgcctaattatggatcatgtaagaaagtagtctcaattaatgaaaaaactatttaaataaaataaatatgttttctctcacactgatgcaaaagaggactttatgtattaacccaaagccttcctttttctctatgttgcaccgaggtttgcagcctaactctgctgctcacctgctctctggccttgggcaagtctctacctctctgaaccttggctttttcatctgtaaatgagcatgttttaaagtgttgacatgrggccgggtgt

SEQ ID NO: 699297 - DNA, 1126 bp, Homo sapiens
tgtatcaatgtactcaccattcctgaaacaactgctttcatattggaggcccatgggccttctccactcaagccaatgaaatgaagcattaatggtggaaattccaggcctcatctagaaatgggaagagctactggaaggttcagcaggcctgcaatatctgcctagattcctttttgtcaaaccagtcaacacaaggccaaccaatagaatctcagtgtattatattttggtcagaagagtgatatctgatagaggccacttcagaatcctaatgttttctttatagaaacctcaagaccaagaaaaagagtaaggactagttctttgcagatacagcaataatggatgatttgaggttacatggaaacaagatcattggagacttccttaccacagccacagttttgctcaatttaagcctacacagagcctacttctgcaggatgtgctgcaattcttgtgtgctctgtgaggaaaacaacatcatctatcttattccccattgtatgcccagcttaagagcacaaagagggcatgcaacaaaaatgtgttcaatgaataaatgaatgttgaatgcttgctaatgcattttttaattaattaactcgttagttaatttgttaattgaacaaacctattctcaaagtgtgggtcaagttcgstcactccatccacagctattacatgcctgctcaagccaagctaggggtgtgttgaaataataaaggcctccaggctcttcctttggggctcattgaatatttcccgacacttgacagtttatcaagcgctttcctgtggatcatctcatggggctcatgtctacaaagcaagcatgactgccatttgacattggtgacagtgaatgtctgataaatcagggatcttgtttcaggtcactcagctagcaagtgatacgggcaaaatgaggacttaagtctttgtactctaaatcctgttctttcttcagaaaccagtgccgctcacctttaacttccttatgaaacactcgtagatcttgttaacctgaagacactgctccagcaggtctgggggaaggggcctgagaatcagaatttctaacaagctccaggcactgctgctgcagctgatctgtggacca

SEQ ID NO: 699298 - DNA, 1437 bp, Homo sapiens
gggtttttaaaagaacaaatgagagataagaaagtttgtgataatgtttgcctatgcagataccattggtctttctatccactttagggccataacactgctccaggaagagaactggggtaagttttatttgcatttttcattccaagagtggattcagtctgaagtggcaatttatacaagcttcattttccaaaagttgctgcttttagtcaaagaagggaaactccaagaaggcttctttctgcatctgtcttcaaatctcagatgtcttcagcttaaaatagtcattatattaatgacatcaagagacagagtaaaaagatatttctcaacttatcctttttttaaaaaaagtttgagtaaatgatagtacaagaatataaagatgtcaaaatcatgatgatagttcgtgagttaccaagtgagaaatgtcatccccagcctgttatgaaacaatgcattgatagaacaatctgaattaacatctcractcctgactggggctgcaactgagacagatggtgaggcctgagctgttgctcctttgctcttaaagaagaaaaggcaatcacgagtcttctctctagcaagcacaacacccaagactaccctttttatatcctatgaaactttcaagtcttgcagcctccagcgtcccttcctctgaattaacacaataacatttttgcctttattagcttttctgacacattaactctcacatctgaattactggataggtagaatctgccatacgtaagccaaccatactgggtgattataaagctgtgggagattagaattcaccctgggattctttgaagagatctcaatgttgatatgagccgtaaacatcctccttttctttccagctaattactgaagtgctatcacctctctgataagatactaacagtgatcgtggctgtggacctaattaggaagctccccaaatatttcatgttgtccagggatgccatagtattcttctagactgtgtcaacacagctgggtataaaaagcaatgctactacttccaaactccctgttgatggggacaacttggtttcatcatcaataagaatacagaaattgttcagtcctcaattcttaagaccataactgtcttttaaatgaaactgtcacatcacctcttaggatttctaggtttcttgttttcttttttcttttgctgcttctggaaattttgctgagaggtttgtaatttcttaaacacagaggccgtagcaataaggactttaagctcatgataaaaaaatacatttaaaatacacacatactgccagattgtttttgtttgtttgttttgatgcagtgtctcactctgtcacccaggctggagtgcagtgtcataatcatgactcactgcagccttggacttctgggctgaagccatcctgcctccttagcctc

SEQ ID NO: 699299 - DNA, 652 bp, Homo sapiens
taaactaaacaataatcatgtatcacactgcacaaggtctaattaggtttagtagaagtttggaacacagtcctactttgacagatgaccctcaggttaactcagccctaaagacaattcctatctgttcagagtcagtagtatgcacaggccaagaataaagaatatttattttaagctcagtgtggtacaaggctctacaaagaaggcagcttgtaaaagtgtctgtggcctgggtatttttggcagacaattatcaaggtatagtaacagctaaattaaagttggtttttgacaataagcttctttcaggcagcagtcagattgaatctctgtaattcattgaggggacactggtagtcaaaaaaaaagaaagaaacacaaaacaatttcacaaacagtataatcaatctctaatgattaaaaacaggccaggtgcagtggctcatgcctctaatcacagcactttgggaggccaagacaggagaacagctggaagccaggaattcaagaccagcctgggcaactgagagcaaggccctgtctctataataattttaaaaactagctggacatggtggcacacacctgtagtccmagatactcgagaagctgaggatcgcttgaacacgggagttcgagactgcaatga

SEQ ID NO: 699300 - DNA, 661 bp, Homo sapiens
ccgctctgaaaaataataaattctgaaaaaagcaatgttaaattccagaattaatgtatcacagtatatccttgtaagataatttatttttaaaagttaagtgcccaataggacatttatgtccccatttaccccatttttgattttattttgttttttataagagacttattctcaattatatgaattattcaggtccttgttttcccgtttctcctgcaatcaaatcttgtgttatttcacttttcattagcagattccaaccataaaagtaattgacagaaatatcacaaggggacaaagcaagagaattgactacaaatccatttttaatttctgtacatcaaaaatatgaatgaaatttaaaattgttttaaaactgggaaataaattttctatgaaagtcaaatarttaatattcataatataaaagggcttatacaaactgatatcatcaaaaatactctgcaaaactagaacatagtttactacaaaaagccaagttgctgacatatttaaaaatatgataaatgaccaacttcatgaaaagaatcaaaggaatatcaatttaaataagcatacatttatttccttcgacaaaattagcaaagctccctcctttttgaaagcaaatgataaaatgctgtggtggcaagggcag

SEQ ID NO: 699301 - DNA, 1356 bp, Homo sapiens
cgccaacccaccaaggacactctatgacttgggaaaactaaggggacgtattagtaggaacgagcatcaatcccccaagatgggagtttgcaaaactcgccaagcgcctcccccgggtgcggttcctctccgccagtgaggtcgcgaccccggcgcagctgccgcctcacttcgggctatccccattcgctattgcggatcagcccctaagtaccaggccctctggcggaacctgcaagtccaaacttcgctacccggattccccagtagtcccccccccaccccacctccacccagagttaggagggtgctaccgcacgtagagcgcgcaggtctctggggtgagcagggcgcgtggagggactccaggagtggcacctcactcccgctcgccgcctactttcgacccgcacaaaaataaagaatawcccccactctgcttctgtttttattgatgtatttctttgcatcgcggcacgcggagcctcgccagcgccctgacactgcagcgcccgcaccagcgaaccacggaacttgggaccgagacaatggcccgtaattgatgtattgccatcaacaataaagaccaattctcctctccccgccattccgaccatccccctcctcccatccccccctcctccacctcccatctcctttcccggggccaccgagggaaagaaaacaaacaagaaattagcgggggacgccaagcgcagatcgaaacgcccgcctctacgccgtcgaggacgcaaaaaaacgaaaaaagttattaaagtttggatcccccaatttattcgtctctgctcgcccatttttaattaagcatcgcgtagctgcttttcgcatgttcatttcgtttggttgtttgttgtggtgtttttttggggggggggattttttttttttcctacacttaatcttaaatcacacgtagaccaagtaacaaacacgtgtgaagttattcccgggagcttcctgctgcgcacgcggcgcgcaccaggagaaaagctttgcgggaccgccagctccgctaggttcctggctgcatgcggtgcccgggaggcccggactttcaagaagccaagattgttagagaaggatgcgggcggctccaaacacgggcacattccgggaaaggagtgtgcaagtgcacacaaacgcgttcgtgtacctgggacagtgtggattggtgggtgtgcgaggacccctgtttgtgagatggaggcgggtgcgggatttacacgtgctcccgtacacgttccccggggtctgggagatgcgagccgctcacaccccaggagtgcgcagatccatctttgccgagggatctctttaaatattcagtgagaaata

SEQ ID NO: 699302 - DNA, 1356 bp, Homo sapiens
cgccaacccaccaaggacactctatgacttgggaaaactaaggggacgtattagtaggaacgagcatcaatcccccaagatgggagtttgcaaaactcgccaagcgcctcccccgggtgcggttcctctccgccagtgaggtcgcgaccccggcgcagctgccgcctcacttcgggctatccccattcgctattgcggatcagcccctaagtaccaggccctctggcggaacctgcaagtccaaacttcgctacccggattccccagtagtcccccccccaccccacctccacccagagttaggagggtgctaccgcacgtagagcgcgcaggtctctggggtgagcagggcgcgtggagggactccaggagtggcacctcactcccgctcgccgcctactttcgacccgcacaaaaataaagaataayccccactctgcttctgtttttattgatgtatttctttgcatcgcggcacgcggagcctcgccagcgccctgacactgcagcgcccgcaccagcgaaccacggaacttgggaccgagacaatggcccgtaattgatgtattgccatcaacaataaagaccaattctcctctccccgccattccgaccatccccctcctcccatccccccctcctccacctcccatctcctttcccggggccaccgagggaaagaaaacaaacaagaaattagcgggggacgccaagcgcagatcgaaacgcccgcctctacgccgtcgaggacgcaaaaaaacgaaaaaagttattaaagtttggatcccccaatttattcgtctctgctcgcccatttttaattaagcatcgcgtagctgcttttcgcatgttcatttcgtttggttgtttgttgtggtgtttttttggggggggggattttttttttttcctacacttaatcttaaatcacacgtagaccaagtaacaaacacgtgtgaagttattcccgggagcttcctgctgcgcacgcggcgcgcaccaggagaaaagctttgcgggaccgccagctccgctaggttcctggctgcatgcggtgcccgggaggcccggactttcaagaagccaagattgttagagaaggatgcgggcggctccaaacacgggcacattccgggaaaggagtgtgcaagtgcacacaaacgcgttcgtgtacctgggacagtgtggattggtgggtgtgcgaggacccctgtttgtgagatggaggcgggtgcgggatttacacgtgctcccgtacacgttccccggggtctgggagatgcgagccgctcacaccccaggagtgcgcagatccatctttgccgagggatctctttaaatattcagtgagaaata

SEQ ID NO: 699303 - DNA, 1140 bp, Homo sapiens
tgggaagatctcttgagcccaggagtttgaaaccagactgggcaacatattgggatcctatctctaaaattttttttaaaataaagaaagaaaatagccagacctggtggtgtgtgcctgtaatcccagctactcactcatcaaagcagggggatcccttattccctgggggttccaggttgcagtgagccgtgatcgtgccattgcactccagcctgggtgacagagtgagaccctatctctaaaaaacatattttaaaaataaaaaaaaaagaaaccctgaaggagcagtgggcctgaaaagtagctttcaatccagggatratgaaggcactggtaatgttgaaatactatttctagcctaacagactacactcaatataaaaagtagatatcgttctaatttctgaacataactaagttaatatattagacattgtaagcagacatgagaacatttattccttgcatccaagagttaaaggactgatgtgggcaaggacttggggaatgtaaagagctaatagatgtctggctcttactccctctgtcttgtccagaaaggcagacctaccctgaggggacaggacaggagggctgagcacagcacacacttctgttctcttttcatgcttgcacactttttctgcatctgttcagtgtgtgtgtgtgtgtgtgtgtgtggtgttctcactgtttcttctctctggcattgtcccaccccctcctctgtttccctctgtccccatgactccccaccccacacagacacaattcttgataattatagtttattgattctcctggtgttagctgcccccggcatcgtcttcctcatgttagctggggcaccttcccagctccatcacagcctgcgtttctcaggaggcaaagcactcccagcgctaatccggagagagctgctgcctggaccaaggcccctggagtccctctgggaggtaagcctgagcccctgcccccaaccagaaccccagctctccaccccgtggaagctgaggctgagcccagtgggcaactgaaataatagtcatagcagtaaacatgtattgtcacttaccacatgccaggcaagttcacaggcacagtctgcacatcctcccaaatccctgggggaagggg

SEQ ID NO: 699304 - DNA, 628 bp, Homo sapiens
ttctgtttgttcttgttctaaaatcttaaatctcacacagtctaccatttttaggaaaccatgttttatctaatcaagattgaggtttttctggagggcaggccaatgagaccaaacagcagcccaaaatcaataataggaaatgcagtaaaaagagcagcaagaagatgatgcttgtttcatctgcacccgtaaactgaagacagacccagagacaatgaggtgctgcattttgattccatcacccagtttccccagctgtgaccaagtcttggagcatgccagccactcattcattcattctataaatatttattgagcacctactactgccaggcactgtactgggctgtggggatctagcaacaaattacaacactcatttcacatcaccccaagccccaggaaactataatactcttctgtcacatagtttcccaaaccatgacaacttaatgacacttaattatccctagatatatgtgaagttaaactattttccattaaaagtcacttctagcctggtatctaaaaaaataaccacttatctgcttagataccaacactgtatatgtgtgtgtgtgtgttttaacatacattcttatatatttastttttgtttgcatta

SEQ ID NO: 699305 - DNA, 678 bp, Homo sapiens
tttcctggggtgggtgtttctccaaatgatgcttccttccaaaatatccacctctgcctcccctcattgctttcatactaataactagaccaataacagtcttaagcataggtaaagtgagtaaatataatcccattacagagaaaaaaacttattcactaaaagagtgtgtgacctaggtattggtgccagcagaaacccaaaaaatgtgcagaagagaagacgctgatggaggtgaatcaggtaagacagaacacaaagatgtgtaagggtgggtttactgacatgaaagcacactcttgtaatctagaatttagcagcctggtaaaaataccaggagctcgtcctattaagctatatatatatatatrtatatatatatatatatatatatatatatgtatagagagagagagagagagagagagagagagagagagagagagacttgaaatagattaaagacttaaacataaggcccaaactaaaattcttagtttcaagtgggataacttgcccacatatatatatatatagcttatatatatacacacacatatatatatatacacacatagtgaaatggttaccacaaaccagctaattaacctatccataacctcacacagttatctctttttttattaaaacatttaagatctattttattaacaaact

SEQ ID NO: 699306 - DNA, 678 bp, Homo sapiens
tttcctggggtgggtgtttctccaaatgatgcttccttccaaaatatccacctctgcctcccctcattgctttcatactaataactagaccaataacagtcttaagcataggtaaagtgagtaaatataatcccattacagagaaaaaaacttattcactaaaagagtgtgtgacctaggtattggtgccagcagaaacccaaaaaatgtgcagaagagaagacgctgatggaggtgaatcaggtaagacagaacacaaagatgtgtaagggtgggtttactgacatgaaagcacactcttgtaatctagaatttagcagcctggtaaaaataccaggagctcgtcctattaagctatatatatatatatatakatatatatatatatatatatatatatgtatagagagagagagagagagagagagagagagagagagagagagacttgaaatagattaaagacttaaacataaggcccaaactaaaattcttagtttcaagtgggataacttgcccacatatatatatatatagcttatatatatacacacacatatatatatatacacacatagtgaaatggttaccacaaaccagctaattaacctatccataacctcacacagttatctctttttttattaaaacatttaagatctattttattaacaaact

SEQ ID NO: 699307 - DNA, 678 bp, Homo sapiens
tttcctggggtgggtgtttctccaaatgatgcttccttccaaaatatccacctctgcctcccctcattgctttcatactaataactagaccaataacagtcttaagcataggtaaagtgagtaaatataatcccattacagagaaaaaaacttattcactaaaagagtgtgtgacctaggtattggtgccagcagaaacccaaaaaatgtgcagaagagaagacgctgatggaggtgaatcaggtaagacagaacacaaagatgtgtaagggtgggtttactgacatgaaagcacactcttgtaatctagaatttagcagcctggtaaaaataccaggagctcgtcctattaagctatatatatatatatatatatatatatatatatatatatatatatgtatagagagagagagagagagagagagagagagagagagagagagacttgaaatagattaaagacttaaacataaggcccaaactaaaattcttagtttcaagtgggataacttgcccacatatatatatatatagcttatatatatacacacayatatatatatatacacacatagtgaaatggttaccacaaaccagctaattaacctatccataacctcacacagttatctctttttttattaaaacatttaagatctattttattaacaaact

SEQ ID NO: 699308 - DNA, 638 bp, Homo sapiens
atagtgttactcaaaaaattaaaagaggcaaagcagggacagctcttgtttacaaaagaatgttaccaaataaatctagaaggaataattcaattagaaaatcatcacgtacaaccactgtaataattaattcaggaaggatcaccaatggagggagtaagaccattgggtgaaagtctgttggggaacaggatattcattcctacatcaccaacagcaccaattactttttcactacaaaggggagagggacatttacaatgcagagatctggcagacatcagcttaataaaacrattgcactttgcctcaccaataataaaacaaatagccgatgcatgcaatctaatgtgatacaatggaatataaacagcatcacctgcatgattatgaggaaactactaggaaagatcagattgtggaacatgtcttcaaaaatatcaatgttatgaaagaaaaaaagaagttggaggagttattctagattgaagaagaatatgacagccaaatgcagtaagtgatttttgattacttcttagatcattttaaataaaatccattttccccaaaaaggatatttgggaacaattatggcaatttgaaaattagatgcataatagagcatgttctcagacata

SEQ ID NO: 699309 - DNA, 574 bp, Homo sapiens
caacaatctaaatgcaaaaatctgaaatagagattgttagggagcagcaaatgtgagaaaaattcgagggtttttggtgatatgattaatttcatatcagttcacaaagttcacaacaatagcaatgacagcaacaacaaaaacagcaaggaatcaaccttagtctaatttagaagaggtacagtgtccacaaccagggactgaaagcattcactgtactgtggtctagccatacaccctgaaaggatgctggcaacctggggtaaagccacagaaggccaatcatggtggagaagggcagtgcagttccgtgagggatggaagtgcttggggatatttaccctggacgagagagctgagggagagggcaggctacataartgtttttagatttctggatggctgtaatttagaagtgagttctggattgctttgtgctgttctggaagacatgaggaccaatgcactggaggtatattaaggtggattttattttagattatggaagtattttcctagcatgtcatgtacgttgtcactttctccataacagcactattgtaatgtgaaaaaa

SEQ ID NO: 699310 - DNA, 982 bp, Homo sapiens
atgaagtaaatggcaggtataaatataaattgatttagcaggtcaactggtctttttacattgatttgttytcagtatctacacaaagatcccaaaaaagcaacaaaagtatttagaacagctattcttgcacagacaagctcacaactaagaaaattaaactactgaaatattatgtcacagatacacaaaattaattagtggcaattttgggggttctaatacataaagttattttttatcaagataacaaaatcactatagattttcagaatctagatgtcactgtccaatttttctatctctgtgacaacgatcacttactgattttgctcactcattctttctttcattcacgctaactaacaattgatgaatgcctactatgtacaagacactgttctagacccttaggtataaagatgaatcaaatggaatctttagccactaggagctgggcttcagtacaaattcatgttcgattacatcaactgagtcattactgcatctcaataacaattccatttatccctgatgtctccttgttcacattccccacaaaaaaaaaaaaatatttcttttttttttttttgagacggagtttcgctctgtcgcccaggctggagtgcagtggcgcgatctcgactcactgcaagctccgcctcccgggttcacgccattctcctgcctcagcctcccgtgtagctgggactacaggcacgcgccaccatgcccggctaattttttttgtatttttagtagagacggggtttcaccgtgttagccaggatggtctcgatctcctgacctcgtgatccgcccgtctcggcctcccaaagtgctgggattacaggcgtgagccaccgcgcccggccaaaaaaaaatatttctaaatcctttgttctttccaccccataagctcttatgtcctccaggctcgaccaccatagtgttatcatcgcctacattttcttcttcagtc

SEQ ID NO: 699311 - DNA, 982 bp, Homo sapiens
atgaagtaaatggcaggtataaatataaattgatttagcaggtcaactggtctttttacattgatttgttctcagtatctacacaaagatcccaaaaaagcaacaaaagtatttagaacagctattcttgcacagacaagctcacaactaagaaaattaaactactgaaatattatgtcacagatacacaaaattaattagtggcaattttgggggttctaatacataaagttattttttatcaagataacaaaatcactatagattttcagaatctagatgtcactgtccaatttttctatctctgtgacaacgatcacttactgattttgctcactcattctttctttcattcacgctaactaacaattgatgaatgcctactatgtacaagacactgttctagacccttaggtataaagatgaatcaaatggaatctttagccactaggagctgggcttcagtacaaattcatgttcgattacatcaactgagtcattactgcatctcaataacaattccatttatccctgatgtctccttgttcacattccccacaaaaaaaaaaaaawatttcttttttttttttttgagacggagtttcgctctgtcgcccaggctggagtgcagtggcgcgatctcgactcactgcaagctccgcctcccgggttcacgccattctcctgcctcagcctcccgtgtagctgggactacaggcacgcgccaccatgcccggctaattttttttgtatttttagtagagacggggtttcaccgtgttagccaggatggtctcgatctcctgacctcgtgatccgcccgtctcggcctcccaaagtgctgggattacaggcgtgagccaccgcgcccggccaaaaaaaaatatttctaaatcctttgttctttccaccccataagctcttatgtcctccaggctcgaccaccatagtgttatcatcgcctacattttcttcttcagtc

SEQ ID NO: 699312 - DNA, 982 bp, Homo sapiens
atgaagtaaatggcaggtataaatataaattgatttagcaggtcaactggtctttttacattgatttgttctcagtatctacacaaagatcccaaaaaagcaacaaaagtatttagaacagctattcttgcacagacaagctcacaactaagaaaattaaactactgaaatattatgtcacagatacacaaaattaattagtggcaattttgggggttctaatacataaagttattttttatcaagataacaaaatcactatagattttcagaatctagatgtcactgtccaatttttctatctctgtgacaacgatcacttactgattttgctcactcattctttctttcattcacgctaactaacaattgatgaatgcctactatgtacaagacactgttctagacccttaggtataaagatgaatcaaatggaatctttagccactaggagctgggcttcagtacaaattcatgttcgattacatcaactgagtcattactgcatctcaataacaattccatttatccctgatgtctccttgttcacattccccacaaaaaaaaaaaaatatttcttttttttttttttgagacggagtttcgctctgtcgcccaggctggagtgcagtggcgcgatctcgactcactgcaagctccgcctcccgggttcacgccattctcctgcctcagcctcccgtgtagctgggactacaggcacgcgccaccatgcccggctaattttttttgtatttttagtagagacggggtttcaccgtgttagccaggatggtctcgatctcctgacctcgtgatccgcccgtctcggcctcccaaagtgctgggattacaggcgtgagccaccgcgcccggccaaaaaaawatatttctaaatcctttgttctttccaccccataagctcttatgtcctccaggctcgaccaccatagtgttatcatcgcctacattttcttcttcagtc

SEQ ID NO: 699313 - DNA, 1341 bp, Homo sapiens
tttcaactccaaggttgggttcattatattctacaataagaagcagaaactataaagtctcgttcactcattgaaataggatttcaccttcactgagctggggctaagcacatagacaatgctcaataataattattgatgaagcattgctttgggtgctgaactgaatatatgctagtcccttccttgctatttaacagtagttacttcagatcctkgacattgatgcttttcataatattgtgcagtaggtttggctttcagttcattgtttgttcaacaagtactaacttcactccgaatatggacctataatggtggtaagctttggagattaaaaagaagtgatgatgtgtgtgaaaacactttgcagagttgggtgcatgtgtgcaatgacgaggaagctcttgttacatggtatggtttctgtacacacatctgacagggcacagcttctaaatctacgtgcttgttagtggtgtgactctccaacctttctcctagtgtagttcccttatttctccttcactctcctggtttaatcatcaccaaatgctgcaatccatcctcagcctgtcactcatgcccagatcttttctgccacctccaccattctgagcaacctctctctggccttgactaggcatggccttcagtggtgaagcctgctttcatgttggagacatgttttcttcataaagccacagtcagcaagttggatcacggctcagcttggagccttgccctgaggagtagctcccaacacttctgtgaggttgctcagctaatctggtcctggcctccactctctccactctctcctccaggctcatgtttcttatattctaaattctagaactttgatcagtttcatcagcataaccactcttgtaactgctgggctcccttttcagccatggcagtaaagccacactgtgtctctcgccaatacccagcccagatcctggcacagagcaggcacttgaggcaggtttttggagtgaaattaaaccagctacatctacatttcatttttcttccagaagaagctgactacttgtcattttcccttagggactttattcttgtagttcttttccagtgtaccaaagctattttgattaaagcttgttatctgttcaaatttaatggcaccatttttggccctgtcctgtcttgctgtcctctgtggttgtttgggggcatatttccaatctccattacagaaattgtcagtgaaggtgttaaactcagggtgagtcagctcctgtgcaatggcccacgcttagatgtttgagtatatccttgaccagaatatcacatgcagggactagtggttta

SEQ ID NO: 699314 - DNA, 1341 bp, Homo sapiens
tttcaactccaaggttgggttcattatattctacaataagaagcagaaactataaagtctcgttcactcattgaaataggatttcaccttcactgagctggggctaagcacatagacaatgctcaataataattattgatgaagcattgctttgggtgctgaactgaatatatgctagtcccttccttgctatttaacagtagttacttcagatccttgacattgatgcttttcataatattgtgcagtaggtttggctttcagttcattgtttgttcaacaagtactaacttcactccgaatatggacctataatggtggtaagctttggagattaaaaagaagtgatgatgtgtgtgaaaacactttgcagagttgggtgcatgtgtgcaatgacgaggaagctcttgttacatggtatggtttctgtacacacatctgacagggcacagcttctaaatctacgtgcttgttagtggtgtgactctccaacctttctcctagtgtagttcccttatttctccttcactctcctggtttaatcatcaccaaatgctgcaatccatcctcagcctgtcactcatgcccagatcttttctgccacctccaccattctgagcaacctctctctggccttgactaggcatggccttcagtggtgaagcctgctttcatgttggagacatgttttcttcataaagccacagtcagcaagttggatcacggctcagcttggagccttgccctgaggagtagctcccaacacttctgtgaggttgctcagctaatctggtcctggcctccactctctccactctctcctccargctcatgtttcttatattctaaattctagaactttgatcagtttcatcagcataaccactcttgtaactgctgggctcccttttcagccatggcagtaaagccacactgtgtctctcgccaatacccagcccagatcctggcacagagcaggcacttgaggcaggtttttggagtgaaattaaaccagctacatctacatttcatttttcttccagaagaagctgactacttgtcattttcccttagggactttattcttgtagttcttttccagtgtaccaaagctattttgattaaagcttgttatctgttcaaatttaatggcaccatttttggccctgtcctgtcttgctgtcctctgtggttgtttgggggcatatttccaatctccattacagaaattgtcagtgaaggtgttaaactcagggtgagtcagctcctgtgcaatggcccacgcttagatgtttgagtatatccttgaccagaatatcacatgcagggactagtggttta

SEQ ID NO: 699315 - DNA, 1341 bp, Homo sapiens
tttcaactccaaggttgggttcattatattctacaataagaagcagaaactataaagtctcgttcactcattgaaataggatttcaccttcactgagctggggctaagcacatagacaatgctcaataataattattgatgaagcattgctttgggtgctgaactgaatatatgctagtcccttccttgctatttaacagtagttacttcagatccttgacattgatgcttttcataatattgtgcagtaggtttggctttcagttcattgtttgttcaacaagtactaacttcactccgaatatggacctataatggtggtaagctttggagattaaaaagaagtgatgatgtgtgtgaaaacactttgcagagttgggtgcatgtgtgcaatgacgaggaagctcttgttacatggtatggtttctgtacacacatctgacagggcacagcttctaaatctacgtgcttgttagtggtgtgactctccaacctttctcctagtgtagttcccttatttctccttcactctcctggtttaatcatcaccaaatgctgcaatccatcctcagcctgtcactcatgcccagatcttttctgccacctccaccattctgagcaacctctctctggccttgactaggcatggccttcagtggtgaagcctgctttcatgttggagacatgttttcttcataaagccacagtcagcaagttggatcacggctcagcttggagccttgccctgaggagtagctcccaacacttctgtgaggttgctcagctaatctggtcctggcctccactctctccactctctcctccaggctcatgtttcttatattctaaattctagaactttgatcagtttcatcagcataaccactcttgtaactgctgggctcccttttcagccatggcwgtaaagccacactgtgtctctcgccaatacccagcccagatcctggcacagagcaggcacttgaggcaggtttttggagtgaaattaaaccagctacatctacatttcatttttcttccagaagaagctgactacttgtcattttcccttagggactttattcttgtagttcttttccagtgtaccaaagctattttgattaaagcttgttatctgttcaaatttaatggcaccatttttggccctgtcctgtcttgctgtcctctgtggttgtttgggggcatatttccaatctccattacagaaattgtcagtgaaggtgttaaactcagggtgagtcagctcctgtgcaatggcccacgcttagatgtttgagtatatccttgaccagaatatcacatgcagggactagtggttta

SEQ ID NO: 699316 - DNA, 590 bp, Homo sapiens
ccagttttgcatgccttactttcaaccccattctttcctgagttttcttctgttctctcggtctccttgccctgctctctcctctgaaacacccaatggctgataaatyccataactttgtctctagagcatcttacctgcccctggagattcaaccacacaaaactctaccttgccagtgcccaaaactacatccccagcctcaattgctcttctgagctacagatgcctctatccaatttgtctacagggcatccttggggacctctctggtagacattcaacctatgcaaaactaaaaccagtttttttctgttcacatctatttcctgctcctgcatctactcagcagtcattcactattcacttaggacagaagactaggattaaaactttacccctccacataaatcacgtcagtattttataacttatcccttcttcaactccattgctggcttgggttaaatggcttaatatcactaaagaacttaccatattgcaggcactttcctgcaatagataacaagttagaattcaagtcttttgttgatagctgtctttatggtgaacattaagtcaaagatatc

SEQ ID NO: 699317 - DNA, 590 bp, Homo sapiens
ccagttttgcatgccttactttcaaccccattctttcctgagttttcttctgttctctcggtctccttgccctgctctctcctctgaaacacccaatggctgataaatcccataactttgtctctagagcatcttacctgcccctggagattcaaccacacaaaactctaccttgccagtgcccaaaactacatccccagcctcaatkgctcttctgagctacagatgcctctatccaatttgtctacagggcatccttggggacctctctggtagacattcaacctatgcaaaactaaaaccagtttttttctgttcacatctatttcctgctcctgcatctactcagcagtcattcactattcacttaggacagaagactaggattaaaactttacccctccacataaatcacgtcagtattttataacttatcccttcttcaactccattgctggcttgggttaaatggcttaatatcactaaagaacttaccatattgcaggcactttcctgcaatagataacaagttagaattcaagtcttttgttgatagctgtctttatggtgaacattaagtcaaagatatc

SEQ ID NO: 699318 - DNA, 590 bp, Homo sapiens
ccagttttgcatgccttactttcaaccccattctttcctgagttttcttctgttctctcggtctccttgccctgctctctcctctgaaacacccaatggctgataaatcccataactttgtctctagagcatcttacctgcccctggagattcaaccacacaaaactctaccttgccagtgcccaaaactacatccccagcctcaattgctcttctgagctacagatgcctctatccaatttgtctacagggcatccttggggacctctctggtagacattcaacctatgcaaaactaaaaccagtttttttctgttcacatctatttcctgctcctgcatctactcagcagtcattcactattcacttaggacagaagactaggattaaaactttacccctccacataaatcaygtcagtattttataacttatcccttcttcaactccattgctggcttgggttaaatggcttaatatcactaaagaacttaccatattgcaggcactttcctgcaatagataacaagttagaattcaagtcttttgttgatagctgtctttatggtgaacattaagtcaaagatatc

SEQ ID NO: 699319 - DNA, 1191 bp, Homo sapiens
taaatattggagaaaatcatctcaggtcccctgctcagcccttctcttgtagattggttcactgacctcatatggcctttgtgatatcccagagaggggaagaccaagtcacagtggcctagattctctgcagctgggctccttctgtctcagagctgggaatacaatcttcaggcaaatgactggaaagcctccttcaggcccctaacatctcccagcagtaagtatgagcactaagtgtgtgcattcagccacactaggatacagcagagctgcatgtaccccaggactcagccagtttcctacrggagcatagaagaaagtaccactaaaggagagcaaggagaaggaagaggaagagggcagtgattggcaaggcttgagggtaagagtaggaggagtgaagacaggagtagtaccagctacggatggaggatgtatgtgaggaggggagaggggagatggtcatggagccagtaatgaagagactaagtccattctcaggcaaatggcacagcctcagtatgaagtaagtcatttgcaagtattcatgaatctcccattatgaataggagatctgaccagctttcctggattataaaggtaaacaagatagggatttttcaatttagttatctggtatttgccataagtagtgtcttaagtgaggcaggagagacagagtgggcttcatagtcacgggacctgtgcatcacaaacggtcttgtgcccacttacccacactgattccagatttatgctcttctgtcaccatcttgaaattcttaataattttttagcaagaggctagcatattcattttgcattggacttcacaaattatgtagctggttctggggagacataattttttttatctggagcatgtggagtcctaataagcaacaacaaggaaagggcgcaagatggggggagggccggccccaagttggaggagaacagtaaacaattgttctgagaaatggctaaacacaaaaaacctgtgggcataatgacctccttccccagatagacccagcagcacaacctcattctgcacataaatcctataaaactcccctctagcccctgcctctttgcagacagccccttctctgctgtgctgcccattgctttcttgcaacataccttcatactttgtctaataaatctgcctttctttacctatga

SEQ ID NO: 699320 - DNA, 677 bp, Homo sapiens
cagttatttagagtaattttctagggcaaaaatagttaaaactcattaggaagatgccaactttgacatttttagctgtcaaatgatattaggaatctaaattggaatctccttttccacattctggacctgtgcaaggtctcctcatgagaaaagactgccccatttatctgccctgcagatgtgcttacctgtatctctcaatttcctaaccggtcaacaatactttttaaggtgatactgtactatttaattaaagacttccaaaatgatcagtttgcatggcagttgctagctagaagagactgtggtggggacttaagcagaattttatgaaattttttatttctttattttggagggtgattagagagaaatgtgaccccttccctcgccagatatggaagatgagaactcagtcatatgtgtttcaattatgctcatggtctggggaaagtgtttatctcagagtccttctctgttgacctctgaatggccatgygttggtagttgcagacacgctacaaaacaatgtgaaaaaatcacctgctcctcttcagatagcgcaagggttcagtcatgttctcagcacctgttcaattaggatttgtttctgtgataaggagaaaattagatctctagctgatatacccctggcttctcagggctgactacaa

SEQ ID NO: 699321 - DNA, 1636 bp, Homo sapiens
attaaacagtcagttgcataaatttctaaggggattcaaagtagtggataatgtgatggagtgtgtatgcacacacatgcacacrcacatgcacatgcatgcacatgcacgcatatacatgcacacacctgcgcacacacatgcacacgcacacatatacatgcacacacacatgcacacgcacacatatacatgtacacacatgcacgcacacacaaatgaacacaaacatgtgtgcacacatgcacacacacatgcacacacacatgcacacacacacaggagtacgaggcagagaattaaatgcattgcagggtcattgggccctttttaaaaataattttatcccaatgctacttccttggcgtgtatattagttgtttcattaacaatggcagctttctgccattattttctctaactcttcagactagttttattttttgggaaagctatctgtttcaattcataacagcatatataagataaggtgcaatcattaacttttaagcaaatcataaatatttatcttaagtcctacgtttctgtatacagtcaagatttttttaaagttcgtatttgtattttatctcattaaggaaaaggtcctgttgcagaggtcgcatctgctcttgcgtcccattaaatctgaactataagcaggtaataaccaaactgccaaaatgcataatgaggcaaaatatcagaattagtagacctaactttgggaatgcataaaatgtaatacatgatattttccgagctataatttctagattctaatgatggggaaaaatgattaagcctttgtaataccagctataataaagaggaaagagaaagcccatgggttaatggtcttctgcttacagtgaaccaacaggcccatttattaaatgccgtgtgcttgctgcatcagatcaatttatctgcttaagccacattttttcacatcatagaactaacctgaaactattttccacattttattttagacttttcacccgtgtcaaataatgtctactctaaccaagagcagttctgggggaatggactgagtaaaatgggaggccagacctgagcgagggtgccagcctctcctgggacttgtgattcaaaggcagtagcagtgtgaccctttagccatggcctgtttttcttccttaaattctctgctacccatgtttctggcaattcccatatcctctgcggcgtacaaacagaaggacgaaatgccaactttaaaaggcatgaaaaaggcccattgatagggtcattagatatagtaagtcaaagctaatagggttgctcgaagtgtggacacctgcatcagcattacctggatgatggtggggcctggggagacacagaggtgactaacttcccttccatactagtttagaaaatgtatgggcttcagccctgcctcttctgtacttttacagacaactcaatatggccactcagcaattcatgtgacatttatcaagcacctatgatgtgcaaggcaggatgcctataataggggtcaggaagatgaataaagccttacctggcccttgaaaagctcacagtccaatagatgagtcagagacgttaacttggacttgccctgagcagtcggctcatcaattgc

SEQ ID NO: 699322 - DNA, 1636 bp, Homo sapiens
attaaacagtcagttgcataaatttctaaggggattcaaagtagtggataatgtgatggagtgtgtatgcacacacatgcacacgcacatgcacatgcatgcacatgcacgcatatacatgcacacacctgcgcacacacatgcacacgcacacatatacatgcacacacacatgcacacrcacacatatacatgtacacacatgcacgcacacacaaatgaacacaaacatgtgtgcacacatgcacacacacatgcacacacacatgcacacacacacaggagtacgaggcagagaattaaatgcattgcagggtcattgggccctttttaaaaataattttatcccaatgctacttccttggcgtgtatattagttgtttcattaacaatggcagctttctgccattattttctctaactcttcagactagttttattttttgggaaagctatctgtttcaattcataacagcatatataagataaggtgcaatcattaacttttaagcaaatcataaatatttatcttaagtcctacgtttctgtatacagtcaagatttttttaaagttcgtatttgtattttatctcattaaggaaaaggtcctgttgcagaggtcgcatctgctcttgcgtcccattaaatctgaactataagcaggtaataaccaaactgccaaaatgcataatgaggcaaaatatcagaattagtagacctaactttgggaatgcataaaatgtaatacatgatattttccgagctataatttctagattctaatgatggggaaaaatgattaagcctttgtaataccagctataataaagaggaaagagaaagcccatgggttaatggtcttctgcttacagtgaaccaacaggcccatttattaaatgccgtgtgcttgctgcatcagatcaatttatctgcttaagccacattttttcacatcatagaactaacctgaaactattttccacattttattttagacttttcacccgtgtcaaataatgtctactctaaccaagagcagttctgggggaatggactgagtaaaatgggaggccagacctgagcgagggtgccagcctctcctgggacttgtgattcaaaggcagtagcagtgtgaccctttagccatggcctgtttttcttccttaaattctctgctacccatgtttctggcaattcccatatcctctgcggcgtacaaacagaaggacgaaatgccaactttaaaaggcatgaaaaaggcccattgatagggtcattagatatagtaagtcaaagctaatagggttgctcgaagtgtggacacctgcatcagcattacctggatgatggtggggcctggggagacacagaggtgactaacttcccttccatactagtttagaaaatgtatgggcttcagccctgcctcttctgtacttttacagacaactcaatatggccactcagcaattcatgtgacatttatcaagcacctatgatgtgcaaggcaggatgcctataataggggtcaggaagatgaataaagccttacctggcccttgaaaagctcacagtccaatagatgagtcagagacgttaacttggacttgccctgagcagtcggctcatcaattgc

SEQ ID NO: 699323 - DNA, 1636 bp, Homo sapiens
attaaacagtcagttgcataaatttctaaggggattcaaagtagtggataatgtgatggagtgtgtatgcacacacatgcacacgcacatgcacatgcatgcacatgcacgcatatacatgcacacacctgcgcacacacatgcacacgcacacatatacatgcacacacacatgcacacgcacacatatacatgtacacacatgcacgcacacacaaatgaacacaaacatgygtgcacacatgcacacacacatgcacacacacatgcacacacacacaggagtacgaggcagagaattaaatgcattgcagggtcattgggccctttttaaaaataattttatcccaatgctacttccttggcgtgtatattagttgtttcattaacaatggcagctttctgccattattttctctaactcttcagactagttttattttttgggaaagctatctgtttcaattcataacagcatatataagataaggtgcaatcattaacttttaagcaaatcataaatatttatcttaagtcctacgtttctgtatacagtcaagatttttttaaagttcgtatttgtattttatctcattaaggaaaaggtcctgttgcagaggtcgcatctgctcttgcgtcccattaaatctgaactataagcaggtaataaccaaactgccaaaatgcataatgaggcaaaatatcagaattagtagacctaactttgggaatgcataaaatgtaatacatgatattttccgagctataatttctagattctaatgatggggaaaaatgattaagcctttgtaataccagctataataaagaggaaagagaaagcccatgggttaatggtcttctgcttacagtgaaccaacaggcccatttattaaatgccgtgtgcttgctgcatcagatcaatttatctgcttaagccacattttttcacatcatagaactaacctgaaactattttccacattttattttagacttttcacccgtgtcaaataatgtctactctaaccaagagcagttctgggggaatggactgagtaaaatgggaggccagacctgagcgagggtgccagcctctcctgggacttgtgattcaaaggcagtagcagtgtgaccctttagccatggcctgtttttcttccttaaattctctgctacccatgtttctggcaattcccatatcctctgcggcgtacaaacagaaggacgaaatgccaactttaaaaggcatgaaaaaggcccattgatagggtcattagatatagtaagtcaaagctaatagggttgctcgaagtgtggacacctgcatcagcattacctggatgatggtggggcctggggagacacagaggtgactaacttcccttccatactagtttagaaaatgtatgggcttcagccctgcctcttctgtacttttacagacaactcaatatggccactcagcaattcatgtgacatttatcaagcacctatgatgtgcaaggcaggatgcctataataggggtcaggaagatgaataaagccttacctggcccttgaaaagctcacagtccaatagatgagtcagagacgttaacttggacttgccctgagcagtcggctcatcaattgc

SEQ ID NO: 699324 - DNA, 1636 bp, Homo sapiens
attaaacagtcagttgcataaatttctaaggggattcaaagtagtggataatgtgatggagtgtgtatgcacacacatgcacacgcacatgcacatgcatgcacatgcacgcatatacatgcacacacctgcgcacacacatgcacacgcacacatatacatgcacacacacatgcacacgcacacatatacatgtacacacatgcacgcacacacaaatgaacacaaacatgtgtgcacacatgcacacacacatgcacacacacatgcacacacacacaggagtaygaggcagagaattaaatgcattgcagggtcattgggccctttttaaaaataattttatcccaatgctacttccttggcgtgtatattagttgtttcattaacaatggcagctttctgccattattttctctaactcttcagactagttttattttttgggaaagctatctgtttcaattcataacagcatatataagataaggtgcaatcattaacttttaagcaaatcataaatatttatcttaagtcctacgtttctgtatacagtcaagatttttttaaagttcgtatttgtattttatctcattaaggaaaaggtcctgttgcagaggtcgcatctgctcttgcgtcccattaaatctgaactataagcaggtaataaccaaactgccaaaatgcataatgaggcaaaatatcagaattagtagacctaactttgggaatgcataaaatgtaatacatgatattttccgagctataatttctagattctaatgatggggaaaaatgattaagcctttgtaataccagctataataaagaggaaagagaaagcccatgggttaatggtcttctgcttacagtgaaccaacaggcccatttattaaatgccgtgtgcttgctgcatcagatcaatttatctgcttaagccacattttttcacatcatagaactaacctgaaactattttccacattttattttagacttttcacccgtgtcaaataatgtctactctaaccaagagcagttctgggggaatggactgagtaaaatgggaggccagacctgagcgagggtgccagcctctcctgggacttgtgattcaaaggcagtagcagtgtgaccctttagccatggcctgtttttcttccttaaattctctgctacccatgtttctggcaattcccatatcctctgcggcgtacaaacagaaggacgaaatgccaactttaaaaggcatgaaaaaggcccattgatagggtcattagatatagtaagtcaaagctaatagggttgctcgaagtgtggacacctgcatcagcattacctggatgatggtggggcctggggagacacagaggtgactaacttcccttccatactagtttagaaaatgtatgggcttcagccctgcctcttctgtacttttacagacaactcaatatggccactcagcaattcatgtgacatttatcaagcacctatgatgtgcaaggcaggatgcctataataggggtcaggaagatgaataaagccttacctggcccttgaaaagctcacagtccaatagatgagtcagagacgttaacttggacttgccctgagcagtcggctcatcaattgc

SEQ ID NO: 699325 - DNA, 1636 bp, Homo sapiens
attaaacagtcagttgcataaatttctaaggggattcaaagtagtggataatgtgatggagtgtgtatgcacacacatgcacacgcacatgcacatgcatgcacatgcacgcatatacatgcacacacctgcgcacacacatgcacacgcacacatatacatgcacacacacatgcacacgcacacatatacatgtacacacatgcacgcacacacaaatgaacacaaacatgtgtgcacacatgcacacacacatgcacacacacatgcacacacacacaggagtacgaggcagagaattaaatgcattgcagggtcattgggccctttttaaaaataattttatcccaatgctacttccttggcgtgtatattagttgtttcattaacaatggcagctttctgccattattttctctaactcttcagactagttttattttttgggaaagctatctgtttcaattcataacagcatatataagataaggtgyaatcattaacttttaagcaaatcataaatatttatcttaagtcctacgtttctgtatacagtcaagatttttttaaagttcgtatttgtattttatctcattaaggaaaaggtcctgttgcagaggtcgcatctgctcttgcgtcccattaaatctgaactataagcaggtaataaccaaactgccaaaatgcataatgaggcaaaatatcagaattagtagacctaactttgggaatgcataaaatgtaatacatgatattttccgagctataatttctagattctaatgatggggaaaaatgattaagcctttgtaataccagctataataaagaggaaagagaaagcccatgggttaatggtcttctgcttacagtgaaccaacaggcccatttattaaatgccgtgtgcttgctgcatcagatcaatttatctgcttaagccacattttttcacatcatagaactaacctgaaactattttccacattttattttagacttttcacccgtgtcaaataatgtctactctaaccaagagcagttctgggggaatggactgagtaaaatgggaggccagacctgagcgagggtgccagcctctcctgggacttgtgattcaaaggcagtagcagtgtgaccctttagccatggcctgtttttcttccttaaattctctgctacccatgtttctggcaattcccatatcctctgcggcgtacaaacagaaggacgaaatgccaactttaaaaggcatgaaaaaggcccattgatagggtcattagatatagtaagtcaaagctaatagggttgctcgaagtgtggacacctgcatcagcattacctggatgatggtggggcctggggagacacagaggtgactaacttcccttccatactagtttagaaaatgtatgggcttcagccctgcctcttctgtacttttacagacaactcaatatggccactcagcaattcatgtgacatttatcaagcacctatgatgtgcaaggcaggatgcctataataggggtcaggaagatgaataaagccttacctggcccttgaaaagctcacagtccaatagatgagtcagagacgttaacttggacttgccctgagcagtcggctcatcaattgc

SEQ ID NO: 699326 - DNA, 1308 bp, Homo sapiens
ggaccattacgttagtaatttgtctgagtggcagaatcaattttaaaacttttaatacagactttaatagagatattagtattaaaggaagagggagtgtcttattaaacaaagaacaaaaacaatagccttaaagcaggttttctcaacattggtacttttgacaccttgaattggataattttttytatcactgggggctcccctgtatgttgtaagatgtttagcagcatgctgtgtccttactcactaaatgccagtagaatccctccttccaagttatgccaaccaaaaacattgctaacatcccctggggaaagatcatctctgattgagaccactgccttaagggaacagtgcatttcactccatcaaaattatttttaatcattgcaactccatgagtaaatttaaaatgcaacactatcatgaaggaagaaatgtacaacatactataaaggactaaatcccttattatagaaagaatttttaggataaatacaagataaatgcctcagcgaaaagggcaaagaaataaacaagcaatctacaaaataaacagtctacagaatcatgccattttatacaatcttaaacacaaataaaatgttatgtatttatttgtatgtatatttactggaggatggaaaggagggagggaggaaaacagaaaaggaaagaatgaagaagggaagcaggtaactagaatggaccattgttttagtgatttgtctaagcagcagcatcagtcagggaacttttaaaacacagattccccagctccaggccattcatcagaaactctaaaggtgaagcctagaaacctggatctttcaacatttcccagatgattctgatgcacctggccccaaaaccaaaatttagaaattgttagtacaaattagaggttggcaaatcacaaccacaggccaaatctggtttgttttttgtaaataaagctttattggaatacaaccacagccacctgtttatgtgctgactgcttttgcaatacaccagcagttgagtactgacaactgaaagcgcctggcccacaaagcctatatgatatttgttatctggccctttagtttcccagtccctgatctagacagtacagactttggggttcacaaaagagggaaaacaggtaggtgggggtcacctggaaagacttcaaaaaagaaaactatcttgaactgggccctacaagtttgatagcaataacatctattttctccccccatgcaactccctaattggactggtgtgcagcaagtgattaaataacagaagaacctttggcaa

SEQ ID NO: 699327 - DNA, 1308 bp, Homo sapiens
ggaccattacgttagtaatttgtctgagtggcagaatcaattttaaaacttttaatacagactttaatagagatattagtattaaaggaagagggagtgtcttattaaacaaagaacaaaaacaatagccttaaagcaggttttctcaacattggtacttttgacaccttgaattggataattttttttatcactgggggctcccctgtatgttgtaagatgtttagcagcatgctgtgtccttactcactaaatgccagtagaatccctccttccaagttatgccaaccaaaaacattgctaacatcccctggggaaagatcatctctgattgagaccactgccttaagggaacagtgcatttcactccatcaaaattatttttartcattgcaactccatgagtaaatttaaaatgcaacactatcatgaaggaagaaatgtacaacatactataaaggactaaatcccttattatagaaagaatttttaggataaatacaagataaatgcctcagcgaaaagggcaaagaaataaacaagcaatctacaaaataaacagtctacagaatcatgccattttatacaatcttaaacacaaataaaatgttatgtatttatttgtatgtatatttactggaggatggaaaggagggagggaggaaaacagaaaaggaaagaatgaagaagggaagcaggtaactagaatggaccattgttttagtgatttgtctaagcagcagcatcagtcagggaacttttaaaacacagattccccagctccaggccattcatcagaaactctaaaggtgaagcctagaaacctggatctttcaacatttcccagatgattctgatgcacctggccccaaaaccaaaatttagaaattgttagtacaaattagaggttggcaaatcacaaccacaggccaaatctggtttgttttttgtaaataaagctttattggaatacaaccacagccacctgtttatgtgctgactgcttttgcaatacaccagcagttgagtactgacaactgaaagcgcctggcccacaaagcctatatgatatttgttatctggccctttagtttcccagtccctgatctagacagtacagactttggggttcacaaaagagggaaaacaggtaggtgggggtcacctggaaagacttcaaaaaagaaaactatcttgaactgggccctacaagtttgatagcaataacatctattttctccccccatgcaactccctaattggactggtgtgcagcaagtgattaaataacagaagaacctttggcaa

SEQ ID NO: 699328 - DNA, 1219 bp, Homo sapiens
tgcagactggacagtgactctgaattgcatcttcctcatataaaatctaaaagaccagtgcccactttcctcatggctggttagagaaatcaaaagtacagtgcaatatgatattaggtgattattttaaagttgtattaatatttacctcccattaaccaagatacagtcacttgaagtctaacattctgtatgtatagttgcttttatttgctaggattaggaactaatctacgaagactttatctactaggattagcagtaacatttatcaccaaagtttcattcttagaagggtaaatgggaatttacaataacgacatagtcaaggcagggaagctggtgacacctccccacccccactcaatgatgcatttttcaagtcgtccaaagggtttagaattgttctgtagaggccgggcgtggtggctcatacctgtaatcccagcactttgggaggccgaggcaggcggatcgcctgaggtcaggagtttgagaccagcctgaccaacatggagaaaccccatgtctactaaaaatacaaaattagccaggcgtggtggcacatgcctgtaatcccagctactcgggaagctgaggcagaagaatcgtttgaaccttggaggctgaggttgtggtgagccaagactgcacctttgcatcccagcctgagccacaagagcaaaactccgtcttaaaaaaaaaaaaaaaaggccgggcgcggtggttcacgcctgtaatcccagcaccttgggaggccgaggcgggtggatcacgaggtcaggagatcgagaccatcctggctaacatggtgaaaccctatctctactaaaaatacaaaaaaaaattagccggaagtggtggtgggcacctgtagccccagctactcgggaggctgaggcaggagaatggtgtgaacccaggaggcagagcttgcagtgagcagagaccgygccactgcactctagcctgggcaacaaagcaagactctgtctcaaacaaaaaaaaagaactgttttgtagaggacaaagtgtcacatttctgtagtggtcatcccttcactaggagactagcggcaaaaaaaaaaaatctgtctaaagctattgcaaagcaagcagccacaagaagtgagggtagctaggatccagctaagagtctgggtttctgagggtctaattccccaggtagacatggacctgcatgtaggaatctgaatga

SEQ ID NO: 699329 - DNA, 1219 bp, Homo sapiens
tgcagactggacagtgactctgaattgcatcttcctcatataaaatctaaaagaccagtgcccactttcctcatggctggttagagaaatcaaaagtacagtgcaatatgatattaggtgattattttaaagttgtattaatatttacctcccattaaccaagatacagtcacttgaagtctaacattctgtatgtatagttgcttttatttgctaggattaggaactaatctacgaagactttatctactaggattagcagtaacatttatcaccaaagtttcattcttagaagggtaaatgggaatttacaataacgacatagtcaaggcagggaagctggtgacacctccccacccccactcaatgatgcatttttcaagtcgtccaaagggtttagaattgttctgtagaggccgggcgtggtggctcatacctgtaatcccagcactttgggaggccgaggcaggcggatcgcctgaggtcaggagtttgagaccagcctgaccaacatggagaaaccccatgtctactaaaaatacaaaattagccaggcgtggtggcacatgcctgtaatcccagctactcgggaagctgaggcagaagaatcgtttgaaccttggaggctgaggttgtggtgagccaagactgcacctttgcatcccagcctgagccacaagagcaaaactccgtcttaaaaaaaaaaaaaaaaggccgggcgcggtggttcacgcctgtaatcccagcaccttgggaggccgaggcgggtggatcacgaggtcaggagatcgagaccatcctggctaacatggtgaaaccctatctctactaaaaatacaaaaaaaaattagccggaagtggtggtgggcacctgtagccccagctactcgggaggctgaggcaggagaatggtgtgaacccaggaggcagagcttgcagtgagcagagaccgtgccactgcactctagcctgggcaacaaagcragactctgtctcaaacaaaaaaaaagaactgttttgtagaggacaaagtgtcacatttctgtagtggtcatcccttcactaggagactagcggcaaaaaaaaaaaatctgtctaaagctattgcaaagcaagcagccacaagaagtgagggtagctaggatccagctaagagtctgggtttctgagggtctaattccccaggtagacatggacctgcatgtaggaatctgaatga

SEQ ID NO: 699330 - DNA, 1693 bp, Homo sapiens
gtagaagaacactaactggggaatcaagagaacaatggcactctctatccacttgtggtcatcatctccactctctgggtgtcacgggtgaagtgagggagctgtctcagatctagatcatgtctagggcccttggcagatccaccttctataatgccattaatctctaataccctggggtgatgccaggaccatctctgggcaaaaggctcacataggctaagtgagcattcctaatgtatcttaaatcatggtgtttatctggacacgtggcttgtcctggtctctggrctgaggcctttggcatgcttatgcagatgggagggtctgctacaggttgctctggccatgctgtgacaacgtgccctggaaaggtcctgaatatggctaattttggcagacaccagagcgcatccactgaagaagaaccgaaagatgaaaagccgggatttcaaccttgcattgatttcaaaacatgcaaaatgaattcaataaataggaaatcatttatgacacttgattttatttatcaaaacttaacattagctctacaatgagtaaaaatcaggatggagagtatggtaactaaaataagaaaaaaagagctccctttcttgattccataacagtaaatgtacattccagaacagagattatgacatggttatatttccagtatttagatccaatttattcaaataattgcaacctaattgtgtggagctattttaaatactgatttgctttgcttcccatttaaattaaaacctcatcacctgtgactattataccaaatatgttccttataatttagacaatgaaatattaattataattttgaaaattagctttgcttagatacaactgttctcaataacttttagtcttctgaaaaaggctcttaaagactgatccactaaacacattggttgtatccttttctatttcaattttctaacacacaaaaaaaaagtttatattttttgctgatattgtaagtcatttatttccatacttcataaagaagacaaaggaaaaatagtttttttgttataagcatgaaaagagtcccaggtcagaaattcaggctgggcatggtagctctcgcctataatccctgcactttgggaggccaacacaggaggatcacttgagcccaggagttcaaggccagcctgagcaacatggcaaaccccatctctaccaaaatacaaaaattagctcggtgtggtggcacacacctgtggtcccagctacttaggaggctgtggtgggaggatcgcttgagcccaggaggtcaaaactgcagtgagccaacatcatgtcactgattatatgattgcactccaatctgggcgactgagtgaacactgtctcaaaaaacaaaaaagaaaagaaatgtagtcccctgatctttgaaaagtcacatgacccctgggcttttgttgctacatccatccaatggagataaccccccttttcctgcaagaggcaggagctgtgcccaatggccttcagagcctgccagccctatattctcatagatacataatgtaggcaatagagcataatggctgtttttttaatcacaggtactactggccaggaaatagtgaatccaaaattcccgtaagagtctggaggtaggtggaaatacatagtgttattacacaaaaagcttcatgctgtgaag

SEQ ID NO: 699331 - DNA, 1640 bp, Homo sapiens
gtgtatgtctatatacatgcactgtcatgcaaagaaaaggaaatatcacaaaatgtaaacactggttgtcagtagaggggcgggttataggagaagaaaccagtttttcttatctttcttgtatatattaatttcataataaatagacaatagagtctttttcattcttcaaaagaaaataaattaccttgttgagagaaacgcatacttctggaagtttgcatattttgtcctgagaaattctctctctttcctgctctccttctctttcttcctctctccaaagaaagagaagagatgctacaaaggagcagaaatttggctataaaaaaaggcaatttaaaaaattactttcttagttgaaatttgcactgacagaagctaagaaaagcttttgaccgtaagctggcaaagccccgagaaagtttgtctctaagttaaaagaaaaagggaaagttttaaagaaatatttaatcgaattccacagacaagatttcggttaaaattcattattattaagggataaagtatttctttctagaattaagaagaaatgctttaaaatataaaaataacttattatgtaattttcataaattaacctgtaaataaaatgcactagctttattttttttaaatagagtgttgatggggagagagagaaaatgaggcagaatgaggaaggagagaaaaggagaatttatggctttgaagtcatatcttcagtttgcttctcaaaaccaggcaatcccccacgtaatggatcaggcccaaattgtagaatatctgcaactgctctgttctattaaattttgaaactgatgctcaaaaactgcagaagcatcttagtaactcatgacagtgcccttccacatggactcagactggctttaccctactgagggttgtcctttacttcttgataaattcctagaatttgcataacttttagtgctcaaagaaattggctgagagcattgtgaaagagtctcctgaggagctaccaggtccattggggggaccagggatcttcctttctaaccaacctgatttcagggacagtcttggtaggaagagaaacatctcatccatctttgatcacctgctccaacaccaccgcagcctgggaagcccatcccagcagggccaatggaccttagactgccagctccagggacagacgtatccagaatggaatgctcgkggtatcaccacaatcaacaggtaccaataagtaaatcatgctgaccatgacaatatttaggattagggcatatagaaatagggcatggagttcaggccaactaatttttttaaatcctaaaatccattaagtaatagaagatcaaaaagaataatcttgattgctgacaatattaatatgaggtctcaatttaagtaaaactcaaatttcatagaaatctttgaactaagcaaatgtgagctataagaatttgatgtaaattatgccattcagggaagctttatatttcctctgcttttgttcttttcaaactattgcattggaacattccaatggttctccccgctacactccctacccccaccattgcagtgagttcagcagaacttactcaattgtggttttaaaatgaccatgaaaaggtgaaatatttgca

SEQ ID NO: 699332 - DNA, 1640 bp, Homo sapiens
gtgtatgtctatatacatgcactgtcatgcaaagaaaaggaaatatcacaaaatgtaaacactggttgtcagtagaggggcgggttataggagaagaaaccagtttttcttatctttcttgtatatattaatttcataataaatagacaatagagtctttttcattcttcaaaagaaaataaattaccttgttgagagaaacgcatacttctggaagtttgcatattttgtcctgagaaattctctctctttcctgctctccttctctttcttcctctctccaaagaaagagaagagatgctacaaaggagcagaaatttggctataaaaaaaggcaatttaaaaaattactttcttagttgaaatttgcactgacagaagctaagaaaagcttttgaccgtaagctggcaaagccccgagaaagtttgtctctaagttaaaagaaaaagggaaagttttaaagaaatatttaatcgaattccacagacaagatttcggttaaaattcattattattaagggataaagtatttctttctagaattaagaagaaatgctttaaaatataaaaataacttattatgtaattttcataaattaacctgtaaataaaatgcactagctttattttttttaaatagagtgttgatggggagagagagaaaatgaggcagaatgaggaaggagagaaaaggagaatttatggctttgaagtcatatcttcagtttgcttctcaaaaccaggcaatcccccacgtaatggatcaggcccaaattgtagaatatctgcaactgctctgttctattaaattttgaaactgatgctcaaaaactgcagaagcatcttagtaactcatgacagtgcccttccacatggactcagactggctttaccctactgagggttgtcctttacttcttgataaattcctagaatttgcataacttttagtgctcaaagaaattggctgagagcattgtgaaagagtctcctgaggagctaccaggtccattggggggaccagggatcttcctttctaaccaacctgatttcagggacagtcttggtaggaagagaaacatctcatccatctttgatcacctgctccaacaccaccgcagcctgggaagcccatcccagcagggccaatggaccttagactgccagctccagggacagacgtatccagaatggaatgctcggggtatcaccacaatcaacaggtaccaataagtaaatcatgctgaccatgacaatatttaggattagggcatatagaaatagggcatggagttcaggccaactaatttttttaaatcctaaaatccattaagtaatagaagatcaaaaagaataatcttgattgctgayaatattaatatgaggtctcaatttaagtaaaactcaaatttcatagaaatctttgaactaagcaaatgtgagctataagaatttgatgtaaattatgccattcagggaagctttatatttcctctgcttttgttcttttcaaactattgcattggaacattccaatggttctccccgctacactccctacccccaccattgcagtgagttcagcagaacttactcaattgtggttttaaaatgaccatgaaaaggtgaaatatttgca

SEQ ID NO: 699333 - DNA, 616 bp, Homo sapiens
aatgtttcatactatacattaatattttataaattccctgttagattaaaaaatatatttttttccttgcaaatcttaagcttgctggcagacctgagtttccctctaaattaaaatgtcttttaaaatacttttaaaaagagagatatataaggagaaaaaaaaaagaaaaaaagttttaaaactaaatatcaaatggctttgtactaaaattattatacattacatgtaaaatcattatgtaattatgaaacaaaactatactgtttaattgaccacatataatttccatattstgagttagatttatttaataaaataaaaaatgctgaaaagaaaatgtctcaccttagtaagaacagtggagtactgaaatgctatacactgcacagatgtcttgtgagcactgatggtcttaactggtgatttcaacattcttaaatcatattgatatattttcccccgggaagatccaatagccaaagtggctccatcaggcatgaaatctaccgcagttagaggagtgtcagccactaaagttttcactagcctttggaaaggagaacaaagtatgtgtagaaatgttagtgtgtacaggtatattagcttatataag

SEQ ID NO: 699334 - DNA, 934 bp, Homo sapiens
caataacaactcaattcagcaaacttatattgagcacttaatacatatccgccaattcactggataaatctaaacaagaaaaaaataaaatataaatacttcatgcttcctaccatgagggatctcagtccacatgctgatggattcctaagttttaatagttctcagcataatccagttcagggcaaaacgctctaaaaagcacagatatgtaattttgcataacatggttccatggcatcacgtggaaaaaactatttcatccttgcttatatatattattgatagggcactgctacatttttaaccaccttgtggtgatgtaaaccctgaagggtttgcaaagaccaccaaaagactgtattaattgtattaccatgtcagcaattatgcccaacatttctaggaaatgactttttgttacattcattactcttgttttgacaaatgtgtcaatggcctttcattaccccaaaacacatttaggtcaagagaatagggtaatacatcattgctaaggactatttttccaataaccaagtaacaatttaattttttaaccaaaatgcaatcaacttaccctattaaataaaatcagtcctaagtcaaaaggtcaagataagatttgatgtatttttaaagtagccttcagaaaagacagataacatccacgygaaaaatgtaagaaacccaaagcccacagtacacataacaaatcaattacaataatagtaattcaatagcatataacactaaaaattcaaataattctgaaaagtgaatacttgccttagccacttatggaaaaataaaataataaacttcctgtttcagagtaaattgctatggattgggacacatttttttgctggacttttttggcagagaaagagttgtttggttttaaaatgagaattcataacattcaatgcaa

SEQ ID NO: 699335 - DNA, 1146 bp, Homo sapiens
tccaggatatgcctgatgaggggttcctttaagtgagaatcttttgcctatgagggccttgcagaatgttttgagcagcttcccaaaaatgtgaggaatgcctcaaggctggctacacaaagcgctctccttggtcctgagacctgtctttggttgagctcagactctgttccccagccagtgaactgaacccctccaccttagccctgccctgctttatttactctgcctaaacccgcctcctctccacccccatactctgtgcacatcccaatcactgcactcaccatgttctaggagggtatatttatacattcatctgtcccacaggatggagctccttgaggctagaacagcattctgtattcatctttgtgccccaaatacgcaggtaagaagtaggcactcaaaaaatgaataaatgtctacgtaatacatgtaactgtgctactttgtgatgtgtcgtatctcctttgctgggcagggaataaatttgagaaaaagatagatttaagatgtgattttcttgtgggtagagatgtgcatgcatgtgtgtgtgagtgagtgaatatatgtgtgggagacacagtgawaaatttcagaggaggggcagagccagggcaaagacccagagtaggtaacaacaaggtatgttcagagcttgacaagttctgttaggctgagcctgggggttgtgagggaggagtcagaaataagccttatctgccaagtaaggagattggctgttatccttgggcagggaacaggagcttcagaaagatcttatttagaggactgacaggataaaaggagtattttagggaacagtgtgctgcaggagaggatcaaaggcaaaaatagcatttaaaaagttactagggtattaaatgagggggaaaggctccctgggcttgatttttgaggcagagtttgcagaaaataagaattggggccgggcgtagcagctcatgcctataattccaacactctgggaggccgaggcaagtggatcactggaggtcaggagttcgagactagcctggccaatatggtgaaactttatctccactaaaaatacaaaaaatagctgggccctgtagtcccagccactcgggaggctgaggcaggagaatcactggaaaaccc

SEQ ID NO: 699336 - DNA, 927 bp, Homo sapiens
tgttttaatttatattagtaaatgctaccaaccagtaggacaagactctctcacaatgttcatttcttaaaatttgctatgcaaccagcttattcttctagatgcaatttagatttcatctgcttcgaaaaataagcaattatgattttgattggaattataygtaaattagagatacatttaaaagactttttcataaaattaagtcttgtggttgaaaaaaattgtttaatatattaaaatttgctttaatagcttagaaaggtttatgttttcaaataaatttgcataaatttgaaaataaaagaaatatttttatatatttggtaatatcctcacttgcctaattttctttgtatttattttatcttgaataaaattgctaaagcaggtctcaatcctaaccacgcataagaatcacctgcataactccacaaacattcagagtcaggtcaacactcaatggcaagtccacttgattctcttaagtcctttgatgccccagccaaggataagaactagtaactgatttcttgctcttcttggacacttttcgtttgtttttggagacagggtcttgctctgtcacccaggctggagtgcaatcatgtctcactgcagccttgacctcctgggttcaagtgatcctccctgctcagtctccagagtagctgggaccacaggcacacagcaccactactggctaatttttgtattttttgtagagaaagggtttcaccatgttgtccaggctcacctaatttctttatgcttatttccaactaaggaatctttcaggtcttttttttttttcaagcagctattaggtggaaatattttatattctttccactttgaggatgatttctactttcttcttatgtaaacactgccttggtctggtaaaaacatgcttaggcggtaacc

SEQ ID NO: 699337 - DNA, 1189 bp, Homo sapiens
aagacttcaacatataaattttagatgggcacaattcaacccacagtcccagactatcaggaaaaaagtaaaacagaaattaccaacatcataaatgagagcaggatatcctgtaaactctatagatatcaaaaaaattgagagtataataaatagctgtaagccaataaatatgacaatgtagatgatatagataaaatctttgaaagttcactcaaaaagaaatggataacctaaatagccccatatctaatacgacatcacattatacactgtaaatatatacaatttgtcaattataccttaataaagtaggggctggggaggaaaaaagccttgatctatgatagaaataactgaatctggcactgagttaatgaaattaataatcacagtttacaattattaagtgtctttactgctgagagacacctagaggccccacaaatatagagccaaatggaaaatttcagcaactcactcagtgaatatatggggctcagccacaaatgaaactattatagtttcatttctaagcctaacattctaaacagtgtgagaaatgtcactgttaaaatcatcactgaatttcaaaatattataaaaatataatgaagttggtcataatttcatctgaaaaaaggaaaactgttatatatacagtatctttgtttgaatcattttattccaaaaggaagcctctatatttacttatatttgtaaaagatggtactaatgttttgacaaaaaaaaaaaaacaggagaaaatcaatgtaaacacaccattttaagtggctgaaaaaaaaccacacgaacatctcaacagacggacaaaaagtatttgacraaaattcaacactcattcctcataaagactttagcaaattatgagagaacatctcaacttgataaaagtaatgggctgagagatagagagggttaactttgcctgctctaaaactctattattctaaccaggttggcctacggcaaagaggtggggatggggttagcacagcatttactttctctgatgttttctataaaatcatgtaaaaaaagtgactttcaataagtgtatgataaagaaaagcttactaatttttccccaaaaatgtcttgttataaaattagaatgtttctcaaacattaaaatccttggcaattatggtacttttggacattctag

SEQ ID NO: 699338 - DNA, 599 bp, Homo sapiens
aggaagaatcttaggccccaaccagacctacagaactgcagtctgcattttaacaaattcttcaggtaacatcatttatcatcacagaagtactgggctagtttatgctatggtgtggaataatcctaaaagctctgtgtcttgaaacaactaagatttatttctcactgatgctgaagtctgtctgggagcaagcaggtaacaagtagggaactctgcttcatgtcattctcaccagggccccaggctgacagagtctccaccatttgaacaatcactagtcatgtggcagaggaggaaatgtgtgactcttgtgcttccctcgtatttcactggccaaagcaaatcccagggccatgcctatcttcaaggaggtggaaaaaacatcctactgtgtacctggaaggaggagaatcaaaatactgctgaagctaggggatcctcgaggcaggcaggcctttcaaggggttatgacaatacagatgtaatcagattcarggaaagtatatcaatacgaaggaaaaggagagcataaacagaagaaacagttcagaatgatgatgattctgaatgggcagtcaaggaagactccagcttta

SEQ ID NO: 699339 - DNA, 957 bp, Homo sapiens
ttttgagacaaagtcttgctttgtcacccaggctggagtgtagtggcatgaacacggctcactgcagcttcgacctccctggcgcaagcaatcctcccccaagtagctgagactacaggtgcacaccaccatacccagctaatttttgaatttttgtacttttttgtatttattattttgtagagacggggttttgccatgttgtccaggctggtctcgaactcctgagctcaataaatcgtcccacctcggccttcacagtgttggggtcacaggcatgagccactgcgccggccagggagaggttaaccaggttaatggacccctagggtgtccacatggcaccttcagggactctgaaacgcagaaatgatatgcaaaattttgagtgcacacaggggatgggaggtggaagtaggagaagagaattcgtagttttattattttccaaacggtcgcgacctaaaggttaataacaactgctgaagagagtagaaaaagtttttaaaaaggaagcccagagaagrgctaaactttagaaagaaaaaaggaaaacatctttcctatccaaggaaaacctatgaacagatggagaagtccacagttgcatcatctgggtaaaacagagaagacagagctggaaaccgcgggcagcttgtgccaacacgctcggggaaggcaaatggaagaagacgcccgtgctccctagagcaggaggtcctaaggccgggaatcgctggccttgcctctcaggacccgggctgacccgagggagggagaagccctcatcgccaggcgggggacccatcagcgcgccggctcagggacaaaatactgatgcttcagactcggccaggcgtgcgtccgagcttccccacagccgccgcacttccctgctgcctttgggatgcggcctccagccccgcctcgccaccggccgtcatctgtgaatcatcc

SEQ ID NO: 699340 - DNA, 957 bp, Homo sapiens
ttttgagacaaagtcttgctttgtcacccaggctggagtgtagtggcatgaacacggctcactgcagcttcgacctccctggcgcaagcaatcctcccccaagtagctgagactacaggtgcacaccaccatacccagctaatttttgaatttttgtacttttttgtatttattattttgtagagacggggttttgccatgttgtccaggctggtctcgaactcctgagctcaataaatcgtcccacctcggccttcacagtgttggggtcacaggcatgagccactgcgccggccagggagaggttaaccaggttaatggacccctagggtgtccacatggcaccttcagggactctgaaacgcagaaatgatatgcaaaattttgagtgcacacaggggatgggaggtggaagtaggagaagagaattcgtagttttattattttccaaacggtcgcgacctaaaggttaataacaactgctgaagagagtagaaaaagtttttaaaaaggaagcccagagaagagctaaactttagaaagaaaaaaggaaaacatctttcctatccaargaaaacctatgaacagatggagaagtccacagttgcatcatctgggtaaaacagagaagacagagctggaaaccgcgggcagcttgtgccaacacgctcggggaaggcaaatggaagaagacgcccgtgctccctagagcaggaggtcctaaggccgggaatcgctggccttgcctctcaggacccgggctgacccgagggagggagaagccctcatcgccaggcgggggacccatcagcgcgccggctcagggacaaaatactgatgcttcagactcggccaggcgtgcgtccgagcttccccacagccgccgcacttccctgctgcctttgggatgcggcctccagccccgcctcgccaccggccgtcatctgtgaatcatcc

SEQ ID NO: 699341 - DNA, 957 bp, Homo sapiens
ttttgagacaaagtcttgctttgtcacccaggctggagtgtagtggcatgaacacggctcactgcagcttcgacctccctggcgcaagcaatcctcccccaagtagctgagactacaggtgcacaccaccatacccagctaatttttgaatttttgtacttttttgtatttattattttgtagagacggggttttgccatgttgtccaggctggtctcgaactcctgagctcaataaatcgtcccacctcggccttcacagtgttggggtcacaggcatgagccactgcgccggccagggagaggttaaccaggttaatggacccctagggtgtccacatggcaccttcagggactctgaaacgcagaaatgatatgcaaaattttgagtgcacacaggggatgggaggtggaagtaggagaagagaattcgtagttttattattttccaaacggtcgcgacctaaaggttaataacaactgctgaagagagtagaaaaagtttttaaaaaggaagcccagagaagagctaaactttagaaagaaaaaaggaaaacatctttcctatccaaggaaaacctatraacagatggagaagtccacagttgcatcatctgggtaaaacagagaagacagagctggaaaccgcgggcagcttgtgccaacacgctcggggaaggcaaatggaagaagacgcccgtgctccctagagcaggaggtcctaaggccgggaatcgctggccttgcctctcaggacccgggctgacccgagggagggagaagccctcatcgccaggcgggggacccatcagcgcgccggctcagggacaaaatactgatgcttcagactcggccaggcgtgcgtccgagcttccccacagccgccgcacttccctgctgcctttgggatgcggcctccagccccgcctcgccaccggccgtcatctgtgaatcatcc

SEQ ID NO: 699342 - DNA, 957 bp, Homo sapiens
ttttgagacaaagtcttgctttgtcacccaggctggagtgtagtggcatgaacacggctcactgcagcttcgacctccctggcgcaagcaatcctcccccaagtagctgagactacaggtgcacaccaccatacccagctaatttttgaatttttgtacttttttgtatttattattttgtagagacggggttttgccatgttgtccaggctggtctcgaactcctgagctcaataaatcgtcccacctcggccttcacagtgttggggtcacaggcatgagccactgcgccggccagggagaggttaaccaggttaatggacccctagggtgtccacatggcaccttcagggactctgaaacgcagaaatgatatgcaaaattttgagtgcacacaggggatgggaggtggaagtaggagaagagaattcgtagttttattattttccaaacggtcgcgacctaaaggttaataacaactgctgaagagagtagaaaaagtttttaaaaaggaagcccagagaagagctaaactttagaaagaaaaaaggaaaacatctttcctatccaaggaaaacctatgaacagatggagaagtccacagttgcatcatctgggtaaaacagagaagacagagctggaaaccgcgggcagcttgtgccaacacgctcggggaaggcaaatggaagaagacgcccgtgctccctagmgcaggaggtcctaaggccgggaatcgctggccttgcctctcaggacccgggctgacccgagggagggagaagccctcatcgccaggcgggggacccatcagcgcgccggctcagggacaaaatactgatgcttcagactcggccaggcgtgcgtccgagcttccccacagccgccgcacttccctgctgcctttgggatgcggcctccagccccgcctcgccaccggccgtcatctgtgaatcatcc

SEQ ID NO: 699343 - DNA, 2138 bp, Homo sapiens
tgtgtctaggggtggtatctatagacatccacatatggatgtttaaatgaatacatttcctctccaaggtctttgacatttgggaaaagaagtttgtttaatggtagttccaacactgaattccataagtaaaaagcattattttcagcatcttcctctggtatgcttttttgttttccttagaaaatgccataatataaatgttaagatcattatagaaaaggaatccttcctgaygagcttgggatcctatagtaattatattaacccgggccttttattgctggttaatgaaattcttttaaaattgaaccagcttcaagtaaactgatttgcattgatttggtgatgtatagagctcaagccactctatgtataagcaaattaaaagcctgaagcctgtatagtcaggctgcatagtctccggctggaaaattgatcccatgattccctccagggacactttgctttggggttggtgctgtttaaagggacacagtcaatttctttggcaggaaataaattaattaggagaaaagaaaaatcttgttcgatgctggactaaaccttttcccaagtcaccaaagacaatttttctaatggaaaaatcatcttggattccttctaagtccatctcacacccctggaaatgacacaacaaaggtgaagcttctgttgtaactgagcatcttcccaagctgctctcactgcatatcccacatggctcctgggtggttggaggtcttgggtaggctggccctccccatccatccacctgacgcactgcagcctggtgctttctgttctctcctgctttcagtgtctcttctgctcatgagaatggagggaggacgaagcagagagcctcaaagaagccaggaccaggaactgaggaagtaagagtatcacaggaaatgctcatatcctctctccctccccaggagcatgctacatgcaggaacaggaaggagaattagattcagtccctgcccatgaaaatcttgtggtctgctatggactgaatgtttgtgtcaccccaaaatgtatatgttgaaatcctagcccccaaaatgatggtattaggaggtgagccttttgggaggtggtcaggtcatgatggaatgagtgcccttagggaagaggctcatgggagcctgtttgccccttttgccctgtgaggttgcagtgaaaagacgtctgtctatggagaaagcaggcccttgacagacacggaatcaccagcacattaatcttggatgtcccaatctccagaactgtgagaaataaatttctgttgtttataagccacccagtctaaggtattttgttacagcagaccaagcagactaaggcatagtccaacttgggagacagatacgtaatcaaaaattacaatgtagtgtaatgagggccataagagatacatgttttattagtctgttttcatgctgctaataaaaacatacctgagactgggtaattaataaaggaaagaggtttaattgactcacagcttcacttggctagggaggcctcacaatcatggctgaaggtgaacgaggagcaaagtcacgtcttacatggtggcaggcaagagagcttgtgtaagggaactcccctttataaaactatcagatctcatgagacttattcactgtcacaagaacagcataggaaagagccacccatgtgattcaattacctcccaccgggtccctcccacgacacatgggaattacggggctacagttcaagatgagatttgggtggggacacagccaaaccatattaaatgtccagtgttccataagagcagaggagagagccagaaaagtcagggaacagggaagtttcagagaggaggctacctggggcaggaagtttggaaggaggaccaggaatcttctggtagagaagaggcaggaggagtgtgagccaagggaccagcaggaaggtgagaccagggacacgaggaaagggcctgcttctccgagctgtggcctgtttgtggtgcagaggggaaatatatgagggacagaggcagccaggcatgaaagtatatgcactccctctaagagttcgttgagcattctgaccagtattgcctccttgaaagagaactccatgggtagaaagat

SEQ ID NO: 699344 - DNA, 655 bp, Homo sapiens
tgagtacctactgtgtgccagctgctgccctgagcacttactgtctattatattatcttattcagcaaccctgtacagcaacctgtacagcaaccctgtgaggtattattttccccatttacagataaggaaacatgtttaaagaagtcaaacaagttgcccccaggaaatgggtgaggactggaatttgaatccaggtctggatttacaacccctatctgagtcaaaactcacttgtttgcaagtaacatagatccaaaaaaactcagctcctgtaactgggggagttaaagctagccccagtgacacatcaccatgttttgactcagcttccctctgacctctctggctgctgatggctccctttgtacggtggggacaatggagaaggggttatgggggccaagggaaattctctccctttgcattctgaacgttccctgaaaatcactaacaagrggcaaattaacaggagaaaaggcatacagatttacttggtcttagttttacataacatgggagccttcagaatgaagactcaaagatacaggggaaatggtccatttttatgcttaggttcaacaaagtatggacagatgtgtggaaatatgattggacagaaagggtagattcaatgtgaatagacagagccagg

SEQ ID NO: 699345 - DNA, 655 bp, Homo sapiens
tgagtacctactgtgtgccagctgctgccctgagcacttactgtctattatattatcttattcagcaaccctgtacagcaacctgtacagcaaccctgtgaggtattattttccccatttacagataaggaaacatgtttaaagaagtcaaacaagttgcccccaggaaatgggtgaggactggaatttgaatccaggtctggatttacaacccctatctgagtcaaaactcacttgtttgcaagtaacatagatccaaaaaaactcagctcctgtaactgggggagttaaagctagccccagtgacacatcaccatgttttgactcagcttccctctgacctctctggctgctgatggctccctttgtacggtggggacaatggagaaggggttatgggggccaagggaaattctctccctttgcattctgaacgttccctgaaaatcactaacaaggggcaaattaacaggagaaaaggcatacagatttacttggtcttagttttacataacatgggagccttcagaaygaagactcaaagatacaggggaaatggtccatttttatgcttaggttcaacaaagtatggacagatgtgtggaaatatgattggacagaaagggtagattcaatgtgaatagacagagccagg

SEQ ID NO: 699346 - DNA, 607 bp, Homo sapiens
gactgaggatgtaattaagaggtgatgctgtggtgtgccacctggatccccatttagcacaggagaaatcattctgcagctgctgggagttccgccagaacacagcctccactggaccctcttggggactgcctcacctgaagacagctgcctcatccagggtcatggccccttctcagggtagtacacattccatgtmatttcaccctgtgccccactctggatgactccgaagggccatcctagcttctgagttcccacattcgcaaacccttggctgcaccttcctctttccatttgactgttgacctgggaagcagccagagttgtgttctcaaccaatgtcccttcctccaccaactcttagaaagaagatagcagaaagcaaaaaaagaggactggtgatggcttatgacattctggaaggtgacaatctccagaaacagggagagctgggatgatggtggcaagaatcttgaagacaatgcattgatgaagttgtggctttttcatattccactgtttcagagtattatagaaccaaataggaaagaatgcctcctcaaccaggcaataatacattggtgaaaacgtgggaattactgga

SEQ ID NO: 699347 - DNA, 1358 bp, Homo sapiens
actgtatgtatattagttatgtacatgataccctctcatttactttctaagttctgagggtggtgaacaatatgttaaacagggccaacataaaaaatgatagttataaaagcaaaagaacagtcacttctcaccaagttcaggactatataacatgtcttcatctcgcctacgagggggaagatctagggcaaaacccactttacggccatacatctgcacgacttgaggaggaggtggaccagggggagggccaggaggttttctgccagggggcaaacgtggaacaccatgtccaagaagaggaaggatagaaactgcccgagttggaggtctgttaaaaaaaaaaacaaaaacaaaaaaacccccacagtaatcacttaacagtaatgagatatttattttctcttctaaacaattttcaagggatttcttattttacatttaatcaaatgtcacactgtttacatccatattgtcttttatttccctctgcattaattttggcactggacagtcaacttgtgcctttactaaatgctctctgattgtgacactgcttccttacccataggctgaggttttctttaggatagagggtggctgggcaccaggaagtggaatgtcctggatcaaaatgttggaaggagcatgtggcatatctggcaaaggaatactctccacttccacatgctgagcattctgaaacagagaaccattcagtagtatgataaaaaagtcatctactaactaaacactaaaaatgacaagtcagctgtttcgtaacttggacatgctttccaactaacataaatatcaccaaaaacccccagaaaaataaccttacgtcaatacttccacattgtcaaagaactgaaagaaatctttacttctaaaaacgtcagaacccagctgttttttttctcctcttatcaggtaattctttttggatgattcgaaacagctgttgtctagagaaagccaactgttacaagtatctagcaccagaactaccctatttaacatgtgatagaaaaatacatgtcaggctgggcgtggtagctcacacctgtaatccgagcattttgggaggctgasgcaggtcgatcacaagctcaggagtttgagaccagcctggccaatatggtgaaactccatctctaataaaactacaaaaattagccagttgtggtggcgtgtgcctgtagtcccagctactcaggaggctgagggaggagaattgcttgaacctgggaggcagaggttgcagtgagccaagatggtgccactgcactccagcttgggcaacagagtgagactcggtctcaaaaacaaaaaataaacaaaaaaaagaaaaa

SEQ ID NO: 699348 - DNA, 616 bp, Homo sapiens
tgcatgttttctttttctaatgtgcaattgttttgttttctacctgtcttttctatgaggctaaaaatccatgaggacaggtgcatttctttctctattttgtgttattsttattgttgttgctcctatctttgcattcctacaacacaagcacatgtacgaatttggtaaaacattcactaaataaatagatgattagtcaaatgaataaatttaatgaaaatttcagaactgtgataccttgcttaagttccccgaagtaatgttgaggatccaaaataatgtatgcaaaagaaaaataacaaaatggaaagtgccagagagtggaagattgtgttattctttccctcttctgaagtcagtttatcccttttagatgcagactacctcctgctagcataaataacttggaagtttacataaaacaatctgacaatgtttgtgcaataattctaaaaggatatctaaatagcagtgacaatcattcagtcttgtttaatgaagttaatggaagttgtaaatcttctagttcaaatcagcagcttgataaaacattagttttgactcatttgggaggattgtgttctaagtttacaaaaaagtgaaccagccaccc

SEQ ID NO: 699349 - DNA, 885 bp, Homo sapiens
tgcctccggggctgaagcaattcttctgcctcagtctcccgagtagctgggattacaggcatggcccccatgcctggctaatttttgtattattagtagagatgaggtttcaccatgtcggccaggctggtctgaaactcctgacctcaggtgatccacccgcctagacctcccaaagtgctgggattacaagagtgggctaccatgcccagtcaactagctgttattctttacaacttatatcatcatatatggccaaaaaataaggcaagataatttcccaaattataccttaaaaaagagatagttatcttaacattggagtccttatagttctcttataaggaaacaatcatcaaattaatttgataaaastgtactttgagaaggaaagacatatttgcttgaaattatattaatcaatgttagtttagatgcctgaaaaaaataccttataattggttaaaaggccagcaaggaatttaagatgatttaataatcattcctgaatatatgacatcacagcttgaagtgtttgcagtttaaaaagcagcaaaattaacaaaaacactggttttaggtaacagcttttgggaaaatggagaaatcaccatatattcatttgtacttatatggtaagcccatatgacattttattttgcacctcaccgtaaagctaccagcaaagcaaatataattaaacattttatatggatttgcatatgactatacttatgtccacacatacaattatatatgctaataaatgactatatttatgtatgtgtattgtcatatgacttgtagaaaatgaattattctttcctatttgcttagttcttatttttataacttttcttctctttaactagtttttaaaattga

SEQ ID NO: 699350 - DNA, 885 bp, Homo sapiens
tgcctccggggctgaagcaattcttctgcctcagtctcccgagtagctgggattacaggcatggcccccatgcctggctaatttttgtattattagtagagatgaggtttcaccatgtcggccaggctggtctgaaactcctgacctcaggtgatccacccgcctagacctcccaaagtgctgggattacaagagtgggctaccatgcccagtcaactagctgttattctttacaacttatatcatcatatatggccaaaaaataaggcaagataatttcccaaattataccttaaaaaagagatagttatcttaacattggagtccttatagttctcttataaggaaacaatcatcaaattaatttgataaaagtgtactttgagaaggaaagacatatttgcttgaaattayattaatcaatgttagtttagatgcctgaaaaaaataccttataattggttaaaaggccagcaaggaatttaagatgatttaataatcattcctgaatatatgacatcacagcttgaagtgtttgcagtttaaaaagcagcaaaattaacaaaaacactggttttaggtaacagcttttgggaaaatggagaaatcaccatatattcatttgtacttatatggtaagcccatatgacattttattttgcacctcaccgtaaagctaccagcaaagcaaatataattaaacattttatatggatttgcatatgactatacttatgtccacacatacaattatatatgctaataaatgactatatttatgtatgtgtattgtcatatgacttgtagaaaatgaattattctttcctatttgcttagttcttatttttataacttttcttctctttaactagtttttaaaattga

SEQ ID NO: 699351 - DNA, 557 bp, Homo sapiens
  misc_feature 16: n = A,T,C or G
caaagcccctgcccanacaaaccacagaaatgctgcaggcaaaaggataggtgtgagaacgtatggcagggttatgtgacttagccaggaagagttggtgggcgttgatgtccagggaagcaccctctggggaaacagctttctgcctgagacctgaaggaccagcatcgtaggagttcggcaacctgggtttcctccctccagcctgttcccacggtccttcagcctggtcttcctcacctaaccctttgtggcagttttctggggctcctgtagccaagtaccacacaccgaggggcttgaaaccacagaagtgtatcctctcacagttcagaaggccagatgtccaacatcgaggggttggcagggtcagttccttctggaggctgtaggggaggatctaacccatgcctcttcctaggttttgggggctyccgacaatctttggtgtcctttggcagcctgcagctgcctcccgttgatatctgctccatcttcacatggcctccgcatgtgtgtgtgtgtgtgtgtgtgtgtgtgtgtgtgtcttctcttct

SEQ ID NO: 699352 - DNA, 1491 bp, Homo sapiens
cttatttgtccaggttacatattttttcatttaatttcacttttaaaactactacagatatttccaagtaacattttataagttttatggactaaatgaggaaattgtcttgaagatctaccttttagaaaatatattaggtacttccaacggttttgatgctacatcamtaaggatggaaattcactaatccccaaagaattcacattcttcctgctagactttctacctatactgtaaaggtcatattatagatagaaatattaaaattatgattgaacagactttattacaatagcttatgggcctatattctaaaaataaatcttaccatgggatgagtgtgtgtgaaaagagagaagcattcatgctaattaggctgattttaaagcctcttgggatgcaataggattttaagagaaaagaaaagcatttcacaggatggataaggaaatgcaaaagaagttgaaaagatacctctaaaaaataacttttaaactcagttgacatgcacaatataaatgagactgacttcaaaagatattaggcctgcagggtaatatatcatttttatcaagtatatactcacatgcaattaaaattatagtatacaaaaacagaagccatatatggatacaacacttagaaaatagtaatttatgatttcttttaaagttttaatctattttatttaaataacaaaacagaaatgttcagcagctaagcaattataatattatccatgtacgaatcacaaatataatgtttacccctgctactggtcaactctgtattatcatgaagtgttctttcttagatacatgaagtcttggtaaccttaatggctatttatctgtaacctgggatagggagtctttttctaagaaatccttcattctatggaaatgtacatttacagaatgactatatttcaaaatatggtagtaaaataaaatatactaaatgctgtcttcccatatacaaatattagtaaattagtaaatctttatgtaggaactgttaatgctgtgaatatataagttgatagaacatatataatttgataaaaccttccctttcaccattcttttgttatgccttgttctttttgcatgttaacactttgaagatttgtttgtagcacactgactaatgcatttaagttcttaaaaaatgagaataaggaaatatgttttaatttgctggattctacaggaaaatatataagctatataacttcttcaaaattccttgacagagataattttttataaaagactgaataaaatatttagcaggcaaaaaatattacaaatatacttaccaggaatcatatcgaaatgctgtatgctttcatgtccactggccaatggcttattttttaatctaaatttatgtctcttacttatactcagtactttattgcattctttttatacatccaatcattttaaacaaaccaatgggcttgaaatgagataatgctaaatt

SEQ ID NO: 699353 - DNA, 2859 bp, Homo sapiens
cagtttgttacagatattattcttattgatgctctaattgccccactgttggccagcgggagcctcttcaagttggtttgttggtccttttgacacagctccagtagtcgttgatggctccctggcttgctggtataatgagatgttttgagcacatcttagcatttcttgccctagagctagaattagccatttctctaaggaacgctggtttcttatggtgggaaggggtatamgggtactatcaaaggcaggtcggtgaccatttccttttaattctctgaaatctaaacagctgaaagtgccaaatgtggtgtctagcctggctccatggaatttttaacacggagttctcacacagcatatgatcattcctcaactcgccacttgatgtcactgcatagtcaaatgagcattcaaaattaccctgcagtggtttgtgttatttctgattctgttgaaagcaatgttaatgagatggtagaaggcaaatgtactacttcaaatgcaaaagtactctatcaaataatgcagtgagtgcattcaatgacaaaattaattctaaaatgaaagcctggcgtccttcattcagtcttccttctttatgaccttgtgaagagatgtttacaaagggattatacatttattagcatcgttaattaccggtgcttttagatgaatagaatgctgtgaaaaaaaatagcactatcagaatatgtttagtattcacaagaggcaatagaattatcctcacacttagaccagcagcaacattccagactactgtcctttctctatgcacttaagttagagtttggccttttcagctcatttcagcaccaggttctcaatagggaccaacagcaggagaagtttgatggtcttaatgaaactttcacggtttaaatgaaatgtctagatataaaggaaaaagttggaaaccaggagtttattttcagggtaacctatgctccaacccagttcatcattcagtggccataggacctttggtatattgccagcctcactgtacctcagtttcctcatctgtaagatgggcatgagtacctagcttttatggtgttgtgaggataaaatatgataatacctgtaaatacctactcaatcctagacatgaggtagacactcagtaaatgttagcctattctcctcctcctaacttcacctccctttgagaatttgatcaagttttattagaattaacaataaaaaagtcaaagttactgcagatacacttgggttagaacctcagctccaataattatgaattttgtaacttgcagcaagttgtttaatctttctgagcctcagttttctcatctataaaataagatttctaaggcatgattgcaaaggccggtttcattgtgcatttgaaagaactttgtcagctgtcagcacctaggttgctgatgtcatttttccctctaaatgaccaggccccaatggaggccattggcagcttgggaagttccgcctagagaaagagaagtttggaagaaagagctcaactgctaaactcttagggggttcccacattaccacttaggagatttacagaccagtgtttgcccatgttcctagataattcaaccctgtttgtaaccacaggaagttgggaccaagggttttcagtcttagcaccctgctttgccccctcactttgattaaaaggggccttgtccagccgttctattgaaaatagcaccctgtccttttctgtcctcttatccagctttattttgctttgcttcacttataatcaattgcattatatatctctatctgctcatttatttattgccctctccccactagaatgcaagcttcccaagggcagggcctttggctagaatataacaagtgttcaataagaagctgttgaattggccatcacagtggctgacatctgtaattctagtactttgggaggccaaggcaggtggatcacctgagcttaggagttcgagaccagcctgggcaacataatgagaccccgtctctaaataaaaaacaaaaacaagttggtgaatggatacatgaacaaaagagcttcatccttgcctctcctgtgcttctctctctctgctctgtcccataaagatcttggtccccatcatagcttcagctgtcaccagtgtgttggtaactttccagcctaacctctgtctgtctcccctgaatgtcttgccatcccatcagactcagcatggagcctgagacaatgtgatttacccactcgttcattccttcattcaaaagatagtggatttcttgttcacttactctgtaccaggaactattttaggtgtctaacagtaaaatggacgtcatgaggtaatgtccttgcccctggaagaattcaagtgccatctggatagatgggtgacacttatgccatgtgacatttgcactaggtgggaagtttggtttgatttgacaaacatttattaaatatctctaatatttaagccacctcatgtccaaaagccttgccaatgataagattctgtgtctcagcctaattaatcaccattttctctccccctgatagctgtcagttatcccgtaagtcttttataaactcccaccaggcaagggcttcaggctgtttctctgtagatgatgcccgggtcaacacgtctcatgctgccttctctcctaagcaccagccttatatttccagctcccaggaggcatcaccacctcaagtatctcccaaatcagcatgtccaaaacacaacgcagatttccacgcaaaatcagatccctttctgtgttctctgtcttagtgatggtcccctccctcctcctacccaccctgttccaatgtcattc

SEQ ID NO: 699354 - DNA, 2859 bp, Homo sapiens
cagtttgttacagatattattcttattgatgctctaattgccccactgttggccagcgggagcctcttcaagttggtttgttggtccttttgacacagctccagtagtcgttgatggctccctggcttgctggtataatgagatgttttgagcacatcttagcatttcttgccctagagctagaattagccatttctctaaggaacgctggtttcttatggtgggaaggggtatacgggtactatcaaaggcaggtcggtgaccatttccttttaattctctgaaatctaaacagctgaaagtgccaaatgtggtgtctagcctggctccatggaatttttaacacggasttctcacacagcatatgatcattcctcaactcgccacttgatgtcactgcatagtcaaatgagcattcaaaattaccctgcagtggtttgtgttatttctgattctgttgaaagcaatgttaatgagatggtagaaggcaaatgtactacttcaaatgcaaaagtactctatcaaataatgcagtgagtgcattcaatgacaaaattaattctaaaatgaaagcctggcgtccttcattcagtcttccttctttatgaccttgtgaagagatgtttacaaagggattatacatttattagcatcgttaattaccggtgcttttagatgaatagaatgctgtgaaaaaaaatagcactatcagaatatgtttagtattcacaagaggcaatagaattatcctcacacttagaccagcagcaacattccagactactgtcctttctctatgcacttaagttagagtttggccttttcagctcatttcagcaccaggttctcaatagggaccaacagcaggagaagtttgatggtcttaatgaaactttcacggtttaaatgaaatgtctagatataaaggaaaaagttggaaaccaggagtttattttcagggtaacctatgctccaacccagttcatcattcagtggccataggacctttggtatattgccagcctcactgtacctcagtttcctcatctgtaagatgggcatgagtacctagcttttatggtgttgtgaggataaaatatgataatacctgtaaatacctactcaatcctagacatgaggtagacactcagtaaatgttagcctattctcctcctcctaacttcacctccctttgagaatttgatcaagttttattagaattaacaataaaaaagtcaaagttactgcagatacacttgggttagaacctcagctccaataattatgaattttgtaacttgcagcaagttgtttaatctttctgagcctcagttttctcatctataaaataagatttctaaggcatgattgcaaaggccggtttcattgtgcatttgaaagaactttgtcagctgtcagcacctaggttgctgatgtcatttttccctctaaatgaccaggccccaatggaggccattggcagcttgggaagttccgcctagagaaagagaagtttggaagaaagagctcaactgctaaactcttagggggttcccacattaccacttaggagatttacagaccagtgtttgcccatgttcctagataattcaaccctgtttgtaaccacaggaagttgggaccaagggttttcagtcttagcaccctgctttgccccctcactttgattaaaaggggccttgtccagccgttctattgaaaatagcaccctgtccttttctgtcctcttatccagctttattttgctttgcttcacttataatcaattgcattatatatctctatctgctcatttatttattgccctctccccactagaatgcaagcttcccaagggcagggcctttggctagaatataacaagtgttcaataagaagctgttgaattggccatcacagtggctgacatctgtaattctagtactttgggaggccaaggcaggtggatcacctgagcttaggagttcgagaccagcctgggcaacataatgagaccccgtctctaaataaaaaacaaaaacaagttggtgaatggatacatgaacaaaagagcttcatccttgcctctcctgtgcttctctctctctgctctgtcccataaagatcttggtccccatcatagcttcagctgtcaccagtgtgttggtaactttccagcctaacctctgtctgtctcccctgaatgtcttgccatcccatcagactcagcatggagcctgagacaatgtgatttacccactcgttcattccttcattcaaaagatagtggatttcttgttcacttactctgtaccaggaactattttaggtgtctaacagtaaaatggacgtcatgaggtaatgtccttgcccctggaagaattcaagtgccatctggatagatgggtgacacttatgccatgtgacatttgcactaggtgggaagtttggtttgatttgacaaacatttattaaatatctctaatatttaagccacctcatgtccaaaagccttgccaatgataagattctgtgtctcagcctaattaatcaccattttctctccccctgatagctgtcagttatcccgtaagtcttttataaactcccaccaggcaagggcttcaggctgtttctctgtagatgatgcccgggtcaacacgtctcatgctgccttctctcctaagcaccagccttatatttccagctcccaggaggcatcaccacctcaagtatctcccaaatcagcatgtccaaaacacaacgcagatttccacgcaaaatcagatccctttctgtgttctctgtcttagtgatggtcccctccctcctcctacccaccctgttccaatgtcattc

SEQ ID NO: 699355 - DNA, 1594 bp, Homo sapiens
tttaacatgctaaaatatcttcttttaactccaagcaaaattcagtattttggcaaagacttttgaagtacctaaagagggttacttggctcagaaaatgattatgttatatatagaaaactgcagaaacttcagggctctttgactatctaccagcaccactaaaagatactatattgttatatacataaactcctaatatcacactgaaacgatcagtctgaactttaattgctgttatggtcaacaagttaatacctagttattctaagtacttcaaatgcctaacctggactggaaaatcattaagaacatcattacatcttgagctgtcttctaaaccttttatttcctttagtatgatattacaatgtgtaaacattgtaggtactaaacaaatatttgttgtcttactgctatttaaagcaaaggtcccaaacccctgggcaccatacaggtccatggcctgttaggaaccaggccacagcaagaggtgagccccgggcaagccagcattgccacctgagctccaccttctgtcagattagattctcacaggagcgtgaaccctattgtgaactgtgccagcaagagatttagcttgcacactccttatgagaatctaatgcctgatgatctgaggtggaacagtttcatcccaaaaccattccccacccaccccctatccatggaaaaactgtcttccatgaaaccggtccctggtgccaaaaagtttgaggaccactgattgaaagaaattaccccttccttagatttataaatcaataaaccaatgaagaaatgaagaaaggataaagaaatttaaaaagaacaaaggcaaagtggaacaagagagaaaaaatatggtaaatttcataaagttcatggagaaatcttcatgaagaaagtagttaattattttaaagagaaaaaatgaactaatgaagaatagagagcatcctattcattaaaaaaagcaagactgggccaggtgtggtggctcacacctgtaataccagcactttgggaggccgaggcgggcggatcacgaggtcaggagttcgagaccagcctgaccaacayagtgaaacccagtctctactaaaaaaaataaataaatccaaagattagctgggcgtggtggcgtgtgcctgtaatcccaactactcaggaggctgaggcaggagaatcacttgaacccaagaggcggagggtgcagtgagccgagatcgcaccactgcactccagcctgggtgacagagtgagaccccatctcaaaaaaagaaagcaagactgccctagttttgttcaatatttatttgacttaatatctaatgaatattattgttctctcctgatttcatctaattcatattgacaaggtaaacaaataagtccctctgtagataaaaatatggatgtcttgtgatgccatagtttataaatcgcattaaaacgttctattcaggaactgagccaatatattttattaacaagcaaagtgagacagaaggaatggttatgcaatcttcccaggcagaattcgatactaaatgtgtttgatcttgggtattctttttggcctttctttaag

SEQ ID NO: 699356 - DNA, 1594 bp, Homo sapiens
tttaacatgctaaaatatcttcttttaactccaagcaaaattcagtattttggcaaagacttttgaagtacctaaagagggttacttggctcagaaaatgattatgttatatatagaaaactgcagaaacttcagggctctttgactatctaccagcaccactaaaagatactatattgttatatacataaactcctaatatcacactgaaacgatcagtctgaactttaattgctgttatggtcaacaagttaatacctagttattctaagtacttcaaatgcctaacctggactggaaaatcattaagaacatcattacatcttgagctgtcttctaaaccttttatttcctttagtatgatattacaatgtgtaaacattgtaggtactaaacaaatatttgttgtcttactgctatttaaagcaaaggtcccaaacccctgggcaccatacaggtccatggcctgttaggaaccaggccacagcaagaggtgagccccgggcaagccagcattgccacctgagctccaccttctgtcagattagattctcacaggagcgtgaaccctattgtgaactgtgccagcaagagatttagcttgcacactccttatgagaatctaatgcctgatgatctgaggtggaacagtttcatcccaaaaccattccccacccaccccctatccatggaaaaactgtcttccatgaaaccggtccctggtgccaaaaagtttgaggaccactgattgaaagaaattaccccttccttagatttataaatcaataaaccaatgaagaaatgaagaaaggataaagaaatttaaaaagaacaaaggcaaagtggaacaagagagaaaaaatatggtaaatttcataaagttcatggagaaatcttcatgaagaaagtagttaattattttaaagagaaaaaatgaactaatgaagaatagagagcatcctattcattaaaaaaagcaagactgggccaggtgtggtggctcacacctgtaataccagcactttgggaggccgaggcgggcggatcacgaggtcaggagttcgagaccagcctgaccaacatagtgaaacccagtctctactaaaaaaaataaataaatccaaagattagctgggcgtggtggcgtgtgcctgtaatcccaactactcaggaggctgaggcaggagaatcacttgaacccaagaggcggagggtgcagtgagccgagatcgcaccactgcactccagcctgggtgacagagtgagacyccatctcaaaaaaagaaagcaagactgccctagttttgttcaatatttatttgacttaatatctaatgaatattattgttctctcctgatttcatctaattcatattgacaaggtaaacaaataagtccctctgtagataaaaatatggatgtcttgtgatgccatagtttataaatcgcattaaaacgttctattcaggaactgagccaatatattttattaacaagcaaagtgagacagaaggaatggttatgcaatcttcccaggcagaattcgatactaaatgtgtttgatcttgggtattctttttggcctttctttaag

SEQ ID NO: 699357 - DNA, 1594 bp, Homo sapiens
tttaacatgctaaaatatcttcttttaactccaagcaaaattcagtattttggcaaagacttttgaagtacctaaagagggttacttggctcagaaaatgattatgttatatatagaaaactgcagaaacttcagggctctttgactatctaccagcaccactaaaagatactatattgttatatacataaactcctaatatcacactgaaacgatcagtctgaactttaattgctgttatggtcaacaagttaatacctagttattctaagtacttcaaatgcctaacctggactggaaaatcattaagaacatcattacatcttgagctgtcttctaaaccttttatttcctttagtatgatattacaatgtgtaaacattgtaggtactaaacaaatatttgttgtcttactgctatttaaagcaaaggtcccaaacccctgggcaccatacaggtccatggcctgttaggaaccaggccacagcaagaggtgagccccgggcaagccagcattgccacctgagctccaccttctgtcagattagattctcacaggagcgtgaaccctattgtgaactgtgccagcaagagatttagcttgcacactccttatgagaatctaatgcctgatgatctgaggtggaacagtttcatcccaaaaccattccccacccaccccctatccatggaaaaactgtcttccatgaaaccggtccctggtgccaaaaagtttgaggaccactgattgaaagaaattaccccttccttagatttataaatcaataaaccaatgaagaaatgaagaaaggataaagaaatttaaaaagaacaaaggcaaagtggaacaagagagaaaaaatatggtaaatttcataaagttcatggagaaatcttcatgaagaaagtagttaattattttaaagagaaaaaatgaactaatgaagaatagagagcatcctattcattaaaaaaagcaagactgggccaggtgtggtggctcacacctgtaataccagcactttgggaggccgaggcgggcggatcacgaggtcaggagttcgagaccagcctgaccaacatagtgaaacccagtctctactaaaaaaaataaataaatccaaagattagctgggcgtggtggcgtgtgcctgtaatcccaactactcaggaggctgaggcaggagaatcacttgaacccaagaggcggagggtgcagtgagccgagatcgcaccactgcactccagcctgggtgacagagtgagaccccatctcaaaaaaagaaagcaagactrccctagttttgttcaatatttatttgacttaatatctaatgaatattattgttctctcctgatttcatctaattcatattgacaaggtaaacaaataagtccctctgtagataaaaatatggatgtcttgtgatgccatagtttataaatcgcattaaaacgttctattcaggaactgagccaatatattttattaacaagcaaagtgagacagaaggaatggttatgcaatcttcccaggcagaattcgatactaaatgtgtttgatcttgggtattctttttggcctttctttaag

SEQ ID NO: 699358 - DNA, 1594 bp, Homo sapiens
tttaacatgctaaaatatcttcttttaactccaagcaaaattcagtattttggcaaagacttttgaagtacctaaagagggttacttggctcagaaaatgattatgttatatatagaaaactgcagaaacttcagggctctttgactatctaccagcaccactaaaagatactatattgttatatacataaactcctaatatcacactgaaacgatcagtctgaactttaattgctgttatggtcaacaagttaatacctagttattctaagtacttcaaatgcctaacctggactggaaaatcattaagaacatcattacatcttgagctgtcttctaaaccttttatttcctttagtatgatattacaatgtgtaaacattgtaggtactaaacaaatatttgttgtcttactgctatttaaagcaaaggtcccaaacccctgggcaccatacaggtccatggcctgttaggaaccaggccacagcaagaggtgagccccgggcaagccagcattgccacctgagctccaccttctgtcagattagattctcacaggagcgtgaaccctattgtgaactgtgccagcaagagatttagcttgcacactccttatgagaatctaatgcctgatgatctgaggtggaacagtttcatcccaaaaccattccccacccaccccctatccatggaaaaactgtcttccatgaaaccggtccctggtgccaaaaagtttgaggaccactgattgaaagaaattaccccttccttagatttataaatcaataaaccaatgaagaaatgaagaaaggataaagaaatttaaaaagaacaaaggcaaagtggaacaagagagaaaaaatatggtaaatttcataaagttcatggagaaatcttcatgaagaaagtagttaattattttaaagagaaaaaatgaactaatgaagaatagagagcatcctattcattaaaaaaagcaagactgggccaggtgtggtggctcacacctgtaataccagcactttgggaggccgaggcgggcggatcacgaggtcaggagttcgagaccagcctgaccaacatagtgaaacccagtctctactaaaaaaaataaataaatccaaagattagctgggcgtggtggcgtgtgcctgtaatcccaactactcaggaggctgaggcaggagaatcacttgaacccaagaggcggagggtgcagtgagccgagatcgcaccactgcactccagcctgggtgacagagtgagaccccatctcaaaaaaagaaagcaagactgccctagttttgttcaatatttatttgacttaatatctaatgaatattattgttctctcctgatttcatctaattcatattgacaaggtaaacaaataagtccctctgtagataaaaatatggatgtcttgtgatgccatagtttataaatcrcattaaaacgttctattcaggaactgagccaatatattttattaacaagcaaagtgagacagaaggaatggttatgcaatcttcccaggcagaattcgatactaaatgtgtttgatcttgggtattctttttggcctttctttaag

SEQ ID NO: 699359 - DNA, 1715 bp, Homo sapiens
aatcagtgctcatatctgaaaataggattgatgactttcattacagtaattcagagcaagcctcaaggaaccagacatacactctcaacggctgcaagaactctccctcagctattccagcacttcatgccatcggcagcttccagctactcaattttgtttggtcaataattgagaacagcagacaatcattattagcaaataagttgatgtccaaaacttgtatttgctcatcttttcaaatcatttttttcctaactatgcattatttaacagaagcaactgagtcccacttggacaaatttccgacattatttatcaagaagttttggctttcaatatcacagatgtatcctgcaccatataaacagtgcttcagaatacaaatgtattatatcaaatgttccccgctaagtaagcctcaggagctgcaacgcaccatgcgaagctgatgacatccttcttcctccccaacttgtgttttacgtgttctccacctaatttctgattggrcagcacaaacatctaacaaatccaattcacaaatctggaagcattgctgatttctctttatgcttaagttactgcacccaatcaggtaagtcctatacattttatttttctaaattaaaaaaaaaaccctcttacaccatttcccatacatttgcatttccattacttatttcagatttttatttctcattaagtaaattatctcctggagttcaaaattgtatcaactttaccttatattttctcctgacaaaataataattaaaaaatataaaataaattatgttgcatcctagcaaataataatataaaagaataattcgtttttgatatatggtaaagggcagcaatcaaattgcatgcagtcattttctgcattttttttggcttcacttattatttatacagctccactattctgattatacaaaagtaatttcacttcttgagtaaacactgctctttcagatctattcttttcacatattatatacgattttctgtaaacaattaaaacatatatacataatagcattatcagtattaatagtatttattgttagatgattataaattcatatgtgttttctatttgggttgtttatttttctgttaagttttcagaagaacttaatagttctttgccagatatgtgctttcatactccaaatattgtattttcattccattaccatggcaaaacttttgaattttaatgaaatttactttgtcttttgcttttcttttatctattgtctttttggtgtcagatctaagaactacttacttagctctaggacctgaatattttctatgttttatttttttcctgaaagtttccatagttttatattttaaatttaaatttatgatccatttttagttaacttttaaggagatgtgagactttgataactttgataataaatgtctgctcgttcaatcagtatttgttgaaaacaccatatttcctcagttgaattgcttttgcactgagtccaacatctgtttggtacatttttgtaggtttatttctagttctctgttcttttccattgaaatacgtgtttatcccttgatcgatacaacattaccttgattgctatagattataatatatattatatcatatatattataatatatattataatagattataatacatattatatcacatatattataatatatattataat

SEQ ID NO: 699360 - DNA, 643 bp, Homo sapiens
tttatttttgtagtttcttgcatcttaaactgtttctagctcttttccaattaagtagtttctcatcttgattttagcatgascatatatgaatgtctcttccaatgattccttcactgtcagatgcatttcttatgttaataccgttaaaatcgtaattaccacaggatgtcgtactacattcatccattctctctgctagtctgtgtatctggaattgttgtaataactttctctatcctggttttttttgttgttttttttttttttctgctactaaaatttctaaatttccgacaagacaaactggcattccagattgcctgttttagctctttgaatttccgacatttacacagccattgcacattctcactttgcttttctgacaattttctgccctcgtattaaatataaaaagttgaatattgcaaaaaacttttaaggtcacctgaactaattgcctagttttcaaataggaaggtaagattaggaagtggcttaacccaagtaatacacaaaagaatgaacaagacatcggtaggttctaagtttacagaggcatgctttataatttgataattcagtcgctttgtttatgcaaaacggcattaaaatatttgatgtggatcatctttaccaa

SEQ ID NO: 699361 - DNA, 643 bp, Homo sapiens
tttatttttgtagtttcttgcatcttaaactgtttctagctcttttccaattaagtagtttctcatcttgattttagcatgagcatatatgaatgtctcttccaatgattccttcactgtcagatgcatttcttatgttaataccgttaaaatcgtaattaccacaggatgtcgtactacattcatccattctctctgctagtctgtgtatctggaattgttgtaatmactttctctatcctggttttttttgttgttttttttttttttctgctactaaaatttctaaatttccgacaagacaaactggcattccagattgcctgttttagctctttgaatttccgacatttacacagccattgcacattctcactttgcttttctgacaattttctgccctcgtattaaatataaaaagttgaatattgcaaaaaacttttaaggtcacctgaactaattgcctagttttcaaataggaaggtaagattaggaagtggcttaacccaagtaatacacaaaagaatgaacaagacatcggtaggttctaagtttacagaggcatgctttataatttgataattcagtcgctttgtttatgcaaaacggcattaaaatatttgatgtggatcatctttaccaa

SEQ ID NO: 699362 - DNA, 643 bp, Homo sapiens
tttatttttgtagtttcttgcatcttaaactgtttctagctcttttccaattaagtagtttctcatcttgattttagcatgagcatatatgaatgtctcttccaatgattccttcactgtcagatgcatttcttatgttaataccgttaaaatcgtaattaccacaggatgtcgtactacattcatccattctctctgctagtctgtgtatctggaattgttgtaataactttctctatcctggttttttttgttgttttttttttttttctgctactaaaatttctaaatttccgacaagacaaactggcattccagattgcctgttttagctctttgaatttccgacatttacacagccattgcacattctcactttgcttttctgacaattttctgccctcgtattaaatataaaaarttgaatattgcaaaaaacttttaaggtcacctgaactaattgcctagttttcaaataggaaggtaagattaggaagtggcttaacccaagtaatacacaaaagaatgaacaagacatcggtaggttctaagtttacagaggcatgctttataatttgataattcagtcgctttgtttatgcaaaacggcattaaaatatttgatgtggatcatctttaccaa

SEQ ID NO: 699363 - DNA, 602 bp, Homo sapiens
tactgtttagaaatcaacagttttagaattttgtacttagaagtcaataattttagaattcagcctgtcatttattttctgtgcaggacacacatttgcttacctcctagtacttggaatgaatcagtccctccatttatatatgtatttgtaattagaagtttcaaaataaactgaagtaacatggagttggtacagtagggatgtgtgaaccaacacgaatatatagtcctagggtaagaactccaaacatttgataaatacataacattttgttttattaataacttgaggccaggcatggtggctcgcacctgtaattccagcaccttgggaggtggaggtgggtggatcacttgargccaggagttcaagaccactctggccaacatggtgaaaccccgtctctactaaaaatacaaaaattagccaggcatggtggcccgtgtctgtaatctcagctactcgggaggctgaggcaggagaatcgcttgaatctggggggtcggaggttgctgaaattgtaccactgcactccagtctgggtaacagagcaaaacttggactcagaaacaaacagttgacgtgttcatagtttatgg

SEQ ID NO: 699364 - DNA, 1142 bp, Homo sapiens
cctactgggcttgcaaaatctcagatcgctggcaccaactcattatgtctcatcaagtattctgaaagagacctaatgatttcttatttctaacaagttcccaggtgatgatgatgctgctgatccagaaacctggatgtccaaactaggcaacatatagactaatcgtaatgctaagcaccagtgcaaaatattatttgaatgttgtcyatttgattctgcttgtgtttcccttatttaataaatgacacagctttggttaaattaagtatttgtttataatttaaaaaaaaaactttccacgctaagactgcagagcttatttaacttggtaaggggtatgtattaccaatttgctgtaaatatatatttagtaatagaacagataaaattctcatttaattgaaagattagcatctatttgttgtattagggaaataagaaaatgtaaaaaactagaaaaagtcatgagatgtatgtaatggaaaataataacaaatctgttttacctataaatgatacatatatcttcccagaacatccaagataatcaacaggagaaggattagaacgaacatgagatttgaattgaggtactcacatttaaaaaaaagctgaagacattcatgacttcttaaaaataagtagtacctaatttggaaatgtgatagaaaaatattttattcataaccaccccaaacatgtaacattactgaaaatcataagtacctgatgaaaggaaggaacaggcatatcaagttgttggaagagaaaaggaattgcaaagacatcaattttttatgtatcaatctagattattgatgtaatctcaattaaaaacacaacagagaattatggagcttactaacttgattgaaaataatccatagcaaaaagatatgttgttgagtttgtttggttcacagaattaatagtaattatatatcttagcactggtcccatcttcacaaatttcaaatataatagcaaacccttaaagtcaaatataacaatatcactttacaaaatgctgatgtgctaattcaacacaattactcaaacaaaagcatctccccagtgagatatcacctctcacctaggatgggtattaccaacaagataaaagaaaacaaatgttggca

SEQ ID NO: 699365 - DNA, 1142 bp, Homo sapiens
cctactgggcttgcaaaatctcagatcgctggcaccaactcattatgtctcatcaagtattctgaaagagacctaatgatttcttatttctaacaagttcccaggtgatgatgatgctgctgatccagaaacctggatgtccaaactaggcaacatatagactaatcgtaatgctaagcaccagtgcaaaatattatttgaatgttgtctatttgattctgcttgtgtttcccttatttaataaatgacacagctttggttaaattaagtatttgtttataatttaaaaaaaaaactttccacgctaagactgcagagcttatttaacttggtaaggggtatgtattaccaatttgctgtaaatatatatttagtaatagaacagataaaattctcatttaattgaaagattagcatctatttgttgtattagggaaataagaaaatgtaaaaaactagaaaaagtcatgagatgtatgtaatggaaaataataacaaatctgttttacctataaatgatacatatatcttcccagaacatccaagataatcaacaggagaaggattagaacgaacatgagatttgaattgaggtactcacatttaaaaaaaagctgaagacattcatgacttcttaaaaataagtagtacctaatttggaaatgtgatagaaaaatattttattcataaccaccccaaacatgtaacattactgaaaatcataagtacctgatgaaaggaaggaacaggcatatcaagttgttggaagagaaaaggaattgcaaagacatcaattttttatgtatcaatctagawtattgatgtaatctcaattaaaaacacaacagagaattatggagcttactaacttgattgaaaataatccatagcaaaaagatatgttgttgagtttgtttggttcacagaattaatagtaattatatatcttagcactggtcccatcttcacaaatttcaaatataatagcaaacccttaaagtcaaatataacaatatcactttacaaaatgctgatgtgctaattcaacacaattactcaaacaaaagcatctccccagtgagatatcacctctcacctaggatgggtattaccaacaagataaaagaaaacaaatgttggca

SEQ ID NO: 699366 - DNA, 1062 bp, Homo sapiens
caaaatatcttgttgactgtactcacccttcttcttgtgatcttttgatctgataactaaggcagatattaggtgactgacgagtggatatcatatacagggtaggtaccctggacaagggatgattcactttccatgtgggacgacatgatatttcatcatgctactcagaacttaaaatatatggattggctatttctggaattttccatatattatttttagaccatgattgaccatggctaagtgaaactgtggaaagaatagtagataaggggagactagtgtacctatattgtagagacaagagaaaatgataggttattcttaccctaacataacctcaatgtctgtcttagcttctagtttgtagaaatggaaaaatatagaaacatacagaagtattattaagatttttaattgtagagtacaactgttagttactagaattcacaacatctagggtgtttgagtaaaattttaattgttctgactcagagttaacataattaaatctttacaagagtgccagttgtggctgaagcctgtaaaccccacaatttgggacactgaggcaggaggatcacttgaggccaggagtttgaaccagcctgagtaggacccagcctgagaccacatctctacaaaaatcttaaaaattagccaggtgtggtggcatatgcctgtagtcctagcgactccggatgctaaggcaggaggatcactgagtccaggaggcagaggctgcagtgaaccatgattatgccactgcactctagcctaggtgacagagcgagactctgtttaaaaaaaaagaaagataaaaaggaaaaagaaaaatattttacaaaattgactagtaaataaaatgttgctagaarattattgtattgaccttaattgttctttttgtgattattttattggaaaaactaaacttgcaaaatatttttaaacttacttgacgttgtaccaaacatattggttttgtaaatagaagataattcccaatcaaactttcctgagggttttttgattgactatgttatagaaatatttgat

SEQ ID NO: 699367 - DNA, 612 bp, Homo sapiens
tgtcctaatttgtttgatcattatttcatagatgcaaaataagttttactctactaataaagcaataataattaaaatttatctaagttgtagctatctcaaacaatactgctattaagtttccttgaattatgcagataaagatatgtcttcccagaggtattcatttgcctattcttggaaaaataccctcttcaaaattcaattgtgtagtgtcaaatgcttatctaaaaatcttcttagtttgaggaaatttcacttcttctgaaatgcctttcctgaccactgttcatctgttacttggttacttgtcccttaatactctctcccagcacctagtgcttcttcaagtgtagggtccattaaacgraagttacttttctcattgctctaattcctaaggacagaaacttggttcatatttctcccatgacctagcgttgcgccttgttcaagtaggcattatctagattcagtattgtcaagtgaatgaagtgacatcatgtcaaataaattagaaaagagcaaaaaataattatatgagcataattataaattttcttaaacctgaaattataaacatctgagctaaaatgttgataataagagagg

SEQ ID NO: 699368 - DNA, 612 bp, Homo sapiens
tgtcctaatttgtttgatcattatttcatagatgcaaaataagttttactctactaataaagcaataataattaaaatttatctaagttgtagctatctcaaacaatactgctattaagtttccttgaattatgcagataaagatatgtcttcccagaggtattcatttgcctattcttggaaaaataccctcttcaaaattcaattgtgtagtgtcaaatgcttatctaaaaatcttcttagtttgaggaaatttcacttcttctgaaatgcctttcctgaccactgttcatctgttacttggttacttgtcccttaatactctctcccagcacctagtgcttcttcaagtgtagggtccattaaacgaaagttacttttctcattgctctaattcctaaggacagaaacttggttcatatttctcccatgacctagcgttgcrccttgttcaagtaggcattatctagattcagtattgtcaagtgaatgaagtgacatcatgtcaaataaattagaaaagagcaaaaaataattatatgagcataattataaattttcttaaacctgaaattataaacatctgagctaaaatgttgataataagagagg

SEQ ID NO: 699369 - DNA, 612 bp, Homo sapiens
tgtcctaatttgtttgatcattatttcatagatgcaaaataagttttactctactaataaagcaataataattaaaatttatctaagttgtagctatctcaaacaatactgctattaagtttccttgaattatgcagataaagatatgtcttcccagaggtattcatttgcctattcttggaaaaataccctcttcaaaattcaattgtgtagtgtcaaatgcttatctaaaaatcttcttagtttgaggaaatttcacttcttctgaaatgcctttcctgaccactgttcatctgttacttggttacttgtcccttaatactctctcccagcacctagtgcttcttcaagtgtagggtccattaaacgaaagttacttttctcattgctctaattcctaaggacagaaacttggttcatatttctcccatgacctagcgttgcgccttgytcaagtaggcattatctagattcagtattgtcaagtgaatgaagtgacatcatgtcaaataaattagaaaagagcaaaaaataattatatgagcataattataaattttcttaaacctgaaattataaacatctgagctaaaatgttgataataagagagg

SEQ ID NO: 699370 - DNA, 2287 bp, Homo sapiens
tagctgggcgtggtggtgggcgcctgtagtcccagctactcgggacgctaaggcaggagaatggcatgaacccaggaggcggatgttacagtgagccragatcatgccactgcactccagtccgggcaacagtgcgagactccgtctcaaaaaaagaaaaaaaaatgtggtttcctcatacgtaacaagcaaaattacagctcaaatagtatgtggcatgtgaattgtctctggaaccaggtggcagcctgtttgctgaagagtgaactggtagttatcagggaaaacatcttgcattgtgccaatgcaatgatccaggtagttgaaaagtatggggcagcaatgcataaaaggaggtataattgatcagtaattactaaactgtgtgttagtgctcttaatggagggataatacttttttaaattttgaggctggatctcaatcctgtcccccaggctggagtgcagtgatgtgattatggctcactgcagccttgacttcccaggctcaggtgatctttccatttcagcctccctagtagccaggactacaggctcaaaccaccacaagtggctaattttttgtatttttagtagagacggggttttggtatgttacccaggcttgtctgcaactcaagccatctgctgccttggccttccaaagtactgggattacaggtgtgaaccaccatgctcagcaggaataatactattttacaggaaacgaatacagataatcttatttaaactctccctttgttataaaaagcataaatactagtataatatgtttcaattattgatactaattaagtggtcatattagtgggaattttctgtagaactgtcatgccagagacaattttattgtcattagactttcctgaagaccttacttaaaattcagaagactcaatcagatattcttatttagtagatcctgggacaaatcactatttatgtaggcattccagagtagtttgtccttagactgttctagaaaccaacacaagacttttcaaagagccttaaagaaagaatatctaaatgtaataataaatgctgcactcagtaatatatcagaatataagtaatatttatgttaaagttatttttgtgtgaaatgtggaactctgacacctctttatttttcagagcaatgagattagggtaattcaaattttggatggataacccaagcctcaaataatacttttacctcactataagttagttcagttccaataaagctttaaagagtccagtagctgccctaatctccgatatatttagtagatgtcaaattagtaaaatttattttaatgcttttggtgaggggccagtctacgtaactcacccagagaactgacaggcccatatacgtaaatgaaacatgttctaactttgctcttgaagagtgaaaaatagctcaagataccagattaattttgccttgctcacagtatgctgccagaaaggatgaatggaaagtcaattgtgccattccaaactacatgtttttgctaatgaaaggctcattaattaaataaaacaaggagggatttttttaaaaaaagattttgccttgcatacccctattcctaaacagatctactaagaaagatggtaatttgcttgtcaggttcctataaggagagacagagtgaaaagctttactagaacttagcaattttttatagtttcttacattttcttggttcaattataaaatcctcaaagaccattgtattttaagatggagtattttgtgatgcacttcttagctagtacatttaggttatggccactcctttgtatgttactggctagagggtaatatttgtttctcttttctagatggggcttttacaatacatttcttattgaacacacacacgcagaatatcgttcagggactagtctcctgtgctactcttagtgacaagaaagcattttattctcacaggagtctgcaagctagtactccccacgcctcttcatccagagtaaaatcaatcaagacttagacttcacttttttttttccagaaatccagaattttcagtgaaatagacaaatattttttcagaggtaatggcaatccaagatgtgttgaccaattttggaaaagttgaattcacacaaatcaccaaaggtggtgagagatcaggaaacaaatacaagtattttatgtactaagaccgcattgattgtaagatgtaccattattctgtgcacctcttagaaagacaagttaagctgtgacacaatgctttattgatag

SEQ ID NO: 699371 - DNA, 2287 bp, Homo sapiens
tagctgggcgtggtggtgggcgcctgtagtcccagctactcgggacgctaaggcaggagaatggcatgaacccaggaggcggatgttacagtgagccgagatcatgccactgcactccagtccgggcaacagtgcgagactccgtctcaaaaaaagaaaaaaaaatgtggtttcctcatacgtaacaagcaaaattacagctcaaatwgtatgtggcatgtgaattgtctctggaaccaggtggcagcctgtttgctgaagagtgaactggtagttatcagggaaaacatcttgcattgtgccaatgcaatgatccaggtagttgaaaagtatggggcagcaatgcataaaaggaggtataattgatcagtaattactaaactgtgtgttagtgctcttaatggagggataatacttttttaaattttgaggctggatctcaatcctgtcccccaggctggagtgcagtgatgtgattatggctcactgcagccttgacttcccaggctcaggtgatctttccatttcagcctccctagtagccaggactacaggctcaaaccaccacaagtggctaattttttgtatttttagtagagacggggttttggtatgttacccaggcttgtctgcaactcaagccatctgctgccttggccttccaaagtactgggattacaggtgtgaaccaccatgctcagcaggaataatactattttacaggaaacgaatacagataatcttatttaaactctccctttgttataaaaagcataaatactagtataatatgtttcaattattgatactaattaagtggtcatattagtgggaattttctgtagaactgtcatgccagagacaattttattgtcattagactttcctgaagaccttacttaaaattcagaagactcaatcagatattcttatttagtagatcctgggacaaatcactatttatgtaggcattccagagtagtttgtccttagactgttctagaaaccaacacaagacttttcaaagagccttaaagaaagaatatctaaatgtaataataaatgctgcactcagtaatatatcagaatataagtaatatttatgttaaagttatttttgtgtgaaatgtggaactctgacacctctttatttttcagagcaatgagattagggtaattcaaattttggatggataacccaagcctcaaataatacttttacctcactataagttagttcagttccaataaagctttaaagagtccagtagctgccctaatctccgatatatttagtagatgtcaaattagtaaaatttattttaatgcttttggtgaggggccagtctacgtaactcacccagagaactgacaggcccatatacgtaaatgaaacatgttctaactttgctcttgaagagtgaaaaatagctcaagataccagattaattttgccttgctcacagtatgctgccagaaaggatgaatggaaagtcaattgtgccattccaaactacatgtttttgctaatgaaaggctcattaattaaataaaacaaggagggatttttttaaaaaaagattttgccttgcatacccctattcctaaacagatctactaagaaagatggtaatttgcttgtcaggttcctataaggagagacagagtgaaaagctttactagaacttagcaattttttatagtttcttacattttcttggttcaattataaaatcctcaaagaccattgtattttaagatggagtattttgtgatgcacttcttagctagtacatttaggttatggccactcctttgtatgttactggctagagggtaatatttgtttctcttttctagatggggcttttacaatacatttcttattgaacacacacacgcagaatatcgttcagggactagtctcctgtgctactcttagtgacaagaaagcattttattctcacaggagtctgcaagctagtactccccacgcctcttcatccagagtaaaatcaatcaagacttagacttcacttttttttttccagaaatccagaattttcagtgaaatagacaaatattttttcagaggtaatggcaatccaagatgtgttgaccaattttggaaaagttgaattcacacaaatcaccaaaggtggtgagagatcaggaaacaaatacaagtattttatgtactaagaccgcattgattgtaagatgtaccattattctgtgcacctcttagaaagacaagttaagctgtgacacaatgctttattgatag

SEQ ID NO: 699372 - DNA, 2287 bp, Homo sapiens
tagctgggcgtggtggtgggcgcctgtagtcccagctactcgggacgctaaggcaggagaatggcatgaacccaggaggcggatgttacagtgagccgagatcatgccactgcactccagtccgggcaacagtgcgagactccgtctcaaaaaaagaaaaaaaaatgtggtttcctcatacgtaacaagcaaaattacagctcaaatagtatgtggcatgtgaattgtctctggaaccaggtggcagcctgtttgctgaagagtgaactggtagttatcmgggaaaacatcttgcattgtgccaatgcaatgatccaggtagttgaaaagtatggggcagcaatgcataaaaggaggtataattgatcagtaattactaaactgtgtgttagtgctcttaatggagggataatacttttttaaattttgaggctggatctcaatcctgtcccccaggctggagtgcagtgatgtgattatggctcactgcagccttgacttcccaggctcaggtgatctttccatttcagcctccctagtagccaggactacaggctcaaaccaccacaagtggctaattttttgtatttttagtagagacggggttttggtatgttacccaggcttgtctgcaactcaagccatctgctgccttggccttccaaagtactgggattacaggtgtgaaccaccatgctcagcaggaataatactattttacaggaaacgaatacagataatcttatttaaactctccctttgttataaaaagcataaatactagtataatatgtttcaattattgatactaattaagtggtcatattagtgggaattttctgtagaactgtcatgccagagacaattttattgtcattagactttcctgaagaccttacttaaaattcagaagactcaatcagatattcttatttagtagatcctgggacaaatcactatttatgtaggcattccagagtagtttgtccttagactgttctagaaaccaacacaagacttttcaaagagccttaaagaaagaatatctaaatgtaataataaatgctgcactcagtaatatatcagaatataagtaatatttatgttaaagttatttttgtgtgaaatgtggaactctgacacctctttatttttcagagcaatgagattagggtaattcaaattttggatggataacccaagcctcaaataatacttttacctcactataagttagttcagttccaataaagctttaaagagtccagtagctgccctaatctccgatatatttagtagatgtcaaattagtaaaatttattttaatgcttttggtgaggggccagtctacgtaactcacccagagaactgacaggcccatatacgtaaatgaaacatgttctaactttgctcttgaagagtgaaaaatagctcaagataccagattaattttgccttgctcacagtatgctgccagaaaggatgaatggaaagtcaattgtgccattccaaactacatgtttttgctaatgaaaggctcattaattaaataaaacaaggagggatttttttaaaaaaagattttgccttgcatacccctattcctaaacagatctactaagaaagatggtaatttgcttgtcaggttcctataaggagagacagagtgaaaagctttactagaacttagcaattttttatagtttcttacattttcttggttcaattataaaatcctcaaagaccattgtattttaagatggagtattttgtgatgcacttcttagctagtacatttaggttatggccactcctttgtatgttactggctagagggtaatatttgtttctcttttctagatggggcttttacaatacatttcttattgaacacacacacgcagaatatcgttcagggactagtctcctgtgctactcttagtgacaagaaagcattttattctcacaggagtctgcaagctagtactccccacgcctcttcatccagagtaaaatcaatcaagacttagacttcacttttttttttccagaaatccagaattttcagtgaaatagacaaatattttttcagaggtaatggcaatccaagatgtgttgaccaattttggaaaagttgaattcacacaaatcaccaaaggtggtgagagatcaggaaacaaatacaagtattttatgtactaagaccgcattgattgtaagatgtaccattattctgtgcacctcttagaaagacaagttaagctgtgacacaatgctttattgatag

SEQ ID NO: 699373 - DNA, 644 bp, Homo sapiens
acacagctcctgggcagcagctgagagaagctgaggtataggattaatcctatacctcacagcacagcacatccctagaaatcagctattcaaggtacccaaccctctttggatgaatgactgaatgaagtggatttaggaaaaagtccttttttttaatttgtctaacaagttattgatgatttttcatctgatatatgcatgtatcacacttcttaccagtcagatcacagggattgccatgacaagctgtgtattccctgaattctattaaaccaagaaagcaaaaccactgtggcagatcagcataaaaataccctaagagttgagtttttactgaatatttcagtaacaactaaaatttctatttccatgataatttataagcaatatagctccttactttgataccactgccaacttcyattcttatcactttggagtaatgtaatcactgtgtctcattcatgattttaaatgaaatactgctgaatgttttctcatataacatgctatttgccatataatttttataaataattttactaaaatttagagtttgttaagaatttttaaaaattataaatttttaaatttataatttaaaaattataagtgttgaatttgatcaaatactttctttg

SEQ ID NO: 699374 - DNA, 609 bp, Homo sapiens
gcttgctcactgatgtgaatattagggcattgtttgggggaagacaatgctctttttcattaggataatattatttacagcaatatggaagtttactaaaccttaaagcacaaagaacagctttcaatgaccatcctctgtctttccagaatgtttctttgtggattgaaaagtgttgactcattttccttagtaaagttaatgataatttacaagatrggtaactaaaatcagatcctagcactttccaaggaagtacatggaaaactcctattttttgttaataattgactttttttttttttttttttttagacagattctccctctgtcacccaggctgcttactgcgacctctgcttactgcgacctccgcctcccacctcccgggtccaagtgattcctgtgcctcagcctcccaagtatccggggttacaggctcacaacactgcaccagactaatttttgtattttcattagagacggggttttgccatgttgcccaggatggtcttgaactcctggcctcaaataatctgcctacctagtcttcccaaagttgtgggattacaaacataagccatcagtgcaggctagcttctaattttc

SEQ ID NO: 699375 - DNA, 2235 bp, Homo sapiens
caaaacaactttccctaggatcctagaggatacaaatttgtagcaaattccagaaggcagaaattacaggacattcttccaatacagcaccacagcaacttctctgttatttggaaaaccgtggaattggtctttacagtaaggttaggacctcggcactgtgggagaggagtgtctttctgggttgctctgtctcaaccctggaatagcagcagtttcttacatccgctattcttatatttcttagggttctgtttttactatccaatcttttttgttccattccccttttttagtttaaaattcttttattaaactccctccccctgttagaattactgtgtgactcatctctcctgctaggactaagactgacacagcataaatttcacccaggatctggactaacacacaacacacttcaaataatgaatagggcttgactcttcttatcatgccactgtggtagagcaggggacttttgtctgcactcgctgttttttctccctcaaatattttgaaccagctgacccctgtgcctgggagttctttgaaactcaatgagcttgtcaagtcatattccaaagtaaagccagttcatttcatctaagatttttgataacgccattttaaatagcattttcctaattaggtaaagcaaacatttactcttataggtaaagcaaacatttacccttatagtttatccctaattaggtaaagcaaacatttactcttatagtttatccctacagataataataatatccctttaataggcagggaatctgatatgaaagaatattaatttaacatgcattgtcatctttgctgaatttttatctaggtttttaaatttttggtacaattaaaaataccccatacaacttaaatttgaatgcttggctaccatgttcggctaccatgttccttgaaagaagattatggatcagagttctaatattcagaacttattactttgctattatttcctttgggtagaagtatttgacagggttttgtgtagactactaaaaaatggccacattttctacatatataatattaatattttgggaaaattgtcttcaattttacttataactaaataattttaactawtacttaatatactagagaaaatgattataagaatttccagtaaatgtcataagcttaaactatttcataggaaggcaacaggtttatactgcaatgtcttgacctaaacacaaatgaaaatatttatgaaaagaaacagtacacaaaactgcattcagaaaacttgaaataaaacacaaaagataatttttttttaaagaaatggtataaagtaccttgaaatggaagaaaactgttggaaaataaatcagaatgaaattacatatctacttcaggagctggtttaaagagcgtagtcatttttatctttacgtaactagtgtcaaataatgagtttccataaaaaatagtaaatgaaaaaccattcttctaagtttgtcttgtaacctaggttaaagatggataatgccgatggtctcacatattcaggagacaatattctacctcttgttggtttctcctttttgtgctgacaagaagtttctgcaaagatgaaaagtaaaaagataaaataaaacatggaaaacaacatgtatggaaaatgaatgagctggggagagattctgggtgggtcactaaaaaaactgcctccagtagcggagcaactgcctgcatttggctggatatggttgggatagatagtaatcgtgggccaaaaatgtcaaggtttggaaccagaaataaacttaccttattaataaatctgacacttatgaagtttgtggttttggactataaaatggaagacttcagttgaggttttgtaataattaggtaggtctcttgagcattataaataatgaatgtaatatacatagttatttctataggtatgttgacagttataataacatatttaaataagaatatagtagatattaaacatgttaaaatagtatggttcaattaataaatgtatcacaaactgacttctgtgatgtatacattttatttttaaatgttcatatagcatacgaaataaaataatcatgtgcttaggccacgaaaaatctcaaaaatattacctagatttgtttctagtttgttaccctatcaacagcctagacccggaccctggaaatatatgtcaactggaaaattgatattgtccca

SEQ ID NO: 699376 - DNA, 1823 bp, Homo sapiens
tggaaccacatacattgacctgaaactcacagaaattccacagcagtctggcagaatttcatttatgttttctctcttggtactgttttctctcacataaaatactgcagtacgttctgcatcatgcggagaatgttttattgggtactgacatgatgtaaaggcaaacctaaacattcttgaactcttctatcagaactttgtatcaaattaatgggactatacaagcatttttaccttacaattctggaaacggaatttttttttcaaaagggtaagataatctaggaataaactataataaaaggaatgcaacaagcattattcatgcattccctaagtagcttgctcccaaacatcatttatatttcaactgagttttagccttttatatttgagatgtactatgctaaattagaaaatcccatccaccagaataagatttttaatttgttcttggctcccaaaaaatactgagaacaatatcttttagcattccacagtccaggtggacaatttaaagctgttaagaaaggcattttaaaatttctatacaaatgactgtctatgtaggtgacacttgatcatagctttgaaaaaaatgccaccaggaaaagactttgtggtttctggccttaaacaatattgaaaaagtaaaagaacatactatgcccttgaggatacattttaacataaaaaattactctggtacaattctatgagaagaattttacatgagacttaggatgtaaatccctagaaacaaaaatggaaattaaattatctgatgtgactaatatataaagttcttacaagtactgagactatttaggagaattttgtacaggtgaaagtgatataattacattatttcactattatcaggatttgatcaaagaattctaaaacccgaatatctatgtctactttctaatactaggagatcgtttctgaaatctaataaccaaaatgtttatgtttataatttgtaatgtcaaaagcaagctttcatgctacatatattagttcttctatatgaaatatatttaattcttccataatcacaaatcatgtgtgtcataaacacaagtacacacattaaaaatatgtctccagctgggcacaatgtaatccctgcactttgacaggctgaggcaggaggatcgctggaggctaggagttgagaccagcctgggcaacatggtgagactctgtctctacaaaaaaattaaaaaacaaaacaaatcaattaaaaaaatctgtctctataattagaatattttatttatacatagtcagacaggttycctcagtcacagaagagtacttgctcctcccagttctgagacattgacccttgagttctatcctcatcctgctgtgggtcgggagttttgatgagggagatactgaccaagagatgaagtctccaaaggggtctcttggtctcctcctcacccctccagactcccatgccagggtctccccgtggccgcctctgggtagagctccacaatcttcagtagggaatattttcaaggtaaaattaaaagcttaaaacatgaaactcataggatggttttattttctgcattactattttttaaaattttaatattaaggaatcattgcttagcacttctaccatattctactgagactgtatgaagtcaacgaacacaaatctccacagacataatttaacatatacagaatttccacaacaatattgaaaaagggcttattgcaatcctgtgtggaaaatacagtacaaaggtttgtgtgtatgcacaaacacacaataattcatttatttagtcatg

SEQ ID NO: 699377 - DNA, 1823 bp, Homo sapiens
tggaaccacatacattgacctgaaactcacagaaattccacagcagtctggcagaatttcatttatgttttctctcttggtactgttttctctcacataaaatactgcagtacgttctgcatcatgcggagaatgttttattgggtactgacatgatgtaaaggcaaacctaaacattcttgaactcttctatcagaactttgtatcaaattaatgggactatacaagcatttttaccttacaattctggaaacggaatttttttttcaaaagggtaagataatctaggaataaactataataaaaggaatgcaacaagcattattcatgcattccctaagtagcttgctcccaaacatcatttatatttcaactgagttttagccttttatatttgagatgtactatgctaaattagaaaatcccatccaccagaataagatttttaatttgttcttggctcccaaaaaatactgagaacaatatcttttagcattccacagtccaggtggacaatttaaagctgttaagaaaggcattttaaaatttctatacaaatgactgtctatgtaggtgacacttgatcatagctttgaaaaaaatgccaccaggaaaagactttgtggtttctggccttaaacaatattgaaaaagtaaaagaacatactatgcccttgaggatacattttaacataaaaaattactctggtacaattctatgagaagaattttacatgagacttaggatgtaaatccctagaaacaaaaatggaaattaaattatctgatgtgactaatatataaagttcttacaagtactgagactatttaggagaattttgtacaggtgaaagtgatataattacattatttcactattatcaggatttgatcaaagaattctaaaacccgaatatctatgtctactttctaatactaggagatcgtttctgaaatctaataaccaaaatgtttatgtttataatttgtaatgtcaaaagcaagctttcatgctacatatattagttcttctatatgaaatatatttaattcttccataatcacaaatcatgtgtgtcataaacacaagtacacacattaaaaatatgtctccagctgggcacaatgtaatccctgcactttgacaggctgaggcaggaggatcgctggaggctaggagttgagaccagcctgggcaacatggtgagactctgtctctacaaaaaaattaaaaaacaaaacaaatcaattaaaaaaatctgtctctataattagaatattttatttatacatagtcagacaggttccctcagtcacagaagastacttgctcctcccagttctgagacattgacccttgagttctatcctcatcctgctgtgggtcgggagttttgatgagggagatactgaccaagagatgaagtctccaaaggggtctcttggtctcctcctcacccctccagactcccatgccagggtctccccgtggccgcctctgggtagagctccacaatcttcagtagggaatattttcaaggtaaaattaaaagcttaaaacatgaaactcataggatggttttattttctgcattactattttttaaaattttaatattaaggaatcattgcttagcacttctaccatattctactgagactgtatgaagtcaacgaacacaaatctccacagacataatttaacatatacagaatttccacaacaatattgaaaaagggcttattgcaatcctgtgtggaaaatacagtacaaaggtttgtgtgtatgcacaaacacacaataattcatttatttagtcatg

SEQ ID NO: 699378 - DNA, 673 bp, Homo sapiens
aaagcattcattgagtatctgctaaggaaacaattgtgttggtcaatatggcaatatagagtggcataaagatagctccttatccatcacaaacacagctggagaaatagaatacattttataaaatccaaacgaccaaatgagtggtcgggagacacttagagtatcaacaactggcttacacaatatgccatcttctaaccatgataagaggtataaggatggtctgtacgttatatttgtatctcacccacccccaccaacaatcaacacagagccctttacacaataagggttgatttgatctctcttttaaatagggaccctcattaatgagagttggggatacagtctgtgacaatggaaaaaggtaacgggccataatgcagattaaagtacaaggctctgacctaaactgacattttactaaccacagattaggaatggtrtgtgtagaaataataacattttgcctcctcttgaactcaacagttttgtttttatttttttttaaactgtttttattttttttaaactgtgtctttgtactattgtttaagaaagtccttgggcagggttggggaaaacagaactcaattaagagactgaaaattaaaagacggtcaaataaaatgagcacatcttggacgagacacacctaggagtgagagga

SEQ ID NO: 699379 - DNA, 1192 bp, Homo sapiens
tcgtaattggctgttgagggaatttcctgaaattcttccagttgatcaaaaacctgaagagaaggcgagagaatcatcatgggatcatgtaaaaactagtgctacaaatcgtttctcaagaatgcactgtcctactgtgcctgatgaaaaaaatcattatgagaaaagttctggttcttcagaaggtcaaagcaaaacagaatctgatttttccaacctagactctgaaaaacacaaaaaaggacctatggagactggattgtttcctggtagcaatgccactttcaggatactagaggtattgtgctcaagggacaaaaatgggaggtgacaaataatttgaaaatgtacattctgtattattttattaaaaatccagattttttttggtggaaaactatcaaatgtaaataagcattcagtgtacttctgtgcataaataatatytaagggactcatgtctttaatcagtcaagttttaagtttgtggtttaaatctggttttgctggtttttaaaaaaaaaaaaattgtctgttttcattttaatctgagggcagttttaagtaccaatgaagctttggccttaatttttactctctttgttattacccctttttagatgaaatagaaataagtgagatatataatttgctataatctggtgtagaccttggttttctatttttaaaactaaaccctgtctttcttattttaaaggcaatgtatattgattatagaaaatttgctaacaaggagataatttatcaccaatcctacaaacaaaggatttcaccactgttaacattttagtgacctttttcttcttttttttttttttttgagacagacttttgttcttgttgcccgggctagagtatagtggcgccatctcagctcactgcagcttctgcctcccgggttcaagcaattctcctgcctcagtctcctgagtagctgggattacaggcgcctgccaccacacccagctaatttttttgtatttttagtagagacagggtttcgccacgttggccaggctggttttgaactcctggcctcaggtgatccgcccgcctcagcctcctaaagtgctgggattacaggcatgagccactgtgcctggctgacctttttcttcttttattactgtacatgtattctaagttttgtttgtttctatttaacatggca

SEQ ID NO: 699380 - DNA, 1192 bp, Homo sapiens
tcgtaattggctgttgagggaatttcctgaaattcttccagttgatcaaaaacctgaagagaaggcgagagaatcatcatgggatcatgtaaaaactagtgctacaaatcgtttctcaagaatgcactgtcctactgtgcctgatgaaaaaaatcattatgagaaaagttctggttcttcagaaggtcaaagcaaaacagaatctgatttttccaacctagactctgaaaaacacaaaaaaggacctatggagactggattgtttcctggtagcaatgccactttcaggatactagaggtattgtgctcaagggacaaaaatgggaggtgacaaataatttgaaaatgtacattctgtattattttattaaaaatccagattttttttggtggaaaactatcaaatgtaaataagcattcagtgtacttctgtgcataaataatatctaagggactcatgtctttaatcagtcaagttttaagtttgtggtttaaatctggttttgctggtttttaaaaaaaaaaaaattgtctgttttcattttaatctgagggcagttttaagtaccaatgaagctttggccttaatttttactctctttgttattacccctttttagatgaaatagaaataagtgagatatataatttgctataatctggtgtagaccttggttttctatttttaaaactaaaccctgtctttcttattttaaaggcaatgtatattgattatagaaaatttgctaacaaggagataatttatcaccaatcctacaaacaaaggatttcaccactgttaacattttagtgacctttttcttcttttttttttttttttgagacagacttttgttcttgttgcccrggctagagtatagtggcgccatctcagctcactgcagcttctgcctcccgggttcaagcaattctcctgcctcagtctcctgagtagctgggattacaggcgcctgccaccacacccagctaatttttttgtatttttagtagagacagggtttcgccacgttggccaggctggttttgaactcctggcctcaggtgatccgcccgcctcagcctcctaaagtgctgggattacaggcatgagccactgtgcctggctgacctttttcttcttttattactgtacatgtattctaagttttgtttgtttctatttaacatggca

SEQ ID NO: 699381 - DNA, 1379 bp, Homo sapiens
gtggtttttaagaaaattgatgaacaaaatggtccatatgtgttcatagttattagtgtgcctgtgtttatccagagatgtgtgtgtgtacatttttaatgtgtggattcttgccattatagcaattagaagagaaaaggtcttggacaggtagagtaaaacacccgctcaaaatatgtaattacatgcccattttctcaggaaaaaaaataaaatctataccagccaggacctccagtgattcttctgtaaggaagtatgctccagagcttaccattctattttttccaagaagtgagatgwttagaaagagggctctcatgttttgacggctctgtcaggcctgtaggtcagggcggaaagagcccaggaacctggactaccactcaactagagaagagatctgacctctagtcaccacctggccagggggcatccaagtgtcacctctgcagctctgttttcacacctttaaaatgagaaggataacaagtgtcagtcataactctttgtgtcaaaacagtaaaaggaacatgttttgaaaagtacaaattgccacaccgaaatgcaacatgtgagtatttctttacagatgtcactcatccctattttgctatgtctttctccaaccagcaaaggtattccaaggattcaccactaatctaacagagggactaaagcctttgattgcttctgtcgctctgaaattccaagaatcacccatcttacatgactcatgctaagacctagaactttaaaccacagccgaaccctagactacatgggagtaaagagggacataatattttaaggtgtagtcactggcccccttccccatctctgcacaccaattactgcttcaggcttaggtagtccatagggaacctttgtgtgaattggcaaaaagcacctcttcctcaggtggtgtctcaagtactgtattagtctgagttctcctgagaaacacaagcaatgggatacacacacagagagacagggagagacagacagacagagagagagacagagagagatttattatgaagaattgactcatgcagttacagaggctgagaagacccaaaatttgcagtcagcaagctgaagatcgagaaagtcaaaggtataattctagtctgaatcttaagacctgagaaccagaagagtcaacggtgtaagttccagcccaaatacaaaagcagaagaccagtatcccaatttggggacactcagaccacaaattctcccttccactgcctttttttgttctagtcaggtcttcaatggataggatgaggcatacccactttaaggaggacaacctgctttactcaaccttgaaatgttaatcttattcagaaacacccttttttatttaa

SEQ ID NO: 699382 - DNA, 1334 bp, Homo sapiens
tgctatttttcccctcccaagctatgcagttgcaattccttaatttttttcagaagacttatttttttcctcctcaattacttttgtaatttatactttttctccttagagtctgtcccatagctcattatataaaactagtaatagcagctctcctcaagtcctaatcagctgtaaataaacagcaaagctttcatcttttcttactccagtatcatatttgctgtttagatcacagcacttcctttttgtttgtggtgtagattaggttccacaataaacttcaagccttttactgtcaaactgctactttctacatgtcatatctgtgtaattcgcctttgtttttttgatagactgagtaatgctcccccaccccaaagatgtccgtgtcctggtccccaggactgtgaatatgttaccttgcctggcaaaagggactttgcagatatgagtaaggaccttgagatggggagagtatccagaattattcaggtgggcccaatgtaatcacaggggtccttatcaaacagaggcccggaggatctgggtaggagagaaaagatggccgcagagatgagagtgatgggctttgaggatggaggaaggagccacaagccaagcaatgcagccgcaggagctggaaaaggcaaggaaacggactttcccctggaactcccatggagaagcatggccctgacctgcccacaccttgatagtagctcattgaaacctgtttgggyttctgatttgcggagatgtaaagcaatacatttgtgttgttttaagcagctaagtttgtggtgatttgttacagcagcaataagaaacatacaatttactaatataataatctgtgcttgtcttgaacgtcatggtcttattcaacagagcattttttgatttatagaggtttcttgatactgtgttctcatcatccaaagccacatcaaaatgagtggttatttactagactattgataaccttaacttcttatcaactgttttaaagtaatttatgtactagaggattccatttattgaacaggttctatgtaccacatatttgagcttggaatgtgctatctcacttaagcgtgacaacaaaaccacaaggcagagattattatcggagccccattttactggggcttggagcagtgcagcagtgcagctagttgctaatggagctgacagtcaagctccagcctgcttgattttaaagtctatcctctctctaccatgatgacctgccactgtgctgtgctcactttctctagtggagtacaaaattgtgaagaatctgaagcattgaattttcaaggaagatgtgt

SEQ ID NO: 699383 - DNA, 1350 bp, Homo sapiens
tgttgattttttggaagtgccactgccaatctcagtgaaacgctccactcgtcaggtcaattcttcgtgttgatctggcctggactcctaggtcactgtgtgctctggcaaccaccagcctttctgcaccaccagtttctgaagagcaccaacagggatgcactccgactgctgaagggaggagcgggggctgcttttccatgggggtgctcctggttaggaaaacagatgaaactggggtagcagctgctgcagcagtaaaaactggaaagtcctcaggcagtgaagagtctaggggagaaaaagaactgctgtcctccggggccggctccaacatgctctccactttgaggtgtctgagggccacctcagctgccttgtgcttgactaccttcttcctggggccctgagcagtgcagctggtgttgccaacagacccagaaggtgaaattaggctggtgggccctcggctttgagaaggtagtacacaggtgttcttccctattctggtaccatacttctgcagaaggctgattggggtcttgcccgggttggtggccagcattttctctacactaggcagcccgcagcccgtggtagtgccagagtcttgctcctcttcacccattccctcctctgtccccacaggcaccactgtgactgcctccatatcaacttctttgaccagtcaagcaccataagaagcacacagcttacaaaaacaatcttttgtctatatcattcttaatcttcagaaaaagtagaacaagtgaactttaaaaattaaaattaaatatcctcaaggactcttcgatttctatcagcattagccttcaaaacaaaaagataaacatttctggggacccatctgctctctccttgtgaatgaataatggactgccccacatatttttaaatttcacctttgatcctatattctgctattgcaagctaacatgagtagacacagcaaagaaatcatgtgatacactcagtcttgtcatcaacaggtaaaagcagtctttccaaaacatccttctaagcaactctctatgacctgagatctgcacatttagtactctggaggagacaagggagaaaaactgtcctggacacttmatgaaaagagtgtggtaagtcatgctaataattagcacttccattaaaagctccaaaacgttgacccttgaattcatgtttcacaactaaaaagatacacaccattttccctgggcttgaaaatcttctccactgggagtccttaaacaggagtcttaagaagcttccagaagcagatgatctttggaaaaaaacagctaatgactcctggatcaagcaaatgacaaacca

SEQ ID NO: 699384 - DNA, 1415 bp, Homo sapiens
gcctcagcctcctgagtagctgggactacaggtgcccgccaccacacccggctaattttttgtatttttagtagagacggagtttcaccgtgttagccaggatagtctggatctcctgacctcatgatccacccgcctcggcctcccaaagtgctgggatcacaggtgtgaaccaccacgcccggcccataaatctctataccaatttatgagttggataaattgcagaaattatttgtgtatagtcagtctttaggtaaatgttttatttgtattatcaacttctttagaaatggattctgagtttttcattgctaatcaaattaatgcaacaatagaatttttacactgtggtacttaatcttttgtaaaccaacaccttcaagtatcttaataaaggtatcaaaattttatcattcagataaattattcaggtaaatttatcattcagacaaatcattgtatccttgtagattcatctatgagaatgctccaaaaggaaatcagttcagaagtcctagtttccctctattttcattgatcacacgtgctagaaatctctgatttaaatatttcatgatacccraatgcctcccaaacaaaataattatctttttgtttgtttctgtgtaacagaagagaaaaataaaagctgtttagtaaatcaaaacaaaacagtccagatgcggtggctcacacctgtaatcccagcactttgggaggctgaggcgggcagatcacttgagggtcaggagtttgagacaagcctgggcaacatggcaaaaccccatctctaccaaaaatacaaaaattaactgggcgtggtggcatgtgcctgtggttctagctactcaggaggctgaagtggaaggattgcttgagcctgaaagatcgaggctgcagtgagctgtgattgcaccactgcactccagcctgggggagaaagtgagaccctgtcaaaaaaaaacaaggaggaaggaaggaaggaaggaaggaaggaaggaaggaaggaaggaaggaaggaaggaaggaaggaaggaaggaaggaaggaaggaaggaaggaaggaaggaaggaaggaatcttataattcatagaaaattaaagaaaaaagaaaattacaccaccaatgtaatagggcacaacaaaagctactgttatttatgagattctcctttagaaagctatttgagcttctcttacttctatgcctcatgtatttattacaactgaaagcaggtcaaaatttacatccaggagcagcctcaaatggaaggaggaaagttgacagacaagtgggtgtacaaaggagaaaggtgctctcactcctctgcctcagtgatggggggggcacctaagctgcctcccgttttccacccctgcatcccccacaagggccttcttgcccctactttg

SEQ ID NO: 699385 - DNA, 1083 bp, Homo sapiens
cccctccaaaaaaaaaaagaaacacagctgattatttagtgtcatgctacatccatagaggacttcagtatatagtatgaagaaagtgcttgctctatgtgtttaattatttataatataaagaaatacagctgattatttagtataatgctacatccatagaggacttcagtatgtagtatgaagaagatgcttgctctgtaagtgtgcactctaggctagatattgacccagacatttgtgatgtctccatctgaaaataacaaaaagagccgaaaacctctgtagattattatttaaaattagaatatttaaattattttaagatgctaagaattacttgcattactttcttcaaattgaaggatgtgcataatatttgggaattctaaccaggaaaagagttttagcctttcattgaaaatgacatttatggtattattcaaaatggtaaaaagctgtttaaaaattcaaatgacaatgaatagaaatagaaatgaatattctagccatggtgtatttacatactataataacaatacatattttcattaaatgatagagtattattgaaaataataaacatttatcaaaatgacacaaaatgatttttaccctaccagtttaaggaaactcttggcatgtgcagtagttacttcccaattgccaagttcacgatcaagctttccattccttgtctgactggaccactccttggtagttgactttgttaaactttccctgtttcttgaaatcctcttcgtctccctttactcccacacttttctggcctatttttatgacctttcttagtgcttttcctatgattcctgctgtgtagcccaggaagttggcttgtgatgtctcatcttctgactttacacatgccccagtgtgacctcattcactctcaaactcctctcagcctcctatgtgataactccccagtgcctttctccagttctgatgtcttccagaactgcacaatcataaatccagctgccttcattcctccctcttcctcatccaycccactcaattcttgaccaacttgatactctcaagatacagtagaaaggtgtg

SEQ ID NO: 699386 - DNA, 636 bp, Homo sapiens
catgattagatttggggagaaatctcaggtgtgtattccaaagaactgaggaatgcaatgtcattctttaattctctgttagcattgtcccatactttgaatttttatgtgagacttgggattaggctttgttatgtgactgaattgtatccccacaaccaccaccaaaattcattgtgttgaagccctaatccccaatataactgcatttggagaaagggcctttaaggagataattaaggtcaaatgaggtcatcagggtagygctctgatccagtaggactgccgtccttataagaaaaaggagaaaaataccaggaatatgagcacacagggactaggctattctaggcagccatctgcaacccaagaagagaggcttcaggagaaatcaaccctgcagacagcttgatcttggacttccagcccacagaactatgggaaaataaatttctgtggtttaattcacccagaatgtggtattttgttatggcagacctagcagaataatacaggcttatatgggccaaaggaagagattttgtccgagagttctttctctctataattaggagtaatttaaactaaacaaaaacaaaacaaatgattgtgtgtcagaaataaccacacaattgc

SEQ ID NO: 699387 - DNA, 1660 bp, Homo sapiens
gaattcacaaaaacccttttctctcttaagtgcccagctctggcaattaaaagccacaacttgccataattttctgttacagatttataagacggattcagcaacttcttcctctttttttttttgagacaggatctcactctgtctcctaggcaggagttcaatggcacaatcatggctcactgcagcctcgaccccctaggctcaagcgatcctcccacctcagcctccccagtagctgggactataggtgtgcaaccccaagccaggctaatgtttctatttttaatgaagatggggttttgccatgttgcccaggctggtctcttactcctgggctaaagcgatccacctgcctcgggctcccaaggtgctgggactacaggtgtgagccaccatgcccagccgctttctctgttcaaggtggtatcccacctcccctctgagtgatgagtgttgatgacccacttggtggggggagatcatccctatcccccagcagagtgtcctgtgtcactacatcccagcataagcggagcagcattggcgtcaggctggtagaattcaggtgtggtgagtgtcctgagaggctaccattaagctctaagctaccattttttagtttacatccatattgtctttatagcctccatcagagctttccctgggctgcctcatatcttttctttcaaataggagaaaggactcgtaacagcataggcatgaagactgaagagaaaacgccttggtactggtgaggagtgtatcatatggagaagcaaatgccccctcgctggatacaactccattacctgccctcatttgataactagtttttggcccagaattagatagctgttcttgaaaagtaaaaaaaaggccctagtgttctcaaaatgaatccagtttaggtgatatgcattaagatactgatttggaggaagataaaaagtaattacaggcacggtggaaaacatctctctctttcaatacatcatatacatacaacctgtgtaatatatacacatatatatgagcacttaagtgtgtatatataaaacagcctgaggaggtggaggacacagcatgaatcacacaaccaaatcaaggcagagttgatagcatcgaagagactgtgattatgttgattgaaaccagatttaaaggacctggggaatttgtttgggaacagagaacaggaccaaaatattccctcagagaggaaatctcatcagagggaaaatgtggggggtggaggggcaggcatggtagggaggtggggagtggtgcttcaggacagagtttggggaaagggaatgagaattattctctctccactttcaagggtgtccaaggagtacagcacgataaatccaggggagacgctgatggcacaaagggaaggagggaagagaacaggacaggcagctgaggagggctgccccatgtatgtgttttgaaatgacggyggcatttaaaaaacaataatcacagagaagcaagattttagcattcagaggaactctcagctttcactttagagctgaagaaaccatggtcccaaaagtgcaggggagctgcccaagccacacagccagttaatgctcaagctggaactggcttttgtgcctccaattaaataacagtttctacctgtttt

SEQ ID NO: 699388 - DNA, 583 bp, Homo sapiens
catgccaccaaccaccacagatctttggcgaatggttatatactatgtgttttttatctttcggaagaaaaataaaacaaaccattagcgaggctaacttaagaaaatcaactttatacaatgataagaggagtggccatgccaaactgaaatgaaatgacagartatcaaaggactgcctacacagaaacgagccacctttgggagctgagtcatatgcagccaaggctctgacaaaaaaggtcttccagtacttcagttcattgatcatcacttgggaataggctgaagacttctgactgttctgcctacagatgtgagcagcaaaatctaactgggaaaaatgacctgattcttctccaggacacaagttgaggaattacctttaaggatagaaatgcacaactttctcctatcatttcaactctaaccaagaaaatgaaaataaaacaaaaaacagttaaatatgagcaaatttagaaatgcatgctacaaaattctttctgcaactttaaacttcttgtttaaaatctttaacagagaccctgtctctcaaaaaaaaattattaaatatatgtgtgtg

SEQ ID NO: 699389 - DNA, 2860 bp, Homo sapiens
tgaaaaacaacaaaaaacaagagcaacagcagggaggtaagacgttgacgtggggaatttgttcatactccagccaattagccctcaaattcaaatttatgtctttgtaaacttacagattgctacaagccagggcaactgagtggtagttaaagcctcaaatataaagccctcaaatggcaagaatctactatatttggactagggggagggaagagtgttagatctaagyacaagacaagacccagacccattgatctctactcaattttatcctgttggtgttagttaaattctttaggcagacaaggtattttgagatcctgattccctcccactttcatgttatttacaaatttggtaaatatagcttctatatctttacctaaatgattcattaaaacattaactattacccagccaagagagtggaagggcttattaaaaacctcccagcaggtttacattagttaattaactatttatacccagtcagttttgttattgttgttattgttgagatggagtcttgctctgctgcccaggatgcagtgaaatggcacaatcttggctcatgacaacctccgtctcctaggttcaaccaattctcctgcctcagcctcccgagtagctgagactacaggtgcacaacactgcgcctggctaatttttgtatttttagtagcaccagggtttccccatgttggccaggctggtctcgaactcctgatctcaagtgatccagccgcctcagcctcacaaagtgctgggataacaggcataagccaccatgcccagcccccagtcagtttcatatgcctaactgctcctgattctgccttacattcttactttttctgtaggagaaatcataagctactccacctactaatctaaaaccatgttgaaaaaatccaggtgttagctgacttgttcttagagggtccatgttgccccctgttggttacagtttcctcttttatgtggccccaaatcttgtttttagtcaattctagacttctcccaaatgaaagtgaatatcacaaatctgcactttgcaaaatccacatctttcccctttctgaaaatgaaatgacttctgcctgttctagttgtctggcctcacatgttttcagattcctcggaattcaggaacatgctggatcatgtgtcctccagtttcctcagttcttgaaatagaaggcttcaggccagaaggctgaactcagagcagacgtgtgatcctctgcaatcttttggttctctggggtttcagtttgttctttacgatgtttatttcatgctactcatccaaaggaacactttcctcatcaaagaaggcagatataggaattcagacgttctgtgtcatgtactcacccataaacatcatacccagagagtgggctttgccattctttaatcttctcctaccaactctaaaacattatttttgtcgtccttaacattatttgcaatttttatttgaggatttaagctttcaggtcatactcttgtgattatcctagtgagcttggtctttttttcctttttacatcttctgtgcatcttattgcctaaattcatttgcaagaatcctttgcaacaatatcaatctttttcttcttctttctctcctttccccagatttccccatcagccacctcctgttcctcagtttcctactgtcattctttctctatatattaacacaattatgtaatatacgagtggacatgatgatattgctcacccttttaattttccaaatttcaaaacatagacccaaataaattaactcaatttttgctccctagatattggtgatatttcgaaaccctaaagatacagcagtatcttttttgcatttccacaacgatgtccccgatattccaagctatggctcttgggatgaattcttcagacagttcatgaaaggacaaggtatggctgttggtaaaagaattattcttacttgatcagatgaccacataaatgtgaaaacccaaatgtgttttagggtaaaggaagaagatttaggtagatctgggaaccaaaaagtttcatttaaatgaacggtcatagcaccattagttctgtgcatccaacaattaaatgcattgctgttttaaaaacgaatttggggccaggtgtggtggctcacgcctgtaatcccagcactttgggaggccgaggcgggcagatcacaaggtcaggagatcaagactgtcctggctaacacggtgaaaccccatctctactaaaaatacaaaaaattagcctggcgtggtggcacgcacctgtagtcccagctactcgggaagctgaagcaggaaaattgcttatacccagaaggcagggattgcagtgagctgagatggcgccactgcactccagcttggcaaagcgagactctgtctcaaaaaaacaaacaaacaaacaaacaaaaaactaatttggacaagtcgtatgttgactatgagtacagagtggccatagaaaagacatgggacaaagagagctttaacagtgagtgatgtagaaaaccatttctagtgaacttccttgtcactatgtaacactgataaaaacaaaaaatattttttaaaaaaccatgacactgagctactatacctaagacatttgtttgctagaaagaaaataagtttttgtcagaaataagtttttgttaaacatgttgatattttgtctctggtttattgataactctaagtgtctattaatgctccaggtgctaaagtaggggtcgtctatgcattattttaatttaagatttataacaaactatgagtaaggtggtattagccccattgtacagatgaggaaactaatcaaaata

SEQ ID NO: 699390 - DNA, 1392 bp, Homo sapiens
ttgaatgggactggtgccaaggaactaaatttctcattttaaaaaaatggaattaattcaaaatttttaagggatatacaattcagttaatggaaaacttttaagtaagtgtaataagttgcgtatgtgaatatactttttaaactgtacgttttattaaatctaaatatacatcaagtattttcaataaaaatttagcatccaaattgagattytcagtatatgtctcatactccatggcttttgaagatttagcatattaaaataatgtaatgtttcactcaaatttttgttgattatatgatggaataatatttttgataaactgggttaagtggagtaaaacattaaaattaatttcatttgtttcttttgttttttaaaattacgtatatggctagcattacatttttattgaacaacgatggtctagaaaatgtctttttcatcatttctttctggcattgtctctgtcggatttcatgtgtcattcactatttctgaatttttttaatccacctaaatattcatgaatgtcttatagtttttataaatcatttttgtaacttgcttaattttgtgttatttatgaaaaatgttccaaaaggtaagaaaataaatagaaatttagacaatgggactgatttatatcagctttttggtggcagggatttataataacataaagatatctcgagcatatacacatatgtatagtttatattttatagcataaattaatgatcattttaacctcagttatttgacatttcttaaagtcttcccccctgtgtttttagtttcttggggaaggtattttgattttgcaatcaattggaacaaacatcttgatggcgacaatgttaagttcatattatatgaagacctgaaagaggtgagattattattgatattttagagcaaaatttattgtaaactacaacgtagagcacttacttataatgtctgtttgtataaacaaatatggtgttcaatttttaaaaatattccagatatatggtacagtgctggaaaagaaaattcaaaccatgcatacatgcttaggttgtttatttaacagaaataaaataacgcttagcaacttattactaaaagtgactgctttattttccctttatgatggatagttcaaattggtaataaaaaaaaataggtaggtctgagttgatttaattgaacatacacttggttgtgaactaatttatccagtcattttttaaaaattgtttattgatgtaacaaatatctagtgagtgattgctcaccaattaggccctggtgttacatcagtgaacagacaaggcaaagatcgctgccctgtagtaacttacatgccagttggagaaggtggaaagaaagaatgatacataa

SEQ ID NO: 699391 - DNA, 1392 bp, Homo sapiens
ttgaatgggactggtgccaaggaactaaatttctcattttaaaaaaatggaattaattcaaaatttttaagggatatacaattcagttaatggaaaacttttaagtaagtgtaataagttgcgtatgtgaatatactttttaaactgtacgttttattaaatctaaatatacatcaagtattttcaataaaaatttagcatccaaattgagattttcagtatatgtctcatactccatggcttttgaagatttagcatattaaaataatgtaatgtttcactcaaatttttgttgaytatatgatggaataatatttttgataaactgggttaagtggagtaaaacattaaaattaatttcatttgtttcttttgttttttaaaattacgtatatggctagcattacatttttattgaacaacgatggtctagaaaatgtctttttcatcatttctttctggcattgtctctgtcggatttcatgtgtcattcactatttctgaatttttttaatccacctaaatattcatgaatgtcttatagtttttataaatcatttttgtaacttgcttaattttgtgttatttatgaaaaatgttccaaaaggtaagaaaataaatagaaatttagacaatgggactgatttatatcagctttttggtggcagggatttataataacataaagatatctcgagcatatacacatatgtatagtttatattttatagcataaattaatgatcattttaacctcagttatttgacatttcttaaagtcttcccccctgtgtttttagtttcttggggaaggtattttgattttgcaatcaattggaacaaacatcttgatggcgacaatgttaagttcatattatatgaagacctgaaagaggtgagattattattgatattttagagcaaaatttattgtaaactacaacgtagagcacttacttataatgtctgtttgtataaacaaatatggtgttcaatttttaaaaatattccagatatatggtacagtgctggaaaagaaaattcaaaccatgcatacatgcttaggttgtttatttaacagaaataaaataacgcttagcaacttattactaaaagtgactgctttattttccctttatgatggatagttcaaattggtaataaaaaaaaataggtaggtctgagttgatttaattgaacatacacttggttgtgaactaatttatccagtcattttttaaaaattgtttattgatgtaacaaatatctagtgagtgattgctcaccaattaggccctggtgttacatcagtgaacagacaaggcaaagatcgctgccctgtagtaacttacatgccagttggagaaggtggaaagaaagaatgatacataa

SEQ ID NO: 699392 - DNA, 1392 bp, Homo sapiens
ttgaatgggactggtgccaaggaactaaatttctcattttaaaaaaatggaattaattcaaaatttttaagggatatacaattcagttaatggaaaacttttaagtaagtgtaataagttgcgtatgtgaatatactttttaaactgtacgttttattaaatctaaatatacatcaagtattttcaataaaaatttagcatccaaattgagattttcagtatatgtctcatactccatggcttttgaagatttagcatattaaaataatgtaatgtttcactcaaatttttgttgattatatgatggaataatatttttgataaactgggttaagtggagtaaaacattaaaattaatttcatttgtttcttttgttttttaaaattacgtatatggctagcattacatttttattgaacaacgatggtctagaaaatgtctttttcatcatttctttctggcattgtctctgtcggatttcatgtgtcattcactatttctgaatttttttaatccacctaaatattcatgaatgtcttatagtttttataaatcatttttgtaacttgcttaattttgtgttatttatgaaaaatgttccaaaaggtaagaaaataaatagaaatttagacaatgggactgatttatatcagctttttggtggcagggatttataataacataaagatatctcgagcatatacacatatgtatagtttatattttatagcataaattaatgatcattttaacctcagttatttgacatttcttaaagtcttcccccctgtgtttttagtttcttggggaaggtattttgattttgcaatcaattggaacaaacatcttgatggcgacaatgttaagttcatattatatgaagacctgaaagaggtgagattattattgatattttagagcaaaatttattgtaaactacaacgtagagcacttacttataatgtctgtttgtataaacaaatatggtgttcaatttttaaaaatattccagatatatggtacagtgctggaaaagaaaattcaaaccatgcatacatgcttaggttgtttatttaacagaaataaaataacgcttagcaacttattactaaaagtgactgctttattttccctttatgatggayagttcaaattggtaataaaaaaaaataggtaggtctgagttgatttaattgaacatacacttggttgtgaactaatttatccagtcattttttaaaaattgtttattgatgtaacaaatatctagtgagtgattgctcaccaattaggccctggtgttacatcagtgaacagacaaggcaaagatcgctgccctgtagtaacttacatgccagttggagaaggtggaaagaaagaatgatacataa

SEQ ID NO: 699393 - DNA, 617 bp, Homo sapiens
gcaccaaggagttttgtgcctgtggtcaaaaaaggagagaagaaagttagagaggctggtttcaggcactatatccatggtcaaaatgttacatgaaagctcttgtgtattgagcccacagaggaaggtttcccttgcatttttgaagccatacaaatgttcaacatggatttacttgccaagtcacttccctttaaacctaatagtaatagctagagtatagggaacatctaccagcactgtcctgggagctttgcgtgtgttatctaaatccttatcataatcctatgaggtaggattatccccatttcacagagaagaaagctgaggcccctaaaggttagctttggcccaaagtcacacagcagagggggattcaagcagttggctctatcctttaacccctgaccccacagggcccagggctacggggtgaagggagagcagtctactgaactagctgcrtatctagggattcgattctggtggcattgggacatccctctgaccctggggactgtcgggagagactcccattcattccctggagtactccccctgcatgtggtgtcagctattttccctttgctcttaggatgccctttccaccttcccca

SEQ ID NO: 699394 - DNA, 2130 bp, Homo sapiens
tttgaatatcaaccacttattagatgtatggtttgcaaatattttcttattcygcaggttgcctttttcacattgattgtttcatttgctgtacaaagctttttagtttgatatagtcccatttgttaatttttgcttttgttgcctaggcttttgacatattttaaaaaatcactgccaagactaatgtcaagaagcttttcctctatattttcttcaaggagttttacagtgttaggtcttacattaaatctttagtccatttagagttcatgccttttgccaagtctgtgagtgagccgtatatttggctctgagctctctagtagccaaagggaaaagggaaatccagtgagacttcctcttccctgaaggctctttcctctatttcacactgccttttggctgttcttactaaactgctcaaagctaatagtcattctctgaagtggtattgattaatgaggctaaaactcttcagtctttgactaactttcagctcaggaaggaaacagaaaccatagcctagaacactacccctgtgtcatatcatgggtagaacaatgttgatccttctttgcatccctgccagggaaaactacagagaaacatcggttcattgcagtttttccaggttttcctgtaatgtcttactcactggcataagaattgaaagctgattgctgaaaacatgtttctcactctgtttctttataatacaaaagcctccatgtgttctaaaaagagcctttgatgcataattaaataaacacctggcttctcaaaaagagacaccttttctcagcagggcaaggactatttccaaacagttaaaatcaaagcatcagaggaaacaagttctaccttctcctcaaagagcagccactgacaggaatgttactggagtgagaaacccggcagagggataacttttcaggagtctgggagacagtgtggtactctagaaataaatcttttagtatcattatatttaaatacagtaatccctcttatccacagggaatgtcccaagacccccagtggatgcctgaaaccccagataataccaaactggattgctgtccatcagaacacgtgtctgttcatatcttccaccctcaaatttagtgccttttccatcttaactgagaatttgtcatacactatggtcataattttgcagttgaggtgccacaaaggtagcatgagtttctttttccttctttacaatttcaagagagaagatttgttcttactatagatcttagcaacctccatatacgattattttccttccttaagtgaagaactttcactttttcacttaaaaggagcactctacagcttctctatgacatatctgaagggccagcatcaccactcttgccatcactttggagacattattgagtaaaataagtgtggcttgaacacaagcgctttgatgccacaactgttgatctggtcactgaggcagctactaagtgacccatgggtgggcagtgtctacaacaggacaaagggggaatctgtgtcctgggtgatttcatcacggtctagtactcagagtggtatacaatttaaaacttatgaatcgcttatttctgaaagttttcatttaatattttcagaccatggtggaccgtggacaaccatgaaaagcaaaaccttggattgcgggggactactgtaatggcccacagtttccaaagtatttatatatatcctatctgtcacaaaatctctgtgaggtgggaaaaggtagtgttatatccccagaaaatggggataaatctaaaactgattaaggaagtccttagagatgggtcacatagccatgagtcctgtcttctaatttcaagtatagtagaaagccctgaggtatgggagttgaagagtgaagccctggatctgcctcccactaactagttgtgtgacctcaagcaagtcactttctcttcaactgggagcagggaaggaggcaaaatgtgattccaccatcactagtgggcaaacttaaagctcattcctagagcccatctctgtctgtctatgtgtcttctcaggtccctgtcttcattgggacattgacttcagtgtttccttctcatagttgctcctcctagtatt

SEQ ID NO: 699395 - DNA, 1271 bp, Homo sapiens
  misc_feature 2, 3, 4, 5, 6, 7, 8, 9, 10, 11, 12, 13, 14, 15, 16, 17, 18,19, 20, 21, 22, 23, 24, 25, 26, 27, 28, 29, 30, 31, 32,33, 34, 35, 36, 37, 38, 39, 40, 41, 42, 43, 44, 45, 46,47, 48, 49, 50, 51, 52, 53, 54, 55, 56, 57, 58, 59, 60,61: n = A,T,C or G
  misc_feature 62, 63, 64, 65, 66, 67, 68, 69, 70, 71, 72, 73, 74, 75, 76,77, 78, 79, 80, 81, 82, 83, 84, 85, 86, 87, 88, 89, 90,91, 92, 93, 94, 95, 96, 97, 98, 99, 100, 101: n = A,T,C or G
gnnnnnnnnnnnnnnnnnnnnnnnnnnnnnnnnnnnnnnnnnnnnnnnnnnnnnnnnnnnnnnnnnnnnnnnnnnnnnnnnnnnnnnnnnnnnnnnnnnnncaggcttcctggggaaacccaagcaatggaaaaaaggaccaaggactgcaggactcactggctcttcaaggacattttttggccacaagattcctcctgccatcagaacagaaaaagtgacacctaaagtcaggctcaaagtagttcrgtgtgacagaaatgtacactggtcacacccttgtttacagtgacaagtccttttccagacatccatcagcatcaacctcccttctctctgtggaacaattcattttatttcacaagcaaaaaacaggacaagcacccaaaaatgtccatttaactccagcgtgtccccagaaggtgtttgtcttctccgaattcatctcccaccttctgttcttgacattcattggctgaagcagtgatttgccaagcgcagttcctggtttagcagcttcagtagcacttgggaccttattagaaatgcagattctcagaacacatctcaaacctcctgaactagaaattctggagttggggaccagcaatctgtgttttaacaaattctccaggggattccaatgcacactcaagtttgaaactaccaggctaaacagttattgatgccacaaatactgctcagaattttaaagggtctcttctttatgattacttcaaaagaatacaggcatcactgggtggcctaatgtgtagactggggaaacagggtgttagaatgagtatagaatagtagcaagttaagacagagaaggaatttaccacatatcccagctcagggaaacagatgaaaatacctgtccatgttttcaggtgagtgtgccctatttttaagcttcctctatctactgggcacagtggcccatgcctgtaataccagcactttgggagaccaaggcaggaggctcacttgagcccaggagtttgagagtagcttgggcaacacagtgagaccccatctctacaaaaaaaattttcaaaatagccaggtctggtggtgggcacctgtggtcccagctactcaagaggctgaggtgagaggatcacttgagcctgggaggtagaggctgcagtgtactccagcatgggcaacagagtaagaccctgtcaaaaaaaaaaaaagcagagatcattgcaaagtcccagacacttggaagagcatggagtttgctgtggctcaattccataaca

SEQ ID NO: 699396 - DNA, 2993 bp, Homo sapiens
tttttctgttaattaattaagtttgaaacttctgtttcaaacttaatgaaacagagaagttccaaaagtttgaatgccttgcagaggaagtgcatcatgtcctgaagatttggctggtgtaattcttttcctaaaccttttcttcatacataaaaagcttccagcatcaggaatttttacagcccaaatccttagggatagcaaaaagtagaacattcaggctgagtctaagaggcaaaaatctagttagaaattgcccaggagaattaagacaaatacacaatgcttaagtcctgcgacagaaatttaaaaataaataaaatcaacccaaaatggccaaccctaaaatgattcagaggctttctctgcccagggattgcttttataatgtatgactttatgcctaattaaaatgaggtcataagttgatagatggctgcaccacaacttaagagacatgggttcaagtctctgctttgacccaacctgtgtgactttcgaaaacatacctcttccttcaacctttgcttgctaatctaagaaacaggaatcataaaatgtcctacctattaactggaaaatgagaaaacacatataaaaggtctccaagatcttaaagtgtcactttattataagactatggactgccaagcaaatcacttgtataagccaataaggcaatgcagcagggtcacagttgtgcctagaaatgttggttatctacagtggaccttgtcattgttcttatcatccacttcatccaaacgactaaactgaagctaagtcaatcgtgctagcccatttccttgtcagtgattgcttcagaggcaagttggaaaagtttacggcaaagatacgtaaggagaggcagacttgggaatgggaaaaaacgagtctctctcccccactcaacatgcataaggaagtgcattgccttacctctgcaggcagccattttgttttcatgacataagctagagcagagacagtcaatgaagtatagaaataatctggatatctgcaattgggaaagaacctgtgtacctgatgttactgagttactaaaagactggctctgcctctgtatgatctgatatggggttccataatggaatagctaagagaactggctaaggaactatgttttcagttcagattttggctctaccaccaattacttaggtgaccacaggcaagttacttaatcctactggaccataattttccatctctaatatgagaataatgatagtatttcccctacagggttgtgatgaggattaagtaaatatttttaaggctgttggtatctggcacagggtaagcactatataaaagtttgtaaataaataatttagaaatatagtgtttatttattattttaaacagtctgagttgggctttgttatttggtcccaaaggaaaacaaaatagactgtttttcttagtcttctgagccagccatcattaattgtgatgtcaaaaatcacggatgtaacaaaagtacattttactaataattaaaatatttaagttatcaaattatttactttaatatacatgtatacatatatatgcttttgtatgtatatacatgtgtgcataaaaagcttccagcattaggaatttttaaaaacccattccaaggtgatctgaaaacagcaaaagaccaaaagtagcaaaaagaatttaatatacatgatacatatatatgtatgtatatacatgtgtgaacatatatgtatacatatgtgtgtatatatacgtgtgtgtgtgtgtgtgtgtgtgtgtgtagagagagaggcaaattcaacattatcttgatatctacactattcttacaaactttgtcacagttagctgtgtggtctggaatcgacatttttcttttctaggtctcagtttcctgagaaatgactggcattatacccaggaagcacagggagttgagaataactctgggtttacccatgagagtgtgttgcacatgggggacccaagggctgcacactacttctcaacctctacaataagccccccagaaaacctaactagagtcaagtctgctgttcctgttatgccatcttgcttgtgggaaaggccaaggtctccaaacattgccctttgtggcagagattagctagatgggcccctcacccattacctctccttcttggacacccagctagaatacatattttagcctccctggcagttagatgggcacgtgattgagttttaaccaagggaatgtgggtgaaagtgaggtgagccatttacaagcctaactcatataagtctcctacgtttggtcctcatcctctttctctaaccagcttctgactgaagaggaggtgaggccaccaggtggaaggaggttttggaatgactggtggaaggccaagtattcagagtcaactgcattggacaggaatgtaaaatagagatgagcttgcgttgtgctaactccctgagaattggggatttatctgttaaaagaggtcatgtttctcatgttttcttaactgataaacttagcaaaaagaaaagtgatgccccttaactagacactgttcagtttagaaagaaacttagagttgctctctggaattttgcctttagcaaaattagtaatgaggtgatagatttgcttgtttgcttctatatgacacacaagaatacaggcgaaaatggccatatttctttgttgaagtcaaatcccagcacccaccatcactccagcttttatttgactctctacaagccccacaggacatgctcckttttgctttgaggaggaaatgccttttagggagtatgtctgtgcattcaggaaacagtcataaaaagaaaggttattaggctacttcccatcacgattatcccttgcagtaggtgatgtcatctgccagaatgacttttcagaagcacctaaaatgcatttgtgaactcctaacatggactcagcagtagccgccgccagtcaaccacat

SEQ ID NO: 699397 - DNA, 1391 bp, Homo sapiens
  misc_feature 923, 924, 925, 926, 927, 928, 929, 930, 931, 932, 933, 934,935, 936, 937, 938, 939, 940, 941, 942, 943, 944, 945, 946,947, 948, 949, 950, 951, 952, 953, 954, 955, 956, 957, 958,959, 960, 961, 962, 963, 964, 965, 966, 967, 968, 969: n = A,T,C or G
  misc_feature 970, 971, 972, 973, 974, 975, 976, 977, 978, 979, 980, 981,982, 983, 984, 985, 986, 987, 988, 989, 990, 991, 992, 993,994, 995, 996, 997, 998, 999, 1000, 1001, 1002, 1003, 1004,1005, 1006, 1007, 1008, 1009, 1010, 1011, 1012, 1013: n = A,T,C or G
  misc_feature 1014, 1015, 1016, 1017, 1018, 1019, 1020, 1021, 1022: n = A,T,C or G
tatttgtggacgaccagttaactaagccagctcttagtgtctttagttgggaaatcttagctgaagatattcaataatgaaccaagagtgactaaaaaattcaatatttaagtatatttcattgtaattaatttgaattgaaatagccatatacagctagtatttactatattgaacaatgcaaataagaggagaaaattaataaccatctctaataccacatgccaaaatcctcatcaatttattctagctaaaggagttgatcagaagcagcagttgaaagcaccaactaaaccagctggggttagttcactgtcattctctcagaaccatctcttctctgaacaaaacaagtacaagagttcattgtgaatctgcattctccttgcctattttaaggttttgatgttgacacaaatttgtgaaatccctcctgtggtgtgatatttcgttttccttgctttctgttaggacaagaatgcttcagctcttaatttaaaattatgtttctccctcctaggttgagtgaacttagaatgcattctctgacatatccaagattttgttaatatgattttcgggaaaaaagcatacttaattagctaagacgtcttattctaagcttgaccctatgttcgacatcttttgaatttctagttgcatgggctgctctctgacactggttagtgacctggaagctatattaatgttaggggaggtggtgtatgagcattagaggtatccttgcaaggaaagacttgtcttatctcaatatgtctttttttttgcacacaagaaagtcaatgtctgagtcttctaaaatcttcctatttccaaattgcagattatgattgattcctaaacaaagacctaatttttgactcagagacatggcaaggtagtgaatcaccattataatttannnnnnnnnnnnnnnnnnnnnnnnnnnnnnnnnnnnnnnnnnnnnnnnnnnnnnnnnnnnnnnnnnnnnnnnnnnnnnnnnnnnnnnnnnnnnnnnnnnncttctgcactaattcattgaaggacaatgttttaccgattcttgaaaaactatcattatctgccccacagtggtggctcatgcctgtaatcctaacactttgggtggccaaggctgccgttttgcttgagcgcaggagttcaagaccagcctgggcaacatggtgaaaactcatctctaccaaaaaaaaaaaaaaaaaaaagtaaaaagttagccgggcaaggtggcrggcacctgtagtcctagcaactcaggaggctgaggtaggaggatcacctgggcctgggaggttaaggttgtggtgagccatgattatgccactgcattccagtgtgggtgacacagtgagaccttgtatcaaaaataataa

SEQ ID NO: 699398 - DNA, 575 bp, Homo sapiens
taaaaataatattttcactttattcaacaaatcttattgaggtcttattatgaatcaggggctctcctaggtacgggcatacaaaattgattaagaccatgcttgcgtgcagaaaacaaacagaaaagcatctctataataaaaaggaaaaagaggaatcccctttgtaggtttcatagtttatactgatatttctgatgtcgtctcagagaattagtcacaattataggaactcagaaggcattccgtggagatgaaatagagactaaactagcagagattacttagtgaaatattgtgataccatttatttcaattagaaaatagttataattcattttagaagatattatggcttacacwtagtagatgtgatgactgaataacaggattgttgaacgatggcaccttggtagccattagccattgccaccatgattctgcattaaaaaatctatgcaaaacgcccgggcatggtggctcacgcctgtaatcccagcactttgggaggccgaggcgggcggatcacgaggttgggagattgagaccatcctggctaacacggtgagaccccg

SEQ ID NO: 699399 - DNA, 575 bp, Homo sapiens
taaaaataatattttcactttattcaacaaatcttattgaggtcttattatgaatcaggggctctcctaggtacgggcatacaaaattgattaagaccatgcttgcgtgcagaaaacaaacagaaaagcatctctataataaaaaggaaaaagaggaatcccctttgtaggtttcatagtttatactgatatttctgatgtcgtctcagagaattagtcacaattataggaactcagaaggcattccgtggagatgaaatagagactaaactagcagagattacttagtgaaatattgtgataccatttatttcaattagaaaatagttataattcattttagaagatattatggcttacacatagtagatgtgatgactgaataacaggattgttgaaygatggcaccttggtagccattagccattgccaccatgattctgcattaaaaaatctatgcaaaacgcccgggcatggtggctcacgcctgtaatcccagcactttgggaggccgaggcgggcggatcacgaggttgggagattgagaccatcctggctaacacggtgagaccccg

SEQ ID NO: 699400 - DNA, 601 bp, Homo sapiens
ttagagcgcactttttaaaaaagttactggagaatacatttcggcaaaatatgaaatgaatttaaaaattgaaagacctaagattaatgaaaagggtcccaatactggagagtaatgaaggggcattgaaagatgttgataaacggaaattctcagactactgcagygaagcagagtaaaagagaaacccgtccagactgaagcaagcattccaggggctctggaagaaaacacataaaaggaaaaaagcgaactgattttatgtatgtagaaaatatattttatatatgcagtagattttatgtatgtatacatatacacatatcactcaactgtgcattgaataacacttatccagacataataaagactaacttttatttaatatattaacatttatgtcaacatgtatgtcaaatatcatatattgaacaataatatataacattttgtttaatatattaacatccatttatgttaattaggagtatggaggcagatgggtaggtgggatgtgggataatggtggtataagagagataaatctttatttactataaaacaaagttgacagataattcctaaaactaagaagttaaaa

SEQ ID NO: 699401 - DNA, 676 bp, Homo sapiens
tgtttgcattcttttttttagacatgatctggctttgtcactcagactggagtgcagtggtacaatcatggctcactgcagccttgaactcccaggtacaagcagtcttcctgcctcagcctctcaagaagctagcgctacaggcatgtgccaccgcacccggctaatttttaatttcttttgtagagacaggttctgtctatgtttcccaggttgttctcaaactcctggcctcaagcagtcctcctgcctcagcttccgaaattgccaggatacagatatgagaaactgcatctggcctcactaggaaaattgattatgttttattttgttttttgctcctctaycaattgcttctgtactgtgtattgtgtgtgtatatgtgttgaacaaataattttaagaaacgttttagtttctctgttgattttaaggatttctgagttatttaatagtaaataaaaacaataaaatactaaatagaagttatagattttaaaaatgcagtagccaaaataaaaaatttgctagagtggctaaaaagcagattcaagacagcagagcagaacaaccatgattttaaagtttgatcggtagatattatctaatctgaaggaacgagaaaaaaatgtgaagaaaaatgaatacagcactatcaaggatagcaaaatacacg

SEQ ID NO: 699402 - DNA, 676 bp, Homo sapiens
tgtttgcattcttttttttagacatgatctggctttgtcactcagactggagtgcagtggtacaatcatggctcactgcagccttgaactcccaggtacaagcagtcttcctgcctcagcctctcaagaagctagcgctacaggcatgtgccaccgcacccggctaatttttaatttcttttgtagagacaggttctgtctatgtttcccaggttgttctcaaactcctggcctcaagcagtcctcctgcctcagcttccgaaattgccaggatacagatatgagaaactgcatctggcctcactaggaaaattgattatgttttattttgttttttgctcctctaccaattgcttctgtactgtgtattgtgtgtgtatatgtgttgaacaaataattttaagaaacgttttagtttctctgttgattttaaggatttctgagttatttaatagtaaataaaaacaataaaatactaaatagaagttatagattttaaaaatgcagtagccaaaataaaaaatytgctagagtggctaaaaagcagattcaagacagcagagcagaacaaccatgattttaaagtttgatcggtagatattatctaatctgaaggaacgagaaaaaaatgtgaagaaaaatgaatacagcactatcaaggatagcaaaatacacg

SEQ ID NO: 699403 - DNA, 676 bp, Homo sapiens
tgtttgcattcttttttttagacatgatctggctttgtcactcagactggagtgcagtggtacaatcatggctcactgcagccttgaactcccaggtacaagcagtcttcctgcctcagcctctcaagaagctagcgctacaggcatgtgccaccgcacccggctaatttttaatttcttttgtagagacaggttctgtctatgtttcccaggttgttctcaaactcctggcctcaagcagtcctcctgcctcagcttccgaaattgccaggatacagatatgagaaactgcatctggcctcactaggaaaattgattatgttttattttgttttttgctcctctaccaattgcttctgtactgtgtattgtgtgtgtatatgtgttgaacaaataattttaagaaacgttttagtttctctgttgattttaaggatttctgagttatttaatagtaaataaaaacaataaaatactaaatagaagttatagattttaaaaatgcagtagccaaaataaaaaatttgctagagtggctaaaaagcagattcaagacagcagagcrgaacaaccatgattttaaagtttgatcggtagatattatctaatctgaaggaacgagaaaaaaatgtgaagaaaaatgaatacagcactatcaaggatagcaaaatacacg

SEQ ID NO: 699404 - DNA, 676 bp, Homo sapiens
tgtttgcattcttttttttagacatgatctggctttgtcactcagactggagtgcagtggtacaatcatggctcactgcagccttgaactcccaggtacaagcagtcttcctgcctcagcctctcaagaagctagcgctacaggcatgtgccaccgcacccggctaatttttaatttcttttgtagagacaggttctgtctatgtttcccaggttgttctcaaactcctggcctcaagcagtcctcctgcctcagcttccgaaattgccaggatacagatatgagaaactgcatctggcctcactaggaaaattgattatgttttattttgttttttgctcctctaccaattgcttctgtactgtgtattgtgtgtgtatatgtgttgaacaaataattttaagaaacgttttagtttctctgttgattttaaggatttctgagttatttaatagtaaataaaaacaataaaatactaaatagaagttatagattttaaaaatgcagtagccaaaataaaaaatttgctagagtggctaaaaagcagattcaagacagcagagcagaacaaccatgattttaaagtttgatcggtagrtattatctaatctgaaggaacgagaaaaaaatgtgaagaaaaatgaatacagcactatcaaggatagcaaaatacacg

SEQ ID NO: 699405 - DNA, 934 bp, Homo sapiens
tgaggaaaacaagtgtttttagctttatctacaatgttttattttgttaaaatagacaaaacagatatgatcaaatttgaaaaatataaagaacaagtagtagaaacaaacattattcatcattacamcaccaagagggcactatagttaaaattttatgaaggttttgctcaagatttttgttgttgtttctgttttcacttttgtaatcgaaaagaaaaaaaacttaaatctcttgagacagtggtttggataaattgtttagtgtagcgagaccttacagttaaaaattttcaagatatatcttattattttggttctcaacatgtttttccatcaaactacttaaacacataccttctgtcctagtctgttttgtgttgttataaaggaatacctgaggctgggtaatttataaagaaaaaaggtttatttggctcataattcttatggctgaaaagttcaacattgagcatctgcatctggtgagggcctctggttgcttccactcacggtggaaggtaacgaagtgctgatgtatacagagatcacatagtaggagaggaagcaggagagacagggatgagaggtgccaggctctttttaacaaccagactatgtgggaactaacagagtgagaacacactcaccccagtgggagggtattaattcattcattagaggtcaattcctatgtccaaacaccttccatctggccccaaatttggggaacaaattcaatgaattttaggggggaaaatatccaaaccatagagccttcttatatgcaacatgcttacacgggccaacaaggttttacatattagagcataatgattgctggcaaattatgtaattccacttttttttcctaccactgatccaagctactagtatttctcacacatagatgagaaaattatgccatagatgt

SEQ ID NO: 699406 - DNA, 934 bp, Homo sapiens
tgaggaaaacaagtgtttttagctttatctacaatgttttattttgttaaaatagacaaaacagatatgatcaaatttgaaaaatataaagaacaagtagtagaaacaaacattattcatcattacaccaccaagagggcactatagttaaaattttatgaaggttttgctcaagatttttgttgttgttkctgttttcacttttgtaatcgaaaagaaaaaaaacttaaatctcttgagacagtggtttggataaattgtttagtgtagcgagaccttacagttaaaaattttcaagatatatcttattattttggttctcaacatgtttttccatcaaactacttaaacacataccttctgtcctagtctgttttgtgttgttataaaggaatacctgaggctgggtaatttataaagaaaaaaggtttatttggctcataattcttatggctgaaaagttcaacattgagcatctgcatctggtgagggcctctggttgcttccactcacggtggaaggtaacgaagtgctgatgtatacagagatcacatagtaggagaggaagcaggagagacagggatgagaggtgccaggctctttttaacaaccagactatgtgggaactaacagagtgagaacacactcaccccagtgggagggtattaattcattcattagaggtcaattcctatgtccaaacaccttccatctggccccaaatttggggaacaaattcaatgaattttaggggggaaaatatccaaaccatagagccttcttatatgcaacatgcttacacgggccaacaaggttttacatattagagcataatgattgctggcaaattatgtaattccacttttttttcctaccactgatccaagctactagtatttctcacacatagatgagaaaattatgccatagatgt

SEQ ID NO: 699407 - DNA, 934 bp, Homo sapiens
tgaggaaaacaagtgtttttagctttatctacaatgttttattttgttaaaatagacaaaacagatatgatcaaatttgaaaaatataaagaacaagtagtagaaacaaacattattcatcattacaccaccaagagggcactatagttaaaattttatgaaggttttgctcaagatttttgttgttgtttctgttttcacttttgtaatcgaaragaaaaaaaacttaaatctcttgagacagtggtttggataaattgtttagtgtagcgagaccttacagttaaaaattttcaagatatatcttattattttggttctcaacatgtttttccatcaaactacttaaacacataccttctgtcctagtctgttttgtgttgttataaaggaatacctgaggctgggtaatttataaagaaaaaaggtttatttggctcataattcttatggctgaaaagttcaacattgagcatctgcatctggtgagggcctctggttgcttccactcacggtggaaggtaacgaagtgctgatgtatacagagatcacatagtaggagaggaagcaggagagacagggatgagaggtgccaggctctttttaacaaccagactatgtgggaactaacagagtgagaacacactcaccccagtgggagggtattaattcattcattagaggtcaattcctatgtccaaacaccttccatctggccccaaatttggggaacaaattcaatgaattttaggggggaaaatatccaaaccatagagccttcttatatgcaacatgcttacacgggccaacaaggttttacatattagagcataatgattgctggcaaattatgtaattccacttttttttcctaccactgatccaagctactagtatttctcacacatagatgagaaaattatgccatagatgt

SEQ ID NO: 699408 - DNA, 1311 bp, Homo sapiens
tggtagagacagagtttcgccttgttggtcaggctggtcttgaactcctgacctcaggtgatccatccgcccacgtcagcctcccaaagtgctgggaataaattgtatttttttgatgactacaagtttactttatgaccttgatttaaatttctacttgaatactttgttttgaatgcttcaactttatgtaaaagccttttttggtaaaagtataaacggttaaatttttacctaattatatttattcaagtactttttcttaacctaaatcttcaaatatagtctttaaatttgttgtattttatcattcaatattaagatgttattgttaaaaatagtaaccattttagtaatatagttttgtgtattccttggtactgaccccaattttattttcttacatttagttttatgatttcaaaaatactattcctgttttccaaagtaatttcttaacatttttgacttatctggaaatctctcatcttatatggatctagaaaaagattatgctttcctactgttttctaacataaagattaagccttctggagacctgatgtgagctttttaactttagatgttttttatatgcctaaggcccgtgagtttcatatctcggtttccacaaagagcttggatctgcgagaattagcaagggattaaagtgatgttttccaccctgtgctcttgcttctggctactgttctctttcacttactgcataatgtttttaggatatatatatttaattcactcttctctattatggcctctatttttctcatattcttttcagatcttcttgacatcactttggccaataatggcgtcaattttagtttacttccatgtaaatatgtttgggtgattttcaaagaacagatacaatgtgaagctataaaccagattcatgtttatctgtcacaagaaaacttggactaagaataaattccacactttccgttaaagaaaacaagaattgtagcttaaccaacatggaatttgwttactgggttatggatttgttaattagtaatcattgatttgacatgtaaccaggttaggtgaatttccctattcattatttccaagtgcaaatcgcaatcacatacttgaaattatccaagatcacatagcaaataaagacaggaacaatgagttgcaagcacaaatccagccctgtaggcctaggttgaagtgtagacctgctgagtttacatcccagggaaccttgggatttatctcacgttaaactctgctgggactggaaaattcttatttatatagatgataggtgttatacga

SEQ ID NO: 699409 - DNA, 835 bp, Homo sapiens
aaaagaaatcaaattgcatgatagaaggtcattagatatatgaatgtcattatgaaaccaatcaatgcatcactttccctcctttgatcagcttgaatcccttcctgggaagccccataactccttcagaagtggtctcctgtgcgtgattactttgacacaatctagatgatgctgtattagggaggtgagaaagagcaagtatcaaaaccaaaattactatgtataagtttgcaaatgagctgatgatgycccctttgccactttcactaagaagggaaatatattgatttggagttacagagattctgttgctcctacttttactttactggctggtaaatctatccaacacatcattttaaataatagctatttttttcattggacttttatagcttttatattagtttgtagggtttatccctatatgtttctatagcaaaagactgttttctcctctaattcaaaaggcatccatggtttgttttatcctggaataatatgtttgctttataatgaaagcatttttaaattatgtatttatacattaatcattgggttgagaccatctttctttcaatgcacaatttgctatttttatctggagaagaaaacagaaacacctcctactaggctacaagttccttgagggggaggaatctacgtcctagcacagtgcctgggacatagcaagatttgagtaaatttttgtgaataaataagtgaatcagtgtaatagaaatacttatgatagcatatatgaatatatacacaatgtttacaaagtgagtttactctacttaggaattaactgcatagattaactactgat

SEQ ID NO: 699410 - DNA, 835 bp, Homo sapiens
aaaagaaatcaaattgcatgatagaaggtcattagatatatgaatgtcattatgaaaccaatcaatgcatcactttccctcctttgatcagcttgaatcccttcctgggaagccccataactccttcagaagtggtctcctgtgcgtgattactttgacacaatctagatgatgctgtattagggaggtgagaaagagcaagtatcaaaaccaaaattactatgtataagtttgcaaatgagctgatgatgtcccctttgccactttcactaagaagggaaatatattgatttggagttacagagattctgttgctcctacttttactttactggctggtaaatctatccaacacatcattttaaataatagctatttttttcattggacttttayagcttttatattagtttgtagggtttatccctatatgtttctatagcaaaagactgttttctcctctaattcaaaaggcatccatggtttgttttatcctggaataatatgtttgctttataatgaaagcatttttaaattatgtatttatacattaatcattgggttgagaccatctttctttcaatgcacaatttgctatttttatctggagaagaaaacagaaacacctcctactaggctacaagttccttgagggggaggaatctacgtcctagcacagtgcctgggacatagcaagatttgagtaaatttttgtgaataaataagtgaatcagtgtaatagaaatacttatgatagcatatatgaatatatacacaatgtttacaaagtgagtttactctacttaggaattaactgcatagattaactactgat

SEQ ID NO: 699411 - DNA, 835 bp, Homo sapiens
aaaagaaatcaaattgcatgatagaaggtcattagatatatgaatgtcattatgaaaccaatcaatgcatcactttccctcctttgatcagcttgaatcccttcctgggaagccccataactccttcagaagtggtctcctgtgcgtgattactttgacacaatctagatgatgctgtattagggaggtgagaaagagcaagtatcaaaaccaaaattactatgtataagtttgcaaatgagctgatgatgtcccctttgccactttcactaagaagggaaatatattgatttggagttacagagattctgttgctcctacttttactttactggctggtaaatctatccaacacatcattttaaataatagctatttttttcattggacttttatagcttttatattagtttgtagggtttatccctatatgtttytatagcaaaagactgttttctcctctaattcaaaaggcatccatggtttgttttatcctggaataatatgtttgctttataatgaaagcatttttaaattatgtatttatacattaatcattgggttgagaccatctttctttcaatgcacaatttgctatttttatctggagaagaaaacagaaacacctcctactaggctacaagttccttgagggggaggaatctacgtcctagcacagtgcctgggacatagcaagatttgagtaaatttttgtgaataaataagtgaatcagtgtaatagaaatacttatgatagcatatatgaatatatacacaatgtttacaaagtgagtttactctacttaggaattaactgcatagattaactactgat

SEQ ID NO: 699412 - DNA, 622 bp, Homo sapiens
gccagggctgctggtcgaggtccggccccatctcttccagcagaaagggagtaagcttgcagggcggctgggggacaagatcccaggatctcagcctctgctcatggatcagctctgagaccccgagtgagctgggggtgctctgtgcgcgttggtttccccagctgtcaagtaaagggattagatgaggaagtcttgtcaaggtggaatgatctcagatttggggcagcagtgaatgatcccgctccctgggccatgccagtggcccggcctcggctgaacacagccccaacactctggaatggggatgagggggcagtcagctcttgctcctagtaagagagatgcaacagggctctgtggctgagctgggtgccttgcctcacacctgtaatcccaacctttgagaggccgaggcaggaggattgctcgaggccgggaattttgagaatagcctggacaacatagccagaccccatgtctacaaaataataakaaaacacacagctatagtccaagctacttggcaggctgaggcaggagggtcccttgagtccaggaattggaggctgcattgagctataatcgcaccactgcactccagcttgggtgacaaagtgag

SEQ ID NO: 699413 - DNA, 1238 bp, Homo sapiens
gatgtctacagtgtaaattcatcttcttcatagtcagtctttttcaaatttctttggactgttcttggccctttggctttcaaatgaattttgattaatcttttaataaaatgcttccctcctacctcattcracacatacttctctcccatctcattcctattctgaaggctactgccctcaaagatctagtttccagccttgaatctgccaccaaatgcccgtctattcttgtgcaagtcccctaatctctctgggtttcagtttcctcacctgtcaggtctgctttgcctatatcacaggattgctgagctgatgaaatgagataaagatgagagatgctttgaacagttcaaaacaccaagttaaagagttaaaaacaataatctctatgtgatctgagacaaaatgtgaaattcagattatttctcccccagttttttctacactttgtgacactcctttctgtcaaacttccagtgttttgcatcttccagtgagatgcgaaggtcttctgttcagggtagaattattatgttgatgggctggggacagctgggatttatatgccctgggtcccattttggattctctctttgtgacttaatgtaaggcacttaaactctttgaatctcaatttcttcacctttaagaagaatattaaaaattctctcccccaagtagtattgtgtttttgtttttgtttttgagacagagtcttgctctgttgaccaggcgggagtgcagtggtacgatctcggctcactgcaatgtctgtctcctggattcaagcaattctcatgcctcggcctcccaagtagctgagaccacaggagcacaccaccacacctagatagtttttgtatttttagtagagacaggttttccctatgttggccaggctggtcttgaactcctcacctcaaatgatctgctggcctcagcctctcaaagtgctgggattataagtagcattgtgaaattcaagagatttagtataggttaactgttacataaaatgtgaagccctataagaatcatgagccattattatgaatgttcttgctgacatatgcatgcagaaaggacttacagaaaggcaatgatgtttctcaccacttgaatcgaaccatgtaggataatcaaaaccatttttgtctacaagtatggttggcccagtgcaatgtcttcacagtcttctagaagatgcaggaaatctttttcaaaaataatatgtc

SEQ ID NO: 699414 - DNA, 1238 bp, Homo sapiens
gatgtctacagtgtaaattcatcttcttcatagtcagtctttttcaaatttctttggactgttcttggccctttggctttcaaatgaattttgattaatcttttaataaaatgcttccctcctacctcattcgacacatacttctctcccatctcattcctattctgaaggctactgccctcaaagatctagtttccagccttgaatctgccaccaaatgcccgtctattcttgtgcaagtcccctaatctctctgggtttcagtttcctcacctgtcaggtctgctttgcctatatcacaggattgctgagctgatgaaatgagataaagatgagagatgctttgaacagttcaaaacaccaagttaaagagttaaaaacaataatctctatgtgatctgagacaaaatgtgaaattcagattatttctcccccagttttttctacactttgtgacactcctttctgtcaaacttccagtgttttgcatcttccagtgagatgcgaaggtcttctgttcagggtagaattattatgttgatgggctggggacagctgggatttatatgccctgggtcccattttggattctctctttgtgacttaatgtaaggcacttaaactctttgaatctcaatttcttcacctttaagaagaatattaaaaattctctcccccaagtagtattgtgtttttgtttttgtttttgagacagagtcttgctctgttgaccaggcgggagtgcagtggtacgatctcggctcactgcaatgtctgtctcctggattcaagcaattctcatgcctcggcctcccaagtagctgagaccacaggagcacaccaccacacctagatagtttttgtatttttagtagagacaggttttccctatgttggccaggctggtcttgaactcctcacctcaaatgatctgctggcctcagcctctcaaagtgctgggattataagtagcattgtgaaattcaagagatttagtataggttaactgttacataaaatgtgaagccctataagaatcatgagccattattatgaatgttcttgctgacatatgcatgcagaaaggacttacagaaaggcartgatgtttctcaccacttgaatcgaaccatgtaggataatcaaaaccatttttgtctacaagtatggttggcccagtgcaatgtcttcacagtcttctagaagatgcaggaaatctttttcaaaaataatatgtc

SEQ ID NO: 699415 - DNA, 904 bp, Homo sapiens
gaaactgccagtttacatcacttttttgcattaatcctagcaaggaggttaggaagtaatatttattgagggacaactataagccaggaatttacacatataatctcagttaatttttacaaaaaaagtcgatatttatgtatagaaattactttatatatgggaaaactgagactcagagggactaaatgaatgaggcaaggcccacacagcttaagataaaagaaccagggttctcatggtgttctttctgagtctaaagctcttgtccttttcatcaacttctcttcttcctttttctcagcattgagtgtgtggctgagatcaaggatagttgttaatttcctaccaaaatcaaacaatgaaagctaagattcctgagggaaacaagatggcagcactatttccaggctgtctcaggagtcagacaaggttattatcagaaagcagcagggattgggcaggcagaggttttgcatgaaacaatagtaaaatcaaaagaattaaaagcagggattcagggagatatttgtacaccaatgtttatggcagcattactcataatagcttaaggatagaaaccacccaaatgttcaattgacagatgaatggataaacaaattgtrgttatatacatataataaaatagtattcagccacaataaggaatgaaactctgacacgcgctgcaacctggattaaccttgaggacattatgctaagtgaaataagccagtcaaccccaaaaggataagtgctatatgattcattctctcattctctctccacccaaccaacttagggcacttagagcacgcaaactcacagagacagaaagtagaatggtggttgccagaagctggaagtgtagagagagaataaatagtaattgttcgatgtgtac

SEQ ID NO: 699416 - DNA, 904 bp, Homo sapiens
gaaactgccagtttacatcacttttttgcattaatcctagcaaggaggttaggaagtaatatttattgagggacaactataagccaggaatttacacatataatctcagttaatttttacaaaaaaagtcgatatttatgtatagaaattactttatatatgggaaaactgagactcagagggactaaatgaatgaggcaaggcccacacagcttaagataaaagaaccagggttctcatggtgttctttctgagtctaaagctcttgtccttttcatcaacttctcttcttcctttttctcagcattgagtgtgtggctgagatcaaggatagttgttaatttcctaccaaaatcaaacaatgaaagctaagattcctgagggaaacaagatggcagcactatttccaggctgtctcaggagtcagacaaggttattatcagaaagcagcagggattgggcaggcagaggttttgcatgaaacaatagtaaaatcaaaagaattaaaagcagggattcagggagatatttgtacaccaatgtttatggcagcattactcataatagcttaaggatagaaaccacccaaatgttcaattgacagatgaatggataaacaaattgtagttatatayatataataaaatagtattcagccacaataaggaatgaaactctgacacgcgctgcaacctggattaaccttgaggacattatgctaagtgaaataagccagtcaaccccaaaaggataagtgctatatgattcattctctcattctctctccacccaaccaacttagggcacttagagcacgcaaactcacagagacagaaagtagaatggtggttgccagaagctggaagtgtagagagagaataaatagtaattgttcgatgtgtac

SEQ ID NO: 699417 - DNA, 904 bp, Homo sapiens
gaaactgccagtttacatcacttttttgcattaatcctagcaaggaggttaggaagtaatatttattgagggacaactataagccaggaatttacacatataatctcagttaatttttacaaaaaaagtcgatatttatgtatagaaattactttatatatgggaaaactgagactcagagggactaaatgaatgaggcaaggcccacacagcttaagataaaagaaccagggttctcatggtgttctttctgagtctaaagctcttgtccttttcatcaacttctcttcttcctttttctcagcattgagtgtgtggctgagatcaaggatagttgttaatttcctaccaaaatcaaacaatgaaagctaagattcctgagggaaacaagatggcagcactatttccaggctgtctcaggagtcagacaaggttattatcagaaagcagcagggattgggcaggcagaggttttgcatgaaacaatagtaaaatcaaaagaattaaaagcagggattcagggagatatttgtacaccaatgtttatggcagcattactcataatagcttaaggatagaaaccacccaaatgttcaattgacagatgaatggataaacaaattgtagttatatacatataataaaatagtattcagccacaataaggaatgaaactctgacaygcgctgcaacctggattaaccttgaggacattatgctaagtgaaataagccagtcaaccccaaaaggataagtgctatatgattcattctctcattctctctccacccaaccaacttagggcacttagagcacgcaaactcacagagacagaaagtagaatggtggttgccagaagctggaagtgtagagagagaataaatagtaattgttcgatgtgtac

SEQ ID NO: 699418 - DNA, 904 bp, Homo sapiens
gaaactgccagtttacatcacttttttgcattaatcctagcaaggaggttaggaagtaatatttattgagggacaactataagccaggaatttacacatataatctcagttaatttttacaaaaaaagtcgatatttatgtatagaaattactttatatatgggaaaactgagactcagagggactaaatgaatgaggcaaggcccacacagcttaagataaaagaaccagggttctcatggtgttctttctgagtctaaagctcttgtccttttcatcaacttctcttcttcctttttctcagcattgagtgtgtggctgagatcaaggatagttgttaatttcctaccaaaatcaaacaatgaaagctaagattcctgagggaaacaagatggcagcactatttccaggctgtctcaggagtcagacaaggttattatcagaaagcagcagggattgggcaggcagaggttttgcatgaaacaatagtaaaatcaaaagaattaaaagcagggattcagggagatatttgtacaccaatgtttatggcagcattactcataatagcttaaggatagaaaccacccaaatgttcaattgacagatgaatggataaacaaattgtagttatatacatataataaaatagtattcagccacaataaggaatgaaactctgacacgcgctrcaacctggattaaccttgaggacattatgctaagtgaaataagccagtcaaccccaaaaggataagtgctatatgattcattctctcattctctctccacccaaccaacttagggcacttagagcacgcaaactcacagagacagaaagtagaatggtggttgccagaagctggaagtgtagagagagaataaatagtaattgttcgatgtgtac

SEQ ID NO: 699419 - DNA, 1115 bp, Homo sapiens
agtctgagaaaagccagcatttgtcaaggacccaggttcacatccatgagtcgtcagtagagataaaactggaacggtaccttcaggtcagatttgaagcttggttaccaggggtcttgaatatcttcctaatatgcctgggcatttatttggatggcatcagaaagtcatttcaggttcttaagcaaaatattgatgtgatcaaagtgatagaaaatttaaatgagactggggtgagaaggacgaacgaagacattttagaagttgtttcatcatctgaggaggtggatttacctctaatccctgttcaactagctttctcttattttccttctgaggaaaaaaaaggcatctccattttggtagtgattttgaagtgcagtgtcagaggaggggagagggtccactcctggtgcaagcatcagatccatggcttagcaatcagaggggaggacggttaggaaaatgcaattggttatatttgggctgttcaggctgaagcaccaaagatactgctagagtctcttcatttgatttctcaagatttaatgtgtgttttgtgaagaggaaaaaagtgataaatgtttctgaccagtgctcactaagctatgaccaacctgccagtaagcattgctgctattaggcctgctattattataagagtgctatcctttgaaactaacaagagaaacatattcactctatgtggtggagaatcttcatggaattgtgccgggaacccagggttcctaaagyacaccctgactgggatgatccccaaagtttctcacaggccccttttattctgctaaggggtatgatgtgtgtaggtgaggcttaaagtatgaacaggaggaaaatgattctctctctgatgccccttcactcttccttactcttgaatatcaaactattgagaaaacttgttttgtgttgtcattctgtcccagaagcagttcaaaatgaacttttaaaacattttatcaggtcgggcgtggtggctcatgcctataatcccagcactttgggaggctgaggcaggcggatcacctgaggtcaggagatcgagaccagcctggccaatgtggtgaaaccccacctgtactaaaaataca

SEQ ID NO: 699420 - DNA, 1391 bp, Homo sapiens
gaaagttcaccttccactcaattaaccttgagagagtggtgtttttttccttttcttccccaagagactttttttttttttttggatgacctttttgaagcatcttattttctgggcaaaaagccaaatgatatactctcttcccagctgcagggctgttgcagattttcaaagctgaggtaaagacagcctttggaataaatgcaagttgggcagtagggttgggaagcatgaggaaatgctttattattccacccaagatgtgcctggagggacggagcctttgtagaggacatccctgcaggacccacaagatacagggacctggagacctcagggctgccaggatctcctcctagttagggagcacacagcaatacaaattaaaaaaaaatcaattccactttgggtgaaagttgaatattagtaagttataacaaagcacattttgcctagtactttgtagtatacgaaggtttttttaatatttaatctcattgagtctcagattcagctaccaaataagactaaatcttatttaagactggatcaatagagtacagtaaacaactatagccctttttcagccagtttgctggacaatggttcctgaaagcccccctaccatcccagacgtacagcatctctggtttgaggcatgtccctggtggtggatttagagagaagcaacatgcagggggtctccaaagtcaactgcatatatgtgcagaggggaacaaataaaagaacccaaaccagctccatttccccatggagcctcagtgttggtagctcatagctcgggtagcaaagggagtttcataaaagtggcgaggcttgctttgaattgcagttgggccacatttctcaagcccagaggcatttgagagttctaaaatcctaggagcagtgtttgaaagcaacaagttagagagggtcactggtagtgacctgtttggggaccaggacattgtgactggcaatcagaaaggttatggaggttaaaaaaaaaaaaaaaggaaatctgcatggccaagaacacaggctcaggagctggactgcctggctttcctgttctgactttaccacttactacctgtgtgtccttgggcaggtcactacctaattgtgcgtctgtctaaaccatctgtaaaatggagatcatgagagcagctacccccggggctggggcggtgggaggagaagaagcatcctggagtcagatgctgtcctatggggagacgagtgtcaagaatcagggaggaaagttgccgggagaggtgacagggaagctgcagacacacacatgtgagccttcgtaggaraatggtgttggaaaaaaaatgctgatgtgacattgggattttgttctgaatgtgaggtaatagcaa

SEQ ID NO: 699421 - DNA, 637 bp, Homo sapiens
ggcagccaccaaagccaggcaaaggagaggaggtagaagatgagactccttactgatggtcctctgtgaatcacacactgactcttcacccaatctacccaccaccacctccatgctgcagcaccctcccaatgaagtcttcctattcaggtgctatccccacatgtacacactagggctgcccagtccaccttgcagaagggttagcccagaatttgagattcaagggaccttcctgactgttcckgaaggcccttcatgatagaagaattttcctctgtgaaactcccaacttatgggaaaatagggttggcaggtctgaactgtaagagaagctaagaaagccttaataaagttcactctacccaacaacaaatgctacgtgctaaataaaggaaatatcactaacatttcatgtatcttaaattagtaataatgggccctaatgagttctgtactattaattccatttacaatccctctctccttggcaacttttcatgttcttcctcccctgcagttttaatgcgatacatgtaaatccattttgctttgtggcagaaaatattcaccctaagaagcacttaaaatgagtaggccttgaccttgggtgtctttaagattttattggcttctg

SEQ ID NO: 699422 - DNA, 637 bp, Homo sapiens
ggcagccaccaaagccaggcaaaggagaggaggtagaagatgagactccttactgatggtcctctgtgaatcacacactgactcttcacccaatctacccaccaccacctccatgctgcagcaccctcccaatgaagtcttcctattcaggtgctatccccacatgtacacactagggctgcccagtccaccttgcagaagggttagcccagaatttgagattcaagggaccttcctgactgttccggaargcccttcatgatagaagaattttcctctgtgaaactcccaacttatgggaaaatagggttggcaggtctgaactgtaagagaagctaagaaagccttaataaagttcactctacccaacaacaaatgctacgtgctaaataaaggaaatatcactaacatttcatgtatcttaaattagtaataatgggccctaatgagttctgtactattaattccatttacaatccctctctccttggcaacttttcatgttcttcctcccctgcagttttaatgcgatacatgtaaatccattttgctttgtggcagaaaatattcaccctaagaagcacttaaaatgagtaggccttgaccttgggtgtctttaagattttattggcttctg

SEQ ID NO: 699423 - DNA, 1063 bp, Homo sapiens
ttttgaggagcctgcatactgattttcacagtgaccgcaccattttacattcctaccaacagtgaacaagagttccaatttcagcaaagtaaacaatcaacagagtgaaaaagcaacctacagaatgggagaaaatatttgcaaaccatatatctgataagaagttaatatcaaaaatacataagaaactcctacaactcaacaacaacaacaaaaaacccaaataactagattaaaaaatgggcaaaagccttgaatggacatttctctaaagaagacatagaaatagccaacatgtatatgaaaatatactccatatcactaatcatcagggaaacgcaaatcaaaatcacagcacctgacacctgttagcatggatggccattatttttaaaaatagacaatttcttaaaagttaatttttacttttatattctgtgactccaaaatttaaagtaaccaaagcacttcgagtttcaaagaaagctacaaatttcatatatatttaatttgttgtgaagcctgatggctggattcagagtctgtctattttcaatttacatacgattttaaggagcatgattctgtgatttcctgcaccctaacagattatataaaggcaattaaaagggtataaggatgtccaaagtagtgaactgatgacaattcaaagtgactgctgacagcttgatatacaagagaagaaygagaaaaacatagaggtgaggattgaaagaagttaattttgcaaacaattgattggtcccatgtaatacttggactaacgaaagtatcattgcatcacagtacagcaaagtaatcaatgttcataatatttctggtttctttaagagggcaaataaaatcctgagttgccctaagagggcaaacctgaatgaattcagaccatctgaaggacagagtggagaggggttaggaccttggagccatttagacctgaatctggatcccatctccatcacttactaatgatgacgactcaggtgtctgtttcctcttctgtgaaataaggatgatgataccatagagggatttggggagg

SEQ ID NO: 699424 - DNA, 668 bp, Homo sapiens
atatatttgtttgtttgttttgttttgttttttgagacagagtctcactctgtggcccaggctagagttcagtggtgtgatctcagctaactgcaacctctgtctcctgggttcaagtgattcttctgccccagcctcccaaatagctgggactacaggcatgtgccaccataccctgctaattttttstatttttagtagagacatggtttcaccatgtttctcaggctggtctcgaactcctgagctcaggcaatccgccagccttggcctcccaaagtgctaggattacaggcgtgagccaccacacccagcctaaacccagtacaaatgttaggtgatagatttcacactcaattttagccaaaaggccaagaaggaatagggactggtttcaatgctgtgctaagaggagccccaatttaacaagtccttctcttcctttatggcagttaaatcaaataaagcctggtaaatgcctacggcagacgacctcataattcacaaactgaattctaacctgccctcttgccaactgttccaggcttcccttgcttctcttctctgctattctgagatgggaaaaggggactcatggggatctccctctgctttggttaaatccttgacatgggtcctgtaaacttatttctggattttatacatga

SEQ ID NO: 699425 - DNA, 668 bp, Homo sapiens
atatatttgtttgtttgttttgttttgttttttgagacagagtctcactctgtggcccaggctagagttcagtggtgtgatctcagctaactgcaacctctgtctcctgggttcaagtgattcttctgccccagcctcccaaatagctgggactacaggcatgtgccaccataccctgctaattttttctatttttagtagagacatggtttcaccatgtttctcaggctggtctcgaactcctgagctcaggcaatccgccagccttggcctcccaaagtgctaggattacaggcgtgagccaccacacccagcctaaacccagtacaaatgttaggtgatagatttcacactcaattttagccaaaaggccaagaaggaatagggactggtttcaatgytgtgctaagaggagccccaatttaacaagtccttctcttcctttatggcagttaaatcaaataaagcctggtaaatgcctacggcagacgacctcataattcacaaactgaattctaacctgccctcttgccaactgttccaggcttcccttgcttctcttctctgctattctgagatgggaaaaggggactcatggggatctccctctgctttggttaaatccttgacatgggtcctgtaaacttatttctggattttatacatga

SEQ ID NO: 699426 - DNA, 668 bp, Homo sapiens
atatatttgtttgtttgttttgttttgttttttgagacagagtctcactctgtggcccaggctagagttcagtggtgtgatctcagctaactgcaacctctgtctcctgggttcaagtgattcttctgccccagcctcccaaatagctgggactacaggcatgtgccaccataccctgctaattttttctatttttagtagagacatggtttcaccatgtttctcaggctggtctcgaactcctgagctcaggcaatccgccagccttggcctcccaaagtgctaggattacaggcgtgagccaccacacccagcctaaacccagtacaaatgttaggtgatagatttcacactcaattttagccaaaaggccaagaaggaatagggactggtttcaatgctgtgctargaggagccccaatttaacaagtccttctcttcctttatggcagttaaatcaaataaagcctggtaaatgcctacggcagacgacctcataattcacaaactgaattctaacctgccctcttgccaactgttccaggcttcccttgcttctcttctctgctattctgagatgggaaaaggggactcatggggatctccctctgctttggttaaatccttgacatgggtcctgtaaacttatttctggattttatacatga

SEQ ID NO: 699427 - DNA, 849 bp, Homo sapiens
atttttactctggtcagctacttagtaagtcttttccttcacaaataactcagagataaaccctaactcttcaaaaaattattataaattccaactacgtgtgattcaaataaaaaagtatttctatatatctactaacgaaagtcttgttggttaagaccagtggttaccttcccttcttgggtctcagctgaggaggaggttattactactcaccatgtaccagtaggacaaatcaaaatttggcggggaaagggtagcagggtgcctcagaggacttgtaatttaaaagagcctctaggaagttgtacttacctttatgggaacatacctccatcgctagcgaagaaccactggttaaaaggatctactttcagccaaaacaaatttttgtcttctattttctacttactaacccaaagtctctcactagcttactatgtcatttacatggcagtctgaagttttaaacttgcgatttctgtattcctcatacatstactccaaagtagtaaaaagcagtcttatccgaaatatagcctatcagcaaacatgtcttcacaaaaatctaattcttagctatcaaaaattatgttttctagtttccagaactattttcaaagtttccattcaaacattctccaaatatcatttttgcaaagtaagttgacaatgtggatattttaaactccatctgcctttcctcagaattaaagctgcaaacacccttctaactttgattgtaaaactgattgacaatttgtaccttcagtagcaataaaatatatcatttatttgaagatttcatcatagaattacaaaagagcattctgatatattaatactgta

SEQ ID NO: 699428 - DNA, 429 bp, Homo sapiens
tgctcagtcacatttctccagaagcagagagcccagaatagtccagccgtttgggaagtactagtaacctaagatactaggcctgtaaaattactgataattaaaaaggagttaagcatagagggaaaaatccactacaaataaacttgctaaaatgttagtaatggctatggtttctggataatgattttatgggtgactttacttttttatttcttccctcttccaagtttttctgaaagcctgaaactatgagaggtgagatatggagcagcttcaggaaaaaaaagggaaacaaaataaaggtacatggaaaaaatacaattgggatgttattgaaaatattcaaaatatcaatgtgtaaatatttttgaagtagactaygtcaaggtaaaacatgccatgcattaagaatgccactgaaatgac

SEQ ID NO: 699429 - DNA, 1232 bp, Homo sapiens
tgcaatgacagggcttgatataagtatactctgatcactaaaatcaaatggtaccttgaggaattagatctagtagcctsaaagtttcgatgtgatatctccaaagtgttcgcattcactgaatgttgaattaaaaaagaagtctgcagacaaaattctaaacatcacctgactctcctactacttccctttccaaataggttccttttcttaattattactcttccaggataaatagacaataagactgacaaatcaaacaatcaaacatattagggtatttgggggtttagttggcagcatgtcgcaacttcttccaaatctgttttagtattaaaccataggagtacactgaatctggtaaacacaataataacataccttttccattcaaacttcactaataaatccttgtcctttcaatataagaacagagactctttctgactaagaattccatatttacagtaaaagaccaaaatgttgatgcacttgtctttttatttatttatgttttcttctagatgagatattggtagagagtacagtgaatattgtactttggctgggttccttatactcacactctaagataagaaatcagctatatgttatttattaagaaaatgctcccaggagaaacccatgtaggaatggagaaagcagggcttgatattgaaagaagccaagcaaaggtaaaatttcaggcaaagtctcagtctcaacctgattgtacagggaagctgtgaagtatagatcaggcctcagaatttgtcctcagttcagtcaagggagctaggcttttataattctgcaccagtcattggctaaaagctaccctggagggacataaattgccaggcacttgtggctcccaccagtggtcggcaaagcagctctagtagttcaaggacattcctccaaaacaagttgaaagtgtaagtggaaagaagtaaagcccttagaagctgaggcattttggtctgaacactgagagtgcccactacaagtgagttgtgagtgtttgcgaattaaatggagtgagctaaaattcattgggggtgggggtggtgtttcttgtcagtattgttttaaaatccagcacagaaagcattcaatggttttgttgccaagtgtacagcatccatttccaagtcttacttcaagaatttacacttttctgtgttcctaagaaaaatgatgaaagcagaaaaagaaaaatttgtatttcc

SEQ ID NO: 699430 - DNA, 1301 bp, Homo sapiens
aatctaatacacttcttgaaaactttagaaactgcattgaacaaattaaatgacctaacttttcggtgactcaggcttcacattttaaccatataattgatgtgattattactacggaatcattttttgaaccagctgctggagcatccatattctataaatataggttcagttttcctgagaaggaaaagttataagaatcaaatgtttaaaaggtgatttatgagttgaaaataatacactcccaatagaattcgagattctaaaagtgaggtaaataccttagtacacataaaaatgccaatattaagaaaaaaattataattttatatagttttatataatttaaattttctaatttacagtgtaggaaacttacaattcatgtcatttttacaaaaggaaatatttatctaaatttcttaccatttttgtctcagtttcataaaagtcaacagttgtctaaacgtcttaggatccttttgtccatttgatactaatgcctagggttggtttgtccaacaggctctgtccttccccagtgccatcagtgagtggggctctatgtcagccaaccgggaacaagaataatgcctggaaatgcttttgtgtcaattcagactctgtgacacaacataaagggaatcttttaacggagcacctccaaaagagaagggaagtagcagttgaaaataaatgaatcacaacttttttattaattcaaagcacatacggtttactaaaagtaacccaaacataatttcatcatcgagaaaacctaagtatgtattatatgtgaaagcatagaaaaccccatacttctggccatgtcttgtaaccagcggctcatgcttgtaatctcagcactttgaaaggtcaaggtgctggcctcccaccttcaggtgggaggattacttgagtccaggagtttgaagccaggagtttgagatcagccttggcaacatagccagaccccatgtctaaaaaaataaaataaaataaaaaattagccaagcatgtagccccagctacttgggagactgaggcagaaggatggcttgagtccaggagttcaaggctacagtgagctatgatgaagccacttcactccagcctgggcaacagagcaagaccctgtctctaagaaacaagacaaaacaaacaaataaacaaayaaaggcatacttcctctagaggggaaaatgtcattttaaaagccttataatacctgaagataagtgctaacttctaagcaaaatgctaaacatagagaagttaagaaccaattatacatcaaatcc

SEQ ID NO: 699431 - DNA, 1889 bp, Homo sapiens
aaacacaggaaaatgaatgggaattgagaatgagaaattcaagtctgcactgcctaacttcaggtttatttttctatgaaaaaattataaaaacattatttttatttatttatttatttttgagatggagtctcatcctgtcacccaggctggagtgtagtggtgctatctcagatcactgcaatctccacttgccaggttccagcgattctcctgcttcaagcttccccagtatctgagattgcaggtgcccgtcgccacacccagctaattttgtatttttagtagagatggcatttcatcatgttggccaagctggtctcgaactcctgacctcaggttatccacctggcttagcctcccaaaatgttgggattacaggcgtgagccaccacgcctggcctaaacacattatttatttgaatcacagtctataggcatatttgtaacatgtagcaaaaaatatttcttcccgatgcagatttctagcacaatgtgtggttggcatccctcacaaaacccccacaccattttcagaatagtatcgtatctggggtattgtaatcgaggcacatccttactctcattcctaacaactctttcttttaagaaactgacatattactcatckgtgagtctatgtttggtactatcttgtgactggattgctactatttttcctttggaagagtttgccatcacccccatgatctgagccacaaccacaagaccccatctggaaaagtgatgtgctgccatttagtttcattccatgaaattttccaaggccattttgcatttcaacaaagtgtgactttatgtcgctcacacatatagatgagggttttttttttctttttagagatttcactgatattccaaaaaatatttctaaactcttcattttcttcattattactcagtttagcctgataagattagtaaaagctaactttccatctcataaatttaaaaatatataaaaattattgatgtttcttttaaaaatatgagatagctatttttaaggcctaagatttctagttagtttcagcaagcactcagtacctcgtttaatttaaataacattaccccagaagataaaaatataacaaacgatattgtaaacagtttaagggtatttaaatgatttataacttcaaaaatatcctatttgtctaactttatacaggaaaacaataagaaacatgattcctatcaatttgttttaatacatttaaaagcagattcttctccatcactaaagcatgtttgactttgaataaatggcttaaactgaaaaaaaaaaaaaaacttctttttaaaattgagaggttacacaagatttgtggagattcagtagaatcacagggaattactttcaaaatcactggcatttatctacccagaaagtcaaaggcagagcccagtatctgtgctttatgataactcccttggcaattctacggtacaactctgttggcaagcctgttggatttaatcatttctgagcactcggtcaaatatattattttatgattcctagtttaccttctaataaggggacggcttgagatgtctcttaattccttcacccttaaatataggtcattttgcagaatttcagttttccttcttgggggactcaagagagtccaggctaaactcatgatgtaatttaactgctgtgtcacttgagataaaagaaagctgagagatttagaaaactaatctaagcctggaaaaaccatctcaggagtgatagatatccagaaagatgcagggtggagtaaaattttaagaagattctctaccaaattttaggaagcacttttaaagtactctaatgtggcaaaccgctataattccttcttatacaaaaggaacaa

SEQ ID NO: 699432 - DNA, 1780 bp, Homo sapiens
catcatttgccatattctaattgtctaataaattaatatcaatgctaaaaacagatttgtacaaatattcatttgggattagagccagctaattcagataaacacatatctttccactgagctgtatgctccaaagcagaaatttataaaagcaactctcagcaaatatgaataacatatttggaagagccaatataataaatttgaaaactctgagctatgttgcagtgtactgctcatcaaagagtatttttacattagtcagccctaaatgtatttccttattctgtgtaatagattcatattaagcagacagatatgcaatagataaagcaggaacgaacacctccccattgacaagccgtcagaagggcaagggaaatatcccagatgagagggaagaacaacaacaaaaaagtcaacaacaacaaaaatgtcaacaacaacaaagtagcctctgaaataaatgtcttcgttaatccctttccaacaataaatcgcgttctgagtgttcaggctaacacttaaagcctgaatcaagcgaaaagctattcttgcagccaccatagtctgcaaaatgttctgtgtatctgccttgtttatctttccatgttatcagctaggtcacgatgagtaaatctattcacaaattggaatttgggtgtaattatacaatgatcttgagcaaatttgtctcgattagtaatcattgacattgcatcctactatcagagctttgattgtgagttttaaatacttcaacaaccagactctctgtaccagttgcacctttcagtcctgtgaaacctgtatggatgttcatcccatatatttcatatacgcttatatctactgtatcacatgtcatatttcttgtctttgtaccacctctatttcaattaaaatatttttccctacttcaaaacatttgtggtcttgttttctctgggaaatctttccagttacccttcattccagtaaacaaaagtagcaaaagagacgactttctcaatgtgatttcaaacacatcagaaagtgctcagttttccagaaaacatatggctaatgtttaacttcaactttttaaaagaagcttacctaattttgayaattttctttgttaatattaatcattcattcaccctaatgagccattattatgtgataagtccattttatacaaagaaagtagaatatgtttcttgccttcagattcttcacagctccaagcagaattcagatgtgtgaaccagtaattgtaataaaatatttcataactattagaatcaatgggaaatcaataagggagcaattaatttttcagagagggtgggaaatgtatcaggaatttcactaatgaagaactgctataaatgattattaaaggatgaattaaaatttacaaagatatgagataagaaaggctattctaggaagaataaaaaagtaaaagcgtttagttataaaattggggaaaagggatgtttggtttacagaactgtagcagttcagaatcactggatatgggggggcacgaagaaaaatgacagaagttggaattcaattatcatgatcttgtatatcattgtacattcttggacattatccatgaacaatgggctagcacagagggttatggtaaggaaatgaaggatgggagagaaatgtcagctgggtagagggaatattggtgttactgttcttttgcattcatccttccaggctgctagattttgaggagttttcctcagtgtgcagactcagtgagagttggggccaa

SEQ ID NO: 699433 - DNA, 618 bp, Homo sapiens
tctgctcactgcaatctccgcctcctgggttcaagcaattctcctgcctcagcctccccagtagctgggattacaggctcccaccaccatgcctggctaaatttttttattttttatttttagtagagatgggttctgccatgttggccaggctggtctcaaactcctgacctcaggtgatccgccagccacggcctcccaaagtgctgggattacaagcatgagccaccacgcccgacccaccattcttgcattaagcatattaagagataccattcagagccagactsatagttgagacagtatttattttttaagtggcactgaggtcatatactttaatccctcccaacaaatgtaacagtcctctgcccatcattagcgattctgaggatgaaacgttatgcaaagtcccttgcagagtcaaatttggcctgagagataaaaagtcgagcttagcagatggcagagaataaaagggagcaggggcaggagaaggctcgtctttttaatctaagcccaaagcccaaaccaggtgccagaaagataaaataaaaactgtgcctatagtgttgaaatgctttagggatgctgaaggacagtctttagagaatcatt

SEQ ID NO: 699434 - DNA, 1055 bp, Homo sapiens
gggaacaatggaaagatgggtatttttgaatatgggctatctgaaccggaattgcatcctaaaaagataaaaacaaaaatggtatcacaaacaatgtaagaagaagttcacataaaagaccagcatgtggtgcctgttttgctttgtctattcttctcagtggccatggccctcattcttcactctcctgctcccacccccmacccatccacagactctaggcttcatcaggtgtctgaggattcagttacatctacatttgctttcaaatgacatctatgtgacagagagtggtcactcagaataggctgcagtcctgttcttatgccatttgggctctagtacttctttctgaccagtcatatacaaataaatcctttacaacagtagagagagaacaaatggctcttactcttgagctcttcaagaaatttaaataaatccttttctttcattattgcaatccgggcagcattagcaaaggcagccatgcttgagcttggaggtgtgcatatgtctggcttaagtgtcctttttccatagcccatagtgtagggactccacaacattcctgggccagtatgctggaattttctttggaaatagctttaaaaaaaaaagtaattcagaaatggatacaaagagacataggacaaaaattttaaaaagtcaagttgctagttacatatgctgaagaaacttattttaaatctaatttgcatattcattcaataatatttgagtgcccatttctgtgatatttatagaatatttactgataccttccacaggccatttgactatttatatctgtattccttggcttttggtctccttttttccccaaggcttcccagagtttttgtttttgttttttttagagagagatgaggtcttgttatgttgccaggctggactggaactcctgggctcaaattctcctccctcctcagcctcctgagtagctgggactataggtacctgctatcatgtccagctctgacctccctgttttgtttagaaaaatacttatgaattatgatccttgacaaaca

SEQ ID NO: 699435 - DNA, 2482 bp, Homo sapiens
ggatcccaaggcagaagaatttttcttagtacagaacaaaatgaaaagtctcccatgtctacctctttctacaccgacacggcaaccatccgatttctcaatcttttccccacctttcccccctttctattctacaaaaccgccattgtcaccaacagctcattgacaatggcatttcttgttctttaggtctgtaatgttcttcacaattttgcctagttagctttaactcatccttccgtggctctccatttctacagcacatcctcagagcagccttccatgaatttcagacagggtcatatcccctggtatgtgctcttctaatatcttatatttctctcttgcaccatttaccacacttttaattaaataattaattttgaaagtagttgtataattccagatgtgagcttcatgtttggtcaggcagtatgactgtctcatttgctgattaattccaggacctagcagagtacctcatacatcataggcctttgagaaacacttattgaaggaatcaacaagtaaggggataatattttttaaagtatacgtcatgcatttattaccaacaaccccctcaactccaaaatcgggcacaaggattgaaaataaaaaattcattgcactgcttagtaaagcattactagtaactttcattaaaaatggacaaactttgttaaaaatttatgaagccttcagatgatttggttacagatatttgtaatatgtgcatttaaaactatatgttaactgatataatggaatatgatttgaggaaatgactcagcaaatgattctacagacatccttgtgagcattcataatctgaaacaaacagcaaaatgaggtcaccaaatgtaccaacagggggaaaatactttctaatgaaggcctaaagatatctgtgaaaactattctctgaagcgagttgggagatctcattcaaaattattgcaagagggtcaaatgtaagaatcttgggaaatcacatttcagagaatatataaaaatctaaataggctttcacattttccagattttgctcaatcaaaattcaggacagaaagtcctaatatgaaatcttgggtacccccatctgctcctaatgaataagaagtatgttaaagaccaaaattattggcataataatccattacatatacatcacatgtagtgtaatctttatttttcttatgaaaaaatcatgtttaaaaatggcaaaaaagtacacataggctgttttatatagctgtaaaaatttatatctgaacagatctaacatgattctgctatactcagaattcattttatgagaacatgcaagtaaagtactttttctaatgtatataaagatacctaattaacaaggcacactgtactaatgactaggaaaagtagctttttctcccccaccaccctaagaattcttgtcatgatttcccttttgcagtaaaattttgagaagcaattggcaatttaggaggtaacagggtatcttttggtaaaatcttgaattgttgagctcttgggactgatytctctttgggagtgtcttttctttgcatggggcttctagagatgtgttcagatttgcttattaagtgtttagtgtgtattagatcacacatgaatgtgtcctgacaagctcagcctagccacagtgagcagctttgtggctagcaaaagagaaagagcagttgatttgtacccagctgctgtcaccttggtgatgtaccagatagcaagcaagcagatgttggtttgttgcctttgtcctctttcctcctaaaacagtactggcgttcccacttgaacacagctgtgagtttcttgtgtgttgttatttgttttttggtgtgaattgtcatctttgatttttttttaacccccacactcccccagacaagtcaaaacctccaggtgaatgagttttttggggagaatcttaagtatagtttctgattcccctaaacctcttcatggaaccttagggatcttaggctcctggattgggaaatttgaattatttttctgtttctgttttgtgcagtgcaggcaatgtggttctgtagtcccctatacttggagtgagttctgaggataccatctgtaaaacgtctcttctagaatccccactgcctgaagtctgtaaaggccctctgcccacgaacaaaggagggacttaataacccactaaggattttggtaggaaaaggtaattatttcccaagatgagggctgcctgggagactcttctgctatccccaggagtcccttcctctatgctgatttctaggctcctatcatccaacatcttcaacttcagatgcaagctggtctcttactgcctccctggagttttgttgttggacaatttcctgtccatggatcctcatgagattatgctgaaatttcattcccaatgtcatcaggaatgaaactaaccaaaattgaactctagagaatgtgctttaat

SEQ ID NO: 699436 - DNA, 2482 bp, Homo sapiens
ggatcccaaggcagaagaatttttcttagtacagaacaaaatgaaaagtctcccatgtctacctctttctacaccgacacggcaaccatccgatttctcaatcttttccccacctttcccccctttctattctacaaaaccgccattgtcaccaacagctcattgacaatggcatttcttgttctttaggtctgtaatgttcttcacaattttgcctagttagctttaactcatccttccgtggctctccatttctacagcacatcctcagagcagccttccatgaatttcagacagggtcatatcccctggtatgtgctcttctaatatcttatatttctctcttgcaccatttaccacacttttaattaaataattaattttgaaagtagttgtataattccagatgtgagcttcatgtttggtcaggcagtatgactgtctcatttgctgattaattccaggacctagcagagtacctcatacatcataggcctttgagaaacacttattgaaggaatcaacaagtaaggggataatattttttaaagtatacgtcatgcatttattaccaacaaccccctcaactccaaaatcgggcacaaggattgaaaataaaaaattcattgcactgcttagtaaagcattactagtaactttcattaaaaatggacaaactttgttaaaaatttatgaagccttcagatgatttggttacagatatttgtaatatgtgcatttaaaactatatgttaactgatataatggaatatgatttgaggaaatgactcagcaaatgattctacagacatccttgtgagcattcataatctgaaacaaacagcaaaatgaggtcaccaaatgtaccaacagggggaaaatactttctaatgaaggcctaaagatatctgtgaaaactattctctgaagcgagttgggagatctcattcaaaattattgcaagagggtcaaatgtaagaatcttgggaaatcacatttcagagaatatataaaaatctaaataggctttcacattttccagattttgctcaatcaaaattcaggacagaaagtcctaatatgaaatcttgggtacccccatctgctcctaatgaataagaagtatgttaaagaccaaaattattggcataataatccattacatatacatcacatgtagtgtaatctttatttttcttatgaaaaaatcatgtttaaaaatggcaaaaaagtacacataggctgttttatatagctgtaaaaatttatatctgaacagatctaacatgattctgctatactcagaattcattttatgagaacatgcaagtaaagtactttttctaatgtatataaagatacctaattaacaaggcacactgtactaatgactaggaaaagtagctttttctcccccaccaccctaagaattcttgtcatgatttcccttttgcagtaaaattttgagaagcaattggcaatttaggaggtaacagggtatcttttggtaaaatcttgaattgttgagctcttgggactgatctctctttgggagtgtcttttctttgcatggggcttctagagatgtgtkcagatttgcttattaagtgtttagtgtgtattagatcacacatgaatgtgtcctgacaagctcagcctagccacagtgagcagctttgtggctagcaaaagagaaagagcagttgatttgtacccagctgctgtcaccttggtgatgtaccagatagcaagcaagcagatgttggtttgttgcctttgtcctctttcctcctaaaacagtactggcgttcccacttgaacacagctgtgagtttcttgtgtgttgttatttgttttttggtgtgaattgtcatctttgatttttttttaacccccacactcccccagacaagtcaaaacctccaggtgaatgagttttttggggagaatcttaagtatagtttctgattcccctaaacctcttcatggaaccttagggatcttaggctcctggattgggaaatttgaattatttttctgtttctgttttgtgcagtgcaggcaatgtggttctgtagtcccctatacttggagtgagttctgaggataccatctgtaaaacgtctcttctagaatccccactgcctgaagtctgtaaaggccctctgcccacgaacaaaggagggacttaataacccactaaggattttggtaggaaaaggtaattatttcccaagatgagggctgcctgggagactcttctgctatccccaggagtcccttcctctatgctgatttctaggctcctatcatccaacatcttcaacttcagatgcaagctggtctcttactgcctccctggagttttgttgttggacaatttcctgtccatggatcctcatgagattatgctgaaatttcattcccaatgtcatcaggaatgaaactaaccaaaattgaactctagagaatgtgctttaat

SEQ ID NO: 699437 - DNA, 1366 bp, Homo sapiens
ttccgatggcggagattgtagcttttagggcagaagatggatctcctccggcaacgtgtgcatgtgcaggcagccgctggtttccttgctccttccccggattctgagccgggactrtgggttcctcatttatattattgttcagcatatagtcgaggctcagtaaatgttggctgaatgaagaaagaaaaggattgtgcagcaggtctccagttttaagattcttcaggtgacttgccttctgagtattgcagagaactgccattgcctcctgagaaaagcagtctacggtctgtgctgggagtctcaatggcattcctctgtctggtcaccgcatccctctcaatctgtgtggtggggaataaagaatgtgaggtggcaatggggctgaacattcgagctcattttccaggagttggttcccttctataggaacattatccgtgtataatcgtggcttggcattgatggaactgttcaaacaaacatgtcatgctcccaccaatactgttaataagaaactttgggtggaggcagagggaagcacgagacatctgaatcttgcatatgttttctttttttgacggagtctcgctctgtcgcccagacgagtgtagtagtgtgatctcggctcactgcagcctctgcctcctaggttcaagcaattctcctgcctcagcctcccgactagctgggactacaggtgtgcacctctacacccggctaatttttgtatttttagtagagacagggtttcaccatgttggccaggatggtcttgatctcctgacctcatgatccacctgcctcggcctcccaaagtgctgggattacaggtatgagccaccacgcccggctgcatatgttgtttgttaagtagtgaaatttgcaatcagtcctttggaaggagactaaattaggggtgggatggaaggtgagatagaagacagcatatgcgattgaaaagtggagaattctgatggttcttttattaaaggacaataagaaaaaaagttattaagaatagggtttcaattttgtaattgaaccctgtggagtatatgcaactagaaagatgggatagagatgcaacttgctttgctttatatagtatccaaccactctttatagctgtgcagtctgtcagatattgtccagactctgtaagtacagaccagtttctgcagttactgctcttgttttcaagagccttgttgtgtactaatttacttgttactgccctttatttttttctttgcagtgcaaagtgccataattgttaaaggtgtatgtatttgaggatatggcaagttaataataaattcttccttctaatcccctcgaatgttgatcattaaaaacactg

SEQ ID NO: 699438 - DNA, 1366 bp, Homo sapiens
ttccgatggcggagattgtagcttttagggcagaagatggatctcctccggcaacgtgtgcatgtgcaggcagccgctggtttccttgctccttccccggattctgagccgggactgtgggttcctcatttatattattgttcagcatatagtcgaggctcagtaaatgttggctgaatgaagaaagaaaaggattgtgcagcaggtctccagttttaagattcttcaggtgacttgccttctgagtattgcagagaactgccattgcctcctgagaaaagcagtctacggtctgtgctgggagtctcaatggcattcctctgtctggtcaccgcatccctctcaatctgtgtggtggggaataaagaatgtgaggtggcaatggggctgaacattcgagctcattttccaggagttggttcccttctataggaacattatccgtgtataatcgtggcttggcattgatggaactgttcaaacaaacatgtcatgctcccaccaatactgttaataagaaactttgggtggaggcagagggaagcacgagacatctgaatcttgcatatgttttctttttttgacggagtctcgctctgtcgcccagacgagtgyagtagtgtgatctcggctcactgcagcctctgcctcctaggttcaagcaattctcctgcctcagcctcccgactagctgggactacaggtgtgcacctctacacccggctaatttttgtatttttagtagagacagggtttcaccatgttggccaggatggtcttgatctcctgacctcatgatccacctgcctcggcctcccaaagtgctgggattacaggtatgagccaccacgcccggctgcatatgttgtttgttaagtagtgaaatttgcaatcagtcctttggaaggagactaaattaggggtgggatggaaggtgagatagaagacagcatatgcgattgaaaagtggagaattctgatggttcttttattaaaggacaataagaaaaaaagttattaagaatagggtttcaattttgtaattgaaccctgtggagtatatgcaactagaaagatgggatagagatgcaacttgctttgctttatatagtatccaaccactctttatagctgtgcagtctgtcagatattgtccagactctgtaagtacagaccagtttctgcagttactgctcttgttttcaagagccttgttgtgtactaatttacttgttactgccctttatttttttctttgcagtgcaaagtgccataattgttaaaggtgtatgtatttgaggatatggcaagttaataataaattcttccttctaatcccctcgaatgttgatcattaaaaacactg

SEQ ID NO: 699439 - DNA, 1861 bp, Homo sapiens
ataggtataggctacccaaagaggaagcacagtagcttctgcaactccaggctagtagcagcagaactgacatcatccttggccagaaaggaagagtgcagggactggcaacctggaaagcagggaaggagtttgggagaagtgacctttggctgctaaggcagccccccaaccccaggagaagagccgagaataggcaccctaccatcctctgatctctggccaggacactccttggccaaacccactcagaagccaggaggcataggagcccactgctgtggtccattcgggtcagctttgtgggcaagagcagagtggagctggaggggaaaacaagagatatccagcacatgtagcaatttgctgccgtagcacttaacacactatttaatggtgcaagagaattgtatttttattcatggttgtgcctagtaaaattctggtacatggtaagtgctcagtattactgagtgaatgagcaaagacctgaaatactgtggaaacagtaaaagcaaattaccacacaattaggaggaattattttcagacataggatatttaaaacatcactcaaatactggagcatgattcagcaataaattctattccataaaccaggtagataaatgtcacagctttaaaatatagttaagtacagttgatcctcgttattcatggattccgtatttgtgaatttgcctaacctaaaattttgtggtacagcaaaaaacttgctgtacacatattctgagctgaggttgaacaaggccatgttccagctttcatactataaacgtgtcctttttacgctaatgccatggtttttgcatttctgttctttttttgatttcactgtttaaaatggcccccaagcatagtgctaagggcaaaaagctgttcctaagggyaaaaaggctgttgtgtgccttatgaagcttatgtgtcagataagcttcattcaggcatgagttacagtgttgttggtcatgacttcaatgttaatgaatcgattatattaaataaggtgtctttacaacagaaatttacatgttgactgcttgatgaaaatgtgaccagtggcttgcagaaatctagccttgtatttcccctaggttctatatttgctaattcagtgttcgcagtgactttatagaacgtaactaccttgaataatgagaatcaaccatacttgctgttttccagttcctaatagatttaaaaaaaaaattcaatttacaaaagacacaagatgacttttcttgtcagcagctaactgatcctcatgatgtaaaaccagaaagaggggggaaacaccaaaattcatcaccactgcataatttcaatgtgatatattaaaatttattacttcctgaatagtattcaactaaatctatattatttcaattaaagttacctaggccatatggtttgaaaattgaaaaatccagtaagagggaaaaggaaaaataccttatttaatacattgactttaagaacaatcacatatgcattattcttactatctgaacttagcctctggtaaattcaatcctgcttagttaggccaattgataccctctacaataagccctacatgatcaaaaagcttcatgctttctacttacagcagcatagcaaatctgaagttcttaaaaaaaaatcgccattctattaacaattataaacgattttccatgctctggtacaagaatatttaatgttagccaagaaagatagccatctattccactgaggattgtaatagaggcagccttttgatttttatatttgtttaaagtacacaacttgaatagtaaaatagaaactgagctgaaatttctaattcactttctaacca

SEQ ID NO: 699440 - DNA, 1861 bp, Homo sapiens
ataggtataggctacccaaagaggaagcacagtagcttctgcaactccaggctagtagcagcagaactgacatcatccttggccagaaaggaagagtgcagggactggcaacctggaaagcagggaaggagtttgggagaagtgacctttggctgctaaggcagccccccaaccccaggagaagagccgagaataggcaccctaccatcctctgatctctggccaggacactccttggccaaacccactcagaagccaggaggcataggagcccactgctgtggtccattcgggtcagctttgtgggcaagagcagagtggagctggaggggaaaacaagagatatccagcacatgtagcaatttgctgccgtagcacttaacacactatttaatggtgcaagagaattgtatttttattcatggttgtgcctagtaaaattctggtacatggtaagtgctcagtattactgagtgaatgagcaaagacctgaaatactgtggaaacagtaaaagcaaattaccacacaattaggaggaattattttcagacataggatatttaaaacatcactcaaatactggagcatgattcagcaataaattctattccataaaccaggtagataaatgtcacagctttaaaatatagttaagtacagttgatcctcgttattcatggattccgtatttgtgaatttgcctaacctaaaattttgtggtacagcaaaaaacttgctgtacacatattctgagctgaggttgaacaaggccatgttccagctttcatactataaacgtgtcctttttacgctaatgccatggtttttgcatttctgttctttttttgatttcactgtttaaaatggcccccaagcatagtgctaagggcaaaaagctgttcctaagggtaaaaaggctgttgtgtgccttatgaagcttatgtgtcagataagcttcattcaggcatgagttacagtgttgttggtcatgacttcaatgttaatgaatcgattatattaaataaggtgtctttacaacagaaatttacatgttgactgcttgatgaaaatgtgaccagtggcttgcagaaatctagccttgtatttcccctaggttctatatttgctaattcagtgttcgcagtgactttatagaacrtaactaccttgaataatgagaatcaaccatacttgctgttttccagttcctaatagatttaaaaaaaaaattcaatttacaaaagacacaagatgacttttcttgtcagcagctaactgatcctcatgatgtaaaaccagaaagaggggggaaacaccaaaattcatcaccactgcataatttcaatgtgatatattaaaatttattacttcctgaatagtattcaactaaatctatattatttcaattaaagttacctaggccatatggtttgaaaattgaaaaatccagtaagagggaaaaggaaaaataccttatttaatacattgactttaagaacaatcacatatgcattattcttactatctgaacttagcctctggtaaattcaatcctgcttagttaggccaattgataccctctacaataagccctacatgatcaaaaagcttcatgctttctacttacagcagcatagcaaatctgaagttcttaaaaaaaaatcgccattctattaacaattataaacgattttccatgctctggtacaagaatatttaatgttagccaagaaagatagccatctattccactgaggattgtaatagaggcagccttttgatttttatatttgtttaaagtacacaacttgaatagtaaaatagaaactgagctgaaatttctaattcactttctaacca

SEQ ID NO: 699441 - DNA, 1208 bp, Homo sapiens
tgctaaaatatattaatatatgttagtatcaggcatattaaatgatagtatttaattatgtttgtaaaatacactacacttcgcagagcctcaattagtaaataatagtctatatatccatacatctgaaaaagtaatactataaaagttgaatactataaatggtttatagaaaccaattctattatataatcacaccacacatgctcaattttttcctcatctgatacatctgttgtcaacttaaaatcgatctaattaaataacttgttactgggaggtgcttgattaaaaattgtgggggagaagtctgaataaatgtgacctgttcttccagacttacagagtactcaccctatcatctttggatgctacagttaacagcaaagatttgtaaggcatgatatgtacactctgttacataactgttagaagcagtaattattatttcccaaaaagaggggcagaaaaaatatttttgaaatacacagagtaggatgggttgggtggctcatgcctgtaatcccagtactttgggtggctgaggcaggcagactgcttgagcccaggaaaccaggcttgagaccagcctgggcaacatggtgaaactccttctctacataaaaaaaaaaaaaaaaaaaagatagaaaaaggtgctacacatgtgtagttccagctactcaggaggctgaggtaggaagaccacctgagccctggtaggttgaggctgcagtgaaccaagatcatgccactgcactccagccttggcaacaaagtgaaagcacccaaattaggagtgagattatcaatgtggatgggaacactggaagaggaagataaagtttgaaagatgaacaagttttgggtaaactgactgaaaagccataaatattgtggctgagaatgacacaaaatttggctctagtagagacaagctaggaagtactgggagattaagtgtgtaaaagcagaatagtcatcaaggtaggcaaggaaatttctactttaccctgtaagcagcagaaagaccactagtagtttcttaataggacataaytagaaaaatgatttagacatgattttggtggctgtgtgtaggatgaactggaaaaaaatgcataaggcagggaaatggatggaagactactgtaatattcaagtaaattgtagtgtgatactggactataaatgggaaagaaatttagata

SEQ ID NO: 699442 - DNA, 2924 bp, Homo sapiens
gagactaacgtctcatgcagtctgtcattgaccaaaatatcattaagtggtacgtgaccgttttttgcaaagtaccctggtatactaaaaaacagttgataaagaatgactgtaatgatcattacaacagagtgattaccttaaattattagatcactcaatcccacttgttgagcattcattgttttgagcactttgaaatagtgcaaggaatttagaagttatagttgctcatctcaaggggataacaaccaaaaagggtataatgagatattataaatgaaaaacaacactttgggaggccgaggcgggtggatcatgaggtcaggagatcgagaccttcctggctaacaaggtgaaaccccgtctctactaaaaatacaaaaaaattagccgggcgcggtggcgggcgcctgtagtcccagctactcgggaggctgaggcaggagaatggcgtgaacccgggaagcggagcttgcagtgagccgagattgcgccactgcagtccgcagtccggcctgggcgacagagcgagactccgtctcaaaaaaaaaaaaaaaaaaaaaaaaagaaaaacaagattacgcagctaaaaagattttaaagattcaggcttcaggggtggaccaatccatgtattcagctctcttggccacagttattgggcacaagagtcaaaggagtcaatgagacagagtgactcccaggactttgaatctattagaagagacatgttcttcctttctactgtgtgacttgagaatgttaggtctggactgcactgggcattttaccatcctgagagaaggacctcaagctgcttggaagctacttctatagaacctgaagatgaagtcaaaggaaggcagcacaaagagaaaactggatccttggtgacagcatttgaatcactagattaactcttgcctgaagccagacatctagactttttaattactaggtccaatatgtttcctttatgatttaagtcagtttgaattggattttgtcatttgcattctagaacatcctaattaatacaccatccaaagaaacaaagataactaaaacaaactaccgtttttaaagaaaagattttaatgttcatggaaagtgaattttcacacaaattattgcatttcatagcatccacccagatttagtcacttttttcatatactaacaaatgtagggttttttttttttttaaaaaagctcttattctttttttcttaaaaaaatatttatttgtgttttttgggccgggcatggtgggtcacgcctgtaatcccagcactctgggaggccgagacgggcagatcacgaggtcaggagattgagaccatcctggctaacacggtgaaaccccgtctctactaaaaatacaaaaattagccaggcgtgttggcgggcgcttgtagtcccagctacttgggaggctgaggcaggagaatggcatgaacccaggaggcagagcttgcagtgagccgagatcgcactactgcactccagcctggggggacagagcgggactccctctcaaaaaaaaaaaaaaaaaaaagaaaaaaatttatttgcgttttttccctagactgctaagcagaaaaaagctcttattcttatccattatcctaattcttaaaaacaaagtcctaatttatgatttcagtatttcagtgacagtaatcataagaagtaacctgattagaccattcactttgcaaaattctctgtaagggaagcagtacttagaatacctaatgtggatgttgtttgcctgaagagttggtgggtataaataaaggctggtaaataatgatttttttaaatgcctctggtatgagaacagtcataaatcctggaattaagacattttccccatgacttacactcccaggactaaaaatgttgccttttagtcctatttagaattgtcttttggatttgctgataaaccctctcatgtctgtatgacttatacaatcagatgttggctgatgcattcagatccctgtgctgtgaatatttatttatttgctttctcaattaaatgagtggttttggtgacaaaccactggtgttaacacaaacagctaagctgatcatttaggaaaagctcaatattaaaggattctaagtccattgttaggctatgacagtaactccaatctcattaacaattaaccactcgatcaccacctaattcataagaaaaaactaccatgaataaaagttcttgactgggtgcagtgggctcatgcctataatcccagaactttgggaggccaaggcgagaggattacttgagcccagggttttgagaccagcctgggtaacatggggaaaccccttctccacaaaaaaatgaaaaaattagctgggccatggtggtgcatacctgtggtcccagctacttttgaggctgaggtgggaggtgggaggatttcttgagcctgggaggtggagcttgcagtgagcgccactgcactccagcctgggtgacagagtgagactctgtstaaaaaaaaacaaaaaaccacacacacacaaaacaaaaaaacacacacacactttccttctgctgtttggaaggaagctatttctatttattcagtgtttggggacctaaatatgtgtctgaaaagaaaatgttgctgtactacaggatggtgattgaagtcctgaaaatatcaggaaactgttctcatttattatttgtcaaatagcgctttctgtaaacacttgtaatctctgttttacaggtgaaagaagactgcagctgagttctattatcaaagcaaagtgctgtactgtacttgaaataactctagcaaatactgtgcttcctgcacagaacctgttggattactcacacaaatgtcaaagaacaggttgacattttagcaagttatcagcctggccca

SEQ ID NO: 699443 - DNA, 2924 bp, Homo sapiens
gagactaacgtctcatgcagtctgtcattgaccaaaatatcattaagtggtacgtgaccgttttttgcaaagtaccctggtatactaaaaaacagttgataaagaatgactgtaatgatcattacaacagagtgattaccttaaattattagatcactcaatcccacttgttgagcattcattgttttgagcactttgaaatagtgcaaggaatttagaagttatagttgctcatctcaaggggataacaaccaaaaagggtataatgagatattataaatgaaaaacaacactttgggaggccgaggcgggtggatcatgaggtcaggagatcgagaccttcctggctaacaaggtgaaaccccgtctctactaaaaatacaaaaaaattagccgggcgcggtggcgggcgcctgtagtcccagctactcgggaggctgaggcaggagaatggcgtgaacccgggaagcggagcttgcagtgagccgagattgcgccactgcagtccgcagtccggcctgggcgacagagcgagactccgtctcaaaaaaaaaaaaaaaaaaaaaaaaagaaaaacaagattacgcagctaaaaagattttaaagattcaggcttcaggggtggaccaatccatgtattcagctctcttggccacagttattgggcacaagagtcaaaggagtcaatgagacagagtgactcccaggactttgaatctattagaagagacatgttcttcctttctactgtgtgacttgagaatgttaggtctggactgcactgggcattttaccatcctgagagaaggacctcaagctgcttggaagctacttctatagaacctgaagatgaagtcaaaggaaggcagcacaaagagaaaactggatccttggtgacagcatttgaatcactagattaactcttgcctgaagccagacatctagactttttaattactaggtccaatatgtttcctttatgatttaagtcagtttgaattggattttgtcatttgcattctagaacatcctaattaatacaccatccaaagaaacaaagataactaaaacaaactaccgtttttaaagaaaagattttaatgttcatggaaagtgaattttcacacaaattattgcatttcatagcatccacccagatttagtcacttttttcatatactaacaaatgtagggttttttttttttttaaaaaagctcttattctttttttcttaaaaaaatatttatttgtgttttttgggccgggcatggtgggtcacgcctgtaatcccagcactctgggaggccgagacgggcagatcacgaggtcaggagattgagaccatcctggctaacacggtgaaaccccgtctctactaaaaatacaaaaattagccaggcgtgttggcgggcgcttgtagtcccagctacttgggaggctgaggcaggagaatggcatgaacccaggaggcagagcttgcagtgagccgagatcgcactactgcactccagcctggggggacagagcgggactccctctcaaaaaaaaaaaaaaaaaaaagaaaaaaatttatttgcgttttttccctagactgctaagcagaaaaaagctcttattcttatccattatcctaattcttaaaaacaaagtcctaatttatgatttcagtatttcagtgacagtaatcataagaagtaacctgattagaccattcactttgcaaaattctctgtaagggaagcagtacttagaatacctaatgtggatgttgtttgcctgaagagttggtgggtataaataaaggctggtaaataatgatttttttaaatgcctctggtatgagaacagtcataaatcctggaattaagacattttccccatgacttacactcccaggactaaaaatgttgccttttagtcctatttagaattgtcttttggatttgctgataaaccctctcatgtctgtatgacttatacaatcagatgttggctgatgcattcagatccctgtgctgtgaatatttatttatttgctttctcaattaaatgagtggttttggtgacaaaccactggtgttaacacaaacagctaagctgatcatttaggaaaagctcaatattaaaggattctaagtccattgttaggctatgacagtaactccaatctcattaacaattaaccactcgatcaccacctaattcataagaaaaaactaccatgaataaaagttcttgactgggtgcagtgggctcatgcctataatcccagaactttgggaggccaaggcgagaggattacttgagcccagggttttgagaccagcctgggtaacatggggaaaccccttctccacaaaaaaatgaaaaaattagctgggccatggtggtgcatacctgtggtcccagctacttttgaggctgaggtgggaggtgggaggatttcttgagcctgggaggtggagcttgcagtgagcgccactgcactccagcctgggtgacagagtgagactctgtgtaaaaaaaaacaaaaaaccacacacacacaaaacaaaaaaacacacacacackttccttctgctgtttggaaggaagctatttctatttattcagtgtttggggacctaaatatgtgtctgaaaagaaaatgttgctgtactacaggatggtgattgaagtcctgaaaatatcaggaaactgttctcatttattatttgtcaaatagcgctttctgtaaacacttgtaatctctgttttacaggtgaaagaagactgcagctgagttctattatcaaagcaaagtgctgtactgtacttgaaataactctagcaaatactgtgcttcctgcacagaacctgttggattactcacacaaatgtcaaagaacaggttgacattttagcaagttatcagcctggccca

SEQ ID NO: 699444 - DNA, 2924 bp, Homo sapiens
gagactaacgtctcatgcagtctgtcattgaccaaaatatcattaagtggtacgtgaccgttttttgcaaagtaccctggtatactaaaaaacagttgataaagaatgactgtaatgatcattacaacagagtgattaccttaaattattagatcactcaatcccacttgttgagcattcattgttttgagcactttgaaatagtgcaaggaatttagaagttatagttgctcatctcaaggggataacaaccaaaaagggtataatgagatattataaatgaaaaacaacactttgggaggccgaggcgggtggatcatgaggtcaggagatcgagaccttcctggctaacaaggtgaaaccccgtctctactaaaaatacaaaaaaattagccgggcgcggtggcgggcgcctgtagtcccagctactcgggaggctgaggcaggagaatggcgtgaacccgggaagcggagcttgcagtgagccgagattgcgccactgcagtccgcagtccggcctgggcgacagagcgagactccgtctcaaaaaaaaaaaaaaaaaaaaaaaaagaaaaacaagattacgcagctaaaaagattttaaagattcaggcttcaggggtggaccaatccatgtattcagctctcttggccacagttattgggcacaagagtcaaaggagtcaatgagacagagtgactcccaggactttgaatctattagaagagacatgttcttcctttctactgtgtgacttgagaatgttaggtctggactgcactgggcattttaccatcctgagagaaggacctcaagctgcttggaagctacttctatagaacctgaagatgaagtcaaaggaaggcagcacaaagagaaaactggatccttggtgacagcatttgaatcactagattaactcttgcctgaagccagacatctagactttttaattactaggtccaatatgtttcctttatgatttaagtcagtttgaattggattttgtcatttgcattctagaacatcctaattaatacaccatccaaagaaacaaagataactaaaacaaactaccgtttttaaagaaaagattttaatgttcatggaaagtgaattttcacacaaattattgcatttcatagcatccacccagatttagtcacttttttcatatactaacaaatgtagggttttttttttttttaaaaaagctcttattctttttttcttaaaaaaatatttatttgtgttttttgggccgggcatggtgggtcacgcctgtaatcccagcactctgggaggccgagacgggcagatcacgaggtcaggagattgagaccatcctggctaacacggtgaaaccccgtctctactaaaaatacaaaaattagccaggcgtgttggcgggcgcttgtagtcccagctacttgggaggctgaggcaggagaatggcatgaacccaggaggcagagcttgcagtgagccgagatcgcactactgcactccagcctggggggacagagcgggactccctctcaaaaaaaaaaaaaaaaaaaagaaaaaaatttatttgcgttttttccctagactgctaagcagaaaaaagctcttattcttatccattatcctaattcttaaaaacaaagtcctaatttatgatttcagtatttcagtgacagtaatcataagaagtaacctgattagaccattcactttgcaaaattctctgtaagggaagcagtacttagaatacctaatgtggatgttgtttgcctgaagagttggtgggtataaataaaggctggtaaataatgatttttttaaatgcctctggtatgagaacagtcataaatcctggaattaagacattttccccatgacttacactcccaggactaaaaatgttgccttttagtcctatttagaattgtcttttggatttgctgataaaccctctcatgtctgtatgacttatacaatcagatgttggctgatgcattcagatccctgtgctgtgaatatttatttatttgctttctcaattaaatgagtggttttggtgacaaaccactggtgttaacacaaacagctaagctgatcatttaggaaaagctcaatattaaaggattctaagtccattgttaggctatgacagtaactccaatctcattaacaattaaccactcgatcaccacctaattcataagaaaaaactaccatgaataaaagttcttgactgggtgcagtgggctcatgcctataatcccagaactttgggaggccaaggcgagaggattacttgagcccagggttttgagaccagcctgggtaacatggggaaaccccttctccacaaaaaaatgaaaaaattagctgggccatggtggtgcatacctgtggtcccagctacttttgaggctgaggtgggaggtgggaggatttcttgagcctgggaggtggagcttgcagtgagcgccactgcactccagcctgggtgacagagtgagactctgtgtaaaaaaaaacaaaaaaccacacacacacaaaacaaaaaaacacacacacactttccttctgctgtttggaaggaagctatttctatttattcagtgtttggggacctaaatatgtgtctgaaaagaaaatgttgctgtactacaggatggtgattgaagtcctgaaaatatcaggaaactgttctcatttattatttgycaaatagcgctttctgtaaacacttgtaatctctgttttacaggtgaaagaagactgcagctgagttctattatcaaagcaaagtgctgtactgtacttgaaataactctagcaaatactgtgcttcctgcacagaacctgttggattactcacacaaatgtcaaagaacaggttgacattttagcaagttatcagcctggccca

SEQ ID NO: 699445 - DNA, 1491 bp, Homo sapiens
gtaccaatgttactttaagttctgcatatatattactaggttggtataaaagtaatcgtggtttttgccgttatgtttaatactttgcaccaacctaatagctcacagaataaaaaaaaaagtctatgaggtaggtacagttttcatccttattttacaaatgagaaaaggaggccaagaatgataaagtaacttggtctcacagccagaaagtgatggagccaagatttgaacttgggcagytggactgtgttcttagtcactgtgcttcctgggtgattactgtgacccttgtacttgacactctgctatcaattacaagagccatttctgtgtgtgcacttgatttccttggggtctccagggaaatgtaattgtctcctcaagtccaggctttcctagaagacatggtgattgcactgataaccagcattagggctggctttgggaaagctcagtacctatgatttatggttagtatcttagattttagaacgctgagcaggaagtttttgtgctttctgaaatcctcacacctttaagtctcatgattggtgaggaggcagtggtccaagggaatggatagaaggagataataagataagccaaatgtttcaaagggagtgaaaactgttgaatgtaaatgcagctcaaggaagacttccctatctgaataaaaaggtgcaaataatgcggcctatttgtatgcatggtggcttaatgatgttgatggtgatgatgatagctttacactatcagagcgctcattctgggctaggcagttttctcagtggggtacagatattaatttatttacagtgagccagagaagtctgctgtagcttttaatgcgtctaaaatgggacacatgaaccccttaggaattttcagactgatcaggacagtttcctagaaacagttcgtgaaagggatgagatgggcccatggtatctaccccttcctagctgcgtgaacttgggcaactcaaccttcttgtgctgtttctctatggctagtgcgtgtaatttgttgttgttgttgttgtttgcttttgagacgttgtctcactcagttgcccaggctggagtgcagtggcacgatcttggcgcactgcaacctccttcaagttattctcctgcctcagcctcccaagcagctggggttacaggcatgcgccaccatgcccggctcatttttgtattttctgtagagatggagtttcaccatgttggtcaggctggtctcgaactcctgaccttaggtgatccgcccaccttggcctcccaaagttctgggattacaggtgtgagccaccactcccggcctagtatgtgtcattgacaattgttcctacctcaaaggctgttatgaggattaaatgagctaatgcatgtaaaatgcatctgcataatatataacacagctcgataaatgtgagttgctattgttgattattatggccacgtttgccgctgatgatgttcaaccact

SEQ ID NO: 699446 - DNA, 1286 bp, Homo sapiens
caagaccaaacagctcctagggcgtgtttaaggcctgtgcagtatgaaagagaatgtttcctagtaacataaccacttgcaatatttcctctggggatggggcagggtgggctggaggagagtgggattgagcctcctccagcttcagggagtctcctgagttagatcaggatgggtaaaaagttggtggatcatagaagtactctgtggtctataaagtgctattctaaggagggcactgtgatgattgactttattgtgtgtgataagggcccactcctggaggaagggcgggaatgaaggaggagtagaaggggaaatgcagagtgtccttgctgttccttctgccccgcaacccctccctcaacattctgcccactgggataatcagggtatgtatggacacgatgaaaccccttgcatgtgtgtgctagtgggaggtgataattgaggcacccataaaacctctgggtaggcagctgaatgtctgtaaacgaccctcaagtttgccctgtgtttttctctggcttctagaacaatcctgtttgcagcttgccttaatgatcaattggtctggcttccttagctagttgctaaagatgtcttttttgggaaagagaaacagcagggctgatcagcagcagcaccccccactgccagctctttcctaattgtggtgacccaagtgagtgcgcccctcaggacctgagaatgtttgtggaaccacacacttcctggcctgtgagccaattttctccattgccaggggcagagggggatgttggatgcagctgggctatttctgtgatagaaattctgggatgggagctccgagagcaagcatcagagcatgaggagtgtctcaggggygtgatcctgaggaagacaaggctgaagtctttatcctgaggctcccctaggtagggatacctgaaggtgaatttgagctggtgtaacaagagggagcaacagctgaaagaaatggcactttcctccccagatttaaggggaagagagtttgtagaggacaatgtattctctctccccgctgtgcagggagcctcgcctctttgctgccgggaagctcccagaagacagaagagcattgaggaaagtgcacagaggcccacaatgcctttgcttgcacatccacccgttactgccagcctatgacctgagctccttggatggcagcccattccctgcacaccagcccctggggcagcagcagacaccaagagcttgtgaggatggaggggtgggaatgaaggccaaggctgaagtga

SEQ ID NO: 699447 - DNA, 2023 bp, Homo sapiens
tctgaagagaatgctgtatgtagaaggagctcagaatgtagaagcagggtcttatctatcacctgcttgtaattaaggaacaatggtatagcttcatagtgaacaatggaaaacttgagcttcatgaatatttagtagtcactttgtgtgttacattgggttatgctcaattgatggctaaaattcccaaaggcagcacagagcaggacaaaatgctatgaactgagaggagggactaggttctagctcttatactgccacaaatttactagctgactttgggcaagtcactcaatatctctgggttttaactacttcaactgtaatacatagggaaaagagcrtggtagggtgatttctgagatttcttctagttacaagattggactccatgagccctgaattcaaatgatattcctaagatactcataaaatccctgttcaaaggataagcccctggctgaataaatacatccacctatctgtattcaagtttcttcagtccttccagtatgacctcccaccagccagataaggtcagcctgcacttgtatcatttctgttcacaccttcagcatttgcttatgctggtcccatttctacaatagctttctctctcatttatccacctgaaaaaatattatataccattcaagatactgttcaattataatttcctctgtggaagtgaattgtttcctggtctctccttggaggctccctcataatatgttatagcatgtgtcatgttgcatacataattagtggggattacatctgtggaactttcagattactggtgacttgaggcagggattatgtctcatatccagtgcctagctaggcccatgcttgtcataaaacaagtgaatattacaatgtttcttcaataaattgcaaagatagtcattttagaatcatgatttactgattttgcatccctaaatgccaacctttaggccagctctcacattataggcatattaacctgctgggaatctttgcccctgcagaggttggaggaggctttttgtaggagcttctgggggctaattttaaaaccactgatctctgaccccattgttttacttattggtaaacttactggaagtctggtcatacttctgaacaataactactacagacctcacatgagcatggctggatttcacctgtgggtggagatgaaaagtaaacgctctctgtctgcatcaattggagaattagggaccaggaacagcacattacttagagcggtatttttcagtgggggtggagtgctattggcattttggacaggacattttttattctgcaggatttttctgtctaatgcaggatatttaacattctagatcccagtccaccaaaagtcagtagtaactcccctctcctccagtatctgtgacaatataaaataccccttattgaggtgacattgcctcaggttgaggaccattaatttggaagaaaccaggaggcctctcctattgtaagtgccattttctagatttacaaatttaaatccaagctcttcttaaccttgaagacattgatttagctgtcaaccctggttcagaattgggtatcaacagcttgagagtaatttctggctgggaaagactgaaaggatggaaaacccatctctttcctctggactaactctatggttaacaaggagctttaattaatgccatctcactggccctatttgtaatgtgaggggcaagatctattacccctattttaaaggtaaggaagttcagtcttgaagtagtgaatggtgctggcccaagtgtcacaggtagtacatttcaaagctgagtctggaaagcagatcttctgactcctaggccatcccgctccccacagagtatctagaaaaccacagaggaggccgggcgcggtggctcacgcctgtaatcccagcactttgggaggccgaggcgggtggatcatgaggtcaggagatcgagaccatcctggctaacaaggtgaaaccccgtctctactaaaaatacaa

SEQ ID NO: 699448 - DNA, 1155 bp, Homo sapiens
agacacactgaattgtatcttttaaaaagttaaattttatggtacgtgaatgatacctcattaaaatagttacatgagaaaaaaaggcaaaatacagggtataattcaagaattttaatttttaaatataaagtatttatagccaaatttgatttacttttaaaatatgtcttattaaatagtttaataaaagcaaaactgttctagcaaaaaaaaaaaagaaattaaatggcatttgtaaaaaaaaaaaaaaaaaagcaggtggggctctggggctggcagggttgagaaagagacagctcctgcccagagagagccgcgatgtcccggagggtgcccccttgtggtggcttttgggatggcacccttccccactgggataaaatagaatctattatggaatggtcagccccacggtgatgggtgtatgtataatttaaaacagcctccagrtggttctaagaatcttctttcatcagaggaggcagaattcccttatacaaccttttggcatgtttgctacatgtttgcaaccttttggcatattgccttgaaattgaacatttgaactctttttctcttaaaacataactgctaaactttcaaaaattatcctgggattctaagcttgttgcacaggaaaaatacgttgttatgtaaggaaaactaatcaaagttctctacctttcctggtcagcagcatgtgtttccaaaaaatttaagagaaattaatgggttaattgagaacattctacatctcaccatgtttgctcttatcataattcaccattgctgatttctctacctacagagttgctgaacctggcttgattttcccatagaactgaagcctgaggaacttatatttgttttgtctgagtttctttctcgggaaaccaaccatcagggctcccagatagtatcagggaactgaaacttttcagatgatggcatccagtcatgagatgcacctgctgcctgttgaccaattcctcttctttacctctctctaaccccctgctatataaacccctaactttagatagttagggagatagatttgagactggtctcccatgtcccagctgatgtcacctgcattaaagcctttcttccccagcaatactcatcatctcagtgattggctttctctac

SEQ ID NO: 699449 - DNA, 645 bp, Homo sapiens
tcagccctccttacttagagataacgttaatgaacaagcttaggttaaaagattaagggtcatgtaatatcaatgacactgaaggcccctgcctttagtgagcacatagacacattccaagtttaattgtagctctttgtaactccttataaaagtagaggcgctaacaaaggacagggcattcctccttttgctttcagaggatatcccacactgtaacgaaacggtttctgaaaaacttacttcttccactatgctctgtggctttccttgaattctctcctttgcaagatccaaggacccatttttggggtctggatcrggaccccttttccagcaacaccggaactacaaagattctcaaacctatgtcggtattgaaataaagatgaaatttaaaagtaaagctatatggcataactagagcctggcatattttatgtatggcatatttggaacccagcaaacagcccaatatggtggagtgttagaagggtagtgaagacttgtaggaaaagacagaaacacaagtcagagacattacaaatgatgttaaattctatcctagaactgttggaattttacccattaaaagttttgagtaatgaattttgaaatgattaatagagcagcacagtagagaat

SEQ ID NO: 699450 - DNA, 612 bp, Homo sapiens
gagagtgagctaccttggaggcagacctaccatcaccacccaagccatcagatgatctgcaacctctgctgacaactgaactgcaaaaatgcccagctaagccattcctaaagtcctgatccacagaaactttgtgagatgatacaaagtttgtattattttgttgtttgttataatagtttgtttaattatttygttttttatgattgtcataagccgttaaattgtgggatgacttgttacccagcaatagataatacaaaatggaaaagtttattaatatttaaaagtctatttacattttcataggaaattttaatactagatttattaaggaggaaatgacttttagattctttagattctcagattctatattataattttagctgttggaaatatttgattagttgtaaataaatgaatttacatttttacctacttaaaagaataaagtttttattgatgccaaattccgaaaaatataaaaagagatttaaaaatcttattctgggcctggcatagtggtttacacctgcaatcccagtgctttgggacaccaaagagggagaatcccttaaggccaggagttcaagaccattctaggaaaca

SEQ ID NO: 699451 - DNA, 579 bp, Homo sapiens
actatgaggccataaaaaagagcaagatcatgtcttttacgggaacacagatggagatggaggatattatccttagcaaactaatgcagcaaaccaaaaattatatttytaatttaaaaatgaataaagatcatcttttataatggattatcatattgtttcttaaaaacttccaatgatattcttaaactgcaagtttagcacttctgtgcatttcaataaacattaaattgaacagctactatgttccagggaatataaaattgctaggagctgcccttgaccctatacagttcataagacacaacaaatatgaaaatgtaggattactatattctgtgaaaaatgacaaaacaggtatgtacaaagtatagtgtgacttcaaggagaaagcaatgaactcagctgagttggtgtgatggttaatgctgagtgtcaacttgattggattcaaggatacaaagtattgatcctggatgtgtctgtgagggtgttgccaaaggagattaacatttgagtaggtgggctgggaaaggcagacccacccttaatctgggtgggcacaatctaatcagctgc

SEQ ID NO: 699452 - DNA, 1140 bp, Homo sapiens
ttatcattttggccttagataaaatagagaaccaaggaccaatatttatctcaaacatcaccacacaatagatatcaactttgtattacatttttgaaaaggttatataactactggagacaaagttaagtttttccatttgaagatttgttgacagtgtaaaagagattaattattaattactgagattatttttgtcttcaaagtcatataacctcattcattaaggcccaaataattgcatataagtttaaacatcatatatatacgatgaaactcattttacaacaaatactgaaaagaaggatcaaaaataaagagatgcccaaagtgcttatctgcccttaaaatagaactatttcaattcggcaagaaaaatagtgaattctgggattatacatctaaaacagttccataaaaatgtatattagattctgatgcaatagttgtccctcttttaagaaactttgtttggatatattgactaaattggacaggttaaataattttactgtggaaaccacttgtcaacattgcatagtggaagagtcacacataaacctacccaagccattatttctccattttcactgtgtctttgtaatgtagtcttgttaaggatgggaacaattcttctcacttatgcttttgttggacaaaatctaacagtgaggtactcattctataaagcagtagcaagtctttaagcatgtagaagagtaagcaagtgtatgaattcattaatatagaacaataaatcagatcaatagaggcttgcctatcagtacctcatgtttaawagaaatagattatatataatttaatagagatcaaattaccacaacatgatgttatgtgcatacaatgctttgctatcaatattgcatgatgtgtttaactatttacgataggagaaaaaagcatcaaataattaatagcataatagcatttcaacaaagttgttaagaaagtgttaaatagctttgaagctattaattcagtaatgtatcacttattcatattaattggagtgggtccatataaattagtgaaaaaatggacttgtagaacattttaatatacgtgtagttttataacatgatatttcaaactatggaaatgctatcaaaattactaggc

SEQ ID NO: 699453 - DNA, 615 bp, Homo sapiens
tttttgatactgttcatgaacacctcaaatatacattgaatatggaatatttttcttttttggatattaatccagaaaggctacaattaaaataataacagaaagacatacagagtcacaaaactaatagaatcaattaaatagttacagaatacacagactatcaaagtaaaatgtaattgtttccctgttaagcaaataaaacaataactaagcaagagtgatttatataggagaatcagattccaagtgttataacrcttaatgtaaacaccatgagatactctagtatttaatgattccaactatattgttagcacctctcaacttatgtgcatatgtttgaaagtcatccagctttctttttgtacaaagttgtgaatgaaagtaagggatgaaagggaataagacagcatagggaagaagaaagggatttagtgagggtggaatgggaggaaagaatgggaaggagtgatggaaagagaagcataaaaagaaagagagtaaaggtagagacttacaaatttataggcatatgaggcataggatatgattttctgatacccatgatttctctaaacttcagaatttaaatgcaaatgattaacataaaaa

SEQ ID NO: 699454 - DNA, 615 bp, Homo sapiens
tttttgatactgttcatgaacacctcaaatatacattgaatatggaatatttttcttttttggatattaatccagaaaggctacaattaaaataataacagaaagacatacagagtcacaaaactaatagaatcaattaaatagttacagaatacacagactatcaaagtaaaatgtaattgtttccctgttaagcaaataaaacaataactaagcaagagtgatttatataggagaatcagattccaagtgttataacacttaatgtaaacaccatgagatactctagtatttaatgattccaactatattgttagcacctctcaacttatgtgcatatgtttgaaagtcatccagctttctttttgtacaaagttgtgaatgaaagtaagggatgaaagggaataagacagcatagggaagaagaaagggatktagtgagggtggaatgggaggaaagaatgggaaggagtgatggaaagagaagcataaaaagaaagagagtaaaggtagagacttacaaatttataggcatatgaggcataggatatgattttctgatacccatgatttctctaaacttcagaatttaaatgcaaatgattaacataaaaa

SEQ ID NO: 699455 - DNA, 615 bp, Homo sapiens
tttttgatactgttcatgaacacctcaaatatacattgaatatggaatatttttcttttttggatattaatccagaaaggctacaattaaaataataacagaaagacatacagagtcacaaaactaatagaatcaattaaatagttacagaatacacagactatcaaagtaaaatgtaattgtttccctgttaagcaaataaaacaataactaagcaagagtgatttatataggagaatcagattccaagtgttataacacttaatgtaaacaccatgagatactctagtatttaatgattccaactatattgttagcacctctcaacttatgtgcatatgtttgaaagtcatccagctttctttttgtacaaagttgtgaatgaaagtaagggatgaaagggaataagacagcatagggaagaagaaagggatttagtragggtggaatgggaggaaagaatgggaaggagtgatggaaagagaagcataaaaagaaagagagtaaaggtagagacttacaaatttataggcatatgaggcataggatatgattttctgatacccatgatttctctaaacttcagaatttaaatgcaaatgattaacataaaaa

SEQ ID NO: 699456 - DNA, 618 bp, Homo sapiens
ttaaaaaataaaatttccctccacggtaccgatgatagctgctaagaagtttggaaatagatgctatccaatgttattatcattatatcatcattgttaataagcaataatgaagctaatgtttcttccctggaagtggtagaacaacaacaaaaaacctgtcagaaatattcaagcaagcactttggttattttggtgttcagtgacaccagagatggtgagaatcattgtatgaattcatcaattttgttggtgtcatgtagacacagccakgctcaaatgaaatatacttttttttttttaagtaaaagggcttctattcaccgtacaggaaattaagtgatcggttcttgtcaaacaaaaagtaaattgttttaaggaaaaagaattcttttgacatttagtcaaattttattctttcaggaaacaagcaattctttgacagaaaaatatgttattgccagaggatatgtattcctcttttatattttgctagttttctattttctcagcacataaggaacagatggaaataaagccgatccaatgaaataatttcttttacatcccagcaataaggaaaactaaaattcaatgaaatgatctaaccaaatttc

SEQ ID NO: 699457 - DNA, 618 bp, Homo sapiens
ttaaaaaataaaatttccctccacggtaccgatgatagctgctaagaagtttggaaatagatgctatccaatgttattatcattatatcatcattgttaataagcaataatgaagctaatgtttcttccctggaagtggtagaacaacaacaaaaaacctgtcagaaatattcaagcaagcactttggttattttggtgttcagtgacaccagagatggtgagaatcattgtatgaattcatcaattttgttggtgtcatgtagacacagccatgctcaaaygaaatatacttttttttttttaagtaaaagggcttctattcaccgtacaggaaattaagtgatcggttcttgtcaaacaaaaagtaaattgttttaaggaaaaagaattcttttgacatttagtcaaattttattctttcaggaaacaagcaattctttgacagaaaaatatgttattgccagaggatatgtattcctcttttatattttgctagttttctattttctcagcacataaggaacagatggaaataaagccgatccaatgaaataatttcttttacatcccagcaataaggaaaactaaaattcaatgaaatgatctaaccaaatttc

SEQ ID NO: 699458 - DNA, 1650 bp, Homo sapiens
caaatattccaacgagagttttcattgttctgcttgggttgtggtctcatccataagccccccatggctgaagagcctggtgttctgactaccttagtcaggattgggagacattccaaaaacttggagcagaggtcaatgccacctgacccatacagattgacaatgatttctaaagggagaaaaggaattctcttatcagaacagggggaatgaatactgggcaagcagaaacattaataacaatattgatgacttatatttatgcagtgatctatgtggatttactatttgtttttagacagtgtcttgctttgtcacccacgctggagtgtagtggcgtaatcatagctcattgctgccttgagttcctggacttaagcagtcctcccgtctcagccttccaagtgtctgaggctacaggcatgcaccaccatgcctggctaatttttgtattttttgtagagatggggtctcactatgttgctcaggctagtcttatactcctggtgtcaagcaatcctcccaccttggccttccaaagtgctgggattagaggtgtgagccactgcacccggcttttactcatttaagatgtgcactaaaatgctcagaaaactgttgttgagggaatgaaggaataatacaaagttttatgactaaggctggcctatatttcatacctatggtatattggtaatattatgattatatgattattactattactatttattgactgccagaaactttgcaactggatccctgtacagtgataagttaagagatttttctatcgtttattacaaagcaatctgaaaggccaacatctctctattgtttctcatcccatatgtatttgaagaactttgtacttgtctttgtttgtggcttgcaatttgcatctaatttctggcgtttatttttttcattttagcacaattacctgctatctcattgtgttctcttgggtaagctgaccaagttttttcttataattttaatttgtatttagaatgtttrcataattaatttggcttcttcccactccttcttcactttttcatataggatagcttcccatctcccacctctaactcttgggatctttttattgttcttttgagaaacactgagcttcactagatgagttttctgttaaaagtctagtccaaagagattttgctattttactaagcctattaattttggcatttgctttgttattaatttttttctaacttcatttcccccatagttttcttaagtattctaaattccacactaagaccttcctgtttttccactgagttttaaccttctttgaggaaatgtagcaaagttcttaaaatgcattcttgaaatccctgagactgcgaaaacttctgcatgagcattcccagacacaatttccaggggaaaggatgatatctctcatcagagttcaagtttatgaagcatgaatctttcagagctgaggtcctctcaccgcaatcccgctggtaattgatgaactgatcttcagcttctcgcataaagggtgagggccagggtttttgtcatgattgtgtcttggactttggccctgttctctatatagggagggtttcaaaagaagagggctcagactgtcaacaaacttatcttctg

SEQ ID NO: 699459 - DNA, 2330 bp, Homo sapiens
aaatgtgtgttctcataaagtcgctcagaactggttggattaaaaatatggagcaagcacatacagtagtaccaaatgaaatcactgaaattcagtacacacattgcctacgctaaagaaaggaaagcattgtcgggcacagatcctgtgccagggacatgcaagctcattatctcactaatcgccacgagctggctggcctgttttgggaatgagcaaagccacttggccttgtgcataacacagcgaggattccagctcgggtcctcttcccacccagaccagttctcttcccactgttcaaactcagcttttaaagttgtgtatttgagcaatattattgtttatatttagactgtgtgtaattcaagagctgcccccatttttctcatgtattatcccacaaaatagataccacagataactttagaaagcttttcaaaatgattcatatttggaggaaaactcagccacaagatatttgtaccaggcagccatagaaaccacagtctcagtttgtgtcttataaaaattctgtaatgaagctgaatagaccaaaattcctgtttcaggctttaaaaatggattggttattaatgtgaatggttatttcctcctcttctattttcgctgtctggtcggcacagccgtggccttttcaagcagctgggatataaatataaagtgggaatggaggcccattaggagtagaagaacagctgacggagcagagcaaagcgccgggctctgcagggccaaccgacccgtccaggcacgctagtttcggttggattgactagtcagctttatgtggaacaggctttaatgatttacaggttggcataagaagccttgtttctttccatgagacggtccatctctatttgtaatctacgtggtaattaaagccagactttttgacggagcatcatctttggcaaatagtgaggtgtggtattagcccctttctagcttatttttaaaggtgcaccttaagtgtttaaaaattgtctatggtttgaagtcagttggcgtcatccttaccaatttatagatgtgtcgcttcataaatgcaagtccttaatttggaaaggcacttgtctaaaagcaaagtgaacatttataacaacatttgtaatttctcttgcaaacccttggaaggatttttgtttttgttattttgttttgtttgtttcaggagggatcatttcttaaacttctcatgagggaggattgctgttgctgattaatgatggttgacttacgactcaaactgtggacaaagagctaacatttttctatcaggggactagaggtcatgtaatgcatcaagtagaaaattcaccatatatattcagctcccaccttacggctgcacacatttgtgaagtgcccactaggtgccaggcattgtgccaatggttggttgtatagatatgatcttagccctccaggagcacacagctatttttcccrgttcagtgaatcccattttttttggtaaaatttaaaaaaaggatatattttttaatatatattcattcttttttctactacaataattagagattcttttgccattacatagctagatgtcatatgatgaaaacttctattctcccgttttccacttgtttctcagttttctcatctgtaaaatgggcataatgatagtacttacctcataaagttgtggtgaggattaaattaattagtatatatcagtgtttaaaacaatacctggtacaaagttaagtgttcaataagtactagcaactattctcattgtctgtccagtaattatctggatttgctgcttctctgggttactgggagcattctgaatcacatggcatttttccagaggctcctccaacaaaagccttcttgccaataccctagccaaacttgttcttgaagaaattcctatcttagcacatggtaccgtcagttacataaaccagcccttcattccaccaggctcccacctgccacagggcatttgcataggccgattttggcccacttctcccagttaactcctgctcctcttcaaagatcacagcttaagcttcttctgctaagatggtctctgacctccatgaataggtcaaatcctgtgtaacttgtctagcatttgctacaggtgccatgttactttaaggattgtcgaagtatttgattaatatctgactttcccaccagaatataagcaccatgagagccagggctgtatcaatttttgttaatcatgatatctgctgcatctagcccagttcctgaactacacagcagttgttaagaaacattagaactgggattcgaaggct

SEQ ID NO: 699460 - DNA, 590 bp, Homo sapiens
gggcagcaagggacacccaccaggaggtggcaacttcaaccaagaatgagtacaccagcccggcgcagtggctcacacctggaatcccagcactgcaggaggccgaggtgggcggatcacctgaggtcaggagttcgagaccagcctagccaacaaggtgacacgctgtctctactaaaaatacaaaaattagccaggcacggtgacatgtacctgtaatcccagctacctgggaggctgaggcaggagaatcacttgaacccaggaggcggaggttgcagtgagccgagattgcaccactgcactccagcctggtgaaagrgcaatacttcgtttcaaaaaaaaaaaaaaagcgtacaccagagggcctgggagtccctacatcatattaagatgaagtacatacaagattctgcagaggcacctaccccacactgaaggagaagtggaaagagcagggaaggcttcaatgaccacaaaacaagtcacaagagcaacaaattgacaaagagtatgttggggtctaacccagtggttctcaatgcggagcaagttctctcaacaggagacattggaagatgtctggaggc

SEQ ID NO: 699461 - DNA, 785 bp, Homo sapiens
gacagggtctcactatgctgccagggctggtactgaactcctaggctcaagagatcctcccacctcggtctcccaaagtgctgggatcataggcatgagccaccayacccagccaaattttttaaagttattttttaaatctccacttaattcgattttggtaaaacacgacctgtaatttttctttatcggtaggtaataaaagcttcagatgattttactgatcactggtatgggcatatttcatgactttgccctttcatctcttgcatagttttaccctcaccaagcaagaccttccctgcctcagcactgtttgccctcttcgtgttttccagaacagaagtggccctgtttcgtgcccagagcagaagagaacgatgaagagctctgctctcccaggtcttcctggtctgtgtgtgtccaggttttgagggcctctcacatacacggctctggaccacgtaagatctaattttagcattttcctgctcggagaccacatgtttggaacagcaggggctgacctgcccgtgcaggcctcctattgtgaagggcacgcgaagccaggataccgcagccctgcaggatgtgactcagcatcctgtctcagtgctggggcggccagcagctctggcaccaagtgctgctgctgacctcacctcttaagaccacaaatacccagggtaattggtgggataggcatgcagcatcagctctccctgttaagacaacttgcttgtccatccattatgctgggcttccttgtgaacaccacaggtatc

SEQ ID NO: 699462 - DNA, 661 bp, Homo sapiens
atgtaagtagatagagaaaagccgagttttttatggcttcatagtattccatttcatgggtgattatacaataatatatttaatcagtccctattggacatttagttttgttactatgaacaatgcaagtataaatayaatggtagctatttctttgtgcatatgtgtatgtatatctgtagaacgcacatctagaattcaaattattagttcaaaggatataagcaatttaaatttatgaattatattgccaaattagtctccaaagagactgtaccaatttaaacttctgcttataatgtatgagactttctgtttcatgggtgtgggtttttaaaccaacgatactggcctatttagaaaggacagagttttattttcaaaatacacaaaactttgacccctttctacacttatgcaatgttcattaggttactttcaataaggttcagcccaccttgccagttcttagatgagaatctctcccaagggtgaaagcatcttgtttctgcttctcttggcaaaaatcatggtttccatgtgatggagtcaattagttttatccccttgttagactgtgtgttcctgagatggacagggaccatatgttggaaagagtaggagctttattttatttttgtttttatttttctagagacag

SEQ ID NO: 699463 - DNA, 585 bp, Homo sapiens
agagagaaggggagggagagaagcccacccgctgagagggggttgtggccgagagcagagtcattggctcctgtcctctggtccaggtagcacctaggaagggatcctctatccctgtggtttcagcgttctttgccgaatctgtctcttttccctgaacccctgcagctaatgctcctgggatatgctggcagagttactgctgttaccattctcatttctttaggctttaatcaagctctcctgtgaagtgctacatcaattcaattttgaatttcacatataaaataatgaaatgagagtgaagcgtgatagacataaaatgtttttttaaaatgaaaatgatatttttaatttaatcatataaaaatcatctggatccagtacatgtaagtggcagagagtttgctatattctcttaccaatggcctcagaaagcccacgatccacaytggttggtgaatgatttccaatttctttaatattttcccttctctccattaagccctgaccctggcattctttaaaatcaacccaagaactcacctcctatgaaaatgtattcatgggaatacttatttatag

SEQ ID NO: 699464 - DNA, 1508 bp, Homo sapiens
ttggagacgctaacttactgggtatgagaggcaagaaagaaggaagtgtcagggtaagtatctcacatgagctacatgagcagaccgtgatgctccattaatgaggctagggacaggaggcaactgtgattcagacagactctgcaatctgtttgagacacctgagagagatccaagtgaagatgttcctcacacttctttctctcatagaattaaacccgatcccctgaacacaaagtgaacaacaccaaggatggcaaacacagatcatcagcagtggagagagcaagcagataaccacaccatcacggccagcaaacacggcaaggagaacacatacttcattgccccattttaaaagtggaaaaatattttaaagagacaggagatatccgggttctatttaaatttttttttttttttactaactgaattcatcataccaagttcctcagtgattcaaccttcctggtataatagaaacaaacacaatagcttcctcccataaaacgttaactactaaggtctcatgcaattcagttttttaaaaaatacaataaagaagctatacaatgtcagcacatgaataaatcaccatagcattatttagctatgaagtgcttgtaagattctccccggggcctgaaagcttaaggagatgaataactcctctcttctcaggcccagttccaaggtgcaacttggggcagcaacttgcgccagcaagacagcaggaggaggaagagagtccgcctgaagacaagtactcctaaagactgagaaagaggccatccgggtacaacatagcagttacgtcagactacgacacttcctgtttacaggagactataaaacctttgccccgtcctcacttggtgctgaggccattttaggcctcagcccgcctgcacccaggtgctcattaaaacagcatgttgcttcacaccacctcatgttgtctgttagcgcgctctcggggttcgaaccgatacaagacccttaacggtgctgagtgtccaataatgacaggcatgaagatttaaaccaaaacatgagaatgaaaattacctattaataatatgacactgattttctctttcaaccaacaataaacataatttatccaacatagggctcaatatttatatatttattccttttcatccattccatttaraaatgatttcccattatggtaacatttggctacttggcatacctagggaagtagttagctgcattttaccttaactggggagttagcttatttataaatcaacactgctcaggaaaatgaaggatacctggacctgatgtagaaaactctttagtaggcattgacaattatatgaattgataacaattatgcattttaaataatattaaaaaccatgtgaattacagtattaaacatacttttttttttgagactgtctcacagtgttgtctggactgcagagcagtggcatgatcgcagcctcactacaacctccacctcacaagcttaa

SEQ ID NO: 699465 - DNA, 606 bp, Homo sapiens
ctgaaattagacctcagttgaacttgatgcgtgttttttggacattcagtttgtatatttttcagtcattttttacatagtaagcacaatttgtccatcagtagatcataggaaccaggartcttacgttcttcttcccagctgtgtaagttttcagagcttcagatagcatccatgtaaaatgggaataattgtattctgccctctttatctacattgttatattaaatgagcacgtgcatttaaatacttcagaaacaatagtgggaagtctttttaaaaaggcaaaactcttctttgcttttaggtgtcagatgtgcttaatctttggaatggggaagagatgggaagggcacatgaggcttctgggagctgaggatgttttgtttctgggtgctggttacataggtatatttgacttagtgaaaattagtgacactgtgcaattgtcatttgtacacaaatcatatgttcattgttagacttcaatttaaaagtttactttaaaaaagcaattcataaaataacgtgctataccaaagtaggcagctttgttaagatgcgctgtcgttgagacacagcccaggggcagactcagatttcctg

SEQ ID NO: 699466 - DNA, 674 bp, Homo sapiens
taaatttgttctagcacaaggcacccctggagtctccgtgaatctgctgtgattctgggaacttcctgattcgcgaattgttcattactcaattaaacgcctttaaatataactcgcctgaagtttttctttaacaaaacaaaactggtgaatgttccacagagcactctaccatacagaaattattcacacctcaactgccctaaaatctaccatttaacatgyaactttgtttagtttgaggcttttaatcaagactcttaatagtcccccctttccttgtgatcacagtaaccttcaagaatttttaatgtttccattaaaaaggctggtcccatcatgtgtggcctaattatttatttaggtacatcaagagtgttaatactaatagcttccttgagtttgttctgtaactcctaaagccaaataactaactcctgtctagattttcctcataatcttgaattgcccttccaacagcctctattatttgctcttctatcccatggttataaaaccaagcccaaaacactctttccacaagacttcacctgcagtacctgcatattttcatgaaccttcttcagagtcaatgaatttgctatggttgctaagttgctagaaagtggccccattgccatctctgagactgggaccccattagccagctacaa

SEQ ID NO: 699467 - DNA, 2217 bp, Homo sapiens
tgtcacccctcaatgaggcttatccccgacctcccaatttaacattagaaattatctcccagtacttcagatcttcttaccctgatctattaatctttctttccatcatatcttttttcttctaatactctgtataatttgtttattaattgagtccattacattcttgctccccctgccattaaaatttaggttccatgaggttaaggaatttttgcctaacaagtgcaaacagcatagacaagtgcctatcacataaatatgtgttgtctaaatgaatcctgccttctgcctgccatctcactttagaacaaaaccttgaccacttcctccctaaacacaccacatgtacacatatacatgcacatacacatgcacatatacatacaaatgcacatgcacacacacacatgcatatacacatacacatatgcatacacatacacacatgcacactcacacacaaatgcacacacacatccacatgcacatgtttgattgcttttaacagatctactcttcctggccagtacactatggctcagtgtttctcaaaatattgtccatgtatcatgagaatgaaatttacaaaggattgttgattaatagcatagatcccgagctctctcctagaaatgcaaagttagaatttctggggctgggtcatattagtaggatccctttgcagactagaattgaagaaaattggctagtcttttcttttttcccctttttctttcctccgtctgagctgtagttttccttgaaaaaagaaaaaaaatctgtgaaaacaaacatcccctaaagcgccagtaattgaaacaggggaatgtgttctcaccttctgtaggccactctggaaaagaaaaagcactgatatgagtcagtgtcaagatgttaaagttgaaatattttgtttcatgacagaggttaaaaatgcagccaccgtgtcacatggccttttaaagtaatttgtttgcatttctcttgttttctgtcctacttgtttggagtaactctgtctcatggaacagataagagttatctgacctcctctatccctccctattgtcataatcaccgaggaaaacctacaaggggatttttaggctagctctgctctagacattgggaataagccttctctttgcttggcattgatactcctcgcttcatctcactactatcctggtgagacatgataatatgattaggagcttgtcctgggtgaaaggaaccaaagattaacttagttttagaccagaagcatacttgtggtctgatctagcttacctgttctggtggtgccatataggaaaagaggtctttagctcacaccaatggaagagctttagagggtccaagaattccctaaaattatttgcaaaatgcatttgtggtattcaatatttttatagaaataaagtactaaactctccttaaattctcaaaagtttctgagcatcaaaggagattaaaagcctcttcccttaggattcaaggtttcattagaattaatgtcctcatagaaaattctctttgtataaacacataagtaaattatctgtttacatttgccttgcaatagtgtggtaccgaatatatttaattctaattctgatcattgttaacatccatcactactctaagaaaacatgcaggcttttaaacattttttaggrggagggtctctctatgttatccagactggcttagaattcctaggctcaagggcttctcctacttcagcttccaaagtatctgggactatagacttgagccaccatgtcctgcaatgcatacattttaacttgttctttctgtgacttactcctaaggtatgaacaaccagagaatcccaatgtctttgaacagggattgagctatgcccatattgagcaatgctttggtttggatcccagaatctatcatcaaatcttcaaacagcatctatcctagaaatggtcttttaaacttaattcagtaatgagaaaacacgagacataatttttcaaaatcaaaatctaacttaaatatatacatccacacttcaattcttaaaggaaatttgagtattttacttcatattcgtttattgttaggacataagatttaaagtattctgggatttatattagaattaaaatattttcatttgaacaggaatttgcaattgacttcattttcctcttgttttaatttaaagtcaaatacatt

SEQ ID NO: 699468 - DNA, 597 bp, Homo sapiens
agatctacctgtacataaaaaatgcctctgtggtcagaatcattacttggacactaggtagcaaatgattagccattaattcaatttaatattatcccaggattttaagatacctaaaggttttggacacgatgttcaaagtcatatgtagaaaacataatcacagtaaatataaaaatttgtcagaagtatcattcaatttagttggacacaaatgtatatttttcagaattttaacggttacacaagattagtctattttatgagtgaaccattgtaaatagtagaaaaaattcaaattaactcatagttttatgagaaaggcccaaatcttattttaccagtaataaaatatattctaatttaatattttttactgttaaaaatcaagggaaaaacataggcatcattcatttaaccaaaattattatactaccataatttgggcaatgaatcatcgtaactttatgaygttgtgcccttgtattaagacattttggagccagcagttttcataaatttttaaatttcacatgtaaattattagaagttcaaattttttattttttatgggtttgagggatattagatttacat

SEQ ID NO: 699469 - DNA, 1326 bp, Homo sapiens
ttgtgagtgttgtacaggtcctaatgaacactatggtcagatatgataagatttactgagaacaacttaaatgaaaaagagctcacaggattctctgcctctgtgattgttttgtagagaggcmtgctttgatccttttagctgactgccatgtagaacattccagtaggaggaactctgcctccaccctatggatatttactagtctggctaagagcatgtaaaggtacctagttttctgggtaatagagatacttctggcccagtacataatctagaaaagtttcaggagctcagctagagagttggaataccagactggccagtatcaccaaagatctcactgtacttctttgaatagtcttagctctgccagtctactctgccaagcatcttggaaagaaggacacatggccattaaagatcaatgtttgtctctccctagcctactaataagtgcagatacaggagatatttttaaatggtaatatacacatgaatgcttggaaaataataaaagatcaattttataggaaaatataaattcccaaaatagagttccaatcaagatgttatgttgagcaagcatgggcaagttttcatttcactccaaatacataaaattagaggataaaatattttaaaccatgtgtaaagtaagtaacagtggttgaaaatcacaactagaaattatcaggtgtgagaaagaaagaaaagactgatgatagtcctgggattagaaacatatcttaatgtttaatgcttctatgggaaagagggctgtggccatacatattacgcacactagaaatgggaaactaatctcccagttaagtaccagattacaaagaagcaagcagtttttgggaatggggaaaaggaaaatctgcatcccctagcctagattaatattagcatatgagtcaggaccccaggttcatgagcaggctatacactctatgccagccatgaggatgtgtcttgctgatatccaactacatggggattaattgacccaagggtcaagtagctgcatcctgaaatccatcaccatgtttgcaccaaggccacacctcttagctgctcttagtcaatgattgactgtgattaagatactgaggcagagctgttactcagtgactgaagactcttctgatatataattggcccaaaagacaggtcatgccaaaaaaaagactaaagctatcaccccagagcaatattgtcaatgtgttattaatttaattactttaaaggtaaattatacaaatatttttatcattaaaagacaaagaatctacaaaacaaaattaacaaaattttatg

SEQ ID NO: 699470 - DNA, 1326 bp, Homo sapiens
ttgtgagtgttgtacaggtcctaatgaacactatggtcagatatgataagatttactgagaacaacttaaatgaaaaagagctcacaggattctctgcctctgtgattgttttgtagagaggcatgctttgatccttttagctgactgccatgtagaacattccagtaggaggaactctgcctccaccctatggatatttacwagtctggctaagagcatgtaaaggtacctagttttctgggtaatagagatacttctggcccagtacataatctagaaaagtttcaggagctcagctagagagttggaataccagactggccagtatcaccaaagatctcactgtacttctttgaatagtcttagctctgccagtctactctgccaagcatcttggaaagaaggacacatggccattaaagatcaatgtttgtctctccctagcctactaataagtgcagatacaggagatatttttaaatggtaatatacacatgaatgcttggaaaataataaaagatcaattttataggaaaatataaattcccaaaatagagttccaatcaagatgttatgttgagcaagcatgggcaagttttcatttcactccaaatacataaaattagaggataaaatattttaaaccatgtgtaaagtaagtaacagtggttgaaaatcacaactagaaattatcaggtgtgagaaagaaagaaaagactgatgatagtcctgggattagaaacatatcttaatgtttaatgcttctatgggaaagagggctgtggccatacatattacgcacactagaaatgggaaactaatctcccagttaagtaccagattacaaagaagcaagcagtttttgggaatggggaaaaggaaaatctgcatcccctagcctagattaatattagcatatgagtcaggaccccaggttcatgagcaggctatacactctatgccagccatgaggatgtgtcttgctgatatccaactacatggggattaattgacccaagggtcaagtagctgcatcctgaaatccatcaccatgtttgcaccaaggccacacctcttagctgctcttagtcaatgattgactgtgattaagatactgaggcagagctgttactcagtgactgaagactcttctgatatataattggcccaaaagacaggtcatgccaaaaaaaagactaaagctatcaccccagagcaatattgtcaatgtgttattaatttaattactttaaaggtaaattatacaaatatttttatcattaaaagacaaagaatctacaaaacaaaattaacaaaattttatg

SEQ ID NO: 699471 - DNA, 610 bp, Homo sapiens
ggtacagggaagagactgagaaccacaagaatataatcacaccaaactgaaactaaatgaatctttaactcagtttctaattagccagatcccaaaatggcccacagtcaccccagtgctaactaacccaagggaaaagtgtgatawaggcaaaatcagtacgtagacattgatcttaaacttctgcagttaaaatgtctcactcatgcaaaattctaaaagcaaaggagcatgccatcccacccctcgagccttttccagtgccttaggaaggagcttgtgcaagtgaggggccctgaagcttcacccttcctagcctcacggtaaatccacctctgtggtagacagaaacatttctagaccacaggaaatctgtttgcctaaggaaacacagaagctgtccttacagttaaacagaaatagttctatttttttcctagagttcagcaccatttctcaaggggtatttcttagaagttcattttatgaagtctcctccacaagttctttttgatagccaataattcaaatgtcatgctacttctttaaatcactccagtcattgaatagcataatcttttcagggggcaaacagctgggctccagtagg

SEQ ID NO: 699472 - DNA, 610 bp, Homo sapiens
ggtacagggaagagactgagaaccacaagaatataatcacaccaaactgaaactaaatgaatctttaactcagtttctaattagccagatcccaaaatggcccacagtcaccccagtgctaactaacccaagggaaaagtgtgatataggcaaaatcagtacgtagacattgatmttaaacttctgcagttaaaatgtctcactcatgcaaaattctaaaagcaaaggagcatgccatcccacccctcgagccttttccagtgccttaggaaggagcttgtgcaagtgaggggccctgaagcttcacccttcctagcctcacggtaaatccacctctgtggtagacagaaacatttctagaccacaggaaatctgtttgcctaaggaaacacagaagctgtccttacagttaaacagaaatagttctatttttttcctagagttcagcaccatttctcaaggggtatttcttagaagttcattttatgaagtctcctccacaagttctttttgatagccaataattcaaatgtcatgctacttctttaaatcactccagtcattgaatagcataatcttttcagggggcaaacagctgggctccagtagg

SEQ ID NO: 699473 - DNA, 1304 bp, Homo sapiens
tgttggccaggctggtctcaaactcctggcttcaagtgatccacccgcctcagcatcccaaagtgctgggattacaacacgagccaccatcccggccagaaggtattttttaatcccccaaataatgacaaattaagagtattaagtcacagtcaagagagccccaaagtcgtgtgacctgtattaattcarctatgttctctcagggtgttggtaattcactgtatttttgtttagcttaatattcagcattcctggtgtttctcttatcctgaatttggaagaggctttacataatgcacagatggatgaaaatttgcttaagtccctcaacacaagaacagcattcactacatctcacatttactccacaagaaccagaattaagccacagggagacaatgaggtgcaccacacacccagaatcatgtggcccttcaaacaggagtacaagaaaggaaacagttggaagcaggctccacagtagaggcagttctcctacctggctccaggttctcgtaaaccgtcggtgaggagggaagggacagggatgcatcctttgagtggaatctgaattctccctttcttctcatcttcatcgaatacgttaatgtccagcctgctgctgagtcaataagcacatcctgcacagatgcgcttgcctgtgagcctttcatcacaggcttagcccccatgcccggagctgataccccgggccagacttctccctcaggaatgacaattttgtccttggtggaggcccatctccaccaagcatgtggggagtggagtcgtttgccagagagtgctggcaatttcacctccccctgtgggcacagaccctcttccgcccttccatctttgctgccatttgcacaagctcactctgaagtcacataaccaggctcagctggggagacctgaccaggatccgcttccaggttatgctcctctaaaaaccatatgtaaaagaagcaaggaattagacactttcagagcagaagggatgttgggagacccaggccaagcccttcattagttagaagcggaaattgagaccaagagatgtgaagttagggctaacctgcaatgtcccctacccaccggttaaactttctttctttctttctttctttcttttttttttttttttttttttgagacggagtctccctctgtcccccgggctggagtgcagtggcgcgatctcggctcactgcaagctccgcctcccggattcacgccattctcctgcctcagcctcctgagtagctgggactacaggcgcccaccatcatgcccgg

SEQ ID NO: 699474 - DNA, 1304 bp, Homo sapiens
tgttggccaggctggtctcaaactcctggcttcaagtgatccacccgcctcagcatcccaaagtgctgggattacaacacgagccaccatcccggccagaaggtattttttaatcccccaaataatgacaaattaagagtattaagtcacagtcaagagagccccaaagtcgtgtgacctgtattaattcagctatgttctctcagggtgttggtaattcactgtatttttgtttagcttaatattcagcattcctggtgtttctcttatcctgaatttggaagaggctttacataatgcacagatggatgaaaatttgcttaagtccctcaacacaagaacagcattcactacatctcacatttactccacaagaaccagaattaagccacagggagacaatgaggtgcaccacacacccagaatcatgtggcccttcaaacaggagtacaagaaaggaaacagttggaagcaggctccacagtagaggcagttctcctacctggctccaggttctcgtaaaccgtcggtgaggagggaagggacagggatgcatcctttgagtggaatctgaattctccctttcttctcatcttcatcgaataygttaatgtccagcctgctgctgagtcaataagcacatcctgcacagatgcgcttgcctgtgagcctttcatcacaggcttagcccccatgcccggagctgataccccgggccagacttctccctcaggaatgacaattttgtccttggtggaggcccatctccaccaagcatgtggggagtggagtcgtttgccagagagtgctggcaatttcacctccccctgtgggcacagaccctcttccgcccttccatctttgctgccatttgcacaagctcactctgaagtcacataaccaggctcagctggggagacctgaccaggatccgcttccaggttatgctcctctaaaaaccatatgtaaaagaagcaaggaattagacactttcagagcagaagggatgttgggagacccaggccaagcccttcattagttagaagcggaaattgagaccaagagatgtgaagttagggctaacctgcaatgtcccctacccaccggttaaactttctttctttctttctttctttcttttttttttttttttttttttgagacggagtctccctctgtcccccgggctggagtgcagtggcgcgatctcggctcactgcaagctccgcctcccggattcacgccattctcctgcctcagcctcctgagtagctgggactacaggcgcccaccatcatgcccgg

SEQ ID NO: 699475 - DNA, 991 bp, Homo sapiens
caaggtaatattcattgttttaccatataaggtgataaccacaggttccagggattcagacatggacatatctttttaggggccaccattcagcccactgcatccaggattcccacaaaaagccagttctctctttcattatccccagcaggcaccctctctatcaactcaagccagtctccctagagaccaccagcctgaaccccatcccctgcatttctaactatacctacatttctattttccctctatcctcccaccatccagaagggcaaatcttgttttattttgttaagatcagctctagccctctttctctgaagctctcactgaccaccaccctcagtccataagtcatttttcttcaaagttctggaacacagagttaatatcccactgaatttatatgctttattttttttttagtggactcacacatttttctatctccccaagtagtctgagctcctcragcacagaagctgtgttttctacttcttttgcaaccccatagtatccagcacagagccaggcatttaagagatatttattaaaagattgataatttaatgaaatgaaaaagaaaaatcagcaatattttgaaagtgatttaaactgatactactatcaccaacaactttaaagaagttgttacaaaaaaaaaaaaaaaaaagaagttgttacaaagaaatgctccctctcagggatgtaaaatctgaaaagcaattaagaactcttcttttatcaccctttttacacttatttacatcctgatgctctaattaaggcaactaataaaagtttcaagttgttaaagttaagagaactactgtatttagatgaagaagtaccagcagcctcagccaaaaaggaaaacaggagggcttgttttgtctttctcttaaaaacataaagagaaaagttatctcccacggattaaagaaaaattaagataaatatgaatgtggctagccactgctctttaccactt

SEQ ID NO: 699476 - DNA, 653 bp, Homo sapiens
ttttttggaggttaaattgttaattccctaatggaaacatgcaagagggtttcataagtactttgagcagaccaaggagtgcttcacagagaagatacatttcgctcatctactcaatcaaggctttgaacaaatatgtgttgagggtttagtttgtgccaggcaatgttctaggtgtttgggattctttactaacaaaacagatcactttccccttagagtttgcatcctagattttgaagstctgagtcttaagaagtgagaagttctgcctgtggaggagtggagaaacagtcttatttgggatcagatgggctgcctctagagaaaattactttacaaaagcaattaaaacaggccctaaggaatatgtgtttgtttttaagcctagccttggtggtttcttttgtgtagctgagaaaggaggctgtatttgactgtttgtcttggggactcataggctaagtgcccctggttttttcaatgtggacctcactgtctgaactcttgtgtgggcacgtggattttttctttttaaattcacaaataacagtgagttgaaaagccctgtctctagcgtaggaatgctgaatttgtctcaaatcaggtaagtatgggactttgctcatacaagttaatcttgccattaatcc

SEQ ID NO: 699477 - DNA, 653 bp, Homo sapiens
ttttttggaggttaaattgttaattccctaatggaaacatgcaagagggtttcataagtactttgagcagaccaaggagtgcttcacagagaagatacatttcgctcatctactcaatcaaggctttgaacaaatatgtgttgagggtttagtttgtgccaggcaatgttctaggtgtttgggattctttactaacaaaacagatcactttccccttagagtttgcatcctagattttgaaggtctgagtcttaagaagtgagaagttytgcctgtggaggagtggagaaacagtcttatttgggatcagatgggctgcctctagagaaaattactttacaaaagcaattaaaacaggccctaaggaatatgtgtttgtttttaagcctagccttggtggtttcttttgtgtagctgagaaaggaggctgtatttgactgtttgtcttggggactcataggctaagtgcccctggttttttcaatgtggacctcactgtctgaactcttgtgtgggcacgtggattttttctttttaaattcacaaataacagtgagttgaaaagccctgtctctagcgtaggaatgctgaatttgtctcaaatcaggtaagtatgggactttgctcatacaagttaatcttgccattaatcc

SEQ ID NO: 699478 - DNA, 607 bp, Homo sapiens
tgcaaaaaactacaataaactaaaaatagctaactctgatgcgttttcttctttccactacactgaacgttccaggttttctacaaggagcatgtcccactttcaacattgtaaaaaatgtgcaagccttgtttctgtttctaaaagcagcctgactgctgaagcttaccttcagtcaagggaaagatttcactcatcttctggcgggccatcctcaccttggtaagctccccttccagcctgagcagtctgatcaagtccacatggcagttgtagtcatagacgttgatagacaactaacaggaaaagaaacaagttgaaatttaaaacaccrtcatcaagtaacttagcttttgtcactactggtaactacacatatacctgccacaaacaaaataaacgtgctatctgagaaaaccactgaaacagcaacccagcacgtacccacaggtagaagacaaaacaataaaagaggcttttgtaacaaacataaagctccctcaaatctgttacagttcctgttagaagacatttgggttctcttggaaataaaggaggcattctaatgaaacaaataaaaagtatgtgaccttaggtaagttattta

SEQ ID NO: 699479 - DNA, 651 bp, Homo sapiens
tcagcaacacagtcaaaccctatctctaccaaaaatacaaaaaattagccagacatggtggcatgcacctgtggtcccagctacttgggaggctgaagtggatcacctgagcctgggagacagaggttgcagcgagccgagaccacaccactgcactctaggcctgggtgacagagcaagacccaatctcaaaaaaaaaaaaaaaaaaaaaaagatagaaatccctattagagaaacaagagtggcagcaggttggtatctgttgatgctgagtgacaggtacataaagttttatttgtacatttgaaacttttcaaactaaaattattttaagttaccatatatctgagacaaagaaaaatgaaaaaaatgtcactagcagacctacccttgaagaatagctaaaggaagttcttcgaacagaaaagttagaagaaggaatcctaaagcatcaaaaaggaagaaagaacaggaagagcagaaatacgggaactacgacagattatcctcctctcctcatgagctttctaaatcatatgtaatggaacaaacattgtaagaacttctgatacccaacacagtattatttaaaagtggggatggaaagagaactgaaatggaagattcccwcacttcattcaagtggtaaaa

SEQ ID NO: 699480 - DNA, 651 bp, Homo sapiens
tcagcaacacagtcaaaccctatctctaccaaaaatacaaaaaattagccagacatggtggcatgcacctgtggtcccagctacttgggaggctgaagtggatcacctgagcctgggagacagaggttgcagcgagccgagaccacaccactgcactctaggcctgggtgacagagcaagacccaatctcaaaaaaaaaaaaaaaaaaaaaaagatagaaatccctattagagaaacaagagtggcagcaggttggtatctgttgatgctgagtgacaggtacataaagttttatttgtacatttgaaacttttcaaactaaaattattttaagttaccatatatctgagacaaagaaaaatgaaaaaaatgtcactagcagacctacccttgaagaatagctaaaggaagttcttcgaacagaaaagttagaagaaggaatcctaaagcatcaaaaaggaagaaagaacaggaagagcagaaatacgggaactacgacagattatcctcctctcctcatgagctttctaaatcatatgtaatggaacaaacattgtaagaacttctgatacccaacacagtattatttaaaagtggggatggaaagagaactgaaatggaagattccctcacttcattcaagtgstaaaa

SEQ ID NO: 699481 - DNA, 644 bp, Homo sapiens
gtctttattcacgccatctgggcagcagctaacacagaagcctggtatacagcaggcactccacaaggctacggggtggaaagtgacaaagcaatcagccacccagcccgtatcctcggaggaattgcgtgcagacccagggctcgcctccccacttcaaacccacagcccagctggggctcargggtgcatgaagccaattgacctccccagggctgactccaacccttgtgaattggacacacgtgggtgctggccaggggggatgggccgcaacagctggaaacatctgttttgaattgtcggttggaagcaccggccaggcagccaaggaatctgtgagctaattttaggccacaagaccgagagctctgctgggcggggtctcactccccaaaccacaggggcgggggctgtggggacatggaggcctccacggtactccttggatggtccacgctgacccggcagccaggaactctctctcccagggtgagcattaactggcaccgactgtgtgccaggctgtccacgctcactccacccttccaaatccctaggagtaggaaggatgcttctccccatttcctaggtgaggaagggaggctgccagaggtcagcaagttgcccaaggtcatgcaact

SEQ ID NO: 699482 - DNA, 674 bp, Homo sapiens
tgctcacattactgcctgcgctccatctcctgtcaaatcagtggcagcattagattctcataggaacctgaacccaattatgaagtgtgcatgcaaaggatctaggttgtgtgcttcttatgagaatctgatgcctgatgatctgtcactgtctcccatctctgccagatagaaccatctagttgcaagaaaacaagttgagggwtccactgattctacattatggtgaattatataattattatgtattacaatgtggcaataatagaaataaagtgcgtaataaatgcaatgcacttgaatcatcctgaaaccattcccgcccccatccatggaaaaattggcttccacaaaactggtccccagtgccaaaaatgttggcgaccagtgccaaaaatgttggcgaccactgccataaatgatctaacggcgttaaatgaaatccagcatgataaactttataattacttctagaaataaaagattcttgccatagcttaactccctgccttgattttcattgtcatttcaagctttttattttttctatgtcctttttctgaatttgaagcaaagatgaaaaatgatatgttggagttattcagtcagacaccatttttaatcacaagtcttggaaaactgaatagattatctgagcaggcccaagccactgg

SEQ ID NO: 699483 - DNA, 674 bp, Homo sapiens
tgctcacattactgcctgcgctccatctcctgtcaaatcagtggcagcattagattctcataggaacctgaacccaattatgaagtgtgcatgcaaaggatctaggttgtgtgcttcttatgagaatctgatgcctgatgatctgtcactgtctcccatctctgccagatagaaccatctagttgcaagaaaacaagttgagggttccactgattctacattatggtgaattatataattattatgtattacaatgtggcaataatagaaataaagtgcgtaataaatgcaatgcacttgaatcatcctgaaaccattcccgcccccatccatggaaaaattggcttccacaaaactggtccccagtgccaaaaatgttggcgaccagtgccaaaaatgttggcgaccactgccataaatgatctaacggcgttaaatgaaatccagcatgataaactttataattacttctagaaataaaagattcttgccatagcttaactccctgccttgattttcattgtcatttcaagctttttattttttctatgtcctttttctgaatttgaagcaaagatgaaaaatgatatgttggagttattcagtcagacaccatttttaatcacaagtcttggaaarctgaatagattatctgagcaggcccaagccactgg

SEQ ID NO: 699484 - DNA, 1374 bp, Homo sapiens
taatgtaaacaaaatagaccgataggcatttgaggatttctggaccccattacaccatgttgttgatgtctgggaagctgtgtagtaaatgtcttttgtatctatccttaatgtttggaaacttcccgcctttaagcttcatatgacaactgaccaacaaacactacgtactatgatgtcaatcttttttaragacattctcattactaaaatgagtggatacttgaatgtttaactcctaaaataatgagcggtgaataaatgagcaagtacatgcatgccttccaatgtagagtcattttcattaaaccctctctcaccagagaagcagtggtatgaaattggcctgattcctttctaagtgtgttgttcttgttcacagttggacatgatataggtcgtggatgtatggggaatctaagagagctgccatcgctgtgatgctgggagttctaacaaaacaagttggatgcggccattcaaggggagccaaaatctcaagaaattcccagcaggttacctggaggcggatcatctaattctctgtggaatgaatacacacatatatattacaagggataatttagaccccatacaagtttataaagagtcattgttattttctggttggtgtattattttttctgtggtcttactgatctttgtatattacatacatgctttgaagtttctggaaagtagatcttttcttgacctagtatatcagtgacagttgcagcccttgtgatgtgattagtgtctcatgtggaaccatggcatggttattgatgagtttcttaaccctttccagagtcctcctttgcctgatcctccaacagctgtcacaacttgtgttgagcaagcagtagcatttgcttcctcccaacaagcagctgggttaggaaaaccatgggtaaggacggactcacttctctttttagttgaggccttctagttaccacattactctgcctctgtatataggtggttttctttaagtggggtgggaaggggagcacaatttcccttcatactccttttaagcagtgagttatggtggtggtctcatgaagaaaagaccttttggcccaatctctgccatatcagtgaacctttagaaactcaaaaactgagaaatttactacagtagttagaattatatcacttcactgttctctacttgcaagcctcaaagagagaaagtttcgttatattaaaacacttaggtaacttttcggtctttcccatttctacctaagtcagctttcatctttgtggatggtgtctcctttactaaataagaaaataacaaagcccttattctctttttttcttgtcctcattcttgccttgagttccagttcctctttggtg

SEQ ID NO: 699485 - DNA, 1374 bp, Homo sapiens
taatgtaaacaaaatagaccgataggcatttgaggatttctggaccccattacaccatgttgttgatgtctgggaagctgtgtagtaaatgtcttttgtatctatccttaatgtttggaaacttcccgcctttaagcttcatatgacaactgaccaacaaacactacgtactatgatgtcaatcttttttagagacattctcattactaaaatgagtggatacttgaatgtttaactcctaaaataatgagcggtgaataaatgagcaagtacatgcatgccttccaatgtagagtcattttcattaaaccctctctcaccagagaagcagtggtatgaaattggcctgattcctttctaagtgtgttgttcttgttcacagttggacatgatataggtcgtggatgtatggggaatctaagagagctgccatcgctgtgatgctgggagttctaacaaaacaagttggatgcggccattcaaggggagccaaaatctcaagaaattcccagcaggttacctggaggcggatcatctaattctctgtggaatgaatacacacatatatattacaagggataatttagaccccatacaagtttataaagagtcattgttattttctggttggtgtattattttttctgtggtcttactgatctttgtatattacatacatgctttgaagtttctggaaagtagatcttttcttgacctagtatatcagtgacagttgcagcccttgtgatgtgattagtgtctcatgtggaaccatggcatggttattgatgagtttcttaaccctttccagagtcctcctttgcctgatcctccaacagctgtcacaacttgtgttgagcaagcagtagcatttgcttcctcccaacaagcagctgggttaggaaaaccatgggtaaggacggactcacttctctttttagttgaggccttctagttaccacattactctgcctctgtatataggtggttttctttaagtggggtgggaaggggagcacaatttcccttcatactccttttaagcagtgagttatggtggtggtctcatgaagaaaagaccttttggcccaatctctgccatatcagtgaacctttagaaactcaaaaactgagaaatttactacagtagttagaattatatcacttcactgttctctacttgcaagcctcaaagagagaaagtttcgttatattaaaacacttaggtaacttttcgrtctttcccatttctacctaagtcagctttcatctttgtggatggtgtctcctttactaaataagaaaataacaaagcccttattctctttttttcttgtcctcattcttgccttgagttccagttcctctttggtg

SEQ ID NO: 699486 - DNA, 664 bp, Homo sapiens
gggaaagtagagggaaaggggatagggagaagttggttaacctgtacaaaaggaataataagtgataggatggatatgctcagtaccctgatttgatcattacacaatgtatacacgtgtcatgacatcacattgtatcccataaatatgtacaattgttatatgccaattttrgaaaataaaaatgaaaagacacagggtaggatttagaaggaaaggaattgctggtggaagagtcaagtgcttcctgaatttcagttgtgtgctgactatgtataatgtggatctggattaaattctggagataagttgatgaataaggcatagtttctgtccccaagagatgaaaaaaaaatatgtggatggatagatggataatagtaagatgatatatagacagatggatatttaatgtagtagattctttcccatggtattggccacttagcatcatttggaaaattttcctctatttagagaatttcccacacatgagctctatcttgccaaaaggcaagttagattcatttttccagcctctcttccagttatgtatttagcctaggctccaccattcagacactcccagcataaaaataggcttgcatagttatctatcatctggtatggtggagataaaggtgtccagattttatggtgagca

SEQ ID NO: 699487 - DNA, 620 bp, Homo sapiens
tagatcctgtatctacacacaaaaaaaattgaaaaattatccaggtgtggtggtgcatgcctatagtcccagctactcaggaggttgaggctggaggattgcttgagtccaggcattccagcctggacaacagygtaagaccctgcgtctaagaaagaaaaaggaatgaaggaatgaattacaggatgatttacaattggtaggatgaacgggacactgggagcagccaacttttcaagaattgaggatgggttaggtaccacatagcccctgacactagaaagaatatcatgagcgtgtgggggctgcattcaagttcacctcttgtctgccagctgtgaatgacttgacctctataagcaccagttttctcatctgagaaagtgctttaataatagcaaccgtcttgtattttgtattgttaggattaaatgagagcatacctgaaaagggtctagctcagtgtctgacagtacccactcaataaaaactatcatactagttttattagtaccacataataccacatagccatcaacaatcatgttggcttttttatgttaaaacataggcatgacacagcaagtagtaaaaggttaaaaggttagaaactagtcaat

SEQ ID NO: 699488 - DNA, 582 bp, Homo sapiens
tactactgtgtgactttaggcgagccactgcacttctctgaatcccagtctcctgacttgtacagcaaagatcatcatagcgcttatctcacagggccgtcatgacaattaaactgagtgagcctgtgtagtttgttttgttaaccaggakaattttgagagtggatggcaactctgtaaagaattggtctgggacatggaggataagctgggattttcccacgtaccccagaatgtcaccctaagctgtaataaataagctgatccatacaaagcactggggacagtgcctggcatttaggactcagcagtgttagctgacatcaccagaggaccccccgtcaagcttctgttctactcccttttagtcctttgcaacatggagtaatgaaaagagcttagtcttcaaggttttcagttctgccacctgaacctcagttcagccaaagcctagttgagcacctattttgtgctctgctctatactacagcagagatagcagctaagtcacacatgaaacgctgctaataatttggacaggcagcatatgtcaaggaagaaatggagactctctggcaaaga

SEQ ID NO: 699489 - DNA, 548 bp, Homo sapiens
atatgtatgaactctttaggctcagagtaaacttttcttaatccaacaaatgtctgaaatctttcagtacaaaygtatcaggttatatgtatgtaaagttaatgttataaaaataaaaataacaggttaatggttgatatgaattagtgaaaatgtaactcagagaaaatatttaaagatgggaaagtttatacatcttggtctatacactaacactagtaaagtgtttcctttgggataccattttgacttgcgtttagctattagcctgtaaatgatatatatttgaaggtgatacagatttgattttaaacaaataactataaattactagttatgaagactcaattttttctgcttttaatgtgaatctacgtatacatcttcatttaatacacacctttatcattaaaatacagctttggctcatagaagatgtacatggtgcatcttaaaacagtgctttattttgaggtaatgtgcttagtgaaaagaacattgttctggaaacgaaaaaacagattctagatccaatacttctaataata

SEQ ID NO: 699490 - DNA, 589 bp, Homo sapiens
cttgaatatcaaacacccttttcatataaatggagaattccagagtggcccatttaacaaatgcctcttctttaaaagctcctcttcccaaaagcaggaaggctattagcaagctagctcttcaagtagcccattagtggcctgaaggaatctgcaagaaatacaattagacctctgaccccagatcccagcgagtgctttgaagagaagagaacgatcaagcctcaaagctggtcagtctgtgcggctcactctggacsctgggtgtgggccccagttgctcccctagaagagtaaagagtcagggtcccggattcccttgggaacctccttctgctctctggcctcatcccatttcacataccaaagtcttttgctggcagcaccctgaggacattacatttgcttgactataattctcgtagcacaaatacattgcttctttttctccatgggaggggcttgagaacttaaactattgtgacccaaactatttttcaactggcctatactagttcaacaattacacttctgagcttcaatctcctttaatataaaagagaacaatcattaccatatattcaaatgg

SEQ ID NO: 699491 - DNA, 626 bp, Homo sapiens
ttagggggaaaggtggttgagtacaataaatataaacacgattggtaaaatggtaaatatgcaacccattcaggaaataaatatggcaatttggtttttacatttaatattaagtaaaaaaaamcccactaaattatctacataaagtagcttatgtacagtaaaaatcttgaaataaataacatcaaaatgcttataaaagtttgtttagttttgcatgattgcaactatgaactgctttgtagtttgttttcatctttttcttaagcccaaattttcttaagaaaaatactcaagaaatgttatctttaagccatgaaacctctaagcatatacttcatattaaccttttgagtgtggacctgggtagcatggctcttaatgctatggtcagtaaaagtcaaggtttgctggcaaacccctccctagacagtgcttgcatcatgtcacacaatggtacctggaaattaaattactttcctaaaatgtattctcccactctgccccctggatttggtcctcagctgtttgctccttgtcctggcaagcgttcagcagagcctaagatggggattcttgtgaaaaacatttattgaggaactgctcttgtgaggaagggatgaggg

SEQ ID NO: 699492 - DNA, 626 bp, Homo sapiens
ttagggggaaaggtggttgagtacaataaatataaacacgattggtaaaatggtaaatatgcaacccattcaggaaataaatatggcaatttggtttttacatttaatattaagtaaaaaaaaccccactaaattatctacataaagtagcttatgtacagtaaaaatcttgaaataaataacatcaaaatgcttataaaagtttgtttagttttgcatgattgcaactatgaactgctttgtagtttgttttcatctttttcttaagcccaaattttcttaagaaaaatactcaagaaatgttatctttaagccatgaaacctctaagcatatacttcatattaaccttttgagygtggacctgggtagcatggctcttaatgctatggtcagtaaaagtcaaggtttgctggcaaacccctccctagacagtgcttgcatcatgtcacacaatggtacctggaaattaaattactttcctaaaatgtattctcccactctgccccctggatttggtcctcagctgtttgctccttgtcctggcaagcgttcagcagagcctaagatggggattcttgtgaaaaacatttattgaggaactgctcttgtgaggaagggatgaggg

SEQ ID NO: 699493 - DNA, 988 bp, Homo sapiens
tgaagtcagtccatctatgggcatttttgcactgggctatgcatgcagcaaagatatgataacatctctctgcccggagtttaatcagttctaaccctcactcgggtgtcacttggagcatttcaaggcatttgttctaaactgctttttcaaaaaagaaaagaagagctgggtgtagtggctcaagcctgtaatcccagtggattacagagggaggctgaggtgggaagatcaygtgagcccaggagctcgaggctgcagtgagctatgattgtgccactgcactccggcctgggtgacagagcaagatgctgtctctaaaagaaaaaaagaaaagaaaccatccaatgccctctggtctaaatgatcagtagctggggcttgaaaaaatctacaggaatgttagcagaaataaattgcctcccagtgctcacgaattctagttgccagagggtttcaagatcatacaaggaaactgaggtactgcacctcacacacagtcccaaagataatactaaatggtttggtcccctctctgtatgttcataatgggatgtgctgaggtgatcaggaatctatgctttcttctttcctgcaaattctgtaataaatctaggttctctcctgacttctcgttgtgaaacaatgattcttcaagggtggagacggttagtaaacattcacttatgctcctaccctctcacagaaccagggcttcaatcctacatgggtagtgactctgcaaagaggagcagcaccaactgaagtcacctattgtcccattctctcagacacagacctccctcttgcagcccacatccgtaaaggcgcatacacactcctcaccttccagggcatagccctttcatctgtgaatcaactccaacaaggatttgcatctgagcctctaaaggcgagccttccaaactccaataaggggatgaagaggggaagtgacatttccagttcaatgagcgttaaccagaga

SEQ ID NO: 699494 - DNA, 1700 bp, Homo sapiens
aaatatgtttatgatgagaagactgagcatcaccaaagatcctgatatttgagctggatgcagtaaatgactacgtctcagaggttctcccctttggcaggggtatgtcctttgtgtgagaagaacagactagaaattcgcatgatcaaagaggtggacacttgcactttgctagctgtctccccaatacccattctttgcttctatattaattgaaatttaaagttgtccatggctgcccagctaaagacagcatttcctcacattcctagtacttaatctttccaagcaatgaaagagccaataataagtaaacagaaacaatacgtgcaactccaagtctcttaagacttgagttgagtctcttaagactcaactcctttctcttaagagaaaggaagtaccctctacttcttttcttcccctactgttggcttgagcattctgataggacctgcagcaacaaactaataagtaatatgtactgtaattggctcttcaacatacattacttcatttaccctgtaagcaaagtgctattaccttattttatacctgagaatatggattaacacagcaagccaagggcacagtcagcatccccactgaaacactgaacagaataattgggtacaactccactcttatagcccattagaaataatttatatagagttctagaagctgatgtctgtttacagcaccaaaaattctttaagaacatttttaatcatagaaattgaaagtaaaatgtagccttcattcattaattcattcgctcaatgaatatttgttgaaatacagaaatataaaagcacattttggtgctatttgacttgaaatgaacattttctctgttttttttaattggttggtagaaatgcaggcataagcaaaaattacaatgggaaatgaggcataaagcatttactctattgacttaaaaggtggtttatctcacaacattcttggcaatgaatgtcaaagcagtgtaattatttcatctcattcctcacatttccagtcaatctttttttcccagtatactttatcagatctggaaaactgaaacataacaaatggcattctaattttcttatccttcatggctatattgtcatgaaaacctcatgaagatgaactgaatgaatcaaatacagctacttcaaaatgccatatttcccctttattacttatttctgaaggattgaaattttcttaagcagatttggtcattatactagacaatttcaatttttstgaacacaactctagatctatttagaatccactgccatttcctttcaagtctttctcacacataacaactgtagtaagacatattctgtggaggccctcaagatgactgttgatggattacatccacctttccttgactcctattgtttccattttcagtattacttgatttaattttttcccctggcaaagtggcttattattcctcatggagacactcacacataaaaaaccctcgcatcctgttatcccattagaatgttccagataaaagaaaaaagatctaccttcgtcttcgtcctccatctgggctttggcttctcttgaatacatggcccgtcggagagttttcctctctaaagtagtttggtcagcttccatatcctgcagtaaacattgtactatcatgcaaggagctaacaccaataggttgtgactta

SEQ ID NO: 699495 - DNA, 626 bp, Homo sapiens
atgggcatttaggttgattccatattttagctattgtgaatattgctgcagtaaatataggagtacaaatatctcttccatatattgattttctttcttttctatgtatacccactaatggaattgctagatcgtatggtagttctatttttagatttttgaggaactttcacactgtttttcatagtggataagttggttgtctatcttgatctcacttttttcagtgtagaaactgtgagttagggggaagttttctgtgtgcttggttcctggcagaatgagggtagagaagcatcrtggatatggaagtccagttctcttaccatctgctcagagttttttcacttctctcttgccacaggaactatctcatcctcatgtttgaattttgggatgttgctggtgatcgtctcagtgccgtatatttattttgggttttctgagtggttggcggcagggacggggagggcattggaggcaggaactgaagccagcttgtatctgtgacaccattttagagtccatccttcctttctaaatataaatattctactgagttaaaggggaagaatttatcctagtatataagataaaataattatatctaaagagatgtttaagtt

SEQ ID NO: 699496 - DNA, 626 bp, Homo sapiens
atgggcatttaggttgattccatattttagctattgtgaatattgctgcagtaaatataggagtacaaatatctcttccatatattgattttctttcttttctatgtatacccactaatggaattgctagatcgtatggtagttctatttttagatttttgaggaactttcacactgtttttcatagtggataagttggttgtctatcttgatctcacttttttcagtgtagaaactgtgagttagggggaagttttctgtgtgcttggttcctggcagaatgagggtagagaagcatcgtggatatggaagtccagttctcttaccatctgctcagagttttttcacttctctcttgccacrggaactatctcatcctcatgtttgaattttgggatgttgctggtgatcgtctcagtgccgtatatttattttgggttttctgagtggttggcggcagggacggggagggcattggaggcaggaactgaagccagcttgtatctgtgacaccattttagagtccatccttcctttctaaatataaatattctactgagttaaaggggaagaatttatcctagtatataagataaaataattatatctaaagagatgtttaagtt

SEQ ID NO: 699497 - DNA, 626 bp, Homo sapiens
atgggcatttaggttgattccatattttagctattgtgaatattgctgcagtaaatataggagtacaaatatctcttccatatattgattttctttcttttctatgtatacccactaatggaattgctagatcgtatggtagttctatttttagatttttgaggaactttcacactgtttttcatagtggataagttggttgtctatcttgatctcacttttttcagtgtagaaactgtgagttagggggaagttttctgtgtgcttggttcctggcagaatgagggtagagaagcatcgtggatatggaagtccagttctcttaccatctgctcagagttttttcacttctctcttgccacaggaactatctcatcctcatgtttgaattttgggatgttgctggtgatcgtctcagtgccgtatatttattttgggttttctgagtggttggcggcagggacggggagggcattggaggcaggaactgaagccagcttgtatctgtgacaccattttagagtccatccttcctttctaaatataaatattctactgagttaaaggggaagaatttatcctagtatataagataaaataattatatctraagagatgtttaagtt

SEQ ID NO: 699498 - DNA, 1407 bp, Homo sapiens
aagatagggaaaggcatgctccttatgccttaatatttgtttgattgattgatggggtcctgctctgttgcccaggctagagtgcagtggtgcaatcacagctcaccgccggcgtcacctccggggctcaagtgatgctcccgcctcagcttctcgagtagctgggactacaggtgctcgccaccacacccagctaattatttttatttttagagagatggggtcttgccttgttgcccagactggtcttaaactcttgggctcaagtgttccacccatctcggcctcccaaaatgctgggactacaggtgtgcaccatcgcgcccagactttttttttctttggtagaggtgtttccgtaaataagactaggacaaaggattatcaattttacaagtcaaggttatacctgcccctttcagagctgattctgcctcacttgacaccagttttccaccgtcagttatgtttctgtgtgtgtatatatatttagtcttggtagattttctaatttcatattacatatggattatttaaaggctggaactcagttgggctcgaacaaaataaatattcaacttatatttatttaagtacattaggtgcctgacagttttacatggtgtggatacagaaatgagcaagatggcaaagtacctactcctttgggatttacatcctagtcggaggagacaatttaacaaatatccgatgctggtggtaattgctgagaatatagagtgatgtgctagcctagggagtggctactttaaatagggaaaccgtctctgaggagagacactgaaattgagatctaaatgacaaataggatcccaagagcagaggcaagaacatttcagcttgagaaaaccgctttatggagacggaagactgttaggccaaggaggctggaaagaagagagggacagtggccagagttgagatctgagaagtgggcaggcgggaattatataggattttgattacataagactgtataggattttgtttgccatgatgagtttgattttattctaaatttgtaaatttgttcttgagcgtggtctggctaagttcattttttgacactttcttaggttttcttttcttggtttccttgattcattcagaggtggttcctcacctcaagtcttttgtataattttactatttatcagacaggatgacaaaccatgrtaggacagctttcaacatggtcacttattaataaattttcaatgagacttttgttgtttttttttaagagcaaatcctacagtttgattttaaaggcggagcagatagccttggctccatcctgtgaagggaacagctaagatagtttattagaatagaaaatactttttgagttgagatgagcagatctggagtgaggtatttttgaga

SEQ ID NO: 699499 - DNA, 916 bp, Homo sapiens
caaccaggagaagttcaagctgtcagagtgcccacccagccactggagggctgatgggaccttaccatacctatagtaggcaagctgttgcgtacagttaggaaactcgcatttatggtatcccaaaatcaaaactatgaaaaaatctgttgactaccatagtacaactctttttaaaaactctaatttcgtgtgctatttttagttcattattcaggtagaaagagaaaactgaattcctatttatggcctaacagagccaaaacaagttacaatccacatttaaaacattctcgaatggcatgtattttataaaacwataattgaaaaatatcagagtagaaccaaatagctcctatttcagtttgtagactctgcaatatgtagtttcaaaaatgcattaacaacaatctggctccttttctgcaggcacacacatgaaatatcatttggcatatgggagttattcccataaagatgagtcagataacaagcaaatgatcattacctcacattatgtgaaatggaaagaagccattaatgcagtattaaggtcataaattcacacacacagaagccaacaaaataaaacattagctctcaaagcattattttcttatccttgctgccacattaaccatacacactaaaaactctgacaaatattataatttgtataaaatacagaagggtaaagcttcccatgttcatgttaatttgtagatttctcgatttacctactggctaggagcaggtatctaatgccgaagctcaaaagaaccctgtatatctgaatcactccaacactctaagcacgctcctcagaaacctatcttaggccccccaagctctcacccagtgaaagggctgcactgggaaaaaggcaattgaatacccaccaaattattcttctggc

SEQ ID NO: 699500 - DNA, 1363 bp, Homo sapiens
caagtgagatgacatgacaagaacaaaaatgtattttaaaagatatgcaggctacagatgcttcatatggacattcaagataagcctgagaatagtcatcagaggaagcagaaattgtcatgagacattcttaatagtaactaagggaacaaaaactaccctaagtctactgagatatcttgtcagattctacctaaatgtttgaaatgtctcatactgagtttgcctgaatgtcagcaactttatcatgatctagaattcaattatgaaaacaaatcatatatagaacaatattgtttatatttgatgttcatactgtttctctgaagaaccgaagactcacctgtaccagatgtattggcgtaaaaataataaacgatctgtaatcaaaagaaatggcaaagccaaatataaatcagctgttaagaatcattttcaaattagatttatagatgagaaatctaaaatatactacagagcgagtcattaaaaaaaataaagaactcaagtcttaaaatgagagactaaatataacctaatatacactgtaacatttacagggtcatatacttattaaattccatgtttgtgtgttattcaaaagtttcaagtatttcctaactgttcaagaaataaaagcagtttgagatgttaaatttaatctaagaagctttcatgaaaccatggactagaagttataataatcaccccttagaaaccaaaatatttgtataaaaaattaaagcaagatatattttacactttatagcaaagatttttaaaacagtaatacctaaaatgggaaagcccacggaaaacaaaacctctaacacgctataaaaaacaatgctttctatcatcctaaatgtacatgtatgtgtgtacctgtgtatgcagttaggtatatatcaatggaaaaatatctaaagaataacagattctctctaggtggtaygaggacaaatttttttctaatttgtagttatctatagtgtctgtattttctacaatgaatttttattatttgtacacattttctaaattctcaaaatttaaaagcatttgtcattatgaaaactgaatatgctagtgcttcttgtatcagaagataaaattaactataattaactgtaattttatcagaagataaaaggataatcagaagattacagttaatttcaagtacttaacttctgtgaaaatgaattttctctttataaggaacttaaattcactggtataaggatggactttgaagccagaaagacatgcagtcaaattccaaatgaatgaccttgagcaagttttcttatctaaaatcataaaggagtaacggcacctttctggtctgataaaaggactc

SEQ ID NO: 699501 - DNA, 1363 bp, Homo sapiens
caagtgagatgacatgacaagaacaaaaatgtattttaaaagatatgcaggctacagatgcttcatatggacattcaagataagcctgagaatagtcatcagaggaagcagaaattgtcatgagacattcttaatagtaactaagggaacaaaaactaccctaagtctactgagatatcttgtcagattctacctaaatgtttgaaatgtctcatactgagtttgcctgaatgtcagcaactttatcatgatctagaattcaattatgaaaacaaatcatatatagaacaatattgtttatatttgatgttcatactgtttctctgaagaaccgaagactcacctgtaccagatgtattggcgtaaaaataataaacgatctgtaatcaaaagaaatggcaaagccaaatataaatcagctgttaagaatcattttcaaattagatttatagatgagaaatctaaaatatactacagagcgagtcattaaaaaaaataaagaactcaagtcttaaaatgagagactaaatataacctaatatacactgtaacatttacagggtcatatacttattaaattccatgtttgtgtgttattcaaaagtttcaagtatttcctaactgttcaagaaataaaagcagtttgagatgttaaatttaatctaagaagctttcatgaaaccatggactagaagttataataatcaccccttagaaaccaaaatatttgtataaaaaattaaagcaagatatattttacactttatagcaaagatttttaaaacagtaatacctaaaatgggaaagcccacggaaaacaaaacctctaacacgctataaaaaacaatgctttctatcatcctaaatgtacatgtatgtgtgtacctgtgtatgcagttaggtatatatcaatggaaaaatatctaaagaataacagattctctctaggtggtatgaggacaaatttttttctaatttgtagttatctatagtgtctgtattttctacaatgaatttttattatttgtacacattttctaaattctcaaaatttaaaagcatttgtcattatgaaaactgaatatgctagtgcttcttgtatcagaagataaaattaactataattaactgtaattttatcagaagataaaaggataatcagaagattacagttaatttcaagtacttaacttctgtgaaaatgaattttctctttataaggaacttaaattcactggtataaggatggactttgragccagaaagacatgcagtcaaattccaaatgaatgaccttgagcaagttttcttatctaaaatcataaaggagtaacggcacctttctggtctgataaaaggactc

SEQ ID NO: 699502 - DNA, 863 bp, Homo sapiens
gccgccatgttcgccgaggactcaggcagcggaggagtgtctctacggaatccctcacaggacaagcttctctatccgcggccgcttttgtttcacggcaaggaaatgctaggttaacccttttatgagtaggaaggacagggactattgcttgtcttgggaacgacttgtgtcccggtcctgatacactccttgttcattaatctacatgagatcggccaagtcattgagcctctcttataactcagtttccataaaacagaaatggtaaaggtaccccactgaaatgctaatgttcatttgtatattctttgcctaacacgtagagagagttcaaacagtggttttaaaataaacaactaaagttatccaatgaaaggtagcagaggaaggatgctacaggagctcagaaaaggcaacgaaggccagagtctgcagggatttcctggaggacgtggagcttgtccctgcgtctttaacaataggcagaattttaatctactggagaagcatttcaagtagcgggaaatrgaatgagcagagacagaggcagaaatacagagttgaaagaactctttcaacgtgtcgccagtgagtgacgactttctcagtgtgggagtaaaagaatttaccaagacagtggtagataaagaaagacagattaaagaaagtatgaaagttcgttgccagggagcagcgggccgactcagcagaggaggagctcattgctaggaaacaaaggcttgttgagaattttatagactggaacttggagtgattgataacaccaggtagcagggagttaacttgctttttttttttctttctttctttttttttttttttttttgtcagctgaagtg

SEQ ID NO: 699503 - DNA, 863 bp, Homo sapiens
gccgccatgttcgccgaggactcaggcagcggaggagtgtctctacggaatccctcacaggacaagcttctctatccgcggccgcttttgtttcacggcaaggaaatgctaggttaacccttttatgagtaggaaggacagggactattgcttgtcttgggaacgacttgtgtcccggtcctgatacactccttgttcattaatctacatgagatcggccaagtcattgagcctctcttataactcagtttccataaaacagaaatggtaaaggtaccccactgaaatgctaatgttcatttgtatattctttgcctaacacgtagagagagttcaaacagtggttttaaaataaacaactaaagttatccaatgaaaggtagcagaggaaggatgctacaggagctcagaaaaggcaacgaaggccagagtctgcagggatttcctggaggacgtggagcttgtccctgcgtctttaacaataggcagaattttaatctactggagaagcatttcaagtagcgggaaatggaatgagcagagacagaggcagaaatacagagttgaaagaactctttcaacgtgtcgccagtgagtgacgactttctsagtgtgggagtaaaagaatttaccaagacagtggtagataaagaaagacagattaaagaaagtatgaaagttcgttgccagggagcagcgggccgactcagcagaggaggagctcattgctaggaaacaaaggcttgttgagaattttatagactggaacttggagtgattgataacaccaggtagcagggagttaacttgctttttttttttctttctttctttttttttttttttttttgtcagctgaagtg

SEQ ID NO: 699504 - DNA, 592 bp, Homo sapiens
ttcagaaggttgttttcttttctccttcagagacttacaccaaattattttgaatttgcatttttttccagtctttaattcttgaccagtaagaagtctctcaactctagtcaytgaatctaccaaaatattttgtttcaaaaaataagaaaaaaatattgcatttttctacatttttgagtagaagaatctccctaatcattggttataaaaaatgaaaatataacactgaacaagttaatattacaaataacaaaataaatgcccactgtgtaaaaataatgcaaaattcatatttcaaagttaccataatttgaatacataggtctcttagagtcaaaaacctcataaaatgtgtgatgacatttttcaggacatatgtagcatcttctaatcagatgctaaatgtgatctattaactatcacttgggttgctgcagccctacatcgattgttttatcctgttgataaaataaaaatttacctcaggaatgactcactggttagtaaaactgaattctcttaagcttaggacttgggaaaatcaataattggaaagataaatgttttgagtcataatgaaaagcatgta

SEQ ID NO: 699505 - DNA, 592 bp, Homo sapiens
ttcagaaggttgttttcttttctccttcagagacttacaccaaattattttgaatttgcatttttttccagtctttaattcttgaccagtaagaagtctctcaactctagtcattgaatctaccaaaatattttgtttcaaaaaataagaaaaaaatattgcatttttctacatttttgagtagaagaatctccctaatcattggttataaaaaatgaaaatataacactgaacaagttaatattacaaataacaaaataaatgcccactgtgtaaaaataatgcaaaattcatatttcaaagttaccataatttgaatacataggtctcttagagtcaaaaacctcataaaatgtgtgatgacatttttcaggacatatgtagcatcttmtaatcagatgctaaatgtgatctattaactatcacttgggttgctgcagccctacatcgattgttttatcctgttgataaaataaaaatttacctcaggaatgactcactggttagtaaaactgaattctcttaagcttaggacttgggaaaatcaataattggaaagataaatgttttgagtcataatgaaaagcatgta

SEQ ID NO: 699506 - DNA, 592 bp, Homo sapiens
ttcagaaggttgttttcttttctccttcagagacttacaccaaattattttgaatttgcatttttttccagtctttaattcttgaccagtaagaagtctctcaactctagtcattgaatctaccaaaatattttgtttcaaaaaataagaaaaaaatattgcatttttctacatttttgagtagaagaatctccctaatcattggttataaaaaatgaaaatataacactgaacaagttaatattacaaataacaaaataaatgcccactgtgtaaaaataatgcaaaattcatatttcaaagttaccataatttgaatacataggtctcttagagtcaaaaacctcataaaatgtgtgatgacatttttcaggacatatgtagcatcttctaatcagatgctaaatgtgatctattaactatcacttgggtwgctgcagccctacatcgattgttttatcctgttgataaaataaaaatttacctcaggaatgactcactggttagtaaaactgaattctcttaagcttaggacttgggaaaatcaataattggaaagataaatgttttgagtcataatgaaaagcatgta

SEQ ID NO: 699507 - DNA, 660 bp, Homo sapiens
cagcagtggatttgttctttgggtgtatgaaatgtctggcttcccttatctctccctggactgactgtagcagtagcaccatcagctccagggcaggatgccgtccttttggaactgagctctcagaatggtgccatattgcagctgctcaaggctgagaagactgtgaaacccagcatgagctccctctcttaagcggtgcctctgcgcaatctgtaggcagctccctatgttagtttctaggctcgtgggtgccgaggggcttgctcttggctaagattgtgtaagtccatggcaggaatgtggagccctggggatcacacattttccctttccctgtgtctgggagcttcttccagctcccagtcaatcccaactgagaaggctgcctcatttccctttcattctttgactttgttgcttccaataatttctctgttgaatattggtgttctcttatagatgaytcatttgaactatgaatatctacttgccattttggtgtcactttatggagaggcatataatagctgcatctagtcaaccctcttcccttatgacagccaaaatattattaattgaaatgccaactgtacttattaaagagcctagatctgtgatgagcagtgattcatgatttgccactgcaaacttgccatc

SEQ ID NO: 699508 - DNA, 604 bp, Homo sapiens
tcccacctaccctgaacctcgttcttagactggacttcaatagccagctggtgccacccccgtcttctcacagctgcctctcctataggcttagaaagcagggcctagtcaaagcctagacccaaagctatgctatggtcctctccccatcttaatccagccatgcaggaccctgggtaacagttccctttgggtgaccctgagggggacccagggaagccttgagaagcagtcrgagtccatgactgtcctggaagccaggcctggtgtgatggggctttgagctgacccctgcatgattcaagacaggactgtggagggctttctgggtgtcttgtgatgggcaggtggctctcattgagtgaatcatctgtgattccatatcctgactggtttttgggaaaaacccctgttctggatcctccaacagagaccctctagtgatctgcccagctgatccctgctgagaaagggcagagtgggggctggtgggaaggaggccttcccactggggaacggtcaagtcattgtccctgacattggaaagctctgttgctctgggtctctcactgggtcccagactcgtttggttgcaacctggcca

SEQ ID NO: 699509 - DNA, 604 bp, Homo sapiens
tcccacctaccctgaacctcgttcttagactggacttcaatagccagctggtgccacccccgtcttctcacagctgcctctcctataggcttagaaagcagggcctagtcaaagcctagacccaaagctatgctatggtcctctccccatcttaatccagccatgcaggaccctgggtaacagttccctttgggtgaccctgagggggacccagggaagccttgagaagcagtcggagtccatgactgtcctggaagccaggcctggtgtgatggggctttgagctgacccctgcatgattcaagacaggactgtggagggctttctgggtgtcttgtgatgggcaggtggctctcattgagtgaatcatctgtgattccayatcctgactggtttttgggaaaaacccctgttctggatcctccaacagagaccctctagtgatctgcccagctgatccctgctgagaaagggcagagtgggggctggtgggaaggaggccttcccactggggaacggtcaagtcattgtccctgacattggaaagctctgttgctctgggtctctcactgggtcccagactcgtttggttgcaacctggcca

SEQ ID NO: 699510 - DNA, 640 bp, Homo sapiens
ttggcattttaaaggttttaaaaaccaattcatgaaagagcatttgatttaattttgtgtttctaataaatatttattaaacatgcagcttttggtgaatgattattgtatattctgttagattttttttctaagttagcaactttaatgaactttaaagataaccaatatttagctattttgtttaaagacactttcctcaaaatatagctgtccaagcaataaatattcaagacactaattataatcaattgttatacactgtcattattggtcccttaactgagggtatgttaatttcagataaaaaaatggtgggtattaatgttaagttttgtgtggcacataatattttatgaattagcaaccttgaaaaataattattcttatatgcaataccactggtttgctaaatctctccacttccaatgactggcatctagcggacactcaacttgtgcgtactgagygtatgagtgagtgagattctgagatgaggtcctagtaccaccatacatagcaaagcagtttatcccgcagttcaacagtgtcaactatcacaaaggagacatttgcctcagattttatacaaggaaactgatggaatgaaacagaccggcattggtagaatgagtgagcg

SEQ ID NO: 699511 - DNA, 603 bp, Homo sapiens
gttcttaccttataagtgggagctaaatgatgagaaaacatggacacatagaggtgagcaacacacaccgggcctgttggagggtgaggggtgggaggagggagaggatcaggaagartaactaatggatgctgggtgattaatgcctgggtgattggatgatctatgcagcaaaccatcatggcacacgtttacctatgtaacaaacctgcacatctcgcacacgtgcccctgaacttaaaagttggaaataaaaaaaattgtctttcggtatacagggctatcctgatatgccttaaaggaagcttgtgcaacctgagacccaggatggctttgaatgtagcccaacatagatttgtaaactttcttaaaacattatgagatttttttttttgcaatttttttttagctcatcagctgtcattagtgtattttatatgtggcccgagacaattcttcttccaatgtggtccagggaagtcaaaagattggatacccctgctataccattggctgtctagaaagacggatgatatttcaggttcctgaacttcaatatggtttatccttcacactctggcacaaatgtatcatattatgaca

SEQ ID NO: 699512 - DNA, 1694 bp, Homo sapiens
ttttcttttttcttttctttttttttttttttttttttttttttttggagacagggtctatatatgtatttgtattgccagaaatgacaagtagtctcactctagggtgtatcacataggagaaagtaatgaggtaaaagcaaattgatatattttgtagttgaaaaattaaaaggggggatgaaggagggagggagggaagaaagaaggaagagaagagggaaaataaaagaagagaaaaccctttccttaaatggtatgggaccagtagaaaaggctaatttaaggataagcaagaggacaaaaagcctaatgggaaaagtttggtttgttacaaagtctacacctaagacctgagaatgtctggtgttggaaaatatacatattcctcatatatcgctaagtccaggtcctgtgctggtctctgagaatatagcaggcaaaaaaaaaaaaaaaagcaaaaattccccaatgctcctgtcctcagggagtttaaatccaagtcaaggggaaagatcataaacacaaactatgatataatatctcacttgggaataaatactatcagggaaaaacagtaagagaataaggactaattgggaggaaagaaggtatccatcaggataggacatgagcagagacctgaacaaaaggagcaagcaagtcctggggccagctggaggcagggtgatccagacacggggaacagccaatgcaagaagggaggcaatgatgctccttatgtgtggaaaggacatgacagagcctgatgtggctgtagaatgagtcaggaataggaaaggaagtcaaaagaggttgaaagtggagcaggctgcagactgcacagagtttatggagggctttggatttaactgcaaggtgggaagccattagactgttttgagcgaaggagtgacatgttatgacacgtgctttagaaagatcttcccgcctgctgcaaataaactggactatggagtgacaagggtggaagcaggagaacagttaggagggtttcgtatgtatatttctctgtgtgtaactactggtactactttccagataaaaaaggggattagtgatacttcatttaccaaagtgattccaggcggatcatgtcatgttaacattttaaaggtgttattttattgtaaaaacacgtttaaaaaagtttaaggcaaaaaatcatctacaataaaatcgcctaatcaaataaatgtttttgtcaatctttctcccaaccatttcatgtatttatgtcaattaccatatatgcagtaattttgtagatagaattacataatctatactttyaccttcacatttaacatttcatcacgtgtatcttcctactctaagtgtttggttttcctagctctctatatttcttattttctaactgctttcctcttcctccaaataaccacatgatatttccatatctttcttgatacataaacatttcctctttgaaatattctactctctaaaaatgttgttttgccttcataaaatatgtgtgattctttctgacacccgtaattttacttgctagaggtctaaggttttaatgaattaattcttgattttaaaaaatgtatccgaactatttttagaataaacaaaagtatgtagatatttagtcatatttctgaaggcaaatctgtttaaatatggtatttcttttctttctt

SEQ ID NO: 699513 - DNA, 1694 bp, Homo sapiens
ttttcttttttcttttctttttttttttttttttttttttttttttggagacagggtctatatatgtatttgtattgccagaaatgacaagtagtctcactctagggtgtatcacataggagaaagtaatgaggtaaaagcaaattgatatattttgtagttgaaaaattaaaaggggggatgaaggagggagggagggaagaaagaaggaagagaagagggaaaataaaagaagagaaaaccctttccttaaatggtatgggaccagtagaaaaggctaatttaaggataagcaagaggacaaaaagcctaatgggaaaagtttggtttgttacaaagtctacacctaagacctgagaatgtctggtgttggaaaatatacatattcctcatatatcgctaagtccaggtcctgtgctggtctctgagaatatagcaggcaaaaaaaaaaaaaaaagcaaaaattccccaatgctcctgtcctcagggagtttaaatccaagtcaaggggaaagatcataaacacaaactatgatataatatctcacttgggaataaatactatcagggaaaaacagtaagagaataaggactaattgggaggaaagaaggtatccatcaggataggacatgagcagagacctgaacaaaaggagcaagcaagtcctggggccagctggaggcagggtgatccagacacggggaacagccaatgcaagaagggaggcaatgatgctccttatgtgtggaaaggacatgacagagcctgatgtggctgtagaatgagtcaggaataggaaaggaagtcaaaagaggttgaaagtggagcaggctgcagactgcacagagtttatggagggctttggatttaactgcaaggtgggaagccattagactgttttgagcgaaggagtgacatgttatgacacgtgctttagaaagatcttcccgcctgctgcaaataaactggactatggagtgacaagggtggaagcaggagaacagttaggagggtttcgtatgtatatttctctgtgtgtaactactggtactactttccagataaaaaaggggattagtgatacttcatttaccaaagtgattccaggcggatcatgtcatgttaacattttaaaggtgttattttattgtaaaaacacgtttaaaaaagtttaaggcaaaaaatcatctacaataaaatcgcctaatcaaataaatgtttttgtcaatctttctcccaaccatttcatgtatttatgtcaattaccatatatgcagtaattttgtagatagaattacataatctatacttttaccttcacatttaacatttcatcacgtgtatcttcctactctaagtgtttggttttcctagctctctatatttcttattttctaactgctttcctcttcctccaaataaccacatgatatttccatatctttcttgatacataaacatttcctctttgaaatattctactctctaaaaatgttgttttgccttcataaaatatgtgtgattctttctgacacccgtaattttacttgctagaggtctaaggttttaatgaattaattcttgattttaaaaaatgtatccraactatttttagaataaacaaaagtatgtagatatttagtcatatttctgaaggcaaatctgtttaaatatggtatttcttttctttctt

SEQ ID NO: 699514 - DNA, 999 bp, Homo sapiens
  misc_feature 589, 590, 591, 592, 593, 594, 595, 596, 597, 598, 599, 600,601, 602, 603, 604, 605, 606, 607, 608, 609, 610, 611, 612,613, 614, 615, 616, 617, 618, 619, 620, 621, 622, 623, 624,625, 626, 627, 628, 629, 630, 631, 632, 633, 634, 635: n = A,T,C or G
  misc_feature 636, 637, 638, 639, 640, 641, 642, 643, 644, 645, 646, 647,648, 649, 650, 651, 652, 653, 654, 655, 656, 657, 658, 659,660, 661, 662, 663, 664, 665, 666, 667, 668, 669, 670, 671,672, 673, 674, 675, 676, 677, 678, 679, 680, 681, 682: n = A,T,C or G
  misc_feature 683, 684, 685, 686, 687, 688: n = A,T,C or G
gatttttctctgctgctgtcctttctctcctgcactttttcctccaatgatgcatttgtttcttcctcagtgatctatattgtcacatgatctacaatactgctttcagcgatatttctgtataggtaaagttttatgttgactgtctcaggatgacaagttggctgccatggaattgacggcatttaatttaatgtccagaaagacctactctgattgagacgaatttatggaaaggagtttcaaaacctatcttttaatctagtgtgttgagctctcttttaaagaagcataaataagtgcaggactttatcatactaattttgttcataatttttgatttgtactttagaaatatggagaggatatccttcactaaaagaccaagatatagagctattttaaagacagcctwctggacccttttttctcaagcttctaataattggtagggttcataaacactctatataccgatctttaaagtttaaattacatgtattctgactctaggataaaatacagaatgcctggttcaatttgaatttcacatgtgcaatgaatgttttttagtataagtatgtcccannnnnnnnnnnnnnnnnnnnnnnnnnnnnnnnnnnnnnnnnnnnnnnnnnnnnnnnnnnnnnnnnnnnnnnnnnnnnnnnnnnnnnnnnnnnnnnnnnnngtgctatattttaatctttgaaatctatcaaccctactctctgaccccattttaacaaaagtattttgggtggcaatagctacaatacttaatactataacttaagaaagtttcatatgtgtgataagacctacttagtttgcttttaagacacataagaaactacagttatttatgtatcttcggagaatatttaaactttggttaggtttttcattttgtttgtcttgcactttactgcttcaatctacattttttttccagcaccttgcactagtagtttatgaggccatcaaaaagaaaaacaggtg

SEQ ID NO: 699515 - DNA, 999 bp, Homo sapiens
  misc_feature 589, 590, 591, 592, 593, 594, 595, 596, 597, 598, 599, 600,601, 602, 603, 604, 605, 606, 607, 608, 609, 610, 611, 612,613, 614, 615, 616, 617, 618, 619, 620, 621, 622, 623, 624,625, 626, 627, 628, 629, 630, 631, 632, 633, 634, 635: n = A,T,C or G
  misc_feature 636, 637, 638, 639, 640, 641, 642, 643, 644, 645, 646, 647,648, 649, 650, 651, 652, 653, 654, 655, 656, 657, 658, 659,660, 661, 662, 663, 664, 665, 666, 667, 668, 669, 670, 671,672, 673, 674, 675, 676, 677, 678, 679, 680, 681, 682: n = A,T,C or G
  misc_feature 683, 684, 685, 686, 687, 688: n = A,T,C or G
gatttttctctgctgctgtcctttctctcctgcactttttcctccaatgatgcatttgtttcttcctcagtgatctatattgtcacatgatctacaatactgctttcagcgatatttctgtataggtaaagttttatgttgactgtctcaggatgacaagttggctgccatggaattgacggcatttaatttaatgtccagaaagacctactctgattgagacgaatttatggaaaggagtttcaaaacctatcttttaatctagtgtgttgagctctcttttaaagaagcataaataagtgcaggactttatcatactaattttgttcataatttttgatttgtactttagaaatatggagaggatatccttcactaaaagaccaagatatagagctattttaaagacagcctactggacccttttttctcaagcttctaataattggtagggttcataaacactctatataccgatctttaaagtttaaattacatgtattctgactctaggataaaatacagaatrcctggttcaatttgaatttcacatgtgcaatgaatgttttttagtataagtatgtcccannnnnnnnnnnnnnnnnnnnnnnnnnnnnnnnnnnnnnnnnnnnnnnnnnnnnnnnnnnnnnnnnnnnnnnnnnnnnnnnnnnnnnnnnnnnnnnnnnnngtgctatattttaatctttgaaatctatcaaccctactctctgaccccattttaacaaaagtattttgggtggcaatagctacaatacttaatactataacttaagaaagtttcatatgtgtgataagacctacttagtttgcttttaagacacataagaaactacagttatttatgtatcttcggagaatatttaaactttggttaggtttttcattttgtttgtcttgcactttactgcttcaatctacattttttttccagcaccttgcactagtagtttatgaggccatcaaaaagaaaaacaggtg

SEQ ID NO: 699516 - DNA, 612 bp, Homo sapiens
catttgaattctgttatagatttatgtaaaaatacattctctttttgaagaatgaaaaagttcacatcttaaaaaaaaaattagctgggcaggccaggcgaggtgggtcaagcctgcacttggggaggctgagtgggcagatcacgtgaggccaagagtttgaaaccagtctggccaacatggtgaaaccctgtctctttctggctaaaaatacaaaaattatccaggtgtggtggtggatgccggtcatcctagctacttgggaggctgaggaggagaatcacttgaacccaggaggcagaggttgcagtgagccaagatcacacccctgcactccagcctgggcggcagaggaagactccatctcaaaaaaaaaaaaaaaaaaaaaaattagctagggctagtggcacatgcctgtagtcctagctacttggaaggctgaggtaggaggatctcttgagtcyggaaggttgaggctgcagtgagccatgaatgcatcacttcattccagcctgggtgacagaatgagaccctggttcaaaagtgaaataaaacaacattggaagcatatttcttttgcccttgatttgccctttttcacttaacattata

SEQ ID NO: 699517 - DNA, 638 bp, Homo sapiens
tgcacgtaacagcctttcttaaccccagctcttatcaaacatggctgagctccaaaaacatactagcaatgtgcctttttagccacgaaagggagacttttcttctgccatgtttgcttcactgcctttcattaagatcaatcatatttaatcttttggctcatccatctctttgggactctgctaaaacccagggccctatttataaagaaaatgtacgtaatacacacaattttattcaaatttcagaggtttcatgggtcccccaaaagctcatctatatccctgtaaggttaaaattcttggattacattctaatggattctatctttccatttcattcattttcatttactcattcatttgttcagccaaacatttactgaagctcatgatatggcatgcactctcctaagtactkgtagtcacatgacttctgtgtcactcaggagactttgtgaggactagcaggctctggaaggctgagtattgctctctgtgctctgacacagtgcaactctacttgttttacagaaaagtgattcctttgtttgatgcacctggctattatgatttccttctagatgtatagtcctatgtagctctgtgaaagcctttttcctagcaacacaggattt

SEQ ID NO: 699518 - DNA, 882 bp, Homo sapiens
tacatcgtcttcagagttgttgcctggaacactttcccctgtgatatagcataagtgatgtcttcatttacttatgtcttttctcagtgccactttatctgagagactttacctgactagaagtgttctccttgcccagttgtttttattttcatatgcccctacctagtatgttatgtttttatttttttctcatttgtctctcacaggaatataatctgaggtaatgtgtctgttttgtttacagccatatccttgcacacaaaacatgacccagcacatgaacaaaaggatgaacaaattaaagaaatggtaggttggaatcaacttgccaagttcattgggtatcatttaaggaatttgtacaggtagtaaactacacacattkaagtgacttagaggtttaattttatttaaaagatagataataacacaaacagttattcattaattcactcaacaaatattgattgaaggcttaccatatgccaagccaggtgcttggtaccaagcacactaaaatgagcatgactggcacagtccttgccaggactttcactttaatggggaagagttcagttgtggttttagaaaaatcactggtgatggtagaggatcatctggatgtaggggcaccattccagagccttttgtactgggagtctaggttaggccaatagcaagaaatatagagataaaggagtatcagaagaacattttttttaacttaacaccagttaataaacaaagataattgctttgagtaaattagctcattatcttgaacacgccctaatgaagggtagaggaaacctatattgattcgggtccttgacagtttaattcaaggctagttagtgaaaacatcagcagcttgtagat

SEQ ID NO: 699519 - DNA, 882 bp, Homo sapiens
tacatcgtcttcagagttgttgcctggaacactttcccctgtgatatagcataagtgatgtcttcatttacttatgtcttttctcagtgccactttatctgagagactttacctgactagaagtgttctccttgcccagttgtttttattttcatatgcccctacctagtatgttatgtttttatttttttctcatttgtctctcacaggaatataatctgaggtaatgtgtctgttttgtttacagccatatccttgcacacaaaacatgacccagcacatgaacaaaaggatgaacaaattaaagaaatggtaggttggaatcaacttgccaagttcattgggtatcatttaaggaatttgtacaggtagtaaactacacacattgaagtgacttagaggtttaattttatttaaaagatagataayaacacaaacagttattcattaattcactcaacaaatattgattgaaggcttaccatatgccaagccaggtgcttggtaccaagcacactaaaatgagcatgactggcacagtccttgccaggactttcactttaatggggaagagttcagttgtggttttagaaaaatcactggtgatggtagaggatcatctggatgtaggggcaccattccagagccttttgtactgggagtctaggttaggccaatagcaagaaatatagagataaaggagtatcagaagaacattttttttaacttaacaccagttaataaacaaagataattgctttgagtaaattagctcattatcttgaacacgccctaatgaagggtagaggaaacctatattgattcgggtccttgacagtttaattcaaggctagttagtgaaaacatcagcagcttgtagat

SEQ ID NO: 699520 - DNA, 882 bp, Homo sapiens
tacatcgtcttcagagttgttgcctggaacactttcccctgtgatatagcataagtgatgtcttcatttacttatgtcttttctcagtgccactttatctgagagactttacctgactagaagtgttctccttgcccagttgtttttattttcatatgcccctacctagtatgttatgtttttatttttttctcatttgtctctcacaggaatataatctgaggtaatgtgtctgttttgtttacagccatatccttgcacacaaaacatgacccagcacatgaacaaaaggatgaacaaattaaagaaatggtaggttggaatcaacttgccaagttcattgggtatcatttaaggaatttgtacaggtagtaaactacacacattgaagtgacttagaggtttaattttatttaaaagatagataataacacaaacagttattcrttaattcactcaacaaatattgattgaaggcttaccatatgccaagccaggtgcttggtaccaagcacactaaaatgagcatgactggcacagtccttgccaggactttcactttaatggggaagagttcagttgtggttttagaaaaatcactggtgatggtagaggatcatctggatgtaggggcaccattccagagccttttgtactgggagtctaggttaggccaatagcaagaaatatagagataaaggagtatcagaagaacattttttttaacttaacaccagttaataaacaaagataattgctttgagtaaattagctcattatcttgaacacgccctaatgaagggtagaggaaacctatattgattcgggtccttgacagtttaattcaaggctagttagtgaaaacatcagcagcttgtagat

SEQ ID NO: 699521 - DNA, 882 bp, Homo sapiens
tacatcgtcttcagagttgttgcctggaacactttcccctgtgatatagcataagtgatgtcttcatttacttatgtcttttctcagtgccactttatctgagagactttacctgactagaagtgttctccttgcccagttgtttttattttcatatgcccctacctagtatgttatgtttttatttttttctcatttgtctctcacaggaatataatctgaggtaatgtgtctgttttgtttacagccatatccttgcacacaaaacatgacccagcacatgaacaaaaggatgaacaaattaaagaaatggtaggttggaatcaacttgccaagttcattgggtatcatttaaggaatttgtacaggtagtaaactacacacattgaagtgacttagaggtttaattttatttaaaagatagataataacacaaacagttattcattaattcactcaacaaatattgattgaaggcttaccatatgccaagccaggtgcttggtaccaagcacactaaaatgagcatgactggcacagtccttgccaggactttcactttaatggggaagagttcagttgtggttttagaaaaatcactggtgatggtagaggatcatctggatgtaggggcaccattccagagccttttgtactgggagtctaggttaggccaatagcaagaaatatagagataaaggagtatcagaagaacattttttttaacttaacaccagttaataaacaaagataattgctttgagtaaattagctcattatcttgaacacgccctaatgaagggtagaggaaacctatattgattckggtccttgacagtttaattcaaggctagttagtgaaaacatcagcagcttgtagat

SEQ ID NO: 699522 - DNA, 682 bp, Homo sapiens
caaaatatttgctgaaggagacagaaccccagaaggatttttttcttccattatttgtgggttatgtcagtttattttatggctgcagcaattttaaatgcattttcctctcctgtgagatgcactctttcaactttcctggaggtgagcttgagggtcttattgatggtcagatgtgagcgcacatatatgtacgcgtcacatctgaccataaaacaagtgatgaatttagcatttacttttagaggggtgagtttcctctgctcttgttcctggtttgggggattaaacctttcctgcttcatagaactgcatgatgagcttcttgaacacacacatactcactcacacacacacacacacacacacacacacacacaaaacagtgccaagaatcttcaacatcagcattttttttcttaatttttttctctttccttaatgaatctggagaagagaaaatataacatttgtttttgaaatatttgaatgaggatgttycaagccaacatagagtaattgcaaaataaaatacctaaaatatttaaataaataaatctaaagtgctataatcatttcttattaacaccaataacctattttataaataatgttcaatttaatctaataagatcaaaataaattagcataccatctttgaattaccaaaaaatcaaaataa

SEQ ID NO: 699523 - DNA, 682 bp, Homo sapiens
caaaatatttgctgaaggagacagaaccccagaaggatttttttcttccattatttgtgggttatgtcagtttattttatggctgcagcaattttaaatgcattttcctctcctgtgagatgcactctttcaactttcctggaggtgagcttgagggtcttattgatggtcagatgtgagcgcacatatatgtacgcgtcacatctgaccataaaacaagtgatgaatttagcatttacttttagaggggtgagtttcctctgctcttgttcctggtttgggggattaaacctttcctgcttcatagaactgcatgatgagcttcttgaacacacacatactcactcacacacacacacacacacacacacacacacacaaaacagtgccaagaatcttcaacatcagcattttttttcttaatttttttctctttccttaatgaatctggagaagagaaaatataacatttgtttttgaaatatttgaatgaggatgttccaagccaacatagagtaattgcaaaataaaatacctaaaatatttaaataaataaatctaaagtgctataatcatttcttattaacaccaataacctattttataaataatgtycaatttaatctaataagatcaaaataaattagcataccatctttgaattaccaaaaaatcaaaataa

SEQ ID NO: 699524 - DNA, 3275 bp, Homo sapiens
ttccaaaacaacagtcctctagctgcactttagaatcacatcttgggaaatagatttagggcttcgtaacttttgaagcaataaattatttgtgcatatgttcttccttatatgaagaatttggtttattttagaccagcattgtgttgggrgggggaaatgaacagttttactacccatgctaaagcctttcatcctccaagtggatgagccttttgtattctaaaaattgactgcattttcattatgaaaaacacttaccactcaaaattactctttcctagaaataattataaaatgactctgattatcacattagtttagcggaatgtttaatgttaatatggacaatttgaattcaatttttttttaaaaaaactgatttttcggtaagcaactcatatctcaaaataatcttaaatctataaaatttggtcattcaaataaatttccacaaaatagtggagaatagaaaaataatgttatacatcttaatgttctttataatgtcttaatgagttttcatgaacattaacgtaacctctaaaaccaggacaggatgtccactaccatttattttcatcacaatttccttcacatagaatataaattttctacagatacaataatgtgtccattagtataaaagtggtgattcaagcaaaactgaagatagcttttttcttggtgggggagaaagagtctcgctttgttgcccaggctggagtgcaatggcggattctggctcactgcaaaggcggattttggctcactgcaacctctgcccccttggttcaagcgattctcccatctcagcctctggagtagctggaactacaggccggtgccaccacgcccggctaacttttgtatttttagtagtgacggggttttgccatgttggcctgcctggtctcgtactcctgatcccaaatgatacacctgcctcggcctccaaaagtgctgggattacaggtgtgaaccactgcacccgacctgaagataaactttaagacaggaagtccaatttagagttggtattgctcaagtaaaagtgatgaaatgataatgttctgcctgattatttgtcagaaatcagctcatgcaagtatttcttccttttatatccttttggacagaaatagtcttctctgcctctgtcagtaccctgtaagagtgtgcaggcatgtatatgtgtgtgtgtgtgtgtgtgtgtgtgtgtgtatccctatctctgtgtgtctgtgtgtgtgtatttatatattatatatatatatatataatatatatatacacacacacatatatacatatatatgaataccatgcattggcatggtatctatcactaatagattgtcatcacagtgactgatataagaagacaaacattaacagtcggtgaataaatatctgactttctcatagttggtacatttttctagggctttcttaatgacactgacacttttagaaatccctcttaggattttgcttttcctttcccaatgtgaatttgtggaatatttagcttttttctactacatagagagaaaggatagacagattcttgcccaacacactgtagagcatgtagacctagaccttcctttcaattccttgcccaagcccttcccccatatgaggatacttttcgttttctactcaaactcattcaagcttcaccatgctccctccccctaggtaaagctttctgaaagaatgggtttcacactgacagtgatttctgagcctctcatttggatggagttttgttcactaaaatgtgtctagtaaaaacagcatagagaagctttagtgaatgctgaaaccagagtacttggggggatttagtcttatttggaatatttgttccgcttgattaaattctacctgtgttcttgcctctattttttctttctgttcttaataatattgagttatttttccactgcattctatctttcctatgcacaagttcttagtctcaagtcacagttctgcatgtactatccattctggctattatttttacaacattttaaacattaagcatacaaagttcactattagaaaaaaattgtaaatcaagttgcctgattacaaaataaattcttccctaaattaccttttgaagcaagattgaagtaacctaagaatgacctcaagttaaatgaaaaagtttggttttattgatttacctctcatatgcctccaactagagaccaataaaatcctaaagagtagcacacaggtgattttcacccacagattatgggtttagttctgaaataaactgtgaaggacgattttttttttccttaaagaacctgtattaaaatagacgcaaccaattctgatggtgttatatgggctgagttgcaaagatcgttatgttttaagtcaacaacacaattaaaaaacaacatgcttctttcatcttttaaactctccatttactttaattaagctcacacagtgaaatcttatttttttctttttaaagatataattaaaaaggtgaattgagaattaggatccaccttcactcttctatattttttggagtgggggcattagaatagaacctctggaatatgtggtgtaaaatttacatttagcacagctccaaatttattattgacagttgtgttaatttttttataaaaaataaatattttgaaaggaggaaatgcaaatgacagataaagaaactcagcttgatgccccagttgcaatgtctggcagctaactctgcccaacacaatgaacaagccatgcatcactggagaagagcagataaatgtcagtcaagcatgttcatatgatggagagaatgtgatagcattagcacattgacacaatatgaccctgcctattaacactcctttttcctttcagactcctcctcagatggtattgtgtgaatgagagcattactatttaataattcttcattcaggctttcctagttgtccacaaaacgttctttgaaacaatagaataaaggtaacagctctcttttatatttgttagactcaataactaaattcattatccttgtaagaaataaaaatctaaatgcacttaggagctcaaaatataatattaaatcagttaaatagatgtattatgacactgaagtaattgaaagtacttttaaaattcactctctgaatagaaaatttaatggctattcaacaaatcaaatccacactgacaccgtacattttaagtcaagtaactagctgctgctaattaaatattccttttag

SEQ ID NO: 699525 - DNA, 2078 bp, Homo sapiens
gcgaaggatgttggtgctaattttgcaaaagtgatctggtcagggaagtctgtgtgcatggatggcatgtgcatgaagatttcagtgatgtgcaggagccagctttttgaagatgagggagagcatttcacggagggagcagtgcatacaaaggctagcgatgcaaaagggtacagaatgttccttagaaagaatggccaaaatgcaaaagtgagaataaagataagatcaagaaaatgtgtatctttatattgacaccaaaaatctcaaatgacgtaggcagaattactttaatatgcctgatattgaaacttkccaaatattaacacttctcaataaatatttatgtacccatggagtgaaatttaaatggaagaaagaacgtagctcttcctctcaatgtgtttactatttttatatttaagtggtattctaatgtgcccttgcataatagttggtaaagataatgaacagtaatgtccacaggaaataaaatatggaagagttttaaattaatatgttagctacccatgagaatgggtaaaattatttttattgtaatcttgataaaaagagaacaacgaagttagccaagctatgcaggattaaagcatctggtgtactagtcactcataagcccatgtaagcagctcatacttttgtgacatcatttggtacaaacgaataaggtatttactagtgcacagtctattatattctagacagattccacctaaatttgtgcttatgcagcataaagttcaattgagttccttacactcagatatatgggggccaagtacacagcaataaaatattcttgtttttttaaagtagatttgaggtttgaatccactggatttgttttctatactcgtcaagttaactgttttacaatacaaaatataactgagtttgattcgtactgaatagtccataaataataaataaaccatgacttttagaaatattttggaaaggaaacatgacaataatgaacatactcatctgtagggtagtttaagaaatctattctacaaggagcaggtttgtaattacttagaaatacaaatgttaagtcagaataaaaatgtctcagcattttaatttggaaatggcatatgtgtgagttctttcttgtttttataaataactagctattatgatggtttcaggatacagttgtgtaataattgcttgtctattatgattgaaagcatgagtaaaataaaatgtatgtaatagcactccctccaataataattgcccactctgtcatatctgtttgcttgtgtagcacaaaaagcaagaacaaaaataggctccacaaatcactcatactaaaaaaaaaatctgaaattaaagtaaatactgctataatactctcatatttttcataaattagaacaaacattttatatatgcttgctttacctattagctagtagatgattaacatcttaccgaatctttaagttaccaatcaataaatcttatcgaatattaccctttaagtctgagctacaaagaatttgaggaaataactcttgacttcaagaagtttattaaagatacaattttagttttcaatattacacgaatgctttttaagtaagcagactgtgacattgagctaattaaaaaatagttatcattactgagtgcttagaaactatagcaacaagtggcttagaattggaaggaaaactgtctgtatacaatacatgcatgcacataaatttacattatcagaacattactgatatttatatctgaagtcctaagtcataaaatatgggtatttggactctgttaaaaatatctcccttctattttgatgattaaagaaatgcagccataaatcttgtttagtttttaaaggcatataaagaaaagaaatgcatgtaataatgtagcccaaataagttcaattctatgaaacaacactgatgttttctaacgaggaaaattctacccattatgtttttggaatctgaaaaaaaaaatgatgaatttcctttcctatagacttgccatgtgggaaatgttctaactttatattgcagaagtgaaacctt

SEQ ID NO: 699526 - DNA, 3047 bp, Homo sapiens
tagaagaatggctctgtctcctctttgcatgggaaggggagcctacctagagctgcctgggccccaaggtccatcattggctgtgatagctccatctcctttttttcactagagcacctgcattctcttgctagaatccagacttaactaccaggcagctggtctggggcagatgaagtagtagatatctggctgtcccgtctacttaaaagcctcactgccctctaattacttcaggctaggcaataactttgcccaccctctggggggtcagttctctgcaagggtcagttctttgacaaatgtctggcaatcagacagatcttaccaggtcacttaagcagccatagccgggggcaaactggctccaggttcccactgagatcatcctattagaaattaccattaataatatttcactaattgagcacctactctgtgcccgacagtttgctcagcgaggggaggcacagttccacacacaggcagagacaggggctcaggaggttcagggtggctgaaccaaaacctcgcagccagtgagggcagagctgggatgctgagaatgaagccttcccacccaggctccaggactccatgaagagagtctctccaaaggcccaaacaccatgccattgacagaagtcttccactaaaccagaaaattacctctgctattcctgcctatgttttcatttctgctcaatttcctgaatatgagggaattctgagagaacaatgaccacttttgggaactagatgaatcaaggagcatttgaaagtaaaatgtgaatttgggctgaaatgcaagtactatttctaatctttgaggcatataatttgcaaaggagcctaccaggcgtagtgggggaaatggatttagcattgtaaatgtgggctcctactgggatctgcagccaagctctggtgttagggatggcgctgtggacctgtaccaatttacgctgtgattagaatattgattttacattattcagcaagtatggtaacactccactggggctttgccttgagcaatctggaatgttttctaagcaccaactctctgggccacgccctgtcatgggcatttacattacagaaatgaatcacttttcagggtctcctggtccagaagggaggcaggcacagaggcaaccaatgacagaaataaggacagcagctcccgtgtgttgacagcttccatattccaggtaccacatctgtactgtcatgcatgaccttattggatcttcacaaccttgagaggagtttccattatttctcagttcaaagacaggaaactaactctgcaagagtacaataacctgcccaaagtcacacaggtgacaggtggggaatctagaatcccaacccaggtctatctgacttcaaacttcatgctatgaacactacactgtcacaatcacaacacagcatgccaagaaccactctggagggatttgcagagtacatcacagcctggagggcgggaggacataattcaatgggagagtgaagtgggccagtggagggagagaatagagaggaagaaaagcttcctagaggtggctgcatttgaacttaacttagaatttcagtgagtttttgcggtggataaggggtcacgctggcatcctaagcactgggaacataggcaaaggcagagagcttcagagtgcacggcagactcatggggaaacaagcagctttgaatggctggaatgtaggtgattgggaaggggtgtttgctgcaatgaggttggcatagaagctggagcagagggtcttggaggccatgctgatggggctggattttgccctgggaggactgggaagccagtgggtgacrtaggacatgggatccatctgatgagggttgttacttccctagaaaactcactctggaacatgtagtagagaatgcattgatgaagggaacagctggtaagctatgaaggcagcaagggtctgggatatgccacccaacttgttgcacctcttaacagtggaacagaaatattcttcttaaggtcatgtgcatctctttctggtatgaaatataacctggtcaaaaaggcccaaaaatctttccagagaaagaatttaaatggtctaagagaatgattcttaagaaggccatcctcgagatgcctgtaatccctgctctttgggaggccgagaagggaggatcacttgaggccaggaatgtgagaccctggcaacacagggagacctccatctctacaaaaaaaaaaaaaaattaaaattaaaaattagccaggagtggtggtgtggaacggtagtcccagctacctaggaggctgaggtgggaggatcccttgagcccgggagttacaggctgtagtgagctatgatcaccccaccgcactccagcctgggcaacagcctttaaaaaaaaaaaaaaaaaaaaaaaaaaaagccagtctcatttttctaaagtcttgtaagttatgaagttatactagaaagacaaatgaaaacactgacaattccacagcaaagcctgctgcggacacgagcaagactgaccttttaggtcctggagagctgggatagcaggcatgtgtcagagtcctggtgatatggggaagataatctcatcagagctcccaagtctgaatagcattttccttactcactgttcaaaacctgagattgtagctctgggctccaagtactgccagaacagcctgtcatatttttgttttaaaatgctagggattttgcattttgctgacatgccaaggagacactggcttttgagagagatcattttgtaaaatcacatttcttattctaggactaaaacatccatcacatcaaagggcataggaaaagtcaaaagaaaaaaaaaatatatatatatatatatgctttatattgtgcccaacctgaaaggatcatttgttttgcaaattccttccatgctgtgctatgtgcagacatatttcttataaaattgtcattttagaacacacagcatcattagagggtggtaaaaagccggcagtgaacatcttcca

SEQ ID NO: 699527 - DNA, 609 bp, Homo sapiens
tcctcatcactaaagtagggccaataatagcacccacctcatagggaagattaaatgacataatgtatgtgatgcaactagcaaagtaccagtcccatagtaagtcatgccccacagtatttccacccacccctgttctctgccttcccaaccaggtactgcaacgactggagcagaggcggcagcaggcttcagagcgggaggctccaagcatagaacagaggttacaggaagtgcgagagagcatccgccgggcacaggtgaggcacacccctgaggttagagatcccaccttctcaggcaagccccactccctctactcctctttctgayggtgggaggaaggaagggagaagcagagagtaaacactgccgtcagccaggttccactaacttacttcctccccatggcaggtgagccaggtgaagggggctgcccggctggccctgctgcagggggctggcttagatgtggagcgctggctgaagccagccatgacccaggcccaggatgaggtggagcaggagcggcggctcagtgaggctcggctgtcccagagggacctctctccaaccgtgagctcctcccccaacactacccatccttac

SEQ ID NO: 699528 - DNA, 631 bp, Homo sapiens
ctacttgtgggatataattctgcctggcacataatagatgatcaataaatgtccattgtctgataagtaacagtttctttcttgattcttatacagggtagctagctccaaagaatgtctgattccaacatctttgctttttccaataccacatgccaagagagaaaaagacatacctaattttttaattctcaccataaatcaatgagacataaacattttggctctcactgtcaacaaaactcctgtgtgtgatttttttttttttttttggaaagcaatctaatgttaaatcatgcttcctggttccaaaacactagaagtgccagcttgactggatattacacctaattggcaggacaaacattcaatgcaccaaacaaatggaaygttcttgtccctcatccaaagtaataaagtgcagagaagctcgcttttgtgcgcgctgtctctctctccctccctctctcactttctcgctttctttcctccacccctccaccgctctctccaagggtcttggtctcagatctcagttgcttctgccccttgatgtttgggattttctccttgcctcacattgcagctgcctctcctttgcgtcggcgaatgtacgtccaacaatcgccct

SEQ ID NO: 699529 - DNA, 597 bp, Homo sapiens
cttttaacattttacattaattagcatttagcagatgaccataacaaattatttttattatgttacattaattgccaatacagatttctttctggttattacaaatctgtttgcaaaattttattttgtcatttattaaatttttggataattagttgctacattatargtatacaaacttatagtgttaattatggctacaaatacttaaattcagttttagtatcttttattaatagtctaaaacttataaaatgctttgtgcattaatattggtaacattttttagtatgaattatcatttcaaaaatgttaagaacatagcttttccgtcttttatttatttatttattttttatttttttgaggtggagtcttgctgtgtcgcccaggctggagtgcagtggtgtgatctcagctcactgcaacctctgcctcccgggttcaagtgattctcctgcctcagtctcctgagtagctgggattacaggcacgtgccaccacacctggctgatttttgtgtttttagtagaaatgaagttttaccatattggtcatgctgatcttgaactcctgacctcaggtgattcgcctgcc

SEQ ID NO: 699530 - DNA, 597 bp, Homo sapiens
cttttaacattttacattaattagcatttagcagatgaccataacaaattatttttattatgttacattaattgccaatacagatttctttctggttattacaaatctgtttgcaaaattttattttgtcatttattaaatttttggataattagttgctacattataagtatacaaacttatagtgttaatyatggctacaaatacttaaattcagttttagtatcttttattaatagtctaaaacttataaaatgctttgtgcattaatattggtaacattttttagtatgaattatcatttcaaaaatgttaagaacatagcttttccgtcttttatttatttatttattttttatttttttgaggtggagtcttgctgtgtcgcccaggctggagtgcagtggtgtgatctcagctcactgcaacctctgcctcccgggttcaagtgattctcctgcctcagtctcctgagtagctgggattacaggcacgtgccaccacacctggctgatttttgtgtttttagtagaaatgaagttttaccatattggtcatgctgatcttgaactcctgacctcaggtgattcgcctgcc

SEQ ID NO: 699531 - DNA, 597 bp, Homo sapiens
cttttaacattttacattaattagcatttagcagatgaccataacaaattatttttattatgttacattaattgccaatacagatttctttctggttattacaaatctgtttgcaaaattttattttgtcatttattaaatttttggataattagttgctacattataagtatacaaacttatagtgttaattatggctacaaatacttaaattcagttttagtatcttttattaatagtctaaaacttataaaatgctttgtgcattaatattggtaacattttttagtatgaattatcatttcaaaaatgttaagaacatagcttttccrtcttttatttatttatttattttttatttttttgaggtggagtcttgctgtgtcgcccaggctggagtgcagtggtgtgatctcagctcactgcaacctctgcctcccgggttcaagtgattctcctgcctcagtctcctgagtagctgggattacaggcacgtgccaccacacctggctgatttttgtgtttttagtagaaatgaagttttaccatattggtcatgctgatcttgaactcctgacctcaggtgattcgcctgcc

SEQ ID NO: 699532 - DNA, 1055 bp, Homo sapiens
tgaacatgggaggcggaggttgcactgagccaagatcatgccaccacactccagcctgggtgacagagtgagactccatctcaaaaaacaaaaaacaaaaacagttcaggcrtgtttcagagacaaggaaaacactgaccatacatacctgaggctgtgttagggaggaattctccccatttaattttagggtgaatgattagaaacgtgcctccaggtaaccatatctcaagcatatccaaatgtcacattttgatatctaagaaggcaatgtcacctttctgattagatttttctagtcagtaataactataaaaactaatagcttacaattctgtctataccaagtgtctctctacatgattagcgtgtattatttaacctctagagccctttgtgttaggtgtttttatattcccattttacagatttagaaatatggcagatgcaataaggtttaacttgcccccaagcagtttaagatagaagcaagttttgaaccctggcagtttaacgtgagcctttaacatccatgctaatagtgtaagtagataagattgaatggtacacagggaacactttacagaaagatgtgtccttagccaagttcagatggctttctggaagtacaagcattaaaaatttggaaaatagccccaagtaggctcagcatgttcctacattctgcaatggaactctccaccccagcctcccaccaccactatcacaagctaaagcaggccataaccagctgggcagtggctgataagagccactcaaaggtagttttggatcatggagttctcattttgaaaaccccctctcctattcaacatagtattgaagttctggccagggcaatcaagcacgagaaagaaataaagggtattcaaatagaaagagagaaagtaaaattgtctgtttacagatgacatgattgtatatttagaaaaccccattgtcagggcaggtgcggcggctcacacctgtaatcctagtgctttgggaggctgaggtgggcagatcacaaggtgagaagttcaagaccagcctgg

SEQ ID NO: 699533 - DNA, 1055 bp, Homo sapiens
tgaacatgggaggcggaggttgcactgagccaagatcatgccaccacactccagcctgggtgacagagtgagactccatctcaaaaaacaaaaaacaaaaacagttcaggcgtgtttcagagacaaggaaaacactgaccatacatacctgaggctgtgttagggaggaattctccccatttaattttagggtgaatgattagaaacgtgcctccaggtaaccatatctcaagcatatccaaatrtcacattttgatatctaagaaggcaatgtcacctttctgattagatttttctagtcagtaataactataaaaactaatagcttacaattctgtctataccaagtgtctctctacatgattagcgtgtattatttaacctctagagccctttgtgttaggtgtttttatattcccattttacagatttagaaatatggcagatgcaataaggtttaacttgcccccaagcagtttaagatagaagcaagttttgaaccctggcagtttaacgtgagcctttaacatccatgctaatagtgtaagtagataagattgaatggtacacagggaacactttacagaaagatgtgtccttagccaagttcagatggctttctggaagtacaagcattaaaaatttggaaaatagccccaagtaggctcagcatgttcctacattctgcaatggaactctccaccccagcctcccaccaccactatcacaagctaaagcaggccataaccagctgggcagtggctgataagagccactcaaaggtagttttggatcatggagttctcattttgaaaaccccctctcctattcaacatagtattgaagttctggccagggcaatcaagcacgagaaagaaataaagggtattcaaatagaaagagagaaagtaaaattgtctgtttacagatgacatgattgtatatttagaaaaccccattgtcagggcaggtgcggcggctcacacctgtaatcctagtgctttgggaggctgaggtgggcagatcacaaggtgagaagttcaagaccagcctgg

SEQ ID NO: 699534 - DNA, 1055 bp, Homo sapiens
tgaacatgggaggcggaggttgcactgagccaagatcatgccaccacactccagcctgggtgacagagtgagactccatctcaaaaaacaaaaaacaaaaacagttcaggcgtgtttcagagacaaggaaaacactgaccatacatacctgaggctgtgttagggaggaattctccccatttaattttagggtgaatgattagaaacgtgcctccaggtaaccatatctcaagcatatccaaatgtcacattttgatatctaagaaggcaatgtcacctttctgattagatttttctagtcagtaataactataaaaactaatagcttacaattctgtctataccaagtgtctctctayatgattagcgtgtattatttaacctctagagccctttgtgttaggtgtttttatattcccattttacagatttagaaatatggcagatgcaataaggtttaacttgcccccaagcagtttaagatagaagcaagttttgaaccctggcagtttaacgtgagcctttaacatccatgctaatagtgtaagtagataagattgaatggtacacagggaacactttacagaaagatgtgtccttagccaagttcagatggctttctggaagtacaagcattaaaaatttggaaaatagccccaagtaggctcagcatgttcctacattctgcaatggaactctccaccccagcctcccaccaccactatcacaagctaaagcaggccataaccagctgggcagtggctgataagagccactcaaaggtagttttggatcatggagttctcattttgaaaaccccctctcctattcaacatagtattgaagttctggccagggcaatcaagcacgagaaagaaataaagggtattcaaatagaaagagagaaagtaaaattgtctgtttacagatgacatgattgtatatttagaaaaccccattgtcagggcaggtgcggcggctcacacctgtaatcctagtgctttgggaggctgaggtgggcagatcacaaggtgagaagttcaagaccagcctgg

SEQ ID NO: 699535 - DNA, 1055 bp, Homo sapiens
tgaacatgggaggcggaggttgcactgagccaagatcatgccaccacactccagcctgggtgacagagtgagactccatctcaaaaaacaaaaaacaaaaacagttcaggcgtgtttcagagacaaggaaaacactgaccatacatacctgaggctgtgttagggaggaattctccccatttaattttagggtgaatgattagaaacgtgcctccaggtaaccatatctcaagcatatccaaatgtcacattttgatatctaagaaggcaatgtcacctttctgattagatttttctagtcagtaataactataaaaactaatagcttacaattctgtctataccaagtgtctctctacatgattagcrtgtattatttaacctctagagccctttgtgttaggtgtttttatattcccattttacagatttagaaatatggcagatgcaataaggtttaacttgcccccaagcagtttaagatagaagcaagttttgaaccctggcagtttaacgtgagcctttaacatccatgctaatagtgtaagtagataagattgaatggtacacagggaacactttacagaaagatgtgtccttagccaagttcagatggctttctggaagtacaagcattaaaaatttggaaaatagccccaagtaggctcagcatgttcctacattctgcaatggaactctccaccccagcctcccaccaccactatcacaagctaaagcaggccataaccagctgggcagtggctgataagagccactcaaaggtagttttggatcatggagttctcattttgaaaaccccctctcctattcaacatagtattgaagttctggccagggcaatcaagcacgagaaagaaataaagggtattcaaatagaaagagagaaagtaaaattgtctgtttacagatgacatgattgtatatttagaaaaccccattgtcagggcaggtgcggcggctcacacctgtaatcctagtgctttgggaggctgaggtgggcagatcacaaggtgagaagttcaagaccagcctgg

SEQ ID NO: 699536 - DNA, 647 bp, Homo sapiens
tgccaggctggagtgcagcggtgtgatctcggctcactgcaacctccacccacgggttcaagctgggattacaggcgtgagccaccgcacctggccaccagtgtagaattttatatttctgagccttttaacatgtctggccctaaactgtggaatctgtgtcctgggcagtgtgactacatctgttcagattttaattcacatatatatgttttagcctggcyttctagagaagtcattctgtgtctgaatatcttagttttcagctatgtacatgccaaagatatgctcaaacagcttgagcctgctctttaatctgtatctgggttaagaagggcacattcaaagcttaaagaattctcatctgccttggcccttgctctcagttagacaacctcaggtctcccctacacatgtgcatagtttcacgttatgccaggatatgtgaagaggttatccctttatggttctctcatttccagggtctgccttttaatttatagctactcttccactcaccccaactggcactacaaccttaaactagcaaatacatggtttttccttgttttcccctaccaagttcagtacattttatcgacaaaggtttttactcattgccccaaattgaatcagctgtctgacag

SEQ ID NO: 699537 - DNA, 647 bp, Homo sapiens
tgccaggctggagtgcagcggtgtgatctcggctcactgcaacctccacccacgggttcaagctgggattacaggcgtgagccaccgcacctggccaccagtgtagaattttatatttctgagccttttaacatgtctggccctaaactgtggaatctgtgtcctgggcagtgtgactacatctgttcagattttaattcacatatatatgttttagcctggctttctagagaagtcattctgtgtctgaatakcttagttttcagctatgtacatgccaaagatatgctcaaacagcttgagcctgctctttaatctgtatctgggttaagaagggcacattcaaagcttaaagaattctcatctgccttggcccttgctctcagttagacaacctcaggtctcccctacacatgtgcatagtttcacgttatgccaggatatgtgaagaggttatccctttatggttctctcatttccagggtctgccttttaatttatagctactcttccactcaccccaactggcactacaaccttaaactagcaaatacatggtttttccttgttttcccctaccaagttcagtacattttatcgacaaaggtttttactcattgccccaaattgaatcagctgtctgacag

SEQ ID NO: 699538 - DNA, 704 bp, Homo sapiens
atttttatatatttttcaaataaattccctttaaaaatgtaaataaatatctcttaaagaaatktttaaatgattttttccacacttatattttcaggattataatcacttaggatttcagcatttgggattatggcattaaggattgtgtcattccagataatgattggctcctggatgctcctttcttccaggtataggaggacatcactcacatgagggtcttatgacctgcttcaggaaaaggtcagaaaatccttcctaggttttatgacgtgctttaggggagagcggtgggaaaaggtcagagagactttcgtgatcctttagttttctcaaattctttcagtttaaaatatacatcataccaaggcatcatattttggggtaggatgttctgagccccatcattgaccttttaaactaagctactgaaagggcaacaggcctcagagctggtacaacacgagaaaaaagttcagagaagttacagtaaataagtagagagaaagaaaggtcttcatgcaagattttctaaaccatttccaagtaccttcaataattaagataaaatacttcagagggtaaaaaagaaatgttggagaaagaaaaagaagtattaaataaattactctatcaaaattacaggttttctaaatgtactgtggtattgaaatctaaatgcctcaagaaaagagtttttt

SEQ ID NO: 699539 - DNA, 634 bp, Homo sapiens
tattaggacaattccaagctcaaaaatatgctagctgatgccttgtttgccacacagaattgtacccaaaaactttctagaccaactcactataaaattaaattttctttaggtgttcacaccacccctaagtcatgcctgaagcagccctgagaaacttcacccctaccccaattatcctcagtaaaaacttacattttctttatcttatcttgtaactttatattttataaataaaaagacaggaatgtcaggyctttgagccaaagctcagccattgtaacccctgtgacctgcacatacacatccaggtggcctgcaggagccaagaaatctggggcagctgaaaaaacacaaaacaagtaaaagagctagttcttgcctcaactgattaaccaacgttacaccgttacaccattgtgacttgtccctgccctaccttaactgatcaatcgaccttgtgacattcttcttctggacagtgagtcttatgatctacccaccatgtaccttgtgaccccctcctctgctaacaatagataataaccaccttttactgtaattttccattacctacccaactcctatgaagcaaccccttccccatctccattcgctgactctcttcagactc

SEQ ID NO: 699540 - DNA, 629 bp, Homo sapiens
ttatatctaatctaagctttttcttaagatctttttaactttcttctttcaaaataatcttgctcagatggagatctgtttttctctccagtgctttgtctgtttcagaagccctattagtatcccatggtgcctgaatgaggtgggctgtcrcagtgagaacttttggagctatctctatctggactcatgctggaaactcagcagtattttttccatgtcaccattataagtagaagctggggctgaaacactgctcccattcccattatcaggctacaacatatgcagagccatggccacaactatatttacctgtaaaatgtgttactggagtagagtatttttgttctttcccttacacaagagctagcaaaccaggacaggtgatccaggttctggagctcaaccaaggcagtttcattttccttttttctttttttttttagacagagtttcagtcttcttccccaggctggaatgcaatggcccaatctcggctcactgcaacctccacttcctgggttcaactgattctcctgcctcagcctcccgagtagctgagattacaggcatgtgctaccacgcctggctaattttgtatttttagtagagatggagtttctccc

SEQ ID NO: 699541 - DNA, 633 bp, Homo sapiens
tgtctttctttctttcatggaaacaatgctactcacagcactaaccagtaaacaaccttcaagatatttaagcacatgaaatcagcttcaaatacacaatggatcccaattttgcacatttttcaaaggtacttacagcagtgaagacttcctaagcttgctttgaaatagtcaccaggaaataaagaaggcatctacagtytaccattcattggacttgtgtcttaaaaggcctcagtgagtgtaggaaaaatccccataaaaggagccaggacctactttttgtagtaagatctatacatggctggcttcttcctgccactgacatctcagttcaaaatttacctcctcagaaatgtgactccttctagccactctaaagcagaggaggtaaagtacctgttactctctatcacatccccctatttctcgtttttcaaatattactcattctctgatatttttcattggtttacctgtttgtctcaccttctagaatgtcagctccataaaagcaaggtccttgcctgacaagtttgccactgtatccccatatctaacccacagccaggcatctagaaccatttgttgaatgaatgagtttgtgtttgtaaaatgaggcatctattttcc

SEQ ID NO: 699542 - DNA, 998 bp, Homo sapiens
  misc_feature 857, 993: n = A,T,C or G
agttttcaaatcrctccatgggtagaactctcgtgagacaaccagctaatttaaataaataaggttctgtgaccccgtgggagcttacaggggtgagacatccattttaatcgaggctcagtttgagaagaggaaatttcactcataacatacttttaagtggattggctgcaatgtgattttctggcgatgtttcctttgttgctattttaaggcaaatgtttatgtttctttacaagacttggcatattttactggaaaggttgaagtaatttctccacccttaatatggcatgcctttctagaatggtcactcggaaccaattaagcaacaatttcattccatagactattgcaatttgcttttcacttattctgtgcagactgaagttgtatattcatggacatttcccatgtaagttttagattttccactttgtagatgcaaatacttcttccagttttgtgataaaataactcaacaacagcaaaattcaaataagaccacaaaaaaagtcttattaagctttacataaatagctgcttccctatcatgaaaacaactgggaacattgtactgttgtgaatctacatttctacttattcagtaattgtacccctagtgctgtttaccatttcatttgtattatttatatatcaaccaaagggtatgaacaccaaaaaataatttcacatcacctatcttccatttctttttattttaaaagccctgaaggtatagttctcctataaataatgataaaaagatgctgtattaatatttcagcaaagatctccatctactcacatactcacaaataacatattctgtaatatatacacttacccctccctanattaactgtgccgtgggcttgcaagataatctagtcaagctaaaagagatatcagagaacaagaccaaaattaatttactactctgtaccacatgtgaatatgagattgtggggggaaaaaaaggctattttttgnaccat

SEQ ID NO: 699543 - DNA, 998 bp, Homo sapiens
  misc_feature 857, 993: n = A,T,C or G
agttttcaaatcactccatgggtagaactctcgtgagacaaccagctaatttaaataaataaggttctgtgaccccgtgggagcttacaggggtgagacatccattttaatcgaggctcagtttgagaagaggaaatttcactcataacatactttyaagtggattggctgcaatgtgattttctggcgatgtttcctttgttgctattttaaggcaaatgtttatgtttctttacaagacttggcatattttactggaaaggttgaagtaatttctccacccttaatatggcatgcctttctagaatggtcactcggaaccaattaagcaacaatttcattccatagactattgcaatttgcttttcacttattctgtgcagactgaagttgtatattcatggacatttcccatgtaagttttagattttccactttgtagatgcaaatacttcttccagttttgtgataaaataactcaacaacagcaaaattcaaataagaccacaaaaaaagtcttattaagctttacataaatagctgcttccctatcatgaaaacaactgggaacattgtactgttgtgaatctacatttctacttattcagtaattgtacccctagtgctgtttaccatttcatttgtattatttatatatcaaccaaagggtatgaacaccaaaaaataatttcacatcacctatcttccatttctttttattttaaaagccctgaaggtatagttctcctataaataatgataaaaagatgctgtattaatatttcagcaaagatctccatctactcacatactcacaaataacatattctgtaatatatacacttacccctccctanattaactgtgccgtgggcttgcaagataatctagtcaagctaaaagagatatcagagaacaagaccaaaattaatttactactctgtaccacatgtgaatatgagattgtggggggaaaaaaaggctattttttgnaccat

SEQ ID NO: 699544 - DNA, 659 bp, Homo sapiens
tgggattacaggcgtccgccactacacccagctaattttttgtatttttagaagagatggggtttcaccatgtttgccaggctagtctcaaactcctgacctcgtgattcacccgcctcggcctcccaaagtgctgggattacaggcgtcagccactgcgcccggctggkttttttttttgtttttttttttttgaccaagttttgctcttgttgctcgggccagagtgcggtggcacaatctcagctcactgccacctctgcctcccgggttcaagcgattctcctgcctcagcctcgctaaggagctgggactgcaggcacctgccaccatgcccggctaatttttatagtgacaggttttcgccatgttcggcaggctggtctccaactcctgacctcagttgatctgcctatcttggcctcccaaagtgctggaattacaggcatgagccaccgcgcccagctgaaattagatgttttttagtgtaacaaggaattgccttccaaaatgaagttcatgtattatgctcatttgcaatatataattaactgtgcaaaatgatttttaaatatagtcaataacaaagattgttctgtatatggtagtgtttaataccttttttttttttccctgagacggagtctcacctgtagccc

SEQ ID NO: 699545 - DNA, 643 bp, Homo sapiens
tgaatatgttttctttcattggtaacaaaatgactggcagggaaaggtgttgtccctgatgagataacattttattttttttttttgagacagagtcttacyctgccacccaagcaattctcccacctcagcctcccgagtagctgggattacagtcatgcgccgccacgcccagctaatttgctgtatttttagtagagatggggtttcaccatgttggccaggccggtctcaaactcctgacctcaggtgatccacccacctcggactcccaaagtgctgggattataggtctgagccaccatcacacccagccgattagataggcttttaaagccgcagcggaaggaggagcagtgtctgtaaccggtggccaaacagtattaaactcctgggttgttttgggaggagtcactacaactacagcccaactacatttattatgccagataacacagtgctggggggacatactggagttgacaagatcccctgggggcacaagtggcaatggctgtgcaccagtggctggatatttctgaaaaatgaaataaaactagtggtcatccaagaagatgtagaattaatgtattgaaaaacattgatgaacatggtccaggtcaacaggaaagctgcaggaata

SEQ ID NO: 699546 - DNA, 643 bp, Homo sapiens
tgaatatgttttctttcattggtaacaaaatgactggcagggaaaggtgttgtccctgatgagataacattttattttttttttttgagacagagtcttaccctgccacccaagcaattctcccacctcagcctcccgagtagctgggattacagtcatgcgccrccacgcccagctaatttgctgtatttttagtagagatggggtttcaccatgttggccaggccggtctcaaactcctgacctcaggtgatccacccacctcggactcccaaagtgctgggattataggtctgagccaccatcacacccagccgattagataggcttttaaagccgcagcggaaggaggagcagtgtctgtaaccggtggccaaacagtattaaactcctgggttgttttgggaggagtcactacaactacagcccaactacatttattatgccagataacacagtgctggggggacatactggagttgacaagatcccctgggggcacaagtggcaatggctgtgcaccagtggctggatatttctgaaaaatgaaataaaactagtggtcatccaagaagatgtagaattaatgtattgaaaaacattgatgaacatggtccaggtcaacaggaaagctgcaggaata

SEQ ID NO: 699547 - DNA, 1025 bp, Homo sapiens
tctctctgtgcctcggcttcctcactggcacagcggggataacactcactcgcagggtgtgggaagggaaagatatcgcacgcggggaagtactcggcrtaggcggagaagatcagagccgaccagcgaggcgagcagttgttcactcggcccatgatgtctgggaagagccccagccagctcccgtcctggacaagcttttttctcatgggggccacctgcttgccttggcacagcgaggacagggccttggcagccaaaggagacggtcagctgtctccacctggtagtggagatagtcacagtggggtgatccttgagctggttttggtcacagagttggtgtctcccaagtggaaagtgggagggcatcattccacacagaggagccccttgtgcaaaagaggtgccagccctcggccaccctgggagcccgctggggtgggagaaggcgcgtgcggctgagcttggccttggtcctgaagcctggggaaacacgggagtactgagcacccaggatgcatcagcaagaatgcagaacagtccctgcctagtggagacggacagacagctaacaaacgaaggcgactggagatcacgatggtgccaggaagttaccaggatgggacagcacccgaggcagcatagggtgccccgtgggaatgttcacagagtgaggaaacttcagagcaagggaaacttccctgcagccagacaggaggaaggaaacctggctgcagcctgcaagacctcccacccgcgcctggcagggagcctggcctgggggctgcccatgctggcccttctgatcctgagcagaagtgatcacggacccttgtgcttccaataattcggcccctcttcctttggttctgggtttcctgtgtagcggtgggcaggatttcatctatctttccatctgccagagtctggcaagggagctaagccacataaacagactctggtggtgcagggggattgtgacctgctgcacagaagggcaaagccgtttcccgccaagccca

SEQ ID NO: 699548 - DNA, 1025 bp, Homo sapiens
tctctctgtgcctcggcttcctcactggcacagcggggataacactcactcgcagggtgtgggaagggaaagatatcgcacgcggggaagtactcggcgtaggcggagaagatcagagccgaccagcgaggcgagcagttgttcactcggcccatgatgtctgggaagagccccagccagctcccgtcctggacaagcttttttctcatgggggccacctgcttgccttggcacagygaggacagggccttggcagccaaaggagacggtcagctgtctccacctggtagtggagatagtcacagtggggtgatccttgagctggttttggtcacagagttggtgtctcccaagtggaaagtgggagggcatcattccacacagaggagccccttgtgcaaaagaggtgccagccctcggccaccctgggagcccgctggggtgggagaaggcgcgtgcggctgagcttggccttggtcctgaagcctggggaaacacgggagtactgagcacccaggatgcatcagcaagaatgcagaacagtccctgcctagtggagacggacagacagctaacaaacgaaggcgactggagatcacgatggtgccaggaagttaccaggatgggacagcacccgaggcagcatagggtgccccgtgggaatgttcacagagtgaggaaacttcagagcaagggaaacttccctgcagccagacaggaggaaggaaacctggctgcagcctgcaagacctcccacccgcgcctggcagggagcctggcctgggggctgcccatgctggcccttctgatcctgagcagaagtgatcacggacccttgtgcttccaataattcggcccctcttcctttggttctgggtttcctgtgtagcggtgggcaggatttcatctatctttccatctgccagagtctggcaagggagctaagccacataaacagactctggtggtgcagggggattgtgacctgctgcacagaagggcaaagccgtttcccgccaagccca

SEQ ID NO: 699549 - DNA, 1025 bp, Homo sapiens
tctctctgtgcctcggcttcctcactggcacagcggggataacactcactcgcagggtgtgggaagggaaagatatcgcacgcggggaagtactcggcgtaggcggagaagatcagagccgaccagcgaggcgagcagttgttcactcggcccatgatgtctgggaagagccccagccagctcccgtcctggacaagcttttttctcatgggggccacctgcttgccttggcacagcgaggacagggycttggcagccaaaggagacggtcagctgtctccacctggtagtggagatagtcacagtggggtgatccttgagctggttttggtcacagagttggtgtctcccaagtggaaagtgggagggcatcattccacacagaggagccccttgtgcaaaagaggtgccagccctcggccaccctgggagcccgctggggtgggagaaggcgcgtgcggctgagcttggccttggtcctgaagcctggggaaacacgggagtactgagcacccaggatgcatcagcaagaatgcagaacagtccctgcctagtggagacggacagacagctaacaaacgaaggcgactggagatcacgatggtgccaggaagttaccaggatgggacagcacccgaggcagcatagggtgccccgtgggaatgttcacagagtgaggaaacttcagagcaagggaaacttccctgcagccagacaggaggaaggaaacctggctgcagcctgcaagacctcccacccgcgcctggcagggagcctggcctgggggctgcccatgctggcccttctgatcctgagcagaagtgatcacggacccttgtgcttccaataattcggcccctcttcctttggttctgggtttcctgtgtagcggtgggcaggatttcatctatctttccatctgccagagtctggcaagggagctaagccacataaacagactctggtggtgcagggggattgtgacctgctgcacagaagggcaaagccgtttcccgccaagccca

SEQ ID NO: 699550 - DNA, 1025 bp, Homo sapiens
tctctctgtgcctcggcttcctcactggcacagcggggataacactcactcgcagggtgtgggaagggaaagatatcgcacgcggggaagtactcggcgtaggcggagaagatcagagccgaccagcgaggcgagcagttgttcactcggcccatgatgtctgggaagagccccagccagctcccgtcctggacaagcttttttctcatgggggccacctgcttgccttggcacagcgaggacagggccttggcagccaaaggagacggtcagctgtctccacctggtmgtggagatagtcacagtggggtgatccttgagctggttttggtcacagagttggtgtctcccaagtggaaagtgggagggcatcattccacacagaggagccccttgtgcaaaagaggtgccagccctcggccaccctgggagcccgctggggtgggagaaggcgcgtgcggctgagcttggccttggtcctgaagcctggggaaacacgggagtactgagcacccaggatgcatcagcaagaatgcagaacagtccctgcctagtggagacggacagacagctaacaaacgaaggcgactggagatcacgatggtgccaggaagttaccaggatgggacagcacccgaggcagcatagggtgccccgtgggaatgttcacagagtgaggaaacttcagagcaagggaaacttccctgcagccagacaggaggaaggaaacctggctgcagcctgcaagacctcccacccgcgcctggcagggagcctggcctgggggctgcccatgctggcccttctgatcctgagcagaagtgatcacggacccttgtgcttccaataattcggcccctcttcctttggttctgggtttcctgtgtagcggtgggcaggatttcatctatctttccatctgccagagtctggcaagggagctaagccacataaacagactctggtggtgcagggggattgtgacctgctgcacagaagggcaaagccgtttcccgccaagccca

SEQ ID NO: 699551 - DNA, 359 bp, Homo sapiens
cagtgctgtctttagagcaggaagagtaartcctgtcccaagggcatccaggccaccacctttttctctgcctggaaacctatttagccttcaaggtcccacttaagtagcgcttggtccaggaaaccttcttgctcctgctagaggtctgtatgggccccagtcacagctctagtgattttctgggaatatagcaggatttgtcaaggacaatccaaatttcatgtcatttgcttctttaaaaaaaagaaaaggtgattcaatgaatgtgtaactacatgtgatttcatgtttggacttcagtggaggcagaaaatagcctctgtcagaccacgtgacctgatttgtggtttggagaa

SEQ ID NO: 699552 - DNA, 622 bp, Homo sapiens
ttcatttatgtatgtgcttactggtctgctgccgctttttcccactgaatgtcagttttgtaacacaggcaaccccttatgtttcatttcccatgtccccagcatctaagtcaatgcctaccattcagtaggtactaggtaaatgcaggtggattcattcatgctgaatgaatgaagaaatcaccctgtcgttkaggaatgtgtggtgtaatagggctgatgaggtgtgtatagtgatggttacctcttggagccaaacatggctatctcttggagcaaaatgtgggaaatgctgtaagtgtccaaatatcacggagatgcaggagtgggagcagtgactggctacagtgtcatgaaaggctccatctgagctgagccttgggagactggcagtgttttgcagctggtgatgatggaaagaatccgaggggctgaggaaagcaggtgagcagaggcccagaggcaaaacagtgaagcacggtgggggcaggactggggactgctttaagtcctatgttgactcatggactcagacccctgagcagcagggaagcattgcgtgctcctcatcagagggtaacatggtgagagaggatatggaagtgctttttaaacttaattc

SEQ ID NO: 699553 - DNA, 1010 bp, Homo sapiens
ctgcccaccaccccctgcccagcctgcaaccacactcaccatgctggccaaagccaggagggtggactgcacctgtgtatggttggtgttctcaaacaggtcgttggcctcaaaaatgtcgtggggcttcaccccatacttggtgatggccttgatgaagttgccgatgttctccagctagaggggggcaggtggtggtcactgggtggggaggggaggtctgaggggcttgcgggcaaggatggaagagattgtgtctgggctcacctggtgccaattttgggttgactcattgatcttcttcacggagcctggctgcagcttattgatgaatctgagaagagtggggaaggggtaagaaaggtgtccccccagggttgggcacggtggctcacgcctgtaatcccagcactttgggaggccaaggcgggtggatcacgaggtcaggagagcgagactatcctggccaacatggtgaaaccccatctctactaaaaatacaaaaattagccaggcgtggtggcacatgcctgtactcccagctactcaggaggctgaggcaatcacttgaacccaggaggcggaggttgcagtgagctgagattgcagcactgcattccagcttggggacagagcgagactccgtctcaaaaaaaaaaaaaaaagaaagaaaggtgtcccccactcccgctctccagcccagcccagcaggaggagggtgacgggatgaccacaaggggccatgccataccctagcgtcacttctccctgcagtcagctctcagctgcagcccctccaaaccacccaagcacacacacaaatgggacrctgatgccaaggagctagactcaggtcccagtcagaaagcctgcttatccaaggtgtgtccgagtctctgggatctccgaagcctcactggcaggcgtgtctcagcatccttttctcttgtagacagcaggaagcccacaagggcctcttctctgactcactcctttaatgatctcgcctc

SEQ ID NO: 699554 - DNA, 628 bp, Homo sapiens
ttttttgagatgaaatctctctctctcacycaggctggatggagtgcagcagcatgatctcggctcactgcaacctccacctcctgggttcaggtgattctactgcctcagcctcctgagtagctgggattacaggcaggcgctacctcacccggctaatttttgtatttttagtagagacggggtttcgccatgttggccaggctgctctcaaactcctgacttcaggtgatccgccctcctcggcctcccaaaatgctgggattacaggcatgagctgccgtgcctggccaggtcttttaatttttaaaagcactcagcatgccaaagtgccatattttggggaattattttctacttcccattacacacatgccagggatgacccattgcctaattttaactaataaaatcatatatatcatacaagatttttgcatgtttcataatgtggaaatcaccagaacattttatttttcttgctgcatttgatatttttggcctcagtcattttatttttggaaagggaagagatatatactcttggttgtgaataaaatcacatgaaatgagtaaatagtgtgaccctaaaggaaaaaactgaggcaaaattaatataagtagaaag

SEQ ID NO: 699555 - DNA, 1593 bp, Homo sapiens
aacaagtttatttccaaaaatttactatacctttctctggtatcatcaatttttcatcaagatgggttatttctcctctccaacaataaaaacaaaaactggactccacttaacactctaattttaccctgtttttttctgctctagagaatgagttacattatccatattgaattattctccctctgtcttctcgagtccacaccaataatgctatgctttttatccccattattccacagaaactgttcctgtcaagggtccagaggagtccatatagcttcttactcaatctatcaaaaaataatgacacagataatcactccttcctcctcaaaacatttttttctcctctggattcccaagataccacattccattggatttcctcctatctcaatgattctttcttcctagatagactcatatattagttccttctcatccccaatctcatttttatatcatctatgtattatgaaaaatttcaaatacaaaaaaaattaaaagtataaaatttaaaaacaattcaacaagtgttaacattttgccacatttgtgtgtgtgtgtattttgaactgaaccacttagtaaccggtacacatcaaagttcatttctgtatccttcagtatatatctcctaagaataaagccattctcctttataacaccaacagcaattagaaaattaacagtaactcaaataccttttatagttcccccaccccaactggattataataaaggttcatgcattgtatatgactgttctatctctttaaatctaataaagttcccctcacattttgtttgtttgttttttaggagggggtctcgccctgtcgcccaggctggagtgcagtgcccagggctggagtgcggtggcgcgatctcggctcactgcaacctccaactcctgagttcaagcgattctcctgcctcagcctcgtgagtagctgggattacaggtgcccgccaccacacctggctaatttttttatttgtagtagagatggggtttcaccatgttggtcaggttgatctccaactcctgacctcatgatctgcctgcctcgacctcccaaagtgctggtattacaggcgtgagccaccacgcccggccttgtttgtttttaatgatactgacttttgaggagattaggccaggtatttcccagaatgcctacattctgcatttgtctgtctctctgtttattgtgtcatttaacaatacatattcctttatcccttgcatttcctgtaaacttcttaactgtaaactgtaaacttcttaacattagagtacccaatgcttggcccttttctcttttccatctatatattcactcccttggtttttttcaaggagtttcatagcrttaaataccatctacctggtgacaactcccaaatatttagctctgtggcctgtctcctgactctaggcttatatatccaactgtctactcagtatctccacttgaatatcttgaagttatcccaatcttaaaatgataaacaaattcagtaaagctgcaatcaaaccagcatgggactggcataaaaacagacacatagaccaatggaacagaa

SEQ ID NO: 699556 - DNA, 1500 bp, Homo sapiens
ttttgatcatctcattctgattctagtgaaggactcaatattgtaacaatatttttatataatttcataatgtgggtgttttgaaagattttgcaatggtagatattgtgataaaattttagctatggaaaggtccttattctcacttttttctttaacaatcctactatgtatagccatgaaactacagaaaatattaggactttgagaaattgtaaaaggacttcataaaaagaacattatctttcctcgtgatgccaccttttaatgatagctgtcagccttttcacttattataaaaaacaaattttctgtgcgaggtgaaaatgttcactgaaatgaatttacacaccctctcaaattccttttggaataggggaggatgcaaataagcaaatagtaataaaactaatttgcatactctaaattgttggtcttaatggtactgatggaaggtttccaatttgtcacaaagcagtgacttttaagaacataaattatattgaaatgcagtttatttaaaaatatagtgccaaaatgcaatattggacaaatttatccctgtttcttttgttgaccaaataatagactgggattcatgattttataagcagaccttgatgatcttatcagtttgatatatttccagtgttgtagatgctaatacataaagagcaaaaacagttttgatttggaatcatagtacctaattgatctgtttctttttctgtattatctgtgggttctcaaatgggctttgtggaccacctgtctcaggagtcatctgtgatgctttttaaattaaaacatagatttctgggccccaccacagaaatactattttggagctgatcccaggacctgtctttttagtaagaaccctggatgatttttgtgggcattgaggtttgggaactgctgttctagagcaggggtcagcaaaccatttctataaattgctagacagtcaatatttttggctttgaggaccatatggtcttcactgtaactatttctgccattatagcacaaaagcagcaacagataatggagaaacaaataggtatgggcagctagactggcttctagaatttgttcgtctctgatagaatctagattctagaccatcggtttttgctgtatgaatattttctaagatattctcttygaaatcaattttaatgagatttcctatgtgtttattttttgataactgacaaaaattcataaatacaggaataattcctagatatacattaaattaattaatagctgtaaaacttttgtaatagttaaaaccttttctatgttaatattagagtatgattaacttacttctaactatgtaatctgcttctcatattaggttcctgttgctagagcaagtattctttggctaattggagaaaactgtgaacgagttcctaaaattgcccctgatgttttgaggaagatggctaaaagcttcactagtgaagatgatctggtaaaactgcagat

SEQ ID NO: 699557 - DNA, 1500 bp, Homo sapiens
ttttgatcatctcattctgattctagtgaaggactcaatattgtaacaatatttttatataatttcataatgtgggtgttttgaaagattttgcaatggtagatattgtgataaaattttagctatggaaaggtccttattctcacttttttctttaacaatcctactatgtatagccatgaaactacagaaaatattaggactttgagaaattgtaaaaggacttcataaaaagaacattatctttcctcgtgatgccaccttttaatgatagctgtcagccttttcacttattataaaaaacaaattttctgtgcgaggtgaaaatgttcactgaaatgaatttacacaccctctcaaattccttttggaataggggaggatgcaaataagcaaatagtaataaaactaatttgcatactctaaattgttggtcttaatggtactgatggaaggtttccaatttgtcacaaagcagtgacttttaagaacataaattatattgaaatgcagtttatttaaaaatatagtgccaaaatgcaatattggacaaatttatccctgtttcttttgttgaccaaataatagactgggattcatgattttataagcagaccttgatgatcttatcagtttgatatatttccagtgttgtagatgctaatacataaagagcaaaaacagttttgatttggaatcatagtacctaattgatctgtttctttttctgtattatctgtgggttctcaaatgggctttgtggaccacctgtctcaggagtcatctgtgatgctttttaaattaaaacatagatttctgggccccaccacagaaatactattttggagctgatcccaggacctgtctttttagtaagaaccctggatgatttttgtgggcattgaggtttgggaactgctgttctagagcaggggtcagcaaaccatttctataaattgctagacagtcaatatttttggctttgaggaccatatggtcttcactgtaactatttctgccattatagcacaaaagcagcaacagataatggagaaacaaataggtatgggcagctagactggcttctagaatttgttcgtctctgatagaatctagattctagaccatcggtttttgctgtatgaatattttctaagatattctctttgaaatcaattttaatgagatttcctatgtgtttattttttgataactgacraaaattcataaatacaggaataattcctagatatacattaaattaattaatagctgtaaaacttttgtaatagttaaaaccttttctatgttaatattagagtatgattaacttacttctaactatgtaatctgcttctcatattaggttcctgttgctagagcaagtattctttggctaattggagaaaactgtgaacgagttcctaaaattgcccctgatgttttgaggaagatggctaaaagcttcactagtgaagatgatctggtaaaactgcagat

SEQ ID NO: 699558 - DNA, 868 bp, Homo sapiens
tggaccttgtcctgcagaggaaagggaaaccacttttaatagtagtataatttaccagatttkcagtttagaatattcattttttaagtccattgactttttgagcagctgttaataagaggaatcatttttgcttccatgtacgaaatagggacttttcctatatctgaattgctattctctgtgagtggacttacctgtttagtaaattggaaaaagattcttgctcatttgcagctaggcttcttgggaagctttatgctctgtgtcctatctatttttctctaattttcacttttcctctgactcttacttttgccttggtgattttttttctccacctcccctctctttgtttttgtccccttccccaaaactctttctgcctagatatctctctgacatccttcatcccttcgtgccccgcccccgtactacagtccagtgtgtttgtcattgtctcctttctcttccatccctgtttgtttctctctttttgtatttgctgtgtatctctctatatgtgtctccctctctgtctgcctttcctgcttccccatagaccacacttattttctagtaaactaatgtttgcctttcagaatccttaggtcgattcctcaaattcatttctatatgctttgggattatcttcatccctaatcgtgatatgagttatcttattatagcttttgctgattcatctacaagatttgtaaccagataattgcaaataatggagcatatttccattatttagattttgtctttacattttaagtcatctttaaaaggaatcagttaatcctttccaagatgtctgtagatttcttcatacattgagatgctcaaaaactgagtaaagaaa

SEQ ID NO: 699559 - DNA, 1496 bp, Homo sapiens
gagtagagatgataatgtggtacaaatgaaacacagagaaagatgacagatataacaggaagtgttgtggaggtgatctctaagtagctttctaagaaaataatgcttggattagaaagtgatgggagaagagaatttcacaccgtgatcaaaaacagaggcaaaaaggaacaggagagatggaggtggcagctggagaatagaatgtatgtcatgaagtatttcaagttatatgaaactgtgatgagctatttcacagtggttttctttaacgaagaatctacattgtatgctcatcactattctgactttatcccctctttccccagtgttccagagcaaccttctgagtattaagtggaagccagctccctgtgctccctcccttgtctgctctcccacaagcatgcatcatgtgctcaaaaacaaactagcagagtaaataagtgacgtcactacaaatcacccagcacttatttccaaaaattgtcttttcatgaagctgaaataaaattagtgttgaattcaaacgactgaactacttgtctattttaaaacgatgatggggaggtctacattcaaccaatgtgttttatttaaagagctctcactcgaccgaatgcttagcctagggtaaactgtggttcctgcccgcaaggactttttaatccagtgggaaccaagtctctcacaatgcctggcacacagtcagtgctcaacaaatgggagctcctacctcttgagcactgtagctgaacaatgggaatttaaagaaaaagtccagaagcaaaggacagacccataaggtcactgtaaatcaaagagttagtaagtactatgyagagaccactggcaaggtgtggcaaacttcccagagggtcagagagttggtcttctgtagaaaaggagctcatctggcagaaggagaaagctggagagcatttcaagcaaagaaaacagcaatgcacacagcctgttaagcagtgatgactagctttgtatggtgtgactggggcccagatatgggggcagtgtgagtaaaggggccagacctccgagggcttcaaggttctggaaagagggtggattatctagcagttacaaggagccaacagcaaatattaagcaggaaaataacatgatctgaccaatttagagaaacaggtgccatggcaatgtggagaatgaattggaaaggaggtgtggaggtcacctagcggttcaactgaggtaatataaaggtttgaaatcaagcagtgatgagcaagatgaaaagatgaaccttaacagatacaaatggtagatttctccttgcaacacgtagcttaaactccaagttagagactgttgcgtttccttatgtccccaaggcatccactatggagcaattcagactattcagactactgccttttgaatatggagactaaaaattttaccatacagaatgcccctctcctactttccttctttcagtaaacattgactatgtgaaa

SEQ ID NO: 699560 - DNA, 1496 bp, Homo sapiens
gagtagagatgataatgtggtacaaatgaaacacagagaaagatgacagatataacaggaagtgttgtggaggtgatctctaagtagctttctaagaaaataatgcttggattagaaagtgatgggagaagagaatttcacaccgtgatcaaaaacagaggcaaaaaggaacaggagagatggaggtggcagctggagaatagaatgtatgtcatgaagtatttcaagttatatgaaactgtgatgagctatttcacagtggttttctttaacgaagaatctacattgtatgctcatcactattctgactttatcccctctttccccagtgttccagagcaaccttctgagtattaagtggaagccagctccctgtgctccctcccttgtctgctctcccacaagcatgcatcatgtgctcaaaaacaaactagcagagtaaataagtgacgtcactacaaatcacccagcacttatttccaaaaattgtcttttcatgaagctgaaataaaattagtgttgaattcaaacgactgaactacttgtctattttaaaacgatgatggggaggtctacattcaaccaatgtgttttatttaaagagctctcactcgaccgaatgcttagcctagggtaaactgtggttcctgcccgcaaggactttttaatccagtgggaaccaagtctctcacaatgcctggcacacagtcagtgctcaacaaatgggagctcctacctcttgagcactgtagctgaacaatgggaatttaaagaaaaagtccagaagcaaaggacagacccataaggtcactgtaaatcaaagagttagtaagtactatgcagagaccactggcaaggtgtggcaaacttcccagagggtcagagagttggtcttctgtagaaaaggagctcatctggcagaaggagaaagctggagagcatttcaagcaaagaaaacagcaatgcacacagcctgttaagcagtgakgactagctttgtatggtgtgactggggcccagatatgggggcagtgtgagtaaaggggccagacctccgagggcttcaaggttctggaaagagggtggattatctagcagttacaaggagccaacagcaaatattaagcaggaaaataacatgatctgaccaatttagagaaacaggtgccatggcaatgtggagaatgaattggaaaggaggtgtggaggtcacctagcggttcaactgaggtaatataaaggtttgaaatcaagcagtgatgagcaagatgaaaagatgaaccttaacagatacaaatggtagatttctccttgcaacacgtagcttaaactccaagttagagactgttgcgtttccttatgtccccaaggcatccactatggagcaattcagactattcagactactgccttttgaatatggagactaaaaattttaccatacagaatgcccctctcctactttccttctttcagtaaacattgactatgtgaaa

SEQ ID NO: 699561 - DNA, 1496 bp, Homo sapiens
gagtagagatgataatgtggtacaaatgaaacacagagaaagatgacagatataacaggaagtgttgtggaggtgatctctaagtagctttctaagaaaataatgcttggattagaaagtgatgggagaagagaatttcacaccgtgatcaaaaacagaggcaaaaaggaacaggagagatggaggtggcagctggagaatagaatgtatgtcatgaagtatttcaagttatatgaaactgtgatgagctatttcacagtggttttctttaacgaagaatctacattgtatgctcatcactattctgactttatcccctctttccccagtgttccagagcaaccttctgagtattaagtggaagccagctccctgtgctccctcccttgtctgctctcccacaagcatgcatcatgtgctcaaaaacaaactagcagagtaaataagtgacgtcactacaaatcacccagcacttatttccaaaaattgtcttttcatgaagctgaaataaaattagtgttgaattcaaacgactgaactacttgtctattttaaaacgatgatggggaggtctacattcaaccaatgtgttttatttaaagagctctcactcgaccgaatgcttagcctagggtaaactgtggttcctgcccgcaaggactttttaatccagtgggaaccaagtctctcacaatgcctggcacacagtcagtgctcaacaaatgggagctcctacctcttgagcactgtagctgaacaatgggaatttaaagaaaaagtccagaagcaaaggacagacccataaggtcactgtaaatcaaagagttagtaagtactatgcagagaccactggcaaggtgtggcaaacttcccagagggtcagagagttggtcttctgtagaaaaggagctcatctggcagaaggagaaagctggagagcatttcaagcaaagaaaacagcaatgcacacagcctgttaagcagtgatgactagctttgtatggtgtgactggggcccagatatgggggcagtgtgagtaaaggggccagacctccgagggcttcaaggttctggaaagagggtggattatctagcagttacaaggagccaacagcaaatattaagcaggaaaataacatgatctgaccaatttagagaaacaggtgccatggcaatgtggagaatgaattggaaaggaggtgtggaggtcacctagcrgttcaactgaggtaatataaaggtttgaaatcaagcagtgatgagcaagatgaaaagatgaaccttaacagatacaaatggtagatttctccttgcaacacgtagcttaaactccaagttagagactgttgcgtttccttatgtccccaaggcatccactatggagcaattcagactattcagactactgccttttgaatatggagactaaaaattttaccatacagaatgcccctctcctactttccttctttcagtaaacattgactatgtgaaa

SEQ ID NO: 699562 - DNA, 626 bp, Homo sapiens
ttgtttcctgcttttggtaatcagatgaaaagtataaataagtttgcaagggagaaaatttatttaatctacatacacaacaaacaacyttttagactctggaaatgtctagtcacaaaaaattggcacccagaaagcaaaatggttttatataatttattgaagcagaatttccaaatagttattggaaatgttttgttaatcttgtataattattgtgtgatatgaagttaatgaacatgagcacccaggatatttcaggatgcactgcaggaaccactgtctagcagttattgcctttattcctgtcccatttcacagacaaagaacctgaggtgcaaagaatttaagtaatttatgcaaataaaaagctgggcttgactggctcctaagtctcagccagctgtgctgctctaacctctagctcttttgcagttagaaaatattcacgttctttatagatgaacagaatagttattcactctttcagatgagactacttctcacctggttctaatagtgaggtttatcctgaatgtggtgaaatctagattcttcttttatagatgtaaacttaaataaatgttatatatcattttttaaatcctttcccaggaaattttgga

SEQ ID NO: 699563 - DNA, 2418 bp, Homo sapiens
tgtaggtcaggttaaagtaagctccaaacttgtggccttcagaagcatctcctgtttaacacacctgaaattactctaacttaatacatttgtattctctaagaaataatgctgactgctgtcaccacagcatcactgatctctcagtggctgttaaaatataaacaagtggaaaaaaagtatacaagttgatagcagctgttcatgtattcttgttttgctaatacctgtgtagagaaagacagtttcacatgcagatcaccatacatttttgcttaaaggttacactgggtaaactgtttgtttatcacattacatctgggtgagattttgcatgtgaccaagaggaagaaatcattcagtcccggaaatagcaactgctatgtaaaaccacatccttgactagtacttcatctttccacagtcatccatctgctaatcaggtgaaatatcagctcagcagaacaaagcaagttatacacaaatttcccccacattcacactgatgccgtacttagtaattctggttctaccattcccttttgcactttttgcaagtcaaattcatgtggaaaaatgttctgtttgtagaactcatagtattcacttatagtgctcatgtcaggaatggcaagtgagtaagagcccctgataatctgcttttgttagaacgtaatgcaaagataataaaacatgtccacttcttttctagttctaatcagtttttagacatcaagatttatttactttgcatgagatttgtttcctattatttgaatatgtgctatacacttgaattagaaaaacctgcttgaatgtattgtcagttattaaagcacatgtgactaagtttgcatttgtcagtattgttctactgtttgtactgaaagtctcattttaaaattgctacttaacactgtactataccttgtaattttttagattctccacttgtattctttaaatgtttccagatgcctttagttttagctgctgtaaratagctactttgcgttatttgatatagaattgttttttaaaaactccatttatttatacagagacatttataatattttacaaacattcttatattctgaataaatatttctaattccacagtgtaccttaactgtgttatttaaagggtaaggctatccttctgtagaactgtgatatacatgcaggcaaatatcaaatccatgatgcttacatgaaatcaagagccctagtcaaagcaggggtctagaagtaagactattattagatcaaaatggccaaagaaccctcatttatagcccatttttagttggctttttaaaatttggcataaataggaagttatctattgaagagagtcttttcccctcttaaagaaagatcattaaaatggaatgtaatcaaggactggaaatgcaaggaagtcatataggacaacaagatggcaagcagctttgcaacacatctgttagagaaagattacaatgttctcaagttttcactatggaagcaaagtaactttgacagtaagtataacaccttagtcactctccttttgagaatttaaaataaaagttactatcatatagctgaggtctctaatggaaaagaatgtatttctttcccccttgagatccaaagttaagtattcctattgcaaaacctgattctagcacaaacttaagaattgctggattttaaatatctaatgaattcacatctcaagccctacactataatcttgctttaaagcaacaaacttaattgtttgaggtattttcatttttgcagagactctcgacaatatttcttcctgggggttttttttttttttttttggttgttttttgttttttccagacagagtcttgctctgttcacccaggctggagtgcagtggtgtgatctcagctcactgcgacctctgcctcccggggtcaagagattctcctgcctcagcctcccaagtagctgggactacagacacgcaccaccacgcccagctaatttttgaatttttagtttcaccatgttggtcaggctggtctcgaactcctgacctcgtgatccacccaactcagcctcccaaagtgctgggattacaggtatgagcaccgcgcccagcttcttcctgttatataaacatacttttatcatgttcatctcatacttgccatttttattggtccaaagagcaaccacaatgagcaactcagaacctacgatgataaataacagtagcagaaaaccaggctaaggtggtaactaaaaccgcccaagcagccaattttattgatagtacattacaaacaatctaacacaatgatgtttttacagaaagccagtatctgaacaaccttccatcgttcaaattgtattttgtaagattaaaaggcttttagtttctaacctattatt

SEQ ID NO: 699564 - DNA, 594 bp, Homo sapiens
gtaacattcctgtgctttggcaatgcccttgtttcactcttcagaggatgaactgcctacttagtgtgacagctataactcttaccatcaaagaattctgctgctttgctggctgaagcccatttgttcttttcttttgattaggtgaatcttgatactgttttctgccatttcccctcatactttgattctgttttcccaaaaagaaatataatatgaatctatagcataatgtaatagcacaaaaaaaataccccatgaatatgtttagctggttgaaycaagtttttagcaaagcttctcctacccaaattttcattaatcaccctatcaatgtattttcttatagaagtcagtgcttcccaaagcaagagttctctaaaggtatgaaatagcaaatacacttgcccctagaaatctttccacacctcggccgggcgcagtggctcatgcctgtaatcccagcattttgggaggctgaggcgggcggatcacgaggttgagatgagaccatcctggctaacacagcaaaaccccgtctctactaaaaatacaaaaacttatccgggcatggtggcacacgcctatagtccc

SEQ ID NO: 699565 - DNA, 952 bp, Homo sapiens
ggcttaaagtcaagttaatatactgaaactgcatacaattaatgaaatttacatcattgtaatttaattttttccttttacccttccttctgccccaagtatgtttggggtggggctcaggagtctatattcttaacaaggggctcagagtattgattcaggttattataattaggcaagtttgggaaacactggtctaattaagcttcctaactctatattcaaggcaattggaactcagtgagggaaaatgaattgtcagatgttcacaacaattgaataacaagctcaggatcaaaatctaggtmttttaacttccagtacagtagtgatgtagcttttccattgcaaaaaactaagaaggagggtgttatggttataatggttgtatagaagtcagtattcaggtaccaggagggctctggtcagtggaccaccaagagtgaactttagatgtaaaaagaaaatctgacttctcaatttattttagattcaatcctgctgctagaaataaatccaattttatgtttatgtattcaactacttcttcttttcatcttgtgaagtaccctaatttgtagtgactcattcatcttactagttttggaaagttgatacacattaaatatttgaatgaagcaagccaataaaaggcaatgatatagtttatacatacttgttacatgatgtgactggcagactcaaatttagtagggactcaaatatttgaaagggtgaatgttttatgttttattatttgaagggtattgaattagatactatgaaattcttaaattgtttcagactttggagttagagaaaacattatttacgtgtttataatctgttattattgtgtataattctcaccaacatccatccagtacttattacatatttatcatgtaccaggcatgattagacatgataatatgctggtaaaatataaaaa

SEQ ID NO: 699566 - DNA, 952 bp, Homo sapiens
ggcttaaagtcaagttaatatactgaaactgcatacaattaatgaaatttacatcattgtaatttaattttttccttttacccttccttctgccccaagtatgtttggggtggggctcaggagtctatattcttaacaaggggctcagagtattgattcaggttattataattaggcaagtttgggaaacactggtctaattaagcttcctaactctatattcaaggcaattggaactcagtgagggaaaatgaattgtcagatgttcacaacaattgaataacaagctcaggatcaaaatctaggtattttaacttccagtacagtagtgatgtagcttttccattgcaaaaaactaagaaggagggtgttatggttataatggttgtatagaagtcagtattcaggtaccaggagggctctggtcagtggaccaccaagagtgaactttagatgtaaaaagaaaatytgacttctcaatttattttagattcaatcctgctgctagaaataaatccaattttatgtttatgtattcaactacttcttcttttcatcttgtgaagtaccctaatttgtagtgactcattcatcttactagttttggaaagttgatacacattaaatatttgaatgaagcaagccaataaaaggcaatgatatagtttatacatacttgttacatgatgtgactggcagactcaaatttagtagggactcaaatatttgaaagggtgaatgttttatgttttattatttgaagggtattgaattagatactatgaaattcttaaattgtttcagactttggagttagagaaaacattatttacgtgtttataatctgttattattgtgtataattctcaccaacatccatccagtacttattacatatttatcatgtaccaggcatgattagacatgataatatgctggtaaaatataaaaa

SEQ ID NO: 699567 - DNA, 952 bp, Homo sapiens
ggcttaaagtcaagttaatatactgaaactgcatacaattaatgaaatttacatcattgtaatttaattttttccttttacccttccttctgccccaagtatgtttggggtggggctcaggagtctatattcttaacaaggggctcagagtattgattcaggttattataattaggcaagtttgggaaacactggtctaattaagcttcctaactctatattcaaggcaattggaactcagtgagggaaaatgaattgtcagatgttcacaacaattgaataacaagctcaggatcaaaatctaggtattttaacttccagtacagtagtgatgtagcttttccattgcaaaaaactaagaaggagggtgttatggttataatggttgtatagaagtcagtattcaggtaccaggagggctctggtcagtggaccaccaagagtgaactttagatgtaaaaagaaaatctgacttctcaatttattttagattcaatcctgctgctagaaataaatccaattttatgtttatgtattcaactacttcttcttttcatcttgtgaagtaccctaatttgtagtgactcattcatcttactagttttggaaagttgatacacattaaatatttgaatgaagcaagccaataaaaggcaatgatatagtttatacatacttgttacatgatgtgactggcagactcaaatttagtagggactcaaatatttgaaagggtgaatgttttatgttttattatttgaagggtattgaattagatactatgaaattcttaaattgtttcagactttggagttagagaaaacattatttacgtgtttataatctgttattattgtgtataattctcascaacatccatccagtacttattacatatttatcatgtaccaggcatgattagacatgataatatgctggtaaaatataaaaa

SEQ ID NO: 699568 - DNA, 611 bp, Homo sapiens
tttttttttgacatccaatgacctctgaactttttattggcttcctgctccccaaagggtaccctgcttctgttggctgaatgcctcagaactttggtgtcgtgggtctcagacaccactttgccatccactgtccggtgggtggtggtggtcttttggatggtttgcatggagttgctgctgtccagagcatcaccaaaattgaagtcctcgccatcttccagcaggctgcggtaggtggcgatctcagcctccagcttgaccttgacgtwcagcaggtcctcctactcctgggcctggcgctgtccctctgcccgggtctgtgccagctctgactccaggtgcagcaggatcccattgaactgctccatctgcagggcgtagcgggcctccacctccctcaggctgttcttcagattccaagctggccttcagatttctcatggagtccaggtcatctccaagaactgcactgtacgtctcagctccgtgagcgtcgtctcagcagctccaacctcggcggactgagtggtgaccactgtggtgctctcttcaatctgctgaggccaatgcttgtccagctcctctccgttcttctgagccagctcgtc

SEQ ID NO: 699569 - DNA, 686 bp, Homo sapiens
ttgatggcaggcaggggtacatcataatgttccacccagcaaagtgtcagctcatattttcttcttctggccattgatatcctgtgttctgacagatattaccctaaagcccctcttgccctgtatgtttagatttttacatttgccctgatgattaaggatggtgtaaaattttaataagtcctccatagtttttggaagaatgtgttttatatcagctataaaattacttccatggggtrcagtggctcacgcctgtaatcccagcactttgggaggccaaggcgggaggatcacgaggtcaggagatcgagaccatcctggctaacacggtgaaaccccgtctctactaaaaatacaaaaattagccgagcgtggtggcgggcacctgtagtcccagctactctggaggctgaggcaggagaatggcgtgaacccaggagacggagcttgcagtgagccgagattgtgccactgcactcaagcctaggtgacagagcgagactccatctcaaaaaaaaaaataaaaaataaaataataataataataataataataataataattacttccatggtctgattcagcctacaaaggcatgccaaaatgagaaataatttcagttattaattacttcaccattcatacatgagcatgtgtagctgtacagcactgagcccatcca

SEQ ID NO: 699570 - DNA, 614 bp, Homo sapiens
ctttgtactgatcttcttctatatcatgattttgccatatcattcctaaaagttagaaccagaaaaatgactataaattattataaaattatagaaagactgtaagattttatgtacactacaatcatgcatgattcacacaccaaactacagctgagtcttcaacacaggtttgaactgcacaggtctacttacatatgaatttcttcagtctctgctactcttgagacagcaagaccaacccctcctcttattcagtctactcaatgtaaagacaatcagaatgaaaactttgtaatgwtgtattttctatgaatactaaataatgttccacttacctatggtttcctaatgaatattttccttttctagcttactttcctgtgagaatatatagcatgtaatacatatgacatataatacatgtattaatcaactgtttatgttaccagtaatgctgccagtaaacagtaggctactagtggttaagttgtgcgggagaagatgtatgactgcttgggtggctggttcaagggccaattatatacccttccatatttcaaataattgaacagcattgatgaccaagaaacaaatgtctctaattgactaag

SEQ ID NO: 699571 - DNA, 1420 bp, Homo sapiens
tgaaaaaattaatccagcatttgcatttctagtctctaacacgcccttgtttttttgttttgtttagttctgtwtttataatacaagaatgttcccctttccagttaaatgacttgactttattatggcaaatcttgggggtaaaatggagttctgaaaagaggcaccatgcctcctgtgtatgcctctgagtatgtcttgccactccaggtatgtgatcagagatagagaagcatggcctcagcttagttgattcccgtgctgcctgtgagcagccagtccactgagcaaacgagaaggctgaggcctagggccatggggtggcctgattataatcacatagctccagccaatggagttctagttcacgttcttcccctgttgcaaccttggtatggctcagatgaccagcagactttggtccaattccgactacccctaacttagctgagtgattttgagcacattgcttaccatccctgggactcagtttcctcatctgtagagtggactggacagtctgtctacctgcctttatgtggttgttggacagtataaacaagatgtccataatgtgcttggcacaaaagagaggctcagcaaagggcagtgattcttatgggccaaatattaccaagctctcagaggtccctagcccccaagcaggggctgggtgctgaggaaggcagagacctccttgctgcctgagaggtgagataggacatttgctaagctcccaccaagagccaagtgtgacctggtggtccaaactcagccacagtggagacctcactagatggactgtgaagggtggagaatgggggacagattcctcacctctcatccctgtctgtctgtcccttcctcagaatcccagaacaagaagtggtggctttatttcacacacctctatatttaataagcaggaccatgacgaggtttggtgacctcagggcccaaatggactgtctgctggcataagtggtgcttgagtcatttcccagggatgagcactgggcaggcttccaggagctgaatttaccctctgattctctgctctcctcttctcctccccacccctaagctccattttagagtttccagcttctttggcttcaggaggcatggaccaagatagaaagtaaaatagttattcattcaccagggctctcatgcccttccctgagcaaaggcttaggctcgattgaagggagaccctggaagcccgagacactgaaccaggccctgaggctcctgctgatatgtatgtgcactggggacacaggctcagtgacctaaatgcccagagagagactggaggaaggagaagctggggcattcagggcaggctccatcagggaggtggcatatgaatgggcttttttgtttgtttgtttgcttgttgttgtttttttttttt

SEQ ID NO: 699572 - DNA, 1420 bp, Homo sapiens
tgaaaaaattaatccagcatttgcatttctagtctctaacacgcccttgtttttttgttttgtttagttctgtttttataatacaagaatgttcccctttccagttaaatgacttgactttattatggcaaatcttgggggtaaaatggagttctgaaaagaggcaccatgcctcctgtgtatgcctctgagtatgtcttgccactccaggtatgtgatcagagatagagaagcatggcctcagcttagttgattcccgtgctgcctgtgagcagccagtccactgagcaaacgagaaggctgaggcctagggccatggggtggmctgattataatcacatagctccagccaatggagttctagttcacgttcttcccctgttgcaaccttggtatggctcagatgaccagcagactttggtccaattccgactacccctaacttagctgagtgattttgagcacattgcttaccatccctgggactcagtttcctcatctgtagagtggactggacagtctgtctacctgcctttatgtggttgttggacagtataaacaagatgtccataatgtgcttggcacaaaagagaggctcagcaaagggcagtgattcttatgggccaaatattaccaagctctcagaggtccctagcccccaagcaggggctgggtgctgaggaaggcagagacctccttgctgcctgagaggtgagataggacatttgctaagctcccaccaagagccaagtgtgacctggtggtccaaactcagccacagtggagacctcactagatggactgtgaagggtggagaatgggggacagattcctcacctctcatccctgtctgtctgtcccttcctcagaatcccagaacaagaagtggtggctttatttcacacacctctatatttaataagcaggaccatgacgaggtttggtgacctcagggcccaaatggactgtctgctggcataagtggtgcttgagtcatttcccagggatgagcactgggcaggcttccaggagctgaatttaccctctgattctctgctctcctcttctcctccccacccctaagctccattttagagtttccagcttctttggcttcaggaggcatggaccaagatagaaagtaaaatagttattcattcaccagggctctcatgcccttccctgagcaaaggcttaggctcgattgaagggagaccctggaagcccgagacactgaaccaggccctgaggctcctgctgatatgtatgtgcactggggacacaggctcagtgacctaaatgcccagagagagactggaggaaggagaagctggggcattcagggcaggctccatcagggaggtggcatatgaatgggcttttttgtttgtttgtttgcttgttgttgtttttttttttt

SEQ ID NO: 699573 - DNA, 1420 bp, Homo sapiens
tgaaaaaattaatccagcatttgcatttctagtctctaacacgcccttgtttttttgttttgtttagttctgtttttataatacaagaatgttcccctttccagttaaatgacttgactttattatggcaaatcttgggggtaaaatggagttctgaaaagaggcaccatgcctcctgtgtatgcctctgagtatgtcttgccactccaggtatgtgatcagagatagagaagcatggcctcagcttagttgattcccgtgctgcctgtgagcagccagtccactgagcaaacgagaaggctgaggcctagggccatggggtggcctgattataatcacatagctccagccaatggagttctagttcacgttcttcccctgttgcaaccttggtatggctcagatgaccagcagactttggtccaattccgactacccctaacttagctgagtgattttgagcacattgcttaccatccctgggactcagtttcctcatctgtagagtggactggacagtctgtctacctgcctttatgtggttgttggacagtataaacaagatgtccataatgtgcttggcacaaaagagaggctcagcaaagggcagtgattcttatgggccaaatattaccaagctctcagaggtccctagcccccaagcaggggctgggtgctgaggaaggcagagacctccttgctgcctgagaggtgagataggacatttgctaagctcccaccaagagccaagtgtgacctggtggtccaaactcagccacagtggagacctcactagatggactgtgaagggtggagaatgggggacagattcctcacctctcatccctgtctgtctgtcccttcctcagaatcccagaacaagaagtggtggctttatttcacacacctctatatttaataagcaggaccatgacgaggtttggtgacctcagggcccaaatggactgtctgctggcataagtggtgcttgagtcatttcccagggatgagcactgggcaggcttccaggagctgaatttaccctctgattctctgctctcctcttctcctccccacccctaagctccattttagagtttccagcttctttggcttcaggaggcatggaccaagatagaaagtaaaatagttattcattcaccagggctctcaygcccttccctgagcaaaggcttaggctcgattgaagggagaccctggaagcccgagacactgaaccaggccctgaggctcctgctgatatgtatgtgcactggggacacaggctcagtgacctaaatgcccagagagagactggaggaaggagaagctggggcattcagggcaggctccatcagggaggtggcatatgaatgggcttttttgtttgtttgtttgcttgttgttgtttttttttttt

SEQ ID NO: 699574 - DNA, 631 bp, Homo sapiens
cagactgcattcaccaaaatgcattgaactgaacatcaaaaagagtgaattttattgcatggaaattaattttwaaaaagtgttaaaaatcatatccaaaagtagttttaaattaaggtgcaaaagttcatgagtacttgtttcatctcttgacatgatttctgattgaaggcaagtggaggcaagaaagacaagtcaaagggaaactgctctgtgcctccaggtctgtttaccctgagttatcagcagagctttcattgctattattttgaaaaaaaaaaaaagtcacaatattaaaaaggaggcaagatgaatataacaaacaggagactagtcactgcccaggactaacaaatattaatattgtatcattttgcatcatatttttatatgtaaataatgtagaatgttgtaggtaaagggaaatctcctgtcttctcttctcttggtacattctactacctccaaaaatggctttgaaaaagaatagagtaggccaagaattctgggaaaatgatgactgctcttttcagtaaatgaagtgagttagtcatgttgatcacgtcatcactgggtatggatgtctgcagtaggtgtctgtgggaaggctggattaacacacacatgttaa

SEQ ID NO: 699575 - DNA, 631 bp, Homo sapiens
cagactgcattcaccaaaatgcattgaactgaacatcaaaaagagtgaattttattgcatggaaattaatttttaaaaagtgttaaaaatcatatccaaaagtagttttaaattaaggtgcaaaagttcatgagtacttgtttcatctcttgacatgatttctgattgaaggcaagtggaggcaagaaagacaagtcaaagggaaactgctctgtgcctccaggtctgtttaccctgagttatcagcagagctttcattgytattattttgaaaaaaaaaaaaagtcacaatattaaaaaggaggcaagatgaatataacaaacaggagactagtcactgcccaggactaacaaatattaatattgtatcattttgcatcatatttttatatgtaaataatgtagaatgttgtaggtaaagggaaatctcctgtcttctcttctcttggtacattctactacctccaaaaatggctttgaaaaagaatagagtaggccaagaattctgggaaaatgatgactgctcttttcagtaaatgaagtgagttagtcatgttgatcacgtcatcactgggtatggatgtctgcagtaggtgtctgtgggaaggctggattaacacacacatgttaa

SEQ ID NO: 699576 - DNA, 617 bp, Homo sapiens
tcatatttgtatagcaatctggaaaagaaagaacggggcttgttaaggcaaatgggcaagacaaaacgggatatctataggcagcaaggggtcctgccagtctaagactaatggaaaactggcccatagccaggtattttctcaatggtgttcactacaccaagtcagagggctactttgtctagatagagcccaggtattgtgagtgagtgcaggaatagaagtgtcttcctaaaggtgtatgtatggtgttctcctgggagactgtaacagatgtgccctgggcaagaccacgccagcagctgtcaatgatgctgagcatacaaataccctggagcccasgaatggggctgcctccgcccagtgtatcacctgtgctccagactgtgtaccccaggtcctctgccagtagcatctccaatcacaggtgaaatgccagcccttcaaacagcacaggtgggccctaggtgtctgatggaaggaatgaacagatatatcacgtggcatgcatttcttctcagtggtgcaggtatctccagcaggtttgctctggccaggtgggccccagtacttagaccatatgcaggaagagaagactctctaaaaataggtatgat

SEQ ID NO: 699577 - DNA, 603 bp, Homo sapiens
ttaagtatgttttggagtttgtatctttcaagaaaccatctattttatttaagtttttcttttatgggcatagaattgtttgtgtaatattcatttacctatttaacatcagtgggatttctagtgatatatcttcattcctgatgttgtctgatattagtcatccattgttctctctctgactctctgtccatctctctgtccatctctccctcctgccctccctccctctccccctccccctccctcttctttgttagattgctggaggtttrtcaatttttgatattcttaaaagacagatactggtttggttgattttatctctttttctgttttgagtgaaattgatttcagctcttattacttctctaaattttcatttattttgttctttttctagttttgtgagatgggagcttaaattattgatgtgatgtttttttttctcttttccgacataggtattgagtataatgcatttctctctacgtattgttctagctgtgttccacagactttgaaatttttcatttttattgtaacatataatttattttattttattattattatactttaagttttagggtacatgtacac

SEQ ID NO: 699578 - DNA, 627 bp, Homo sapiens
aggatcttaaatttcctctctgctcctttttttcttttaccactcagtctctaaacgataccaccactcactttcttttcactcttacttctctcagaagcactgtttctaagattaatactttgaatcccattcacttgcaggtcccttccctgtaaatgttatatgatctacaagattcttcttcattatttttgcacgtagcatgggttttctctttctgggggtgattttagctctttttttactcatactccttccatggcacccagctaawcctttgtaagtcttggagcaagacctctggaaatagctcttctggaaacagctcttctggaaattggagtttacttttctatatagaggtaatttgatgtttattttgtttctgtcttctatatatactcaaggcatgatatttgaagtttatgtggatagattcagagttgtgcagctgctattttctcagctaacaaccaattaaaatttaaaggtctattatcaaaagtaatgacttctagaaacattgttacttagacctatttgataataaattggtctcaaaaacagtcaactgaggcaatttctgttctctgagaataaaatatcaccttttttaatgcagga

SEQ ID NO: 699579 - DNA, 627 bp, Homo sapiens
aggatcttaaatttcctctctgctcctttttttcttttaccactcagtctctaaacgataccaccactcactttcttttcactcttacttctctcagaagcactgtttctaagattaatactttgaatcccattcacttgcaggtcccttccctgtaaatgttatatgatctacaagattcttcttcattatttttgcacgtagcatgggttttctctttctgggggtgattttagctctttttttactcatactccttccatggcacccagctaatcctttgtaagtcttggagcaagacctctggaaatagctcttctggaaayagctcttctggaaattggagtttacttttctatatagaggtaatttgatgtttattttgtttctgtcttctatatatactcaaggcatgatatttgaagtttatgtggatagattcagagttgtgcagctgctattttctcagctaacaaccaattaaaatttaaaggtctattatcaaaagtaatgacttctagaaacattgttacttagacctatttgataataaattggtctcaaaaacagtcaactgaggcaatttctgttctctgagaataaaatatcaccttttttaatgcagga

SEQ ID NO: 699580 - DNA, 1870 bp, Homo sapiens
tagctgggcatggtggtgcacacttgtaatcccagctactctggaggctgaggcaggagaattgcttcaaccaggaaacagaggttgcagtgagccaagattgcaccactgcactccagcctgggcaacagagtgagattccatctccactcagccaaaaaaaaaatctttctaccatgcctctctgactaaacctccactttacctcccttttcttcttttccaatcaccacatactttttcttccctattttatactatgctctggtttctctctagatcatataaatcttttgcctgttactacaaacatactgtaaatttgaaacaattcacaagactaaatatttaaaattgagtggaatcaataagatatttttatttcaatgttacaaattatagttttattatttactaaagctctcactttgggaaagttctgtatttgctgtttctgcagttttaatttttataaagtgagaagactgtcatttatgccttctaaggtctactccaactagttgaatctatgacacctacatttattaatgataatgcagtgagagaggcatttaattagctcctgcaaaaaatctagctaaaatctaatgagggcttgagctatgtgtcatggtatcagggatagagctgtagggcagaatccaaaataaaagataaatatccatgtactttaataattttattataataaaaatttagaaaaatgaattggatatttatttttcatcttaactagaagaggcaattgccttacaaataattaatttttaatcattaaatatttccagtaagggcatattcttgacacccttacgggaggaggtgataatacacagttttaagaaccttaactttatggtcaaattgcctgatgtaatgtttcacaaaacaaaatgtgtgggctttcagtatcagaattcacctgtagcacttataaaacttatttaaattatttcagagccctgttttacagccactgaatctatatttctggaagtgaatgtttggactcaccatttttaccaaaatccccaggtaattctcatacacattatgtttgagaataaccaatccgagttcaaacaataagtaggttcccattttgtttggaaatattttacaattacatgtttctttagcagcaaaaaggtaagatcatttaattaaattacttaggctgatttgatgacttacataatgcagtaaacagtagctataatagcatttttatagactgttattgtagtgagatgttgacagtggtagtttgtagacaagatcagttggtagactaatagaacagctrgtagagcagtagaccagtagaaaggcagtgattcatacattggtcaaaatattcttataactctaagatgaaagtaatacttaaatattttcaaggctagatggcctttagtgaattaatagggtctctctgagaacttcaccatcaagtattgtatagactactggagcagccagcccatagtggtggaaataaccaagcctgaatttcctgatatagcagatactgctagctgttagctcaaaatccattcccttaaaagagtcccatttttgtttgatagaaaaaaattacccagctgaaaatttcccagcctaccctatggatagggcagatagtgatagtcaatgagacattatggaagatttattcctgtcacattttctcctccttgtcactccatttgttctcctgcctggaacataggctgggggctgaaaggtagtatatatcttgtgactaacaacaaagatgaaatcagtcacatctaagagtggcagaatggaaaaattgtatgagtttcatgacatctgctgcactagt

SEQ ID NO: 699581 - DNA, 642 bp, Homo sapiens
aagtatactgggatgagggagggtaaggtggaatctctcatctaatgtaatgaatcccaggacaggcataagaagcccacaaggttcttcagaattttataccagcagaaaactgccaatttggacttaaagagccagggatrgaataaaattaaagaaggctgttagagtcccaaaattctacaggcaggaaacaggctgattaaactattcagcttaaatttgtgctaaacttcacaaaaaaagaaggataattctgacgaagaaggcttgagtccagagagtagagtccttagctcagaggatggagacaaaaactacaagaattattctcagaccttgaaatctaatactgttttcctagctagatttcaaaattgcttgggactggtgactcttttcaaataaaaaaaaaaagactatttttttagagcagttgtatgttcatagcaatattgagcagaaggtacagacattttctctacatatccagtgtcccctgcatccccagctaaagtggggacaatttgctacaattgatgaacctatattgacatgtcatcaccacccacaatccatagtttatattagggttcacttgctattctatattctataagtttggacaaacatacaatgtca

SEQ ID NO: 699582 - DNA, 642 bp, Homo sapiens
aagtatactgggatgagggagggtaaggtggaatctctcatctaatgtaatgaatcccaggacaggcataagaagcccacaaggttcttcagaattttataccagcagaaaactgccaatttggacttaaagagccagggatggaataaaattaaagaaggctgttagagtcccaaaattctacaggcaggaaacaggctgattaaactattcagcttaaatttgtgctaaacttcacaaaaaaagaaggataattctgacgaagaaggcttgagtccagagagtagagtccttagctcagaggatggagacaaaaactacaagaattattctcagaccttgaaatctaatactgttttcctagctagatttcaaaattgcttgggactggtgactcttttcaaawaaaaaaaaaaagactatttttttagagcagttgtatgttcatagcaatattgagcagaaggtacagacattttctctacatatccagtgtcccctgcatccccagctaaagtggggacaatttgctacaattgatgaacctatattgacatgtcatcaccacccacaatccatagtttatattagggttcacttgctattctatattctataagtttggacaaacatacaatgtca

SEQ ID NO: 699583 - DNA, 669 bp, Homo sapiens
agcaccaaggagcaagccatccccttgaaatgtaatcatcagtcaaggaagacagcgccccatctctcagtgtctgtgagaggattggagtctaactttggtgggcttcttttttcaagttgtaaaattacctccttgcaggaagatatgaaaaagtttacttttcctttggggaaggcaattagcatacatgagtcatctgtaatctgctcaccccggctcttagtaactctttagccctttgtctctatgaaaggggtacagtcttgccctgtacttcctccctgatagctggcaatagcatcagaataaaatcaacttctgtctgctcttttctaatgggaattttttctttagcaatctgcagagagcccaggcacggtgggctcacgcctgtactcccagcactttggggsgctgaggcgggtagatcacgaggtcaggagttcgagaccaacctggccaacatagtgaaaccccatgtctactaaaaatacaaaaattatccaggtgtggtggcgcatgcctatagtcccacctattcaggaggctgaagcaggagaattgcttgaacccaggaactggaggttgcagtgagccaagattacgccactgcactccagcttgggggacagagtgagacttcatctaaaaaaaaaaaaaaaaaaa

SEQ ID NO: 699584 - DNA, 649 bp, Homo sapiens
gacacttggcatggagttggaggaggtgagtttgytcaggtatgtgggtcaatctgggggagtgtctcaggaagaaagctatattcattggtattcttgattgtacacaacaggcaaacccctcaagctgaaaaggttgtttgactcacaaagtgagacattcaggggtgcttgccttcaggtaaggtcagatccagcaacacaaatgatggtctttctctctcctccttctcttggttctgctctatctgattgtttgttcatgtgtgagtctaattctcccctactacaggtgggcttccttcatatagtcagggaaaatggctgctagcaactccaggcttacgtggccccagcttggcagtcagtggaaagcaagcctcctctccacacctatgtatatgcgcctggaaatgagacgccttgctaagttgtgtacacctataccagttactgtgtttggggagatgtggcactgtagttctttcagctgggcacagctgcccacctctgtggtgagagtctggggctagaggagggaaacagtgactggtagtcccacaggaccacaaggagagcagaagggatggttccccaaaggaataaaagttgcaggtacagcaatctattttcagaaataaatagaaca

SEQ ID NO: 699585 - DNA, 649 bp, Homo sapiens
gacacttggcatggagttggaggaggtgagtttgctcaggtatgtgggtcaatctgggggagtgtctcaggaagaaagctatattcattggtattcttgattgtacacaacaggcaaacccctcaagctgaaaaggttgtttgactcacaaagtgagacattcaggggtgcttgccttcaggtaaggtcagatccagcaacacaaatgatggtctttctctctcctccttctcttggttctgctctatctgattgtttgttcatgtgtgagtctwattctcccctactacaggtgggcttccttcatatagtcagggaaaatggctgctagcaactccaggcttacgtggccccagcttggcagtcagtggaaagcaagcctcctctccacacctatgtatatgcgcctggaaatgagacgccttgctaagttgtgtacacctataccagttactgtgtttggggagatgtggcactgtagttctttcagctgggcacagctgcccacctctgtggtgagagtctggggctagaggagggaaacagtgactggtagtcccacaggaccacaaggagagcagaagggatggttccccaaaggaataaaagttgcaggtacagcaatctattttcagaaataaatagaaca

SEQ ID NO: 699586 - DNA, 1637 bp, Homo sapiens
atttttgtctttatgtcttcagaaaaaccttgaaagtggaaatgcaaggtccagaattacatggtgtctaaaattttgataactagtcacacatttcaatggggaagaacagttggtatctcaggtgactgaggtcggagaagtgccatttccaaagatgggattagggacccaagacaatgcctagggtatgattgttctccctaagctagctgtaaatccctttttattatgtgctggagggtcaagccatgcaaggtatgaattatatgatttcttagtttcatgtctaagataggcagtacaaccagacaggtaagtacaatttatttgctacattattttttattttagaaagcaaccagatgaagagctcgcaggctattgaggcagattaaagacagcagagggcgctcattattagcaaaatcaaggaaaacatttgtgtatatatgcaaggtagataatgagaaatatcagcaccttctattgcattaaatttttcactggggattcacaactaaatggcaactacctgatgctccccctttctagtaactacctctgacttcatttcaagcattgttaaatggtgcattctttgttctgtccttaactctctcattatcaaatgagaacttgttttctgatactgacaatgaccataataacagtgatagctattggtcattcattgtttcctccatatattttcgattcagcaaataattattgaatattagttgcaggatctttgctggacaggaagcatacagtaataaattgtcatgacccatatctccayagatttcacagtgtaaagggagagatagaaaccacacaaataaacatgggtaaaaggataattataagttatgataataacaataaaggaaaagaataggatcctaagaaaggtcacagtgacaagagattgcctgtttattttaggtcatttctatggacatgccaagttgggacttgaggttggaagaacccatcttaaccaaataatattctgtgtggaaggtactaagtgcatgaatatcctgaggataaggagaacttggcttcttcaaagaactgaaacatcacctgtgtttcagtgcacaggtggcagcaggagcacagggacacaagccaaggtcaaaccatgcattaggtgtcatggtcatggccctgtatttatcctaagagcccagaaaagccttgggaaattttgtatccaatgttctccatatacctgagtggcaacactgcatatgcaaccatatccacttgcattagtcagactcctacgagtcattcctgatacttccctctccctgacacgtcatgtagaactaataaccatgtcctgtcaacctaatgtcttaatattctcttgaatccttccacatggttctgtctgcattgaccctcccttgctcaagagcttttggctggcttcttgctttactctggacccctctgtctagcctgcacaacagccaactgatatttttaaaatgcaacaatgatcatatgtgttccaatgctcaaaatcctttggtggctttccattgttcttggatttaagaataaaatcctgaccataacctatgaggtcctgtaagacttactttcttccttcttat

SEQ ID NO: 699587 - DNA, 600 bp, Homo sapiens
agttgaaaatgtaaatgcttgctgggctactgctattttttaaatcttgataaaataagcatttaaacttgttttattgtgttctacattatcttatctggttatttgacttattagatataatattttaacatataaagagagaaatattaccttaagaaagaaacagttataaagtgattgtaaagatttatatttcagaatattttgacagttctataatgcacctttggaaatacgttcttgtcatatgctttgtcttactcaacagcaatttaatgccagctgtgtagctttagttgcagtaaaatcaattttaattttagttctatgtctaaaagtatatttgttaaataaaattgatgtcaattcacctctacccgagtttaggtttcracagatgtgtcaaaacagagaatcttaaaatgatagtgtttgtctttaatttgccttcatcagattgcaaaactcatgtatcccaattatatatagaaaatacatatatatttttctgctttttgatgctcttaattcctattataataatccctgaacttaaagataatgcacatggatagaatgttgaagtcactacatcta

SEQ ID NO: 699588 - DNA, 1277 bp, Homo sapiens
cttggagctcaaacatctgggggcaggcagtgaccatggcatcccgagctcagcagaggccctggagaagcatctccctgaccttggagggctgcctggccctgccttgtggtacccccggagcacgggggccggcgggggagaagaagcggcctccaaagctgggcccaggcttccgaggagcagctgctgtgtggttgctcctgacactctaggtgttcagagagggcctcaggtcccggctgctgacgcttgggggccagtcggctgctgcgtgtttttctaagggcaggatgagacgagtgcggaagtgtgaaagtaaaatctgcagcatggagccaacttccaggatgaagaaacattgctgggacgatttygacaggaaaaaacaggaagtcatgaggattggtttctttccgctcctgctggctgacagcctccttctagtgtcctcctggcggagactgatgggccccgacagcaaatcagccctagcaacacaattcagatgacaggagtgtgggctgcaggctgaggcaactgcttaaaagcgggtgcaggtccctcctgtggccattcagtgtccacacagcatttcactcacagctgaacttccactaaacagcagggacattttgcttttcctaagaatgtgtccgcgtccacacacgctgccctttggcagccgtggcaccgcctgtgggcactgtcatccctcatgtacagtcacggtcttgactgaacggtgggcactgtcatccctcatgtacagtcacgatcttgactgaacggtagcctccaccaccaggggtatgtaaagcaataagaggagggggagaggacaaattagcttccacacagggacacacgcacacacaccccaacatggcaattgatcatgaagacatcattggtatttagaaccttcttcttcactttggattccctatgtcctttgcccccgtctttccagggtcttgcttctgaactgacactgtaaaagagttggtatcgtaatgagaacacctgcttccgggcgatggactaacacaggacctgtcagctccacagacataagcccatcactgcccttcttctgctagaaaacaagttccttgatcagaagagatgctgtgcagaacactctggggtatctgaggcattctgcacatagatggcggtgctgtcagatgtgcgtgggcagggaaggcaaattcaaatctagaaaaggtgtctatcgcagtgaggtcaaattgctatgccgttcatgacaaaag

SEQ ID NO: 699589 - DNA, 1277 bp, Homo sapiens
cttggagctcaaacatctgggggcaggcagtgaccatggcatcccgagctcagcagaggccctggagaagcatctccctgaccttggagggctgcctggccctgccttgtggtacccccggagcacgggggccggcgggggagaagaagcggcctccaaagctgggcccaggcttccgaggagcagctgctgtgtggttgctcctgacactctaggtgttcagagagggcctcaggtcccggctgctgacgcttgggggccagtcggctgctgcgtgtttttctaagggcaggatgagacgagtgcggaagtgtgaaagtaaaatctgcagcatggagccaacttccaggatgaagaaacattgctgggacgattttgacaggaaaaaacaggaagtcatgaggattggtttctttccgctcytgctggctgacagcctccttctagtgtcctcctggcggagactgatgggccccgacagcaaatcagccctagcaacacaattcagatgacaggagtgtgggctgcaggctgaggcaactgcttaaaagcgggtgcaggtccctcctgtggccattcagtgtccacacagcatttcactcacagctgaacttccactaaacagcagggacattttgcttttcctaagaatgtgtccgcgtccacacacgctgccctttggcagccgtggcaccgcctgtgggcactgtcatccctcatgtacagtcacggtcttgactgaacggtgggcactgtcatccctcatgtacagtcacgatcttgactgaacggtagcctccaccaccaggggtatgtaaagcaataagaggagggggagaggacaaattagcttccacacagggacacacgcacacacaccccaacatggcaattgatcatgaagacatcattggtatttagaaccttcttcttcactttggattccctatgtcctttgcccccgtctttccagggtcttgcttctgaactgacactgtaaaagagttggtatcgtaatgagaacacctgcttccgggcgatggactaacacaggacctgtcagctccacagacataagcccatcactgcccttcttctgctagaaaacaagttccttgatcagaagagatgctgtgcagaacactctggggtatctgaggcattctgcacatagatggcggtgctgtcagatgtgcgtgggcagggaaggcaaattcaaatctagaaaaggtgtctatcgcagtgaggtcaaattgctatgccgttcatgacaaaag

SEQ ID NO: 699590 - DNA, 1277 bp, Homo sapiens
cttggagctcaaacatctgggggcaggcagtgaccatggcatcccgagctcagcagaggccctggagaagcatctccctgaccttggagggctgcctggccctgccttgtggtacccccggagcacgggggccggcgggggagaagaagcggcctccaaagctgggcccaggcttccgaggagcagctgctgtgtggttgctcctgacactctaggtgttcagagagggcctcaggtcccggctgctgacgcttgggggccagtcggctgctgcgtgtttttctaagggcaggatgagacgagtgcggaagtgtgaaagtaaaatctgcagcatggagccaacttccaggatgaagaaacattgctgggacgattttgacaggaaaaaacaggaagtcatgaggattggtttctttccgctcctgctggctgacagcctccttctagtgtcctcctggcggagactgatgggccccgacagcaaatcagccctagcaacacaattcagatgacaggagtgtgggctgcaggctgaggcaactgcttaaaagcgggtgcaggtccctcctgtggccattcagtgtccacacagcatttcactcacagctgaacttccactaaacagcagggacattttgcttttcctaagaatgtgtccgcgtccacacacgctgcccttyggcagccgtggcaccgcctgtgggcactgtcatccctcatgtacagtcacggtcttgactgaacggtgggcactgtcatccctcatgtacagtcacgatcttgactgaacggtagcctccaccaccaggggtatgtaaagcaataagaggagggggagaggacaaattagcttccacacagggacacacgcacacacaccccaacatggcaattgatcatgaagacatcattggtatttagaaccttcttcttcactttggattccctatgtcctttgcccccgtctttccagggtcttgcttctgaactgacactgtaaaagagttggtatcgtaatgagaacacctgcttccgggcgatggactaacacaggacctgtcagctccacagacataagcccatcactgcccttcttctgctagaaaacaagttccttgatcagaagagatgctgtgcagaacactctggggtatctgaggcattctgcacatagatggcggtgctgtcagatgtgcgtgggcagggaaggcaaattcaaatctagaaaaggtgtctatcgcagtgaggtcaaattgctatgccgttcatgacaaaag

SEQ ID NO: 699591 - DNA, 1277 bp, Homo sapiens
cttggagctcaaacatctgggggcaggcagtgaccatggcatcccgagctcagcagaggccctggagaagcatctccctgaccttggagggctgcctggccctgccttgtggtacccccggagcacgggggccggcgggggagaagaagcggcctccaaagctgggcccaggcttccgaggagcagctgctgtgtggttgctcctgacactctaggtgttcagagagggcctcaggtcccggctgctgacgcttgggggccagtcggctgctgcgtgtttttctaagggcaggatgagacgagtgcggaagtgtgaaagtaaaatctgcagcatggagccaacttccaggatgaagaaacattgctgggacgattttgacaggaaaaaacaggaagtcatgaggattggtttctttccgctcctgctggctgacagcctccttctagtgtcctcctggcggagactgatgggccccgacagcaaatcagccctagcaacacaattcagatgacaggagtgtgggctgcaggctgaggcaactgcttaaaagcgggtgcaggtccctcctgtggccattcagtgtccacacagcatttcactcacagctgaacttccactaaacagcagggacattttgcttttcctaagaatgtgtccgcgtccacacacgctgccctttggcagcygtggcaccgcctgtgggcactgtcatccctcatgtacagtcacggtcttgactgaacggtgggcactgtcatccctcatgtacagtcacgatcttgactgaacggtagcctccaccaccaggggtatgtaaagcaataagaggagggggagaggacaaattagcttccacacagggacacacgcacacacaccccaacatggcaattgatcatgaagacatcattggtatttagaaccttcttcttcactttggattccctatgtcctttgcccccgtctttccagggtcttgcttctgaactgacactgtaaaagagttggtatcgtaatgagaacacctgcttccgggcgatggactaacacaggacctgtcagctccacagacataagcccatcactgcccttcttctgctagaaaacaagttccttgatcagaagagatgctgtgcagaacactctggggtatctgaggcattctgcacatagatggcggtgctgtcagatgtgcgtgggcagggaaggcaaattcaaatctagaaaaggtgtctatcgcagtgaggtcaaattgctatgccgttcatgacaaaag

SEQ ID NO: 699592 - DNA, 1249 bp, Homo sapiens
ggatatattatgtactatacttgaatacctctaaatatcattagcaactcagctattcatatataaaatctcttgtggtcaaaatttcacaggtacttagtgcttcaaataaattcaattaaggataagcaaatgcctttaactacatttccatttcatttaaatatatctgattccttagacaagtcacctgattttgtttttacagtgatattatttttatgatttgtgatagcaggtcttgccagaggtgaaaataaataaccatttttatctgagtatagacagacaatatacaagctttgccccattatcatgattgagaattaaagatttaaaagccatgactacgttacagtttatatccctatgtttctgaacttaatatgacctacatagatggatatatatgataacacataattaagattaacaacatcattacaagaaaagctaatagaagtgctggctattttatctttagcaactgttttccaattttacatkaaaaaagatcttgctttgactaaattattaacgttgtgataatctgtcattagaatcaataactgctttattatgcatagtgcatatagtgctaaaatggaccctctctcaaataaatttagtgccttgtcacaatccagtatgattttacaatattgctaatgtgcacaaagcattcaaatataaaatatcggcatgtcggagatttatgacaaatgtgaggagaagatgaatctaggttaagctttcatgtcacttgactgaggtcaagaaaatcaatactattcataatgtatctttcacccacagtcataaatgaaaaaccttctgtacctagagagacttcttatttatcttttagtctcagtggtggaaatattctaaaatgggtgttagaagaaaaaataaaattaattggcaataaggagaatgaatcatatttttggaatgtgcagtgactcaagatcaggtaactgaatatgtttccctattttgatctttgctttttctctgcagatgtgtctaacatttgtgaattctaagaattactatggtgtaggtaatagtcacaattctccactttagctcttatgaattttataacattgtgaaatggccagtaactgcatttcaatttatttcattaacttactatttcctatttcttttgatgcaacatggtttttaatcattagaatcaataactgcttacagtgatattagtcatatactgaccacaata

SEQ ID NO: 699593 - DNA, 1146 bp, Homo sapiens
ggaactgatactgctgtatgccagagagtcagaggccactgtcttgcttctgggttttacatatgctgctatgtagggaatatgtaatgacattatgatgtttaaaattatacttctgaaatgaaaatgaaatattgaacctgaaaatccaaacaactctaaaaattagcatctcttagaatatcaatcatttccatattacagtcccagtgtcttatggaaggaaggtccttgcatgttaaatatggggtaggtgaagctcatctcctgaaatctactttcctattttttccccacagatgatgatgtttaatttttaatgttttattttggtaaattaaaaaattgtgataaaatatacataacattaaaatgaccattttgacaattttaagtgtacaattcagtggcattatgtacactcattttcccttccattgatgcagccccatctccaccctagaccctcctataaggagaaaaccgataggcattattatttttattggaactttatatctatttacctcttaaaaagaagtttttctcaaaaagtgatgttgataataaaggaatgcatgagggattttcagagatgagagacaatgaggcaaagaagtctgggtaagaagcccttccatatgtccttaatagaatactttctttccccctgccatcttgggggtataaggaagaaggatgagatttagaattgctactttgccatgtgtcagttgcataggcttttaaccagcatctttcagtcttgatgtccttatctgtaaaatggatggtagtaatactgatatcactgttactgtatacgttaaatgaggtaatacacawcaagaggtaacattaaaattgctatgcctgaattggttattacttacgtgaaattctgcttctaattaataccattaggttgcaagctcattgagggtagagtctagtctgagcccgagcctgagcacatgttggcactgaacaaacattggttaaatgtatggaaggaccaagatacttgcattccacagaaaattcataatgtatctaggataatgagaagcaaaactacaaagaagtaaatagattgaaaaagaaagtgagtctgtgtgatttgttgtgctccagccccaaagtggg

SEQ ID NO: 699594 - DNA, 1116 bp, Homo sapiens
tcactctgctgattgtttcctttgctgtgcagaaacttttcagtktgatatactcccatttgtctaattttttgctgttgcttttggtcttatccaaaaaaaagtaattgcccagtctagtgtcatgaagcatttcccatgtgttttcttccaggagttttatagttttgggtcttacatttgtctttaacccattttgagttgaattttctatatggtgaaagacaggggtccagattcattcttctgcatgtggatatccaattttctgagcatcatttattgaagagactgtcctttctccattgcgtgttcttgacatctttgttgaaaatcagtagattttcttggctgtagatgcatggatttatttctggactttctattctgtaatcctctttctttggactaacttgaatattctcttgtggccaatttcccatcagagatttttaaagagcagcatctacacagtgttctgaaacctgcttctccaccaacattgaaaacactggtcttctggtagcctctcagctgggtttatattcaggagattcatttacaaagaaatagtcttgttcgtcaatgtctaggttgcaatttaatcacattttcataaaaatagagttagtattagaacaaagttgtgttctgactacagagtaaaaaggagatgtgtcgccaggggacaaaactgggaccaatgtgtggtcattccaactaaagcattttagccagaatggagctaatacttaaatatgtatttggagttggaccacacccctttctcctcatatctatttatgtctactgatctaaatgtaagctggaaaaaaaaatgtgtctacagttgggtccagacatatacagacaaggctgacagcctttaggactttgacagaagccagcttatgggatcagagaggcctgtaagagtgaatttaccactttgaggcagcctggcagagtcggcagcaagacttgcatgtcagagacaagtggtttcagataaacaatatttgaatccatcctgacccaactatgtgggggcatgtttgtgccctgggaaaaaatatatttgtagtccaggactgatagagctgtccccaaactctg

SEQ ID NO: 699595 - DNA, 1116 bp, Homo sapiens
tcactctgctgattgtttcctttgctgtgcagaaacttttcagtgtgatatactcccatttgtctaattttttgctgttgcttttggtcttatccaaaaaaaagtaattgcccagtctagtgtcatgaagcatttcccatgtgttttcttccaggagttttatagttttgggtcttacatttgtctttaayccattttgagttgaattttctatatggtgaaagacaggggtccagattcattcttctgcatgtggatatccaattttctgagcatcatttattgaagagactgtcctttctccattgcgtgttcttgacatctttgttgaaaatcagtagattttcttggctgtagatgcatggatttatttctggactttctattctgtaatcctctttctttggactaacttgaatattctcttgtggccaatttcccatcagagatttttaaagagcagcatctacacagtgttctgaaacctgcttctccaccaacattgaaaacactggtcttctggtagcctctcagctgggtttatattcaggagattcatttacaaagaaatagtcttgttcgtcaatgtctaggttgcaatttaatcacattttcataaaaatagagttagtattagaacaaagttgtgttctgactacagagtaaaaaggagatgtgtcgccaggggacaaaactgggaccaatgtgtggtcattccaactaaagcattttagccagaatggagctaatacttaaatatgtatttggagttggaccacacccctttctcctcatatctatttatgtctactgatctaaatgtaagctggaaaaaaaaatgtgtctacagttgggtccagacatatacagacaaggctgacagcctttaggactttgacagaagccagcttatgggatcagagaggcctgtaagagtgaatttaccactttgaggcagcctggcagagtcggcagcaagacttgcatgtcagagacaagtggtttcagataaacaatatttgaatccatcctgacccaactatgtgggggcatgtttgtgccctgggaaaaaatatatttgtagtccaggactgatagagctgtccccaaactctg

SEQ ID NO: 699596 - DNA, 1116 bp, Homo sapiens
tcactctgctgattgtttcctttgctgtgcagaaacttttcagtgtgatatactcccatttgtctaattttttgctgttgcttttggtcttatccaaaaaaaagtaattgcccagtctagtgtcatgaagcatttcccatgtgttttcttccaggagttttatagttttgggtcttacatttgtctttaacccattttgagttgaattttctrtatggtgaaagacaggggtccagattcattcttctgcatgtggatatccaattttctgagcatcatttattgaagagactgtcctttctccattgcgtgttcttgacatctttgttgaaaatcagtagattttcttggctgtagatgcatggatttatttctggactttctattctgtaatcctctttctttggactaacttgaatattctcttgtggccaatttcccatcagagatttttaaagagcagcatctacacagtgttctgaaacctgcttctccaccaacattgaaaacactggtcttctggtagcctctcagctgggtttatattcaggagattcatttacaaagaaatagtcttgttcgtcaatgtctaggttgcaatttaatcacattttcataaaaatagagttagtattagaacaaagttgtgttctgactacagagtaaaaaggagatgtgtcgccaggggacaaaactgggaccaatgtgtggtcattccaactaaagcattttagccagaatggagctaatacttaaatatgtatttggagttggaccacacccctttctcctcatatctatttatgtctactgatctaaatgtaagctggaaaaaaaaatgtgtctacagttgggtccagacatatacagacaaggctgacagcctttaggactttgacagaagccagcttatgggatcagagaggcctgtaagagtgaatttaccactttgaggcagcctggcagagtcggcagcaagacttgcatgtcagagacaagtggtttcagataaacaatatttgaatccatcctgacccaactatgtgggggcatgtttgtgccctgggaaaaaatatatttgtagtccaggactgatagagctgtccccaaactctg

SEQ ID NO: 699597 - DNA, 1116 bp, Homo sapiens
tcactctgctgattgtttcctttgctgtgcagaaacttttcagtgtgatatactcccatttgtctaattttttgctgttgcttttggtcttatccaaaaaaaagtaattgcccagtctagtgtcatgaagcatttcccatgtgttttcttccaggagttttatagttttgggtcttacatttgtctttaacccattttgagttgaattttctatatggtgaaagacaggggtccagattcattcttctgcatgtggatatccaattttctgagcatcatttattgaagagactgtcctttctccattgcgtgttcttgacatctttgttgaaaatcagtagattttcttggctgtagatgcatggatttatttctggactttctattctgtaatcctctttctttggactaacttgaatattctcttgtggccaatttcccatcagagatttttaaagagcagcatctacacagtgttctgaaacctgcttctccaccaacattgaaaacactggtcttctggtagcctctcagctgggtttatattcaggagattcatttacaaagaaatagtcttgttcgtcaatgtctaggttgcaatttaatcacattttcataaaaatagagttagtattagaacaaagttgtgttctgactacagagtaaaaaggagatgtgtcgccaggggacaaaactgggaccaatgtgtggtcattccaactaaagcattttagccagaatggagctaatacttaaatatgtatttggagttggaccacacccctttctcctcatatctatttatgtctactgatctaaatgtaagctggaaaaaaaaatgtgtctacagttgggtccagacatatacagacaaggctgacagcctttaggactttgacagaagccagcttatgggatcagagaggcctgtaagagtgaatttaccactttgaggcagcctggcagagtyggcagcaagacttgcatgtcagagacaagtggtttcagataaacaatatttgaatccatcctgacccaactatgtgggggcatgtttgtgccctgggaaaaaatatatttgtagtccaggactgatagagctgtccccaaactctg

SEQ ID NO: 699598 - DNA, 1116 bp, Homo sapiens
tcactctgctgattgtttcctttgctgtgcagaaacttttcagtgtgatatactcccatttgtctaattttttgctgttgcttttggtcttatccaaaaaaaagtaattgcccagtctagtgtcatgaagcatttcccatgtgttttcttccaggagttttatagttttgggtcttacatttgtctttaacccattttgagttgaattttctatatggtgaaagacaggggtccagattcattcttctgcatgtggatatccaattttctgagcatcatttattgaagagactgtcctttctccattgcgtgttcttgacatctttgttgaaaatcagtagattttcttggctgtagatgcatggatttatttctggactttctattctgtaatcctctttctttggactaacttgaatattctcttgtggccaatttcccatcagagatttttaaagagcagcatctacacagtgttctgaaacctgcttctccaccaacattgaaaacactggtcttctggtagcctctcagctgggtttatattcaggagattcatttacaaagaaatagtcttgttcgtcaatgtctaggttgcaatttaatcacattttcataaaaatagagttagtattagaacaaagttgtgttctgactacagagtaaaaaggagatgtgtcgccaggggacaaaactgggaccaatgtgtggtcattccaactaaagcattttagccagaatggagctaatacttaaatatgtatttggagttggaccacacccctttctcctcatatctatttatgtctactgatctaaatgtaagctggaaaaaaaaatgtgtctacagttgggtccagacatatacagacaaggctgacagcctttaggactttgacagaagccagcttatgggatcagagaggcctgtaagagtgaatttaccactttgaggcagcctggcagagtcggcagcaagacttgcatgtcagagacaagtggtttcagataaacaatatttgaatccatcctgacccaactatgtgggggcatgtttgtgccctgggaaaaaatatatttgtagtccaggactgayagagctgtccccaaactctg

SEQ ID NO: 699599 - DNA, 579 bp, Homo sapiens
gggaaattcatccccatgatccaatcacctcccaccaggcccctcctccaacactgggsattataattccatatgagattttggtggggacacagatccagaccatatcagacagttctacattttgcagctatgttcccaccttgcgacacaacttctccaacagcaagggcagaataattgctggacttttccaaacatcacactggaaagcaccaggaggttaaatgactagctcaaagcaccaagcctgacagctcttaatccaagattaaagccaagtgtggggtttacaggtaggtgtgcgcaaagctcagcttctggaatttcacatttgtttgtggagtaacagcacaaagcctttgtttatatgactttaaaagaattaatctcattcattctgaagaacgtggcagcagagctgactggaatctttctctgctgtcctttcatttcggggtcaggggtttacatcagctccctttagcagatttgtttctcctagaacacagaaggtacttgatgatcccttgcatctgtcacaaattcttctatcgctgggcagagtaaccacagctt

SEQ ID NO: 699600 - DNA, 627 bp, Homo sapiens
aggcaggagaatcgcttgaaccgggaggcggaggttacagtgagctgagattgtgccactgaactccatcctaggcaacagagtgagactttgtctcaaaacaacaacaacaacaacaaaacaaagcaaacaaacaaacaaaaaacagagagagacaagttctcactgcattgtccaaactggattcaaactcctggaatcaggtgatccttttgccacagcctcyagggtagctgggactgcagatgcacgccaccatgcttgactgtgtagaattttaatcatttggctatataataattcagttaacatatatcatatttttaagcatttatgttgccctttcttgctgtacaaataatattgaccttccttgattctattgtctttacataaattcttagaagtagaattgctgagttcttaagaagatttagcttcctaatttagtttttttttaccttgttttaaattattttatagtttaacaagggacccaagatgaagctgggtggtatgagaaagtttctctctctagagaatgcatggctggattatgaagagctgattaaaactcagggtcttagagagttatcagtggtgcccacagagggaggcttttgaatc

SEQ ID NO: 699601 - DNA, 640 bp, Homo sapiens
tttttctagtcttttctctcacattgatccttctctctgtctaggcactaagactacaagcattctctccagccaggtagtgttgaccagcaatgaagaaattaattcttagtttatgcgtttcaaaggagattcagacccttccagtaaaagggccacagaaaggactcagaacacaaattcagaaattgcataatgatggaaaagcccagcacagcaaggtttccaattatagaacgaggcagcatgcctggattggggttaaggactcagaaagagacattggatgaagctaggtgtgaaagaagaggctcttcgccctgcccaccacccagggtgagtccagaaacaaggttgagaaaactgtttgacgartgggtttcatgatctgagagctcagggtacctgtgcccccttccctattgaagagcccagcagctggcaggaccctaaggcagcccttgccagcatggagctggagctgaagaggtatctgagtgtgtagatctaggtagaggagttcaagatcatatcatgcagtttctcacagcccagagggacgaaggagtgttatctaactcctaggtccccaagaggggcatggaaatattccacattgctggcatgtgggaacaggctg

SEQ ID NO: 699602 - DNA, 640 bp, Homo sapiens
tttttctagtcttttctctcacattgatccttctctctgtctaggcactaagactacaagcattctctccagccaggtagtgttgaccagcaatgaagaaattaattcttagtttatgcgtttcaaaggagattcagacccttccagtaaaagggccacagaaaggactcagaacacaaattcagaaattgcataatgatggaaaagcccagcacagcaaggtttccaattatagaacgaggcagcatgcctggattggggttaaggactcagaaagagacattggatgaagctaggtgtgaaagaagaggctcttcgccctgcccaccacccagggtgagtccagaaacaaggttgagaaaactgtttgacgagtgggtttcatgatctgagagctcagggtacctgtgcccccttccctaktgaagagcccagcagctggcaggaccctaaggcagcccttgccagcatggagctggagctgaagaggtatctgagtgtgtagatctaggtagaggagttcaagatcatatcatgcagtttctcacagcccagagggacgaaggagtgttatctaactcctaggtccccaagaggggcatggaaatattccacattgctggcatgtgggaacaggctg

SEQ ID NO: 699603 - DNA, 1202 bp, Homo sapiens
  misc_feature 195, 196, 197, 198, 199, 200, 201, 202, 203, 204, 205, 206,207, 208, 209, 210, 211, 212, 213, 214, 215, 216, 217, 218,219, 220, 221, 222, 223, 224, 225, 226, 227, 228, 229, 230,231, 232, 233, 234, 235, 236, 237, 238, 239, 240, 241: n = A,T,C or G
  misc_feature 242, 243, 244, 245, 246, 247, 248, 249, 250, 251, 252, 253,254, 255, 256, 257, 258, 259, 260, 261, 262, 263, 264, 265,266, 267, 268, 269, 270, 271, 272, 273, 274, 275, 276, 277,278, 279, 280, 281, 282, 283, 284, 285, 286, 287, 288: n = A,T,C or G
  misc_feature 289, 290, 291, 292, 293, 294: n = A,T,C or G
tgaccatgtgccctttgaaatctgtaagagagaattcttccttgcccctttctagcttacggtgatttgctagcaattcttggtgtttttctggcttgcagtcgcagcattccaagctgtagctcttgtgtcacacagagttccccttgtgtatctctgtgtgacattctcttcctgtgtcttaacatcatcttnnnnnnnnnnnnnnnnnnnnnnnnnnnnnnnnnnnnnnnnnnnnnnnnnnnnnnnnnnnnnnnnnnnnnnnnnnnnnnnnnnnnnnnnnnnnnnnnnnnngatcttttgggagacacaatttgatccatagcatctacctggatttgagtcatatggctgactgtattttatcatatctgaaatcaagaagtaactgtactgggaggaggggcggattctaagacctctactcacctctgaagtcaccgcttggttgtgtatggttgaccctcttgtgtgaatagatatataaatgtttgatggtttagtaatcttctggacatggggccctggagagaattatcagcacagaatgtgatacttacgtgggctatgatggaaaagccacagaggatggtatcttcctgagctctgcattttaaagtatcctattacatagcatgaaaatcacgcggtgccatttagcataataataccaggggcacacttaaaatatcatgttatagcttggaaacattgakagctacaatgggatttcaattgtgtaaagggatgtttttacatcatcttccctggaatttatcaggggcacttttattctattatatctctagtgtaatgagactcatgctttttgaatgtttagaccctgcctatatatgtagagtttttgtctagctatatttatatattgattcattaattcatctacttattattcatttattcatccattcatcattcacgctttcattcaacaaatgtgtactgggtgcccctcctgggagacagacactagggagtcagaaataataaaactaattccttccctcatggagctgatattctaaggagagatacacaattttaaaataacgaaaagcaaaaatacactttcaggcaataaaatgtactatgaagtaatatgtgtgtaattggggaatagaattaacatttgtttgaataactctaggcatcatgtgaaggtatattctgtaagggcttgt

SEQ ID NO: 699604 - DNA, 1202 bp, Homo sapiens
  misc_feature 195, 196, 197, 198, 199, 200, 201, 202, 203, 204, 205, 206,207, 208, 209, 210, 211, 212, 213, 214, 215, 216, 217, 218,219, 220, 221, 222, 223, 224, 225, 226, 227, 228, 229, 230,231, 232, 233, 234, 235, 236, 237, 238, 239, 240, 241: n = A,T,C or G
  misc_feature 242, 243, 244, 245, 246, 247, 248, 249, 250, 251, 252, 253,254, 255, 256, 257, 258, 259, 260, 261, 262, 263, 264, 265,266, 267, 268, 269, 270, 271, 272, 273, 274, 275, 276, 277,278, 279, 280, 281, 282, 283, 284, 285, 286, 287, 288: n = A,T,C or G
  misc_feature 289, 290, 291, 292, 293, 294: n = A,T,C or G
tgaccatgtgccctttgaaatctgtaagagagaattcttccttgcccctttctagcttacggtgatttgctagcaattcttggtgtttttctggcttgcagtcgcagcattccaagctgtagctcttgtgtcacacagagttccccttgtgtatctctgtgtgacattctcttcctgtgtcttaacatcatcttnnnnnnnnnnnnnnnnnnnnnnnnnnnnnnnnnnnnnnnnnnnnnnnnnnnnnnnnnnnnnnnnnnnnnnnnnnnnnnnnnnnnnnnnnnnnnnnnnnnngatcttttgggagacacaatttgatccatagcatctacctggatttgagtcatatggctgactgtattttatcatatctgaaatcaagaagtaactgtactgggaggaggggcggattctaagacctctactcacctctgaagtcaccgcttggttgtgtatggttgaccctcttgtgtgaatagatatataaatgtttgatggtttagtaatcttctggacatggggccctggagagaattatcagcacagaatgtgatacttacgtgggctatgatggaaaagccacagaggatggtatcttcctgagctctgcattttaaagtatcctattacatagcatgaaaatcacgcggtgccatttagcataataataccaggggcacacttaaaatatcatgttatagcttggaaacattgagagctacaatgggatttcaattgtgtraagggatgtttttacatcatcttccctggaatttatcaggggcacttttattctattatatctctagtgtaatgagactcatgctttttgaatgtttagaccctgcctatatatgtagagtttttgtctagctatatttatatattgattcattaattcatctacttattattcatttattcatccattcatcattcacgctttcattcaacaaatgtgtactgggtgcccctcctgggagacagacactagggagtcagaaataataaaactaattccttccctcatggagctgatattctaaggagagatacacaattttaaaataacgaaaagcaaaaatacactttcaggcaataaaatgtactatgaagtaatatgtgtgtaattggggaatagaattaacatttgtttgaataactctaggcatcatgtgaaggtatattctgtaagggcttgt

SEQ ID NO: 699605 - DNA, 1049 bp, Homo sapiens
tgtctctggaatttttatttaagtttatattagcaataatgaccttggttctagggaattcggtaacgattaatgaccagcaaggggtcactggcctcatggtgctttgggccagcaaccccttccaaagaggacaagaactggccatttatcccaaggaagtgccctaaggcgaggtccttatcctcttgccatctgatggtaatttaacctcagcttttaaagggcccttaggagcaaatatacaatgggttgtgctttcagtattttaaagagtttatttttgccatgcaatgcctaattgggtatcattgaaaagagttgtcaaaataaagttggtaattatgttccttttattccggggtacatatactcattttgtgtctgcatatctgctggcttgtattggtgtagtgtgcatctatgcagatgcttatactcacattcccatgtctggggtgtgtgtgtgtgtgtgtgtgtgtgtgtgtgtgwgagagagagagagagggagagaggggttaaaatacccaatgccagatcaacagaataaataaaacttgaatgatagatacttcagtcacattagttttgcctgcaagaataaatccctgtaatatgtaaaataaggggccagaggcagagtaaaattagtcttttcttggttacagatgactggtgtggcagtgactggcattggcgttttgcatgttctatgtgttattgtcattactgtaattactgatgataactaaccatttatgaagccacatattagctgaattctgggtattctctcatttaatccttacagcaattctatgtgctgagtattcttatttctcccattttacagatgaggaaactggggcttcagttggttaaataacttgcccaacgtcaacatagctattaagtggtggagctgggatgccaaccttgcagtgtctgaccccaaagatcagggttttaatcataacactattctgcctctatttaaaaactaacatttccattttctaagcgcagcccttaatatattcatttaggca

SEQ ID NO: 699606 - DNA, 864 bp, Homo sapiens
tgaacatttatgtagtacttattatgtaccaggcattgttctaatttcattaaatataataactaacttgataatttaaattaygtaaaagcatttgcttctgggaacttacttttatcaaagtcacagtactaacatcttctcatatattagatactgtctccagcacagttgcaaacatatatggttaagccgttgcaaagtaaaattatttgcctaggtcatatagggagtaggcctttgatacattttcatatttaacattgaggaaattgacctaattcatatgattgaatccataccttgtttcagtcagggttctccatatataaaaatgcaacgttgagctacattcctggcatataatgctgagttgttgctctcagctaatgctccctgtcattccacttattgttaagagagaggtcttttaaagatttcttttaaggaattggctaatatgattgtaaggagggtggcaactccaacgtctgttgggcgggctggcagagtaggcatgcaggtaggagatgatgctggagtgttgagtctgaaatctgtagggcaggtcagcagactggcaactcagacaggagttcatgctgcagtctcaaggtagagtttcttcttctccaggaacctcacgttttgctacatctacaggttaaccatgtctataggttagcaaaatctacaaaatgcctttacagcaataactagaaaagtgattaaatgactgagtgccatagcctagatgaattgacacaaaattaagcataacatagcttgactttatatgaatggaataccaagttgtgtaggagtcatgggaattaatatataattaaatatagtgaaacatag

SEQ ID NO: 699607 - DNA, 864 bp, Homo sapiens
tgaacatttatgtagtacttattatgtaccaggcattgttctaatttcattaaatataataactaacttgataatttaaattacgtaaaagcatttgcttctgggaacttacttttatcaaagtcacagtactaacatcttctcatatattagatactgtctccagcacagttgcaaacatatatggttaagccgttgcaaagtaaaattatttgcctaggtcatatagggagtaggcctttgatacattttcatatttaacattgaggaaattgacctaattcatatgattgaatccataccttgtttcagtcagggttctccatatataaaaatgcaaygttgagctacattcctggcatataatgctgagttgttgctctcagctaatgctccctgtcattccacttattgttaagagagaggtcttttaaagatttcttttaaggaattggctaatatgattgtaaggagggtggcaactccaacgtctgttgggcgggctggcagagtaggcatgcaggtaggagatgatgctggagtgttgagtctgaaatctgtagggcaggtcagcagactggcaactcagacaggagttcatgctgcagtctcaaggtagagtttcttcttctccaggaacctcacgttttgctacatctacaggttaaccatgtctataggttagcaaaatctacaaaatgcctttacagcaataactagaaaagtgattaaatgactgagtgccatagcctagatgaattgacacaaaattaagcataacatagcttgactttatatgaatggaataccaagttgtgtaggagtcatgggaattaatatataattaaatatagtgaaacatag

SEQ ID NO: 699608 - DNA, 864 bp, Homo sapiens
tgaacatttatgtagtacttattatgtaccaggcattgttctaatttcattaaatataataactaacttgataatttaaattacgtaaaagcatttgcttctgggaacttacttttatcaaagtcacagtactaacatcttctcatatattagatactgtctccagcacagttgcaaacatatatggttaagccgttgcaaagtaaaattatttgcctaggtcatatagggagtaggcctttgatacattttcatatttaacattgaggaaattgacctaattcatatgattgaatccataccttgtttcagtcagggttctccatatataaaaatgcaacgttgagctacattcctggcatataatgctgagttgttgctctcagctaatgctccctgtcattccacttattgttaagagagaggtcttttaaagatttcttttaaggaattggctaatatgattgtaaggagggtggcaactccaacrtctgttgggcgggctggcagagtaggcatgcaggtaggagatgatgctggagtgttgagtctgaaatctgtagggcaggtcagcagactggcaactcagacaggagttcatgctgcagtctcaaggtagagtttcttcttctccaggaacctcacgttttgctacatctacaggttaaccatgtctataggttagcaaaatctacaaaatgcctttacagcaataactagaaaagtgattaaatgactgagtgccatagcctagatgaattgacacaaaattaagcataacatagcttgactttatatgaatggaataccaagttgtgtaggagtcatgggaattaatatataattaaatatagtgaaacatag

SEQ ID NO: 699609 - DNA, 864 bp, Homo sapiens
tgaacatttatgtagtacttattatgtaccaggcattgttctaatttcattaaatataataactaacttgataatttaaattacgtaaaagcatttgcttctgggaacttacttttatcaaagtcacagtactaacatcttctcatatattagatactgtctccagcacagttgcaaacatatatggttaagccgttgcaaagtaaaattatttgcctaggtcatatagggagtaggcctttgatacattttcatatttaacattgaggaaattgacctaattcatatgattgaatccataccttgtttcagtcagggttctccatatataaaaatgcaacgttgagctacattcctggcatataatgctgagttgttgctctcagctaatgctccctgtcattccacttattgttaagagagaggtcttttaaagatttcttttaaggaattggctaatatgattgtaaggagggtggcaactccaacgtctgttgggcgggctggcagagtaggcatgcaggtaggagatgatgctggagtgttgagtctgaaatctgtagggcaggtcagcagactggcaactcagacaggagttcatgctgcagtctcaaggtagagtttcttcttctccaggaacctcacgttttgctacatctacaggttaaccatgtctrtaggttagcaaaatctacaaaatgcctttacagcaataactagaaaagtgattaaatgactgagtgccatagcctagatgaattgacacaaaattaagcataacatagcttgactttatatgaatggaataccaagttgtgtaggagtcatgggaattaatatataattaaatatagtgaaacatag

SEQ ID NO: 699610 - DNA, 580 bp, Homo sapiens
gttgaagcagaggagaggtgtcatttgttgaaagctgtcaaacagccagattatataaaattatgaagatatttagcaggaatattctaagatactgctacaaacaacactatttattgaccacaaatatgccagttgctttacatatactcaaccttacaataatcctgctaggtaaatcatctgattttacagatgaggaaagaggttcagagaagttaagcagcttgccccaagtcatagaaatagaattccaaatacagaattcaagaattaaaagaactttccagtcagcactggaatactgtagcgcccttccccctcaacccctccacatttaccccaccctccaatcaacatatgaatggaggaaaagggaagggcagaatttatgcttctaatggacagcttcctttcaagaggcagagggtgttgctgagctgatcatggccagtttttgcttcccaatcctgccaatctattaggtcatcccttcttttgtggaaaagagcaaaggarggacagaaagagtcgggagcattatactagcaaagccatctacacggggaaggacatatca

SEQ ID NO: 699611 - DNA, 600 bp, Homo sapiens
ctgtgtatggtagagtgtttaaaagtctgtaatattataaagtatcgttttgctacttttggtagrtattttgcctgacttcatatacctgtatttatatttttatttgtagttgtatttatggaaaacaatctgctgtttatgacagaatatatcataaactgcttttcatttcactaaataaaattctaccacataatttgtaatggcttcagagtattctttgaggtaaagacttcattgttaaccattcccatattcttggataattagggttcctatgataagtaatagtgtaataaacacctcttgatatctatatctatatatctttgcatctatttctaattacgttttcagcatacttcctagaagtagagtgcctggatcaaaagttggacaaattttaaagaataataattatcctttcactgagtgctgctgtatgccaggtatttactaagtaatgactcacataatcttcacaacaatcaataagttagatactactactattgtctccactttgtttttactatactttaatttctacagtacttgtgcacaatgtgcaggtttgttacatatgtatacatgtgc

SEQ ID NO: 699612 - DNA, 600 bp, Homo sapiens
ctgtgtatggtagagtgtttaaaagtctgtaatattataaagtatcgttttgctacttttggtaggtatyttgcctgacttcatatacctgtatttatatttttatttgtagttgtatttatggaaaacaatctgctgtttatgacagaatatatcataaactgcttttcatttcactaaataaaattctaccacataatttgtaatggcttcagagtattctttgaggtaaagacttcattgttaaccattcccatattcttggataattagggttcctatgataagtaatagtgtaataaacacctcttgatatctatatctatatatctttgcatctatttctaattacgttttcagcatacttcctagaagtagagtgcctggatcaaaagttggacaaattttaaagaataataattatcctttcactgagtgctgctgtatgccaggtatttactaagtaatgactcacataatcttcacaacaatcaataagttagatactactactattgtctccactttgtttttactatactttaatttctacagtacttgtgcacaatgtgcaggtttgttacatatgtatacatgtgc

SEQ ID NO: 699613 - DNA, 831 bp, Homo sapiens
acacaaaatggactaagacaataacataccaatattaatacattaattagtattgactgtatgaattatattgtctggtgagatataaaatgcacatagaataaaatatgtgacaacaataacatattagttgggaacttggtaaaggtgttatacatagggaaaaagtatataattttctatggtttgtgttatttatccaataatagtaataataatattttattaccatatggtgaaatgcttatcattttctacaaaaagacacttgctaagaagtacatctttttatrgacaagactaacatgacctctgtctgtacactagaatgtcagtacatggcccctagataattaaggagttcttggacttaaaaatccaaacaatgtgtcttgctttaacatcttttcatacttaaaaataataagcttaaaaacaaaacattgcaaaaagagcttccccttcaaaaaaaataaaataaaattaagcctctttcagttgtcagctttgcttctgaatttataaatttcaacttacaaacaactttcagagaaagtgagtaaagtagggtacacttgtgcactattcctttcaagaacagaacgggagtcttcaattcttagctacaccatggttgccattttgtatcatagatgtggcaccagttaaatgaagcaagatattgaaatgagattcttttcacatttcatgaaacacagggatttgtgttgttttttcctagggggttaagattgaatgtaatatttcaatcatacttgaaagaacatgagttaatttttcatagccactaatccactcattcagaaatga

SEQ ID NO: 699614 - DNA, 646 bp, Homo sapiens
tacagagcacaaatatgtaatgactatgtagttacacattaataagtcccactttatttttcagaatctagtacgataaaatgcgattggatctacttcgatgtgataacctgtggagtcatgctcgcttgttgttctgttcagctttctggaactcagtggactacaatatatgttcagcattgcccacctattttcaattcatccaagtacactcactgaggtagagagaaaacaaaaaaatgaaaagtaactttttttttctaacactcctttctagcgtgtgtcctttccagtggaacatcagcaattgtggcttagattcaagaattgcaggtgcagaagcttgaccgtgccaccagagccgtaccttcgcctagtcattgcatgcaaaatgcctggattcaaaagcatagaaggggcttgaatttggtttggaccatgattttgttgcttatgtttttaggatattattttcattccaaaagtgaccataggaaatcaaatgtctgagaacaaaggacttaagratgcaaccatctaacaaacattaaaaagtccctttaactatagaactaaattacacaaaaaaaactgaattgaataaaataaatatgtcaccaccaaactaaataaagcccatcaa

SEQ ID NO: 699615 - DNA, 900 bp, Homo sapiens
cacctgtttttctttttgatggcctcataaactactagtgcaaggtgctggaaaaaaaatgtagattgaagcagtaaagtgcaagacaaacaaaatgaaaaacctaaccaaagtttaaatattctccgaagatacataaataactgtagtttcttatgtgtcttaaaagcaaactaagtaggtcttatcacacatatgaaactttcttaagttatagtattaagtattgtagctattgccacccaaaatacttttgttaaaatggggtcagagagtaggtttgatagatttcaaagattaaaatatagcacttgggacatacttatactaaaaaacattcattgcacatgtgaaattcaaattgaaccaggyattctgtattttatcctagagtcagaatacatgtaatttaaactttaaagatcggtatatagagtgtttatgaaccctaccaattattagaagcttgagaaaaaagggtccagtaggctgtctttaaaatagctctatatcttggtcttttagtgaaggatatcctctccatatttctaaagtacaaatcaaaaattatgaacaaaattagtatgataaagtcctgcacttatttatgcttctttaaaagagagctcaacacactagattaaaagataggttttgaaactcctttccataaattcgtctcaatcagagtaggtctttctggacattaaattaaatgccgtcaattccatggcagccaacttgtcatcctgagacagtcaacataaaactttacctatacagaaatatcgctgaaagcagtattgtagatcatgtgacaatatagatcactgaggaagaaacaaatgcatcattggaggaaaaagtgcaggagagaaaggacagcagcagagaaaaatc

SEQ ID NO: 699616 - DNA, 900 bp, Homo sapiens
cacctgtttttctttttgatggcctcataaactactagtgcaaggtgctggaaaaaaaatgtagattgaagcagtaaagtgcaagacaaacaaaatgaaaaacctaaccaaagtttaaatattctccgaagatacataaataactgtagtttcttatgtgtcttaaaagcaaactaagtaggtcttatcacacatatgaaactttcttaagttatagtattaagtattgtagctattgccacccaaaatacttttgttaaaatggggtcagagagtaggtttgatagatttcaaagattaaaatatagcacttgggacatacttatactaaaaaacattcattgcacatgtgaaattcaaattgaaccaggcattctgtattttatcctagagtcagaatacatgtaatttaaactttaaagatcggtatatagagtgtttatgaaccctaccaattattagaagcttgagaaaaaagggtccagwaggctgtctttaaaatagctctatatcttggtcttttagtgaaggatatcctctccatatttctaaagtacaaatcaaaaattatgaacaaaattagtatgataaagtcctgcacttatttatgcttctttaaaagagagctcaacacactagattaaaagataggttttgaaactcctttccataaattcgtctcaatcagagtaggtctttctggacattaaattaaatgccgtcaattccatggcagccaacttgtcatcctgagacagtcaacataaaactttacctatacagaaatatcgctgaaagcagtattgtagatcatgtgacaatatagatcactgaggaagaaacaaatgcatcattggaggaaaaagtgcaggagagaaaggacagcagcagagaaaaatc

SEQ ID NO: 699617 - DNA, 900 bp, Homo sapiens
cacctgtttttctttttgatggcctcataaactactagtgcaaggtgctggaaaaaaaatgtagattgaagcagtaaagtgcaagacaaacaaaatgaaaaacctaaccaaagtttaaatattctccgaagatacataaataactgtagtttcttatgtgtcttaaaagcaaactaagtaggtcttatcacacatatgaaactttcttaagttatagtattaagtattgtagctattgccacccaaaatacttttgttaaaatggggtcagagagtaggtttgatagatttcaaagattaaaatatagcacttgggacatacttatactaaaaaacattcattgcacatgtgaaattcaaattgaaccaggcattctgtattttatcctagagtcagaatacatgtaatttaaactttaaagatcggtatatagagtgtttatgaaccctaccaattattagaagcttgagaaaaaagggtccagtaggctgtctttaaaatagctctatatcttggtcttttagtgaaggatatcctctccatatttctaaagtacaaatcaaaaattatgaacaaaattagtatgataaagtcctgcacttatttatgcttctttaaaagagagctcaacacactagattaaaagataggttttgaaactcctttccataaattcgtstcaatcagagtaggtctttctggacattaaattaaatgccgtcaattccatggcagccaacttgtcatcctgagacagtcaacataaaactttacctatacagaaatatcgctgaaagcagtattgtagatcatgtgacaatatagatcactgaggaagaaacaaatgcatcattggaggaaaaagtgcaggagagaaaggacagcagcagagaaaaatc

SEQ ID NO: 699618 - DNA, 900 bp, Homo sapiens
cacctgtttttctttttgatggcctcataaactactagtgcaaggtgctggaaaaaaaatgtagattgaagcagtaaagtgcaagacaaacaaaatgaaaaacctaaccaaagtttaaatattctccgaagatacataaataactgtagtttcttatgtgtcttaaaagcaaactaagtaggtcttatcacacatatgaaactttcttaagttatagtattaagtattgtagctattgccacccaaaatacttttgttaaaatggggtcagagagtaggtttgatagatttcaaagattaaaatatagcacttgggacatacttatactaaaaaacattcattgcacatgtgaaattcaaattgaaccaggcattctgtattttatcctagagtcagaatacatgtaatttaaactttaaagatcggtatatagagtgtttatgaaccctaccaattattagaagcttgagaaaaaagggtccagtaggctgtctttaaaatagctctatatcttggtcttttagtgaaggatatcctctccatatttctaaagtacaaatcaaaaattatgaacaaaattagtatgataaagtcctgcacttatttatgcttctttaaaagagagctcaacacactagattaaaagataggttttgaaactcctttccataaattcgtctcaatcagagtaggtctttctggacattaaattaaatgccgtcaattccatggcagccaacttgtcatcctgagacagtcaacataaaactttacctatacagaaatatcgstgaaagcagtattgtagatcatgtgacaatatagatcactgaggaagaaacaaatgcatcattggaggaaaaagtgcaggagagaaaggacagcagcagagaaaaatc

SEQ ID NO: 699619 - DNA, 1023 bp, Homo sapiens
aaccataacctggatgaacaacggttcctgtgctggaaatgccacatttcagctggactggccaccatgcaccaagaggaactaagacagagaggcgagagaagtgggaatgtttcctcccccttccattttccttgatgttaagagaatcaggaattattgcattgggtcaaacgtagctcttacagtttggtgatgctaaggacttcttgctcagtatcccactatactgggacctttacaggtgcaatgccatctgtccctttcaaggccctggcagaggaggtatcaccctcattttacagatgcagcagctgagactctgaaagatcataaagttgcatagggaatatacgaagtactgggattcaacctcaggcccgccgagagccctttccagcagaacagggctttccgtattacaagttcaacctactcaaggggaataaaactaatttaatgtgttcaagactaaagtaattaaaataagattagactagaataaaatatatagattagagaatagagtacattctgggtagtatggatcaatactattttatgaaaccccccttcaatttatatctagctatatccatatctatatacatgtgcatagatacgggcataccttggagatattgtggatttgattccagaccaccacaatattgaaataaagtgaatcacacaaagctttkggtttcttgatgcatgtaaaagttgtgtttacaatatattgtagtctattaagtgtgcaatagcattatatctaaaaggtacatattttagtcaaaaagtatgtattgctaaaaacattgtatagcatgcaatgctgtttgataactttttacccaccactagaacttctttcataattggagtcagtcctctcaaaccccgcagctgctttgtcaactaagtttacgtgatattctaaatgatcatctgagccttcagtgagtcatcatcttttcgttggtggagtagggcctctgtgttgatggttgcttactgattagg

SEQ ID NO: 699620 - DNA, 1127 bp, Homo sapiens
ttcttccaatatgtcatgtattactctcacacatatatacattttaacccacagagcatgttgcatgaaaccatcattaacaaatcaagatacatgtgtaaaatcttcacaactaacaattttattctgaaaaggttaacacccaggaataacagagagagccatttccctttkcagatatggcaataaaataagtgtgtgaaagtttgcttaagggctaaacaattctgaataggtaaaaagagaaagctattgcaaagcaaagatacctgttttcaaatacagaaatctggcctgataacaacaaaagcctgaaggagaaactgaaggtaacaacagattatgcccatgaattaatctcaggcctgtgataagcggtcatccccctgaaatctatacaaagagactcagaacccttttatgttagatcattgtttcctcattccattcacccacacctcccaagtgtgcgtacaattactatgttttaatagctcagtttttaaatgacataggtgttatggttatagaaaagtatgctagaaatttggtaaaccaccatgaagagacatgggtaacctcaagtggttcactattttaataaaaattgttaattgacctccctgacatgtgacagacacatgcaatgataaacatgaacacagatgcccagtcctctctctcacaaagcctatagtaatagggagacaagtagatatggaattaatagctatgagtattctaaaaatttgaatgaatactgtgttttctgaagttgagaattctatgagatttagcccagtgttgggcggacaagagaggcttgccagaggcaagcacattagctgagcaacacattgaagtgaatcaagggcataaataatggccttctaagtatgattaggcaatttttatttggcctagcaccttctaactaggtgaaatagtgctattacttaaattttctttctcagtttccttcacgataaattgataaaacaatcattatctttctcatcagatttttcctgataattaaaaagatatgtaaagtaatttaaaggtgcctatcacattataattactcagtatttttaaagtcattattatattgaagaaaacacaga

SEQ ID NO: 699621 - DNA, 1127 bp, Homo sapiens
ttcttccaatatgtcatgtattactctcacacatatatacattttaacccacagagcatgttgcatgaaaccatcattaacaaatcaagatacatgtgtaaaatcttcacaactaacaattttattctgaaaaggttaacacccaggaataacagagagagccatttcccttttcagatatggcaataaaataagtgtgtgaaagtttgcttaagggctaaacaattctgaataggtaaaaagagaaagctattgcaaagcaaagatacctgttttcaaatacagaaatctggcctgataacaacaaaagcctgaaggagaaactgaaggtaacaacagattatgcccatgaattaatctcaggcctgtgataagcggtcatccccctgaaatctatacaaagagactcagaacccttttatgttagatcattgtttcctcattccattcacccacacctcccaagtgtgcgtacaattactatgttttaatagctcagtttttaaatgacataggtgttatggttatagaaaagtatgctagaaatttggtaaaccaccatgaagagacatgggtaacctcaagtggttcactattttaataaaaattgttaattgacctccctgacatgtgacagacacatgcaatgataaacatgaacacagatgcccagtcctctctctcacaaagcctatagtmatagggagacaagtagatatggaattaatagctatgagtattctaaaaatttgaatgaatactgtgttttctgaagttgagaattctatgagatttagcccagtgttgggcggacaagagaggcttgccagaggcaagcacattagctgagcaacacattgaagtgaatcaagggcataaataatggccttctaagtatgattaggcaatttttatttggcctagcaccttctaactaggtgaaatagtgctattacttaaattttctttctcagtttccttcacgataaattgataaaacaatcattatctttctcatcagatttttcctgataattaaaaagatatgtaaagtaatttaaaggtgcctatcacattataattactcagtatttttaaagtcattattatattgaagaaaacacaga

SEQ ID NO: 699622 - DNA, 659 bp, Homo sapiens
tttttaaactttcctggtaactgtactatttcatttgttgctttttgggatctggatccaggaaaaamatttcaagtaaaaatatcctggatattaaggctggcctgcagatttcagcacacagtgcgaccagccaatcatatgccaaagtgaaatttcttgcccagtggaaaagcattgaatgaatatacatgaacctattcaagtacatttaataaactgtaaattaattaacataaaattaatgtacagagtaacaaatattttcttcacgggaaaaagagtcttaactcataattctctcgagattcaggaagtctacaaatcttgttactaaaagaaagtttaaacacactactccaaatttagctaatgtcccagaagtctgtttgtaaaatttggtgcataaggcagccttaaaaccagtttcaaagatgcatctaattcaaaggcacactgaacttccttgaaagatgccatcttgtttatcacggcctgaagaacagaatgcatttgacacactgccactgacccttccctgtggaatataagcaagtctaatataaacttcattaacgtgactttaaaatgctcatggtgtaatataagtaagcaaactgagagaattgcatcatgactgcaaaggcaaaagcaaggta

SEQ ID NO: 699623 - DNA, 630 bp, Homo sapiens
tccagcctgggtgacagggtgagactctgtctcaaaaaaataaaaataaaaaagaaagaaagaaaaagaaaccaaggccagagattgaatgatagaactcatgactgaataaatgattgcatgatagtctacaggatggcttagggacttaggaaaataatgggatccactgacatatattrgaaaatgtagtcgagcattgctttggctggtgactggcctgagatgttttgacgtgtagaagttgaagtaattgcctatgtcaaatttcagttatccagaaaaacagcaactctcaagagggaggccaggctgaaaaataaaggtttcggatgtagatggaattgactaggtgggcaaatactttcagagttagagtttaattttcctgaagccttaatttatggtaatcttgcttgtgtagtactcttaactagctaattttagctaacgttattgaggatgtcatctgcagagggctcatataaggaataaggaattgtgtcttatctccaccattaaatactccatgaagttaagtaaactcttggtccaaattaaaaaaaaaaaaaaaaaaagaaatagtgacattctatataaaatagtaaaaacaatagctaagagctatga

SEQ ID NO: 699624 - DNA, 630 bp, Homo sapiens
tccagcctgggtgacagggtgagactctgtctcaaaaaaataaaaataaaaaagaaagaaagaaaaagaaaccaaggccagagattgaatgatagaactcatgactgaataaatgattgcatgatagtctacaggatggcttagggacttaggaaaataatgggatccactgacatatattggaaaatgtagtcgagcattgctttggctggtgactggcctgagatgttttgacgtgtagaagttgaagtaattgcctatgtcaaatttcagttatccagaaaaacagcaactctcaagagggaggccaggctgaaaaataaaggtttcggatgtagatggaattgactaggtgggcaaatactttcagagttagagtttaattttcctgaagccttaatttatggtaatcttgcttgtgtagtactcttaactagctaattttagctaacrttattgaggatgtcatctgcagagggctcatataaggaataaggaattgtgtcttatctccaccattaaatactccatgaagttaagtaaactcttggtccaaattaaaaaaaaaaaaaaaaaaagaaatagtgacattctatataaaatagtaaaaacaatagctaagagctatga

SEQ ID NO: 699625 - DNA, 1011 bp, Homo sapiens
aaatgaagaaaacttcagaataaattcaaccaaagaagtaaaagattcatgtactcactgatgaaagaaatggaagaaaacaacaaataattgggaagatattccatgtttatgaatatgcataaataatatttttgaaacgttcatactacccaaagtratgtacagatttaatgtattccctataaaattttcaatgacattttcacagaaatagaaaaatgaattataaaatttttgtggaaccacagaaggccccaaacagccaaaacaatcttgagcaaaaagaacaaagctggaggcatcacacaaactcctatcaaaatataactgtaccatgaagctgtagtaatctgaacagcatggtattggctcacttaagttgagaaaaacacacacattgctgtctataacagaaaattaagggcaatagttataatattacaacctatcccatttttactggtatagctataaattgtaaggctgccattgaatagatctattattaaaaggtatttaaaaattcataaactttgttctcctgctctcaaataaaagtgtttacttttaaaatgagtttattctgaaaaacacttatgaactaacaaatgacccaatgggcacaaggctataaaggatgaaaactccactgtaattttcctcaatattttaaacttcaagtagctttaaaaaaaatgagcataaaatgcctttattcttattggccataaagaaaaatatagtgtgagaagtgtcattctgtaagacccgtgagttactctcttatttttttaaataagtactaaagcctagattgtaccagttactagataattgtaggacaaccctgacacagaagaagacaaaatatataattgtttgtttatatagcatcatggtttggggcaaacagtattctgatatggacaaaaagaaagacacccaaaccactttatcaaatttaatcatataacatttcaagcaatatattatggtgactatagcctc

SEQ ID NO: 699626 - DNA, 1011 bp, Homo sapiens
aaatgaagaaaacttcagaataaattcaaccaaagaagtaaaagattcatgtactcactgatgaaagaaatggaagaaaacaacaaataattgggaagatattccatgtttatgaatatgcataaataatatttttgaaacgttcatactacccaaagtaatgtacagatttaatgtattccctataaaattttcaatgacattttcacagaaatagaaaaatgaattataaaatttttgtggaaccacagaaggccccaaacagccaaaacaatcttgagcaaaaagaacaaagctggaggcatcacacaaactcctatcaaaatataactgtaccatgaagctgtagtaatctgaacagcatggtattggctcacttaagttgagaaaaacacacacattgctgtctataacagaaaattaagggcmatagttataatattacaacctatcccatttttactggtatagctataaattgtaaggctgccattgaatagatctattattaaaaggtatttaaaaattcataaactttgttctcctgctctcaaataaaagtgtttacttttaaaatgagtttattctgaaaaacacttatgaactaacaaatgacccaatgggcacaaggctataaaggatgaaaactccactgtaattttcctcaatattttaaacttcaagtagctttaaaaaaaatgagcataaaatgcctttattcttattggccataaagaaaaatatagtgtgagaagtgtcattctgtaagacccgtgagttactctcttatttttttaaataagtactaaagcctagattgtaccagttactagataattgtaggacaaccctgacacagaagaagacaaaatatataattgtttgtttatatagcatcatggtttggggcaaacagtattctgatatggacaaaaagaaagacacccaaaccactttatcaaatttaatcatataacatttcaagcaatatattatggtgactatagcctc

SEQ ID NO: 699627 - DNA, 1011 bp, Homo sapiens
aaatgaagaaaacttcagaataaattcaaccaaagaagtaaaagattcatgtactcactgatgaaagaaatggaagaaaacaacaaataattgggaagatattccatgtttatgaatatgcataaataatatttttgaaacgttcatactacccaaagtaatgtacagatttaatgtattccctataaaattttcaatgacattttcacagaaatagaaaaatgaattataaaatttttgtggaaccacagaaggccccaaacagccaaaacaatcttgagcaaaaagaacaaagctggaggcatcacacaaactcctatcaaaatataactgtaccatgaagctgtagtaatctgaacagcatggtattggctcacttaagttgagaaaaacacacacattgctgtctataacagaaaattaagggcaatagttataatattacaacctatcccatttttactggtatagctataaattgtaaggctgccattgaatagatctattattaaaaggtatttaaaaattcataaactttgttctcctgctctcaaataaaagtgtttacttttaaaatgagtttattctgaaaaacacttatgaactaacaaatgacccaatgggcacaaggctataaaggatgaaaactccactgtaattttcctcaatattttaaacttcaagtagctttaaaaaaaatgagcataaaatgcctttattcttattggccataaagaaaaatatagtgtgagaagtgtcattctgtaagacccgtgagttactctcttatttttttaaataagtactaaagcctagattgtaccagttactagatmattgtaggacaaccctgacacagaagaagacaaaatatataattgtttgtttatatagcatcatggtttggggcaaacagtattctgatatggacaaaaagaaagacacccaaaccactttatcaaatttaatcatataacatttcaagcaatatattatggtgactatagcctc

SEQ ID NO: 699628 - DNA, 2675 bp, Homo sapiens
  misc_feature 704, 1488, 1489, 1490, 1491, 1492, 1493, 1494, 1495, 1496,1497, 1498, 1499, 1500, 1501, 1502, 1503, 1504, 1505, 1506,1507, 1508, 1509, 1510, 1511, 1512, 1513, 1514, 1515, 1516,1517, 1518, 1519, 1520, 1521, 1522, 1523, 1524, 1525: n = A,T,C or G
  misc_feature 1526, 1527, 1528, 1529, 1530, 1531, 1532, 1533, 1534, 1535,1536, 1537, 1538, 1539, 1540, 1541, 1542, 1543, 1544, 1545,1546, 1547, 1548, 1549, 1550, 1551, 1552, 1553, 1554, 1555,1556, 1557, 1558, 1559, 1560, 1561, 1562, 1563, 1564: n = A,T,C or G
  misc_feature 1565, 1566, 1567, 1568, 1569, 1570, 1571, 1572, 1573, 1574,1575, 1576, 1577, 1578, 1579, 1580, 1581, 1582, 1583, 1584,1585, 1586, 1587: n = A,T,C or G
tgcaagtataaaatacaggaaataaatagtcattggctgtgaacaacagcccagagaggcaacaaggggacaggtgaatcagccagatagagggagtctgtgggggtctctacagcatccactacagccggacagtcagtatgcagagaaggctggccttgaatcagtgtcaatatcaggttcaggtcgtctggcttcttctaagtggagctttgctgtttgtgctggtgctggtgttgggaaggctgctgcgtgccaggcccaggtcaggagctgtcacctgccctctggctgacagcccgatgcagctgcactccagtcagggtggctgtgttgctgggcaggttgggagcagtttgctgaatgacccctgactctgtctctttcttccccagcacaaacgctgtatcccagcctccctggatgcttactactcctcccaggaccccaattccagaagccgctttacacagtcatcagccactacagcgtggccaagcagagcactgcccgggccatcgggccgtggctgtcagcagccgctgtcatccatgagccccaagccgcccaagacccagggccactagaggcctgccccagccagaatggggggcggggtggagaggagacccccattggctaagccaagctccagttacaagacaacactgtactcctgggatatgggggcgggggcggggcanggcagggtggggggaagaacgcaccaaaaacgtggtgtgtgctggagttgtctgaaccgatatttctttttgttccttggtattggtgattcgtcgccgagtcaggctcatgtacaaaggcatgtttcgtggtgattgttcccatgtaagatatttttaaagccactggttattctttgtttggaaaaagttacacccgaaaaggaaagaaaccaagaacttgaacaataagcattaaactggcttcatcrgaagaccgtgaagggcagtaagagcacaaactctgggggcttcttagatagaaaacgtaacttcagtggggctccagggttgcagagtatgagtgacacagaccgggactattccattagcctgtggtctgcagggtaggcccgcaggaaatgaggaatggccgagctggagagaagagctgattttggcattactaagcccagaacgcacataacccatagtgaaatgtgctggcctctggtgcattttgcaagatgagcacaaactttctgggcctccatcctaggacctgggcagacccacatggcctgggctctgaatgcccaccctgcgacggtgggttctgcatcagcaaacgctgaggagtgggcagattttctttgtcttttgcttgcattttctagatccacacctggatactgcccatgttgacgagacagcagcagggggagagggagggaaggaaggtgcggctgcaagaaggaaggcacgggacaggcatgtgacactaggccacaagcgataagcagcnnnnnnnnnnnnnnnnnnnnnnnnnnnnnnnnnnnnnnnnnnnnnnnnnnnnnnnnnnnnnnnnnnnnnnnnnnnnnnnnnnnnnnnnnnnnnnnnnnnnttatgtaaccttatacgtactatttgacgagttcctgctctaggtaaatctttaaacactatgtcatggaatactcacaaaatgaggtaggaacaatacttattcccatgttaaagatgaggaagctgcggtgtgaagagacgaagggaactggcagaggcaggtgcaggagtcgcaccgggtcccagggctgcctactctcctcccgggtccaacctctccttgtgccaccggccacacccccaacacctggcccaaacccagcgaggctctcaccaagggcctggaattgaaaaataaattatgtaagctcagtccacagcctctagacaacattccctcaggagatagtgaggcagagacagaaaaagagaaagattaagagaaagagaggagacagtgaggagagagaggagcggggagtgtccagagagagaggtgcaaccacctttgggggctactttgactaattgaactctagatctgtgtttccagaaacaggtcatttctgacaaaaggacagactcagataaacagcctgctgttctagactgagtctgatctatgggaaacggcattgacgttgccatggaaacgagtccttttctctccactgtccaggagtgctattttttaaagagatggtattgtgtgcttcttggaagaattattggggatcaatttcttcttcttccacatgactccccgtttggattagagcacattgcaggagttgagggaagataaattgaccaacagcagttctgacaggtggcctttcaattttccagaaaaaatgtgtatctcgctaaataccttctgatccgaccggccgctgggatgactccgggcgccatcactgcttctccccagtatgcagccatgggctgctctttcatctcactcctcctctcccccagcctggactgtgagcccaggggtacggacttgaatctttgcctctggcactggcttgggggaggcaccccagcagccttatgagcagaagccccgagctttccctcctccaaacctttacaatgctgtccccattacctgggaggatggctctgtggtgtctctcctcc

SEQ ID NO: 699629 - DNA, 1337 bp, Homo sapiens
ccagaaaatgcctcagtgtacaagtaaaattcagtgagctaagggcaggtaagaaataactgctacattcatactttaaaacttttcaatgtcatattacaagaaacaagtgcatggtagatgctcaaagttagctattcttatttgtcaatgaactgataaggtaataatggaagaataatgtatggtcacttgtaaatgcaaataaacgcctacccaaaaacatgacgttgacgtcaaggctttatcataccacatacagagagatatgaaaaagcctgttactttcacaattktaagagcaggcaggcctctccatcaggttcaaagtatcttgagagagcaagcaaaggtgactggctcagagtgagtgtcccatcaacataggaggtgctaacataaaacttagcagtagtcctccatctacgtctgcaggtgaccataacaataacacacaggaatacaaagtagtgtcaaagaataacttaaaattcatagttttgtctgggtgcagtggctcacgcctgtaaagtcagcactttgggaggctgaggtgggaggatcacctgaggtcaagagttcaagaccagcctggccaacttgctgaaatctggtctctactaaaaatacaaaaaaaaaaaaaaaaattagctgggcatggtggtgcacgcctgtaatcccagttacttgggaggctgaggcaggagaatcatttaaacccaggaggcagaagttgcagtgagccaagatcatgccactgcactccagcctgggtgacaggagactctatcttaaattaaaaaataaaaataaaataaataaaatgcatagttgggcaataactcttgtaaggatttaaggaagtcaatattcccaatgaactgaattgtcagggctatcaatagagaaaatattatgcatttattccaaaagcgtctactgagtaaactttgtgccaagtgttatgggtagaaagttaaatacgacacagatttccttctgaaggaatctaaagtccagtaatggactaaaaaaatacaaaataatcataatagaattaccctgtataataagcactgtaatgatagtatgaagttggtatatggaagcctaggagagtgattgattaattctgtcatttgtgggttgaaaagatttctttatctactagaagatgggaaagaaagagagcaactaatgagaaagtccagcttagctaccagaccatggcactagccctgattggtcaaaacacctatgattagtccagtggtcactctgtccacttgggcaacccttagccattgactcttccagctcttaggacagagttaggc

SEQ ID NO: 699630 - DNA, 1337 bp, Homo sapiens
ccagaaaatgcctcagtgtacaagtaaaattcagtgagctaagggcaggtaagaaataactgctacattcatactttaaaacttttcaatgtcatattacaagaaacaagtgcatggtagatgctcaaagttagctattcttatttgtcaatgaactgataaggtaataatggaagaataatgtatggtcacttgtaaatgcaaataaacgcctacccaaaaacatgacgttgacgtcaaggctttatcataccacatacagagagatatgaaaaagcctgttactttcacaattgtaagagcaggcaggcctckccatcaggttcaaagtatcttgagagagcaagcaaaggtgactggctcagagtgagtgtcccatcaacataggaggtgctaacataaaacttagcagtagtcctccatctacgtctgcaggtgaccataacaataacacacaggaatacaaagtagtgtcaaagaataacttaaaattcatagttttgtctgggtgcagtggctcacgcctgtaaagtcagcactttgggaggctgaggtgggaggatcacctgaggtcaagagttcaagaccagcctggccaacttgctgaaatctggtctctactaaaaatacaaaaaaaaaaaaaaaaattagctgggcatggtggtgcacgcctgtaatcccagttacttgggaggctgaggcaggagaatcatttaaacccaggaggcagaagttgcagtgagccaagatcatgccactgcactccagcctgggtgacaggagactctatcttaaattaaaaaataaaaataaaataaataaaatgcatagttgggcaataactcttgtaaggatttaaggaagtcaatattcccaatgaactgaattgtcagggctatcaatagagaaaatattatgcatttattccaaaagcgtctactgagtaaactttgtgccaagtgttatgggtagaaagttaaatacgacacagatttccttctgaaggaatctaaagtccagtaatggactaaaaaaatacaaaataatcataatagaattaccctgtataataagcactgtaatgatagtatgaagttggtatatggaagcctaggagagtgattgattaattctgtcatttgtgggttgaaaagatttctttatctactagaagatgggaaagaaagagagcaactaatgagaaagtccagcttagctaccagaccatggcactagccctgattggtcaaaacacctatgattagtccagtggtcactctgtccacttgggcaacccttagccattgactcttccagctcttaggacagagttaggc

SEQ ID NO: 699631 - DNA, 1548 bp, Homo sapiens
aaaaagcaaggatttagatttttaatggaatttaggaaggcaaacagttaacaccagccaatatattcccataaccaggaaagagactaatcctccagtcaagatatagctcagaatcttaccaaccaattagtcagttacctatgaattacacttcaccattcacaagtacgttcacatacaacatctcatttgatcaacacaaaaaccctgagaatactgatgcaattatcttcttttttctatgaaaaaagactatagctcagggagtttaagtagttcgtaagaggtcacacattaagagacgaggccagaactccttttcattacactacaggttcctcatctgttaaataaaggagttgaatttggtggaaattgaaattctctttatgatgtatgaaaaatgggacacgtgcttgtcagtgcatatctatgtggtttaattcactggagagtcaaagtcaatgttccctttaagaaaacagaagaaatgaaggccaaacatgtcttatcagattgacacgctgaaactaccttagagaagagtatcatatgataacccaatatttggtgtctcaagaacttactcccatgactgctatctgcctttgtgtattcttttttgaatagatgcttccttgcaggtgtttccatgatgttacaggtcaacattgccaatgttcctctttctcccatctgcattccttctgcaaacactaataccatcttacattaggtttagcactgtgcagttcttaaagggtcttcgaagacttttcatcagatcccggccagttatttgttgctatgttcttttagctgttgaggcttctgggctcccgatttaaatccttctcagcctagtgtccagggctccccatgagtcacccttcttgagattctgcttcacctgttgtagccaactagacttctgcttggtcccctgtcttatttacctgaataaaatcccagcccttttgagcctggggttttgcattgcttcctccccatgtgcccacagcctagagtcctgccccggaacattaagcagagcctaattccttgctaatagagttctctgaggctgtaaacttgactgggtgcccaaatattgtcctctcaaccccctaccataatgctcaagctcctccataggaaggcactcccccaaaatttaatgccaaactcctgtaatgcgaacagcttaataataacagcaatacaactgactgtgtccaggagctttccaagtgctttatgtgtattatctcacaataatactatcaaaaaatattattactttcattttacagttgagakaactgaggctcaaggagattacatataggctgagtatctcttattcaaaatgcttgggacgggaagtgttttgggtttcagattttttcagatttggggatatttgcacgtagacttaccagttgagcattcctaatctgaaaatctaaaatgtgaaatgttctagtgagtgctttctttggacatgacctttgagcatcatgtcgatgctcaaaaagtttcaga

SEQ ID NO: 699632 - DNA, 623 bp, Homo sapiens
tgcaaagtgatctatttgaagggagcctgtttcaattacaagatcttaatcagcaagagatttatcatctcacataacaggaagtccagaggtggagcaagcctcaagactgggtgactcagtagcaaggtttgcatcatcctcaggctggaggtcaactggttgcagtagttccaggcatcaaaccacaggraaaaaaaatcatctctccttcaggaattgtaattcctagaaatttttacaaaaagcttatggcagacatcccatttacctgtgttgagtttaggtaattctaagctaatcactggcaaagtcagtagaatttccctcacatcactcaggtccagcctggagcttctggtaagaccagcttctctggaagcacagggctacgaaagagatgaatagagaacgaaattagcatctgctagctgaagagtgatatacatgccgagtaaagaaataacagtgcttactagaggacaacaggtgggtgtatctgcaatgtaggaacaggacccacatgaaagaatgcttcagtggaagtcctcatattagacaatagaagttgcttcataaatgtctttaaaacatatgcccaggccgggcacggtggctcacgc

SEQ ID NO: 699633 - DNA, 959 bp, Homo sapiens
aggaaaacccaaagttatgcaaaatgtcaaggaaggtaggtttgaccaagttatgaacaagacacacaaaatgtctatcagacaattctaatcaacagggctattccttaaaagggagaactcagcctcctaaagcaaaaaagatgggaaaaaaacagaatagccagagtttatcaaaggtaaatattgggcctttgtcagatctggaagtgaagacatggttttgatattccaaggttgtaaaaagataaataaggcgactgcaattttatgaaactgtgttcagagacccaaggagtgaccttatgtgcaacattgccatgctgacacttaaaaatgcctcaagaaacatgctaaacctttgcctaaattattttcttttatccctggaagagtactgctaaatcagggaaagtagaattcagtgagaggaagtaatttactcaatgtstcacaagtccaggtagtaggagcagaatcataacccaatctgactccaaagcctgtgctcttttgtcctatcatgctgccttggatcaacagaaaagacacctaaaaaaagtggctctgtccaaggcaagaaagaataatgaaagaaaatgaagagcatgtgatactgatgagaacgattattgatatgaggtctagattaccataaagagggctcaggagactgggataaggtcattacatattgttaattatttcaaggtgtaaagaaatccaaatgaaccccagagcagtgaaaatgtgctgatatcttaccctgcaaccttaaggagaaacttctctgttctctcaaggacttagcactgcctttaccatagactatatacgctattcacagtcctattgtcaaggagttgagcccgccccagttactgaaattagaggttgctctcacctgagtgtttcctcctccaccaccactggaaccatgtcctgcagcatttctctga

SEQ ID NO: 699634 - DNA, 959 bp, Homo sapiens
aggaaaacccaaagttatgcaaaatgtcaaggaaggtaggtttgaccaagttatgaacaagacacacaaaatgtctatcagacaattctaatcaacagggctattccttaaaagggagaactcagcctcctaaagcaaaaaagatgggaaaaaaacagaatagccagagtttatcaaaggtaaatattgggcctttgtcagatctggaagtgaagacatggttttgatattccaaggttgtaaaaagataaataaggcgactgcaattttatgaaactgtgttcagagacccaaggagtgaccttatgtgcaacattgccatgctgacacttaaaaatgcctcaagaaacatgctaaacctttgcctaaattattttcttttatccctggaagagtactgctaaatcagggaaagtagaattcagtgagaggaagtaatttactcaatgtctcacaagtccaggtagtaggagcagaatcataacccaatctgactccaaagcctgtgctcttttgtcctatcatgctgccttggatcaacagaaaagacacctaaaaaaagtggctctgtccaaggcaagaaagaataatgaaagaaaatgaagagcatgtgatactgatgagaaygattattgatatgaggtctagattaccataaagagggctcaggagactgggataaggtcattacatattgttaattatttcaaggtgtaaagaaatccaaatgaaccccagagcagtgaaaatgtgctgatatcttaccctgcaaccttaaggagaaacttctctgttctctcaaggacttagcactgcctttaccatagactatatacgctattcacagtcctattgtcaaggagttgagcccgccccagttactgaaattagaggttgctctcacctgagtgtttcctcctccaccaccactggaaccatgtcctgcagcatttctctga

SEQ ID NO: 699635 - DNA, 959 bp, Homo sapiens
aggaaaacccaaagttatgcaaaatgtcaaggaaggtaggtttgaccaagttatgaacaagacacacaaaatgtctatcagacaattctaatcaacagggctattccttaaaagggagaactcagcctcctaaagcaaaaaagatgggaaaaaaacagaatagccagagtttatcaaaggtaaatattgggcctttgtcagatctggaagtgaagacatggttttgatattccaaggttgtaaaaagataaataaggcgactgcaattttatgaaactgtgttcagagacccaaggagtgaccttatgtgcaacattgccatgctgacacttaaaaatgcctcaagaaacatgctaaacctttgcctaaattattttcttttatccctggaagagtactgctaaatcagggaaagtagaattcagtgagaggaagtaatttactcaatgtctcacaagtccaggtagtaggagcagaatcataacccaatctgactccaaagcctgtgctcttttgtcctatcatgctgccttggatcaacagaaaagacacctaaaaaaagtggctctgtccaaggcaagaaagaataatgaaagaaaatgaagagcatgtgatactgatgagaacgattattgatatgaggtctagattaccataaagagggctcaggagactgggataaggtcattacatattgttaattatttcaaggtgtaaagaaatccaaatgaaccccagagcagtgaaaatgtgytgatatcttaccctgcaaccttaaggagaaacttctctgttctctcaaggacttagcactgcctttaccatagactatatacgctattcacagtcctattgtcaaggagttgagcccgccccagttactgaaattagaggttgctctcacctgagtgtttcctcctccaccaccactggaaccatgtcctgcagcatttctctga

SEQ ID NO: 699636 - DNA, 1151 bp, Homo sapiens
aactttccatcagcaccgtgcactgggtcattctctctagggcagatgagttcattgttccttatatagtttcgaaattcactgcactcatcctagaaaatgagaaagggaaagtgaacatggctttgtccctttttggcttagtgatttcttcaaacttggttttaggaagtcctctcttagctctgggctcagactcactgtactcatcctggcaacagaggccaaggaacgcccaggttgtctaaattttgcatcctccgcttcattctgaacctgtctgcactggtcctgaaaaatgtagggaaacataaaacaacacttgatagaccttcctgtttttttctcccgttcatccatccttcctttccccattttccccatgaagcatgcttttgacaaaaggacaattgctcagggatctaactctacaaatgtgattgttactgttaaagaattgaataaagatgtcttctttgtagtcttgaaaaataaatagaaaagaaagcatcacgcatgcacactgctgattctttaatgctgatagaatcatctggtgaaaacagaagggaagctaaaagggagacttagattggtttatattgcctgaattattaarataaacatcagcaagctacccaaagccttgtttcacacttaaagtgtcaaagataagcatgcagttgagttggtaaagaatgttaccctctacttttcaatccatatttctcccaaggaggaaagactaaaacaataatagacacacactctcagagaattttctacaaaatcaaaaaaggtatcaaacccccaaacccccaaaaatcttgttatgatacaaagtgacaagacaagaaaaatcaattttctttgaagttaagatattaatatatttattattcccaaagctggagaagaatgcaaaattctgaaggtgaaaagtaaaatggttattttggtatcctttaataaataacctttgcattatttgagggcttgctacttgatttctcttcatctttcttttttctttcattagcttctcgatcactgcagaataattaaaaaaaaagatagggtaatttttcaagggttgttactgaattgtctttaaccaagtatttctgcgattctaaacattagcaaatcta

SEQ ID NO: 699637 - DNA, 1151 bp, Homo sapiens
aactttccatcagcaccgtgcactgggtcattctctctagggcagatgagttcattgttccttatatagtttcgaaattcactgcactcatcctagaaaatgagaaagggaaagtgaacatggctttgtccctttttggcttagtgatttcttcaaacttggttttaggaagtcctctcttagctctgggctcagactcactgtactcatcctggcaacagaggccaaggaacgcccaggttgtctaaattttgcatcctccgcttcattctgaacctgtctgcactggtcctgaaaaatgtagggaaacataaaacaacacttgatagaccttcctgtttttttctcccgttcatccatccttcctttccccattttccccatgaagcatgcttttgacaaaaggacaattgctcagggatctaactctacaaatgtgattgttactgttaaagaattgaataaagatgtcttctttgtagtcttgaaaaataaatagaaaagaaagcatcacgcatgcacactgctgattctttaatgctgatagaatcatctggtgaaaacagaagggaagctaaaagggagacttagattggtttatattgcctgaattattaaaataaacatcagcaagctacccaaagccttgtttcacacttaaagtgtcaaagataagcatgcagttgagttggtaaagaatgttaccctctacttttcaatccatatttctcccaaggaggaaagactaaaacaataatwgacacacactctcagagaattttctacaaaatcaaaaaaggtatcaaacccccaaacccccaaaaatcttgttatgatacaaagtgacaagacaagaaaaatcaattttctttgaagttaagatattaatatatttattattcccaaagctggagaagaatgcaaaattctgaaggtgaaaagtaaaatggttattttggtatcctttaataaataacctttgcattatttgagggcttgctacttgatttctcttcatctttcttttttctttcattagcttctcgatcactgcagaataattaaaaaaaaagatagggtaatttttcaagggttgttactgaattgtctttaaccaagtatttctgcgattctaaacattagcaaatcta

SEQ ID NO: 699638 - DNA, 1151 bp, Homo sapiens
aactttccatcagcaccgtgcactgggtcattctctctagggcagatgagttcattgttccttatatagtttcgaaattcactgcactcatcctagaaaatgagaaagggaaagtgaacatggctttgtccctttttggcttagtgatttcttcaaacttggttttaggaagtcctctcttagctctgggctcagactcactgtactcatcctggcaacagaggccaaggaacgcccaggttgtctaaattttgcatcctccgcttcattctgaacctgtctgcactggtcctgaaaaatgtagggaaacataaaacaacacttgatagaccttcctgtttttttctcccgttcatccatccttcctttccccattttccccatgaagcatgcttttgacaaaaggacaattgctcagggatctaactctacaaatgtgattgttactgttaaagaattgaataaagatgtcttctttgtagtcttgaaaaataaatagaaaagaaagcatcacgcatgcacactgctgattctttaatgctgatagaatcatctggtgaaaacagaagggaagctaaaagggagacttagattggtttatattgcctgaattattaaaataaacatcagcaagctacccaaagccttgtttcacacttaaagtgtcaaagataagcatgcagttgagttggtaaagaatgttaccctctacttttcaatccatatttctcccaaggaggaaagactaaaacaataatagacacacactctcagagaattttctacaaaatcaaaaaaggtatcaaacccccaaacccccmaaaatcttgttatgatacaaagtgacaagacaagaaaaatcaattttctttgaagttaagatattaatatatttattattcccaaagctggagaagaatgcaaaattctgaaggtgaaaagtaaaatggttattttggtatcctttaataaataacctttgcattatttgagggcttgctacttgatttctcttcatctttcttttttctttcattagcttctcgatcactgcagaataattaaaaaaaaagatagggtaatttttcaagggttgttactgaattgtctttaaccaagtatttctgcgattctaaacattagcaaatcta

SEQ ID NO: 699639 - DNA, 1151 bp, Homo sapiens
aactttccatcagcaccgtgcactgggtcattctctctagggcagatgagttcattgttccttatatagtttcgaaattcactgcactcatcctagaaaatgagaaagggaaagtgaacatggctttgtccctttttggcttagtgatttcttcaaacttggttttaggaagtcctctcttagctctgggctcagactcactgtactcatcctggcaacagaggccaaggaacgcccaggttgtctaaattttgcatcctccgcttcattctgaacctgtctgcactggtcctgaaaaatgtagggaaacataaaacaacacttgatagaccttcctgtttttttctcccgttcatccatccttcctttccccattttccccatgaagcatgcttttgacaaaaggacaattgctcagggatctaactctacaaatgtgattgttactgttaaagaattgaataaagatgtcttctttgtagtcttgaaaaataaatagaaaagaaagcatcacgcatgcacactgctgattctttaatgctgatagaatcatctggtgaaaacagaagggaagctaaaagggagacttagattggtttatattgcctgaattattaaaataaacatcagcaagctacccaaagccttgtttcacacttaaagtgtcaaagataagcatgcagttgagttggtaaagaatgttaccctctacttttcaatccatatttctcccaaggaggaaagactaaaacaataatagacacacactctcagagaattttctacaaaatcaaaaaaggtatcaaacccccaaacccccaaaaatcttgttatgatacaaagtgacaagacaagaaaaatcaattttctttgaagttaagatattaatatatttattattcccaaagctggagaagaatgcaaaattctgaaggtgaaaagtaaaatggttattttggtatcctttaataaataacctttgcattatttgagggcttgctacttgatttctcttcatctttcttttttctttcattagcttctcgatcactgcagaataatwaaaaaaaaagatagggtaatttttcaagggttgttactgaattgtctttaaccaagtatttctgcgattctaaacattagcaaatcta

SEQ ID NO: 699640 - DNA, 616 bp, Homo sapiens
cagctactcgggaagctgaggcaggagaatggcgtgaacccgggaagcggagcttgcagtgagccgagattgcgccactgcagtccgcagtccggcctgggcaacagagcgagactccgtctcaaaaaagaaaaaawaataataataataataataataataaataaatagcgttgtatggcagatgcacctgacagcaataactttaagcataccctgagaataccctgtggtctaagaagaatgtgtgcttggagctaaggaatccgggaatggccaaggcgaatattcactccttatctgtggagctgcttgggaggctgaggctgtagaattacgtggggcccaggagttcgaggctgcagtgagctgtgatggcaccactgctctccaacgtgggtgacagagggagaccctgtcttgaaataataaaaataaataaattatgcccagttagccacttgggatccatcttgaaggactggctttttcaggttcacatttgttcacaaatgcaaacacacacacaacaattcctcataatttatattaatagatttctctgaatgcctcttagagtttaccatgcgctgtgtgctctaaatgaatgtaacat

SEQ ID NO: 699641 - DNA, 616 bp, Homo sapiens
cagctactcgggaagctgaggcaggagaatggcgtgaacccgggaagcggagcttgcagtgagccgagattgcgccactgcagtccgcagtccggcctgggcaacagagcgagactccgtctcaaaaaagaaaaaataawaataataataataataataataaataaatagcgttgtatggcagatgcacctgacagcaataactttaagcataccctgagaataccctgtggtctaagaagaatgtgtgcttggagctaaggaatccgggaatggccaaggcgaatattcactccttatctgtggagctgcttgggaggctgaggctgtagaattacgtggggcccaggagttcgaggctgcagtgagctgtgatggcaccactgctctccaacgtgggtgacagagggagaccctgtcttgaaataataaaaataaataaattatgcccagttagccacttgggatccatcttgaaggactggctttttcaggttcacatttgttcacaaatgcaaacacacacacaacaattcctcataatttatattaatagatttctctgaatgcctcttagagtttaccatgcgctgtgtgctctaaatgaatgtaacat

SEQ ID NO: 699642 - DNA, 616 bp, Homo sapiens
cagctactcgggaagctgaggcaggagaatggcgtgaacccgggaagcggagcttgcagtgagccgagattgcgccactgcagtccgcagtccggcctgggcaacagagcgagactccgtctcaaaaaagaaaaaataataawaataataataataataataaataaatagcgttgtatggcagatgcacctgacagcaataactttaagcataccctgagaataccctgtggtctaagaagaatgtgtgcttggagctaaggaatccgggaatggccaaggcgaatattcactccttatctgtggagctgcttgggaggctgaggctgtagaattacgtggggcccaggagttcgaggctgcagtgagctgtgatggcaccactgctctccaacgtgggtgacagagggagaccctgtcttgaaataataaaaataaataaattatgcccagttagccacttgggatccatcttgaaggactggctttttcaggttcacatttgttcacaaatgcaaacacacacacaacaattcctcataatttatattaatagatttctctgaatgcctcttagagtttaccatgcgctgtgtgctctaaatgaatgtaacat

SEQ ID NO: 699643 - DNA, 616 bp, Homo sapiens
cagctactcgggaagctgaggcaggagaatggcgtgaacccgggaagcggagcttgcagtgagccgagattgcgccactgcagtccgcagtccggcctgggcaacagagcgagactccgtctcaaaaaagaaaaaataataataataataayaataataataaataaatagcgttgtatggcagatgcacctgacagcaataactttaagcataccctgagaataccctgtggtctaagaagaatgtgtgcttggagctaaggaatccgggaatggccaaggcgaatattcactccttatctgtggagctgcttgggaggctgaggctgtagaattacgtggggcccaggagttcgaggctgcagtgagctgtgatggcaccactgctctccaacgtgggtgacagagggagaccctgtcttgaaataataaaaataaataaattatgcccagttagccacttgggatccatcttgaaggactggctttttcaggttcacatttgttcacaaatgcaaacacacacacaacaattcctcataatttatattaatagatttctctgaatgcctcttagagtttaccatgcgctgtgtgctctaaatgaatgtaacat

SEQ ID NO: 699644 - DNA, 1453 bp, Homo sapiens
atgtggagcacactatttcccattccatttacttcagctctattagaaatccttctttagaaatcaattaatacctagagtctttgctgcatgaggaagcactcaaccatctcaaatctcttgtatcattccacaggtatttcaaacgcattaatagtcttattcccyaaatgtaagctttttgagagcaagacacaagctgttatgtggcacacaaggttggattagagattgattttattccttcgactcatgcaccatatactgactatggaagtgtcttgtttgaacataatttctctggaggcctattttagaaaatgacaaatgaagtggcaaagcaattaaatccaaaatgcccacccacaggatgttggagaggatctctcatttcatccagaagtgttgattatgatatgattttgttgttgttgttttgatgtgtctggaaagtaaaaattcctcaagcattcagcaccctgaagttatgcataaatgtagcaattaagttttcttttttcccaagctggtgtcaggaggaataaaacaccaaaacacattaaatccacttaggcaaggcaggttttaaaaaaagaaaaactttaatgggccaatatcttgtcaataattctcagcttcagtttaaaaacagatatcatggttatttgactaattttccttccattttcatatactttggaggttttcttacctatgccatcagccaggttaggtcctaccaactctcaagtgaggctcgtttagttcagtgcagccaatcagcgccaaagggcacagctcagaagtcctaaacatcctctgtaagggaccaataaagagaacacgcttgctagccattgctgacaatagaatgaaggaacaatcagggtctcaaaaagtcccttaaagaaaagcacctgtggccgggctaggtggctcacgcctataatcccagcactttgggaagccgaggcgagcagatcttgaggtcaggagatcgagaccatcctggctaacacagtgaaacccgtctctactaaaaatacaaaaaattagccgggcgtggtggcacatgcctgcagtcccagctacttgggaggctgaggcaggagaattgcttgaacccaggaggcagaggttgcagtgagccaagatcacgccactgcactccagcctgggtgacagatgagagtccatctcaaaaaaaaagaaaagaaaagaaaagcacctgtatccatggctggaacagagttgacacttgactactgattggcaaatgaatgttgaatgaggaaataacttcctaatttggttaggttttaaatttgatagttttgcaacgaaaaggaaaacagaggtagggaatccagaaattgattattaaatgacatttacttattttactctagagtgtgaatgagacattattctgttaatgttgtacatacgtgtg

SEQ ID NO: 699645 - DNA, 1453 bp, Homo sapiens
atgtggagcacactatttcccattccatttacttcagctctattagaaatccttctttagaaatcaattaatacctagagtctttgctgcatgaggaagcactcaaccatctcaaatctcttgtatcattccacaggtatttcaaacgcattaatagtcttattccctaaatgtaagctttttgagagcaagacacaagctgttatgtggcacacaaggttggattagagattgattttattccttcgactcatgcaccatatactgactatggaagtgtcttgtttgaacataatttctctggaggcctattttagaaaatgacaaatgaagtggcaaagcaattaaatccaaaatgcccacccacaggatgttggagaggatctctcatttcatccagaagtgttgattatgatatgattttgttgttgttgttttgatgtgtctggaaagtaaaaattcctcaagcattcagcaccctgaagttatgcataaatgtagcaattaagttttcttttttcccaagctggtgtcaggaggaataaaacaccaaaacacattaaatccacttaggcaaggcaggttttaaaaaaagaaaaactttaatgggccaatatcwtgtcaataattctcagcttcagtttaaaaacagatatcatggttatttgactaattttccttccattttcatatactttggaggttttcttacctatgccatcagccaggttaggtcctaccaactctcaagtgaggctcgtttagttcagtgcagccaatcagcgccaaagggcacagctcagaagtcctaaacatcctctgtaagggaccaataaagagaacacgcttgctagccattgctgacaatagaatgaaggaacaatcagggtctcaaaaagtcccttaaagaaaagcacctgtggccgggctaggtggctcacgcctataatcccagcactttgggaagccgaggcgagcagatcttgaggtcaggagatcgagaccatcctggctaacacagtgaaacccgtctctactaaaaatacaaaaaattagccgggcgtggtggcacatgcctgcagtcccagctacttgggaggctgaggcaggagaattgcttgaacccaggaggcagaggttgcagtgagccaagatcacgccactgcactccagcctgggtgacagatgagagtccatctcaaaaaaaaagaaaagaaaagaaaagcacctgtatccatggctggaacagagttgacacttgactactgattggcaaatgaatgttgaatgaggaaataacttcctaatttggttaggttttaaatttgatagttttgcaacgaaaaggaaaacagaggtagggaatccagaaattgattattaaatgacatttacttattttactctagagtgtgaatgagacattattctgttaatgttgtacatacgtgtg

SEQ ID NO: 699646 - DNA, 1453 bp, Homo sapiens
atgtggagcacactatttcccattccatttacttcagctctattagaaatccttctttagaaatcaattaatacctagagtctttgctgcatgaggaagcactcaaccatctcaaatctcttgtatcattccacaggtatttcaaacgcattaatagtcttattccctaaatgtaagctttttgagagcaagacacaagctgttatgtggcacacaaggttggattagagattgattttattccttcgactcatgcaccatatactgactatggaagtgtcttgtttgaacataatttctctggaggcctattttagaaaatgacaaatgaagtggcaaagcaattaaatccaaaatgcccacccacaggatgttggagaggatctctcatttcatccagaagtgttgattatgatatgattttgttgttgttgttttgatgtgtctggaaagtaaaaattcctcaagcattcagcaccctgaagttatgcataaatgtagcaattaagttttcttttttcccaagctggtgtcaggaggaataaaacaccaaaacacattaaatccacttaggcaaggcaggttttaaaaaaagaaaaactttaatgggccaatatcttgtcaataattctcagcttcagtttaaaaacagatatcatggttatttgactaattttccttccattttcatatactttggaggttttcttacctatgccatcagccaggttaggtcctaccaactctcaagtgaggctcgtttagttcagtgcagccaatcagcgccaaagggcacagctcagaagtcctaaacatcctctgtaagggaccaataaagagaacacgcttgctagccattgctgacaatagaatgaaggaacaatcagggtctcaaaaagtcccttaaagaaaagcacctgtggccgggctaggtggctcacgcctataatcccagcactttgggaagccgaggcgagcagatcttgaggtcaggagatcgagaccatcctggctaacacagtgaaacccgtctctactaaaaatacaaaaaattagccgggcgtggtggcacatgcctgcagtcccagctacttgggaggctgaggcaggagaattgcttgaacccaggaggcagaggttgcagtragccaagatcacgccactgcactccagcctgggtgacagatgagagtccatctcaaaaaaaaagaaaagaaaagaaaagcacctgtatccatggctggaacagagttgacacttgactactgattggcaaatgaatgttgaatgaggaaataacttcctaatttggttaggttttaaatttgatagttttgcaacgaaaaggaaaacagaggtagggaatccagaaattgattattaaatgacatttacttattttactctagagtgtgaatgagacattattctgttaatgttgtacatacgtgtg

SEQ ID NO: 699647 - DNA, 1453 bp, Homo sapiens
atgtggagcacactatttcccattccatttacttcagctctattagaaatccttctttagaaatcaattaatacctagagtctttgctgcatgaggaagcactcaaccatctcaaatctcttgtatcattccacaggtatttcaaacgcattaatagtcttattccctaaatgtaagctttttgagagcaagacacaagctgttatgtggcacacaaggttggattagagattgattttattccttcgactcatgcaccatatactgactatggaagtgtcttgtttgaacataatttctctggaggcctattttagaaaatgacaaatgaagtggcaaagcaattaaatccaaaatgcccacccacaggatgttggagaggatctctcatttcatccagaagtgttgattatgatatgattttgttgttgttgttttgatgtgtctggaaagtaaaaattcctcaagcattcagcaccctgaagttatgcataaatgtagcaattaagttttcttttttcccaagctggtgtcaggaggaataaaacaccaaaacacattaaatccacttaggcaaggcaggttttaaaaaaagaaaaactttaatgggccaatatcttgtcaataattctcagcttcagtttaaaaacagatatcatggttatttgactaattttccttccattttcatatactttggaggttttcttacctatgccatcagccaggttaggtcctaccaactctcaagtgaggctcgtttagttcagtgcagccaatcagcgccaaagggcacagctcagaagtcctaaacatcctctgtaagggaccaataaagagaacacgcttgctagccattgctgacaatagaatgaaggaacaatcagggtctcaaaaagtcccttaaagaaaagcacctgtggccgggctaggtggctcacgcctataatcccagcactttgggaagccgaggcgagcagatcttgaggtcaggagatcgagaccatcctggctaacacagtgaaacccgtctctactaaaaatacaaaaaattagccgggcgtggtggcacatgcctgcagtcccagctacttgggaggctgaggcaggagaattgcttgaacccaggaggcagaggttgcagtgagccaagatcaygccactgcactccagcctgggtgacagatgagagtccatctcaaaaaaaaagaaaagaaaagaaaagcacctgtatccatggctggaacagagttgacacttgactactgattggcaaatgaatgttgaatgaggaaataacttcctaatttggttaggttttaaatttgatagttttgcaacgaaaaggaaaacagaggtagggaatccagaaattgattattaaatgacatttacttattttactctagagtgtgaatgagacattattctgttaatgttgtacatacgtgtg

SEQ ID NO: 699648 - DNA, 1603 bp, Homo sapiens
gtgaagctgagtcacaaaagggaacagaaattgatcataactgagaattactgacctttaatttttataatgagagaggaaagccctaagtgaataagatgatactgtgtgtaaggaattttagacatcagccaaggagtgttgtggggagagaatcatccagatccccaacgaatgtgaaaacactgtttctgtctgtacttgcagatggttctgagtaaaaagacgatcaggtgttctgacctgagaaaagttctatactcattgatcttcagtaacatgtgattaacaggacattagaaggcaaaagccagcattttggtgaatggattgccaaagccattcactttgcgaagaataggactaagagctcctgttcagcatctgagagatgtgagttgaacgccagctctactactcactggctaaatgaccttatacagatccctttctttctaagatttctcatctgtacaatgaaaatggtcattgtatcaactttatcaggtggttgatatgggtttcagcccacagccttaggaacacaggcccaacttcaaaagtgcccctggctctctcagactgggaggttttccatcatgaagacatccaacttggaatacccgcatctgtcatcccctccttctctaggcttagtctctgcctggctgcttcttcagactgtgaccacaccagtgtaagaaaggtatcagtaggtcagacaacaatgccttattggtaccatgaaacttgcgaagtagaacttgggtttagaacatcaaaacaaaaaacgtacactgtctagatagatgttcagggtacttctgcatgaaaaatctatggtgacccaggtaaagtatttccacaagaggcagactagaataattaaaaacacaaactagagaacaggaagtttcaaattttctactttctaatagtgagactgggcaagttaccaacttctcctcagcttcctcatctgtaaaatgggagtaatgaagcctgactctctaaggataccttgagaattaaagggtgtagcatagtcctcagtaacagtggttgttaggcaagatactgaatttctaaacttctataggagacaggcttactagtcactaatctttagtctgttagaaaactgtgcctkcgtaaaggaatttaccttcccacagacttttcaagagaattttgagcttcagattctgagggtactgagaacactgcatttattctaaagcagtgtcagtttctgtctaatgatatttatcaactctaagaagtaaagttatgggtctctttatatttttccctccaatggaagagaaaaaaggacaatgtctgaagtttccataaaaagctaccaatggtaatggaggtcagaggttagaaatgtaagtatgcattgccatggtgatggagttagcattgttatgagcttgttttatttatggttagctatttctgtcagttttgtttcatcacctttgttttttctcaaattacaaaacaattaaagaatttggcaaggaaaatgagccagatgtaacagtttcctcttacatctcttaatagaagcaaacatgctgtaatgagatttctt

SEQ ID NO: 699649 - DNA, 1090 bp, Homo sapiens
atcctatgcctgtgctgccctctactggccaccaggaggagggtacctgcagcgcacccaccctgaggatctccggcggccccacccacccactcggcttcctcctgaggccacgccccctgaggccacgccccctgaggccagccacttcctggccacgcccctcaaagtccagctttccggctgagtcggagcctgggcctagcagtcctgtcccaacctccttgcgtttctcgcgagaccaggcccagaaattcccagcatcccttgctacactcactccactaagtcccttaaaaactgccagaaaccagcagttcctccagcgtaggttttatttccaatttttattgaacttattaaaattcttacctcttcccacctccctaaagcccaatttctacttggccctgtgcctggggccaggctcatttgtatgaaaggcctgatggcctgcagactcccccagcccaggcttctagcaacatgcaaaggatgtggcggaatttaaattactaatggccagccgggaaggggaaaatgacaggggcctgccccatctgtcccacctcccgaagactcactggctgttccctccccagctaacaggtcctgatccccttctagaatcctcagacccttctgcaggccactgatttgcttctaacactccaactcattcatttaactgacatttattaagcatcctctgtatgcaaagcatggggccagccacaggggatatggccgtaaatayggcaaggccattcctccaaggctaatgaggagagtgacataaacagtgacgtgaaatcaattattacaaatgctaaaatagaaatagatccagctaccatctaaaactggcaccccatgggctgaatcgaacctgcagatgttggcaagagctgtaaaaaaaaaaaaagatgatattttgatgccaacattttaaaaatttggaggatttccattaaaatatgggagttttggcttctcttgtaaaaaatcagaaacgcaacactgggtccacatttcttctcggcaaccctcagctggagctaggctggagctggggcgtttcatgagggcc

SEQ ID NO: 699650 - DNA, 1045 bp, Homo sapiens
taaagaagatggtttgaggaggctgcgaagatccaacaagaaaatgggcaggaagaatctttgtaaaatgggaagccctgcaaaggcttgctgaacatttttatccttggtctggtgctctaagtttctgatacatctgatgtaaagtaccatgaaatkctatgggagacacctctgggagtgtgtagtcttaagatggatgattcatcattcccgttcctttacccagggcagacattgctaatcgatcatggcactctcccacggagcctgggagacgcctcacaatccttctccacacagctgtccaggcaggcactaccaattgagaatagaagggatgaaggattaaagctttccattctccttaaacttgtctgattccatcatgagccacagtagaaacaggcccagagatgagtgcaacttgcgcatatcacaaaggcagagcctagggatgcccagagtctttcaattctcattcaaacctgttcgtatccaagatgactcaataaggaggaaggagtcagtacaaagaaggttccagggcatggggatgcccaaagtggcaatgacttcccactgctgttagaaaaatctcccaattccctatcatggccatcatggctgcccatgatctggtccctaccttcctctctgactccatctcctaccattctccccttaccttccatgccccaaccattctctctttctgttcctcaaaacatgccaagctcggtctcacctcagagcctttgcaggatctccctacggggatgacaaagacattcaccagaagctccaggcaaacacccctctgacttggtccacacccaggagaaggagagctccattttttcagcaaatgcagcagaacatctagcttcctagaatccagtactcatcatggcagccaagaagatggaaaactccaattggccaagcctggaccgtgtgcccagccttggagatagagccagcctcaccctgaccacacaggctgagagtgatggagacatgggtgcccaatggagaaattaca

SEQ ID NO: 699651 - DNA, 632 bp, Homo sapiens
aggtaggcattgtagttcccggcaagaaagtcagcctctcctttgcagctttgaagctaggyattgacttttccccagctaggaaagttgaagataatttcttccaatataaggctgttttctctacattgaaaatccatcaatattattgatgaatatttaacaaatatttattgattgctcccattacaagcagctgcattagaatgttcaaaccaatcattagagagaggaaatattttggtgcccaaaggatgcagtaagtaggagtactcctttggtcagaaaagcacttagaataattctcatacttctagatcattatttgtgtgctccaacatctacaaatgaatttcacaaaccctgccaccaaattatatgcagacatgaatatgggaagagtgtttacaactttattttagattcttccatgtttctataatttccaaaggttaggaactgcattcttaggatgttgtcttttaaatgttattcttatctggccatgttggctgttatttatgaaccaaagcttttcaagaagtagtggtaagtagcttgggggtgaggtagagatttgggtcactagatgcagatactgacaatagcaagaagaatatggcatggcatga

SEQ ID NO: 699652 - DNA, 2950 bp, Homo sapiens
gtatacattgtacctaatgtgtagttttttatccctagaccccctcccaccttccccctctaagtctctaaagtccattatatcactctgtgtgcctctacatactcacagcttagctcccacttataagtgagaatatacaactgttggttttccactcctgtgttatttcacttagaataatggcccccaactggatccaagttgctgcaaaagacattatttcattcgtttcagtggctgagtagtattccacggtgtatatataggttatcatgacttttatgctacaatggcagagttgtgaggatttgacagagactgtatgacctacatttggtcatatgtatggtcatatggtatgacctatttggcccttttcagaaaacatttgctgatgcctaatataaagcaatgctccagaaactgaagtataaaaagatttcttttccattaagttttccacattctttcttatcccccttmacctaagctgaaaatagtacagcaggaaattatcgtgcgctctgaaacccagggggttcaaacaaacaaacaaacaaaaacaaccaaacagcattttatttttttaatttatttttatttttatcttttgagacggagtctcgctctgttgcccaggctggagtgcagtggcacgatctcggctcactgcaagctccgcctcccgggttcaagtgattcattctcctgcctcagcctcccgcgtagctgggactgcaggtgaccgccaccgtgcccagcttttttgttttttgtttttttcttttttttgtatttttagtggagacggggtttcaccgtgttaggcaggatggtctcagtctcctgaccttgtgatctgcgggtctcggcccccgcaaagtgctgggattacaggtgtgagccgccacgcctggccaccaaccaaacaccatgttaatgaaaggaataatgttaagaatgtaatgaccagcatggtttcacaatttatctcttttatgataatttataatactgatggatttaaaagtacttcatactagctttaaaaaacacattttgagctctcagctttaaacatctggtgtccattatttctaagaaagtgttaaggaaattctaaaaagaaaacatttagggaataaagaagaaactggttagaaattactcaactggttttgaagaaataaggttagaactcttattccaatgcagaataagaattaaaatacagttccagaaaggagaaattaggatgtacatatttacagagcaataaaatatatctagactcacattgtgtgaccgactgatcatttctctttgtacaggagttcagtggtggaatgaatcttcattttcagaagaatttaaaaaagagagcagttgttttcttttttacttaattaatttaaacccttctattcctaatttagactttaggtgacaccattgaagtaacaagagaaaagattattttaatcatggacagagtttcagccatgcaataaagacacagtgagcatcagcaatgaaggaagccctaaaccaggcacttgagttataacgctagactgtgaaaagcggaaatgcacccatcccatctgaacaggatatggccaggtacctgccgtgacatccagagggaaagcctgtaaacatactttcccgcttaggaactaagtcatctaccacccagaaagatttttcaggggatatgtgagttaatgtttaccgactgctttaatattctaggattaaaaatggaacatcagaaagaagaggctgtgctggaatttggaggccattcaaaaatccagcccagcaagtctaatggtttgttttcaacatttatttaacctccttctgctatcaagaaacctgagagccctctgaggaagtttatagtgaaggaaatggagaaagtgtaccttgtttttgagttgttttgttaaagctcctagatagcaaaagtgtgtgtttgataactaggaacatttgcccagcttgtcgagaggtaataggcttaaatctttgaaccaaccaagattgggtatcttgccatgccgccttagaaaagcaaatgttgttagagcccttgaaataatcttaaattctgtccttgaaatagctataaatgaacttggactccgttcaacataggccagtgaagagaacatgccagggggaaatgtttttgtccaccctggaatggccagctgtcgctgcctgccagcaaacggagggcacagaatggccggatctgtgggaataagcaaacagttctgttttctccacagaaactcatttccctgggcttcatattgacaattgtgagctatatttacaaaggggtttgtatgcaaaagaagcatccactagtgtagtggcaaatatttatcccagcaggtctgggagctacctcacccagcttgctttttatagaaccaggtgataacacatttcaaagagctgatttgagaggcaagtgtttactagcataaaaatgttctttaattagtatttatctcagagtcagggtgacataagttgctacttatgctgatacaagaacagatagagatattcttgtatggagggagaaaggggtagtagacatgccttttggatttggggtatatgtttatattagcttgatttgaccctaaattagctagaatccagtctggtctttggttaacctgtatttaaaatatccttcatggtatctaaagacactgtgccagctttagtcttggacactaagaatgtcaagttgtacactgcataggcaattgaatagatcatctcagttgcttcatagaagttacttttcatcccaatgttgatgagtgggaactttatacatctcccaggagctgattatctcaataactgccaaaagtaagtcattttttacacaaaaaaattcaatggagaaatatcc

SEQ ID NO: 699653 - DNA, 1601 bp, Homo sapiens
tattcaacatgtgtttattgttgacaactgtactgaccttcctcaacatccttataagaggaataaagacaacatgtcatcacgacaattaggataccaccaactaaaagatactatcgtatacaaggtgcttcttatattgtatatggagacaataaattgtgttatttctctaaaaagtgcacatatatatatatatatacacatatatatacacacatatacaatatatatacatatatacacatatatatgtatatatatgtgcactttttagagaaacaacaaaatttattgtcaaataatgtactttgttttataaattttgaaaatatataataatagacctagaatagtagaactggaaggaagctgatacttcatctaacctcttattttaacaatgatgaaattaaggcccagaaatactttgccagccactaaakctctaataggattttaatccaaatgaagctaattcagaaaaacttttatctatttccaataaaatctcagattcttataaccccacagctttgattttgcatctaaaatattgtcaacaaggattcttcttggtttattacaattttcctcagttaagtttttctacaagactgtgtctacatgaaggtaagaccttccacccttctgaatggtgcatggcacatggtatgtgtttaaaaattcttgttgagtaatatttagccatgcttgctcatgcttatacaaaatttaaatacttctattacataaacattagatattttcttggagcatattattgaaggaagaaacaaaatcatgcctatcatatcactatcaaatatcactttaaaaacaatcctttagcattttctgaaacataatgccaagtggatgattcagatagaaacttccggttcatgttgattcttttaggctttgtcatgccttcgtgatggctggtgattgcaggaaacattattttgatcagagaaagctgcatatgggtttgccttccatcctgaaggttcagatcctttgatgctgaacctgagacggaaacagtcttcttaaacaaacttggtccttgggtcttctatggaatgaaagaatcgtatctctgaagtcagtctaaaatctctgagccagtgagtctcaaatagtgaagaatgcacactatcaaatgggataatatgtaatttttaaaaattatagtaaatacaatagaaagcctatttattgttttctgcaatacaatcaatagaaaaacaagctcaagagaatctttgctggttgagagaagcaaaagatcggctagagatgggggtggtggagcgtgtgcgacaatatgtgatccattaatgcctaaggtaggaactggctcctgggaagagtccacagtggggatcaaaactgtcaatcctgtgctaagccttgttagtagcacccagccactactgactgctatttataacaggttctgctggagaatgtgatccatcttcaaggataagatcagatggctcaggaaatggctgtcaaattgtttactttctcatgaccttttctaccaagtcacccagcaggtgctttcagaagagttatcccagaagaga

SEQ ID NO: 699654 - DNA, 1601 bp, Homo sapiens
tattcaacatgtgtttattgttgacaactgtactgaccttcctcaacatccttataagaggaataaagacaacatgtcatcacgacaattaggataccaccaactaaaagatactatcgtatacaaggtgcttcttatattgtatatggagacaataaattgtgttatttctctaaaaagtgcacatatatatatatatatacacatatatatacacacatatacaatatatatacatatatacacatatatatgtatatatatgtgcactttttagagaaacaacaaaatttattgtcaaataatgtactttgttttataaattttgaaaatatataataatagacctagaatagtagaactggaaggaagctgatacttcatctaacctcttattttaacaatgatgaaattaaggcccagaaatactttgccagccactaaatctctaataggattttaatccaaakgaagctaattcagaaaaacttttatctatttccaataaaatctcagattcttataaccccacagctttgattttgcatctaaaatattgtcaacaaggattcttcttggtttattacaattttcctcagttaagtttttctacaagactgtgtctacatgaaggtaagaccttccacccttctgaatggtgcatggcacatggtatgtgtttaaaaattcttgttgagtaatatttagccatgcttgctcatgcttatacaaaatttaaatacttctattacataaacattagatattttcttggagcatattattgaaggaagaaacaaaatcatgcctatcatatcactatcaaatatcactttaaaaacaatcctttagcattttctgaaacataatgccaagtggatgattcagatagaaacttccggttcatgttgattcttttaggctttgtcatgccttcgtgatggctggtgattgcaggaaacattattttgatcagagaaagctgcatatgggtttgccttccatcctgaaggttcagatcctttgatgctgaacctgagacggaaacagtcttcttaaacaaacttggtccttgggtcttctatggaatgaaagaatcgtatctctgaagtcagtctaaaatctctgagccagtgagtctcaaatagtgaagaatgcacactatcaaatgggataatatgtaatttttaaaaattatagtaaatacaatagaaagcctatttattgttttctgcaatacaatcaatagaaaaacaagctcaagagaatctttgctggttgagagaagcaaaagatcggctagagatgggggtggtggagcgtgtgcgacaatatgtgatccattaatgcctaaggtaggaactggctcctgggaagagtccacagtggggatcaaaactgtcaatcctgtgctaagccttgttagtagcacccagccactactgactgctatttataacaggttctgctggagaatgtgatccatcttcaaggataagatcagatggctcaggaaatggctgtcaaattgtttactttctcatgaccttttctaccaagtcacccagcaggtgctttcagaagagttatcccagaagaga

SEQ ID NO: 699655 - DNA, 1076 bp, Homo sapiens
tgcaaccttaatgaacttgttagccctaattgtgtgtgtgtgtataatctttagagttttttagtgcaagatcatgtcatctgcaagtagaagaagttttacttcctcctttctaatctagataccttttatttcattgtcttgcctaattaccctggataggacctccagtgcaatattgagtagaagtggcatgagtggacatacttgtcttgtttccaatcttagaggggaagctttcagtcgatcaccattaagtgtgatatattcattcattctttcattcaacaaatgtttactgagcagcaagttacgccactgtactctgggaatctcttggtgcttataatctgaagggggtgaggtaaggagaaggagtaaccaagagggaagtgaaataaatacaaacaggccaggcgtggtggctcacgtctgtaatcccagcactttgggaggccgaggcaggcggatcacctgaggtcaggagtttgagaccagcctggccaacatggtgaaaccctgtctctactaaaaatacaaaaattagccaggtatgatggtgcgcacctgtaatcccagctactcatgaggctgaggcrggagaattgcttgaacccgggagacggagattgcagtgagccgagattgcgccactgcactccagcctgagcaacagagcaagactccatctcgcgggggggaagtggggaaagaaagaaatacaaacaagtaaggtgaatttaaatagcatgacaatacatgtggagaagaaaataaagtaggtcaagtgatcttgactcaggaaggtgtcttcaaggaggtagtatgagcagaggcctgaatgaagggagtcagccatgcacatatcctagcaaagtttaacgtggaggaaggagcaacagaagcaaagctcttgaggctggaacgagcttgttgtaagaatgagatggtagctgagtgaatgagggtgccagaggcaggccaagagctagaggagggaggctgggtctccctgggtttaatgctgcccacccattaaaaagtgttaaaacttgaactttttttgtgtcagtttt

SEQ ID NO: 699656 - DNA, 1076 bp, Homo sapiens
tgcaaccttaatgaacttgttagccctaattgtgtgtgtgtgtataatctttagagttttttagtgcaagatcatgtcatctgcaagtagaagaagttttacttcctcctttctaatctagataccttttatttcattgtcttgcctaattaccctggataggacctccagtgcaatattgagtagaagtggcatgagtggacatacttgtcttgtttccaatcttagaggggaagctttcagtcgatcaccattaagtgtgatatattcattcattctttcattcaacaaatgtttactgagcagcaagttacgccactgtactctgggaatctcttggtgcttataatctgaagggggtgaggtaaggagaaggagtaaccaagagggaagtgaaataaatacaaacaggccaggcgtggtggctcacgtctgtaatcccagcactttgggaggccgaggcaggcggatcacctgaggtcaggagtttgagaccagcctggccaacatggtgaaaccctgtctctactaaaaatacaaaaattagccaggtatgatggtgcgcacctgtaatcccagctactcatgaggctgaggcgggagaattgcttgaacccgggagacggagattgcagtgagccgagattgcgccactgcactccagcctgagcaacagagcaagactccatctcgcgggggggaagtggggaaagaaagaaatacaaacaagtaaggtgaatttaartagcatgacaatacatgtggagaagaaaataaagtaggtcaagtgatcttgactcaggaaggtgtcttcaaggaggtagtatgagcagaggcctgaatgaagggagtcagccatgcacatatcctagcaaagtttaacgtggaggaaggagcaacagaagcaaagctcttgaggctggaacgagcttgttgtaagaatgagatggtagctgagtgaatgagggtgccagaggcaggccaagagctagaggagggaggctgggtctccctgggtttaatgctgcccacccattaaaaagtgttaaaacttgaactttttttgtgtcagtttt

SEQ ID NO: 699657 - DNA, 661 bp, Homo sapiens
atgctcccatttgctttttttcctcaagcaggtgagaaatggtacataaatggcacatcaatgcctaaccaaatttgtcaaaattttgcttgtctgtaatcatatgacaaaatcttagtattacaaggacattatctttttttataaacctttcttatcagagggtactgccggacaagaagtaagatatctttaacctagccaatgactggcttcctttgtttttctatcttagccaatcttctttctttgaaacatgrtatttgctatttaaggaatctcgtaaaaatactaggcatttttagagttccacatataaaaacattgatcacagtgtatttaaaattcttacttaaattagagttttagacatttttgttaagaaataagaattttactcttatgattatttttctgttatttagggatatatgtacatgagacctaaattttagaaatcagtttgatattgagtcactcggtaggaaatgaaaattgagctttaatttattttcctatttttttctgtttctttttttaactttaagcatcatgtaatgatattgaccaggactctcattttttgaaataccccattaaaagcattatttaacgtaattgattaatgaatgatacaaacagccactaagagagtaccttg

SEQ ID NO: 699658 - DNA, 1502 bp, Homo sapiens
tcagctaatgacttgtgaaaagataacatgcaatgaccaagtttgttttatttcaggaaggcaaagtaaatacaaaaattgtgaaacttataaaagttgttcatcatattacattgagaagatcatgttaaactcttttattctgattactgttttctaattctaattttaattttcttaatgtttgtttcttatattttgcaggtacgtttttatgtgcattcacatttagaatggaggagtacattcacttggatttatccctttttcattatgaaatatatctctttgtttttagcaatgtttgttctaaagtctactctatctgatattgctatgactgcactagcttttcttggttagggtttgcatggtatgtcttttctcatcctttcatttttaacaactctgtgttcttacgccccaacttgtgagtcttaaacaggatatagcttggttttgtctttatactcaggctgccaatctttgcttcttggagcatttactcatttatatgtaatgtaattactgttatattgtgtttattgtcctccatttttttttctgtttctacttgacccacttgtttcatattctttggcctctcctgtcttgacttcttttaaatcaatcagacttttcattattctcattctttcctttattaatttattgttatttgttattttattattcttttagtttttaccctaaagattacatcatttattgatgtgttaatgtctaaaataagttattgcctttccacttctctgattatgctcaaaatctgagacattctaagtccacttaaatgggtatattccattatacccatctaatgagttctaatcttaatgtattttaagtttttctaatttccattcatttcttcttttgattatatatatatatttgcttcttcttttgcagtcttgctgtcatatattttaattttccatgtttcaaacctcatattattaataccattatcttttttttttttttttttttttgagatggagtctcgccctgtctcctaggctggagtgcagtggtgtgatctcagctcactgcaagctccgcctcctgggttcatgcgattctcccacctcagcctcccgagtagctgggactacaggcgcccgccaccatgcctagctaattttttgtatttttagtagagacggggtttcaccatttacaggatggtctcggtctcctgacctcatgatccgcctgcctccattatctttttatacagttgatttcagtccatgtrcatatatagtcactgctttgctttcttttccttctttcaattctgtgattccctgcagaattttttttgtattagactcaactatatgaacttgctattattcatcagttttcatcaacacaagcatcactatcatatagttcaacctaatattaccttaacgcatttgtctgaataacctgtgtaacttttataagatggagtcttgctttgttgctca

SEQ ID NO: 699659 - DNA, 863 bp, Homo sapiens
gtcttggtgtccaaagacatcttcttttatgggcctggctcccataggcacctgagtttgagattcctggatttataggagtctcggctctgaccccaaggtcctgtggggctttcagcttgtcccttacttactatgggcctcaatttcctcatctgcccaatgaacaccatctctactaaaaatacaaaaattatctgggcatggtggtgcgtgcctataatccagcaactcaggaggctgaggcaggagaatcacttgaacccaggaagtcagaggttgcagtgagctgagatctcaccactgyactctagcctggcgacagagtgagactctgtctcaaaaaaaaaagttgctttctgtttctcttccaactcttgtcttccaggtggtgatggaagactagtttggggatgttttcaggtttgcaatcatacttcagggaactcccctgcttcctgtcatgcaaaggagctttcatttctctagatgtcagggtgggtgggtgtgagagagacagtgggcaggaccaaagtcaaactagcaagcaggtgggcgagaagctgccaggggcagagagaagcccgcagcctccaccccacaccttacttctattccctaggcctcctggtgatccctgaggtgacctttggccctcagtccctctaaggcacatcaaggccggaggtgaggcaggtgtgattccagggccgctgccgggaaatagttcccccacacccatcaaagcctggtgcctgaaaggtaactggttgtctggtggctctggagagagagatccaaggtgggaaggcgctcaggcctcccaaaaaagcttccagcactgaggcggactttgctcttcc

SEQ ID NO: 699660 - DNA, 863 bp, Homo sapiens
gtcttggtgtccaaagacatcttcttttatgggcctggctcccataggcacctgagtttgagattcctggatttataggagtctcggctctgaccccaaggtcctgtggggctttcagcttgtcccttacttactatgggcctcaatttcctcatctgcccaatgaacaccatctctactaaaaatacaaaaattatctgggcatggtggtgcgtgcctataatccagcaactcaggaggctgaggcaggagaatcacttgaacccaggaagtcagaggttgcagtgagctgagatctcaccactgtactctagcctggcgacagagtgagactctgtctcaaaaaaaaaagttgctttctgtttctcttccaactcttgtcttccaggtggtgatggaagactagtttggggatgttttcaggtttgcaatcatacttcagggaactcccctgcttcctgtcatgcaaaggagctttcatttctctagatgtcagggtgggtgggtgtgagagagacagtgggcaggaccaaagtcaaactagcaagcaggtgggcgagaagctgccaggggcagagagaagcccgcagcctccaccccacaccttacttctattccctaggcctcctggtgatccctgaggtgacctttggccctcagtccctctaaggcacatcaaggccggaggtgaggcaggtgtgattccagggccgctgccgggaaatagttcccccayacccatcaaagcctggtgcctgaaaggtaactggttgtctggtggctctggagagagagatccaaggtgggaaggcgctcaggcctcccaaaaaagcttccagcactgaggcggactttgctcttcc

SEQ ID NO: 699661 - DNA, 1336 bp, Homo sapiens
gaccacaggtgtgcaccacaatgccaggctgattttttttttttttgagacagagtgttgctctgttgcccaggctagagtgcagtggcatgatctcggctcactgcaacctacgactccgtggttcaagcaattatcgtgcctcagtctcccgagtagctgggattacaggcatgcaccacacccagctaatttttgtatttttagtagagacagggtttcaccatgttggccaggctggtgtcaaactcctggcctcaagtgatctgcctgcctcggcctcccaaagtgctgggattacaggtgtgaaccactgttccggcctgagccactgtgcctggccctggctaatttttaaattatttgtagagatagggatctctctatgttgctcaggatggttttgatctccagtgctcaagtgattctcctgcctcgacctcccaaagtgccggaattacaggtgtgagttaccgcgcccagccagctatggtttttgtaaccttgttttggcattttttttctgactcgtcaaagaatatttcggcaactttggagtggccaggcttccctttcccatgcgcagcaggaagtccaggtgggaatggggagaggctgggagatccctcaggtcggcggctttcagagctctccaggccacgcctctcagtggccagcaggtggcagttctgagccttccacctggccaccctccttcctccacccccggggtgcccgtccccccagtccacataccacagagtcccaggtggctggagagagctcctggcttccaggccctgggccattctgagaagctggatgaggcagcctagtggccatccagctgcccctgcctgggactgcctgcctaccccttcccatccttggctccatgctaaaggaaggtgggcttcctggaggagctgacatcttaagtgagacctgcaggacaataaaggatttcaggcagagggaacggaatatgcccaaatccagagaatccagaccctgtgctttcaggaactggcaggaggctgatgtggctagaatgcagactgttgggcttgggagagggactagggaggccaggtaatgcttggcactstgggagcagcaggaccagggcagcccgagtctagacattatcttgagggcagtaaggagccctcagcccattctaacccatcagagttggcctccggaaggatcgccatggctgcaaactgcctagcctctcatcgcccctcacccgctgtcactcacacacctgggcctcctaccgtgctggccaggaaagagctgcaagtcctcgggcccgaggctcggcaggcag

SEQ ID NO: 699662 - DNA, 632 bp, Homo sapiens
gctggctggtgagtgggcacattacaggaagccactcctacacaccctttagttttgaaaccacattttaaatgtagaacatacatcagtaactattttctttttataacatttctctgaaccaagtcacaaaatacagaagcatttagagtaacacacaaatctacaactacttttaattatattctatatagagtaaatcacatgaatatgccactaatttcctcctcaccagagccattggattttgtgattctgctttcttccaggcctttttaggtaacagtgctaaccaaattacccgattattcataaagctcaatgaaacattagatcatatttattttcaataattaaattcatacccaggtgctgaacaagaaaagcactccttcttacataaaccaaaaccagttttaaaaagacattgctcagaaagagtgaatgtaattgtattagtccattttacactgctrtaaagaactgcccaagactgtgtaatattcagaggtttaattgactcatggttcagcatgactgggatggtctcaagaaacttacaatcatgccggaaggccaaggggaagcaagacaccttcttcacaaggcagcaggaagaagaaataatgcag

SEQ ID NO: 699663 - DNA, 664 bp, Homo sapiens
ccattgcactccagccttggcgataagagcaaaactccgcataaacaaaacaaaacaaaacaaaacaaaacaaaacaaaacaaaacaaaaagcactgctcagatccccttcagaaaatgacttgttgctcttgctgcccaaccaaaaagggtgtgattagctgacaacctatagctagtagttcctttgggatctgcctcaacttttgagccaaggtcacatttttcttggggtagcccttagtcaatgactaagcaagatgttgaagaaataacgtgggcgtctaaaaaggcagtgtttgcactggcgctccccattggacgggtggaatctttgtcaggtttgcaactcagggcagcagctcccctgtccaatccttaattcccttttcctttcagagcaattgctcttccataaatcttttgcactcttaactctgtgtwaacgacctgcttaggctagaagagctctgggctctgaaaaggtaacctctaggttaaaaaatctgattagataatctgatagattctaccatgtagaaaattgttttaagaggaattttataattttgtgagaggatctagaaagactaagggacacatatgtacaagagtaaaagtaagaaaaaaagaaatgcaaataataactgcagataggcaaaaaa

SEQ ID NO: 699664 - DNA, 1239 bp, Homo sapiens
atgagagtttggaattatttacctaagaaaataaggtacatcatgaggagagaaaagccagctatgtgacgacgaacggaatatccaatcggaatagctactgggaagcagctcatgccaccagaggaggagtggccagagtgagtttcccaagtagcgtgagtcacgacagtcttctgtaggaaaacatttttggcaaaaggaggaaattgcaaagcgggaaaacgaaaacagcaaaaacttaagtcactgcagttgtcattatactaggtcaagaaaagagatccaatacttagaatgttacatttcttaaacatgttgggaaagagggaaaaaaaccaaccagtctcctaaaaggattccattaagctcctctatttggattgtacatacattgtctataaatccaaggacacttagaaagatacttgatttctaaaaatttagtttaaattcatggttggagtgcataaaattcagaaatggaaacccagtgactgactgacttgtgatatttttgtctgctcttgkactgaccagtcttgaattcaagcacttatcaagacaggttcaaaaactagttgtaaggtgcttttagatgttgacctttctgctccctctaagcagtgaagctcatggctatttaatacagcttatcagaagtgctattctgtaaaacagccttatggcttacacttttgagatagaaaatgatcaatacttcatggtgatcaataacctattgagttgaactttgcatacgtacattatacattacactcactaaaaaatactctcaattaattattttgctttttcctttttggacaattcctgagctcagcctaacaggtcataattcatttttttaagtaagtcttattctcttttcagggtaacatatacagacctacatctcctccttccattgaatgtgcctaaaagcattctgtcatttacttacaaaatcatacaaaatgattgattgtcctcttaggtgtgacatttgtgtccccctcagacttttagttccctgatcaccaggattgggtatgttgggagagctggcaagaaggaagcaaaggtctagctaaatgtttgtttgtttcaaataaagaagggtgtgtcacatcttgtatccccatcagtaaacataacataaaggtaggggacaggcactggaacgaaggaaccctcccggcctgggtgacgcaggtggaaggcttctggagttaattt

SEQ ID NO: 699665 - DNA, 646 bp, Homo sapiens
tgagtttgtatcttccctgggattagaaaaataaagtttttggccaagtcattctctctcaaagctactatacaaatggttccagaaggtattcaggacagttgctcccaggatttttaaggcctgaaacaaatgtacatttcttctagctaataaattcctcaaataatgagtgaaataggtacaagtactcagttttctctaaaaacaaaacaaaacaaaaacaaaaaactatttggttttaagagttatactcataacaagactttgttttgttttgttttgtttgtctgtgggccttgactaattgatatagtgtttctgtatgagagaacaaaggactacatataggtcaaatattggagattaacaaggtgttgggggaatcacttttgtttgcctgtgtgyccaccctaatcttatcttgaattgtaactcccacaattcctatatgtcatgggaggaacccagtgggaggtgattgaatatgggtgggtgggtgtttcctgtgctattcttgtgattgacagtgaatgagtctcacaagatctgacggtttttaaaaacgggagtttccctgcacaaatttgcttgctggcaaccatgtgagatgggactttctcctccttgactttcgccatgattg

SEQ ID NO: 699666 - DNA, 647 bp, Homo sapiens
tttaccaaatttagattattttcttctatttacccccctcccccacagttacattttgaataaaccacttatcacattctgccttgaattatagttttaatcttatctcatatctcctgatatattatgaaattcctaatggtcacaaataaataaaaatatctctatgttctgaagaatgctcttgtaaagagctttgctcaaaatacatgcttaataagtattttttgtgtttttaatttgtgaatgtagccctttaaatttaccaatttttctcaataatttagtttttaaaacaataaagcatacctcattttagcagcactttgtcaggaagaattgatcatattcaccttaaaaaatattcttgttttgttgtattttgttcaatttaattttagtcatcagtatttccaaatgcatgcaaacataaatctcatttatttttgtatcyccaggtgtcttttaaatatattacttctgttgtatgggacaaccaagataaattataggatattattatgcaagacagagcaacagagtaccattgggccctattcactcgatttttacatgtcttttatgagcttatgggaatttatacattcagaaagagttatgtatcccaactatataaattcactatc

SEQ ID NO: 699667 - DNA, 627 bp, Homo sapiens
gaaaatatttttccaagatatgcatattttgttcaacaaacagcattacatcttctatggtcaataggtagaccattctattttagaagaagccctctgctttttgtttaatgaaatttccctctatggctaagtcacctaatgttcttgaaatatcttatttattagcagtttgtagattctcaagaaccattctgcttggtgtccttcrttggtgtgaaggtatcatgttttagataatgaggataccactgtttaaaaacacaaacacaaaatttcatttcaataattatgtgcaaataaaatatagtatccttggttcaatggattcatcattaattgtattgctaagatgagatctggtgaactggaagacttgcgcttcttatctactctcactggggctccgtttctttgtggataaaacaaaggggttaaaccaaatgatctgcagatttccctttatatctaacattttgtgagtcagtgagtacacactgaatttggaggtgttaggtttgatgacagcttatgctataggcatcccaggcagcaagaaaacttaggagctaacctcctggtcacggggctacgataactttccctgcttccatgctgtaatcctcc

SEQ ID NO: 699668 - DNA, 1544 bp, Homo sapiens
tagcattgcttttatagtgttggatgatgtacatgatcttcagaagcaagatcctatgtaactatgtgtgtgtgatgttcagggggcattagcccagtgctctctttttcaaacaatgatacaaaacagaaacaaaacagaaaatcaccttcaggtttgggaagaatggtcagattctagcctccttccttttcctaagtttttcctaaactgaaaagcactgaaaaatggcctcagttatatagacagccacagtatgtaagactagatctgtgcttaagccagagaaaagaccctcctctgtttcagcagccttcctttctatagaggtagtggaatggaataaactcttcaatatctttttatctatgtttatctatctatctatctatctatctatctatctatctatctatctatctatccatccatccatccatccatagcttctcagccttttggctaagatcagtgtatttatctacatatttgccttccattttctttctagttctcttctcgtccctttcttaattttctttctcttgtattcataataaccttttcatttggttcctaccccaaaccacatgtttgtatatttgttcttataacttctggttattgcagttgtcataattttttgctgactgcctttaacaatctcatcaaacttggatatctttaggaagataaaacaacataaactatcactcatactaaatttcaatatctcaaattaatccaaaacatcataatttttcatgaaatcctgagagttaatgggtcagtaaataattgcatggttttctccaaaaaaaaaaaaagtatttttaccaccaaagtgaacagagaatgtgtatttaccccccaaaagactctgaaaaatatgtgaataattaattcctgcaaacataattctcatcccctggttggaattaatttgactgaaaccttagatgtattcctgagtttttcttgagtctacaaagtctacaatctagtcctaggggtcacagtttgtaacagttcttggaataacaagaaaatcactgcatgtgttcagctcctctttgtctctgtctatgaactttcattggtctaacattttgtcaacagttcatcaaggaaattaatgagcagtctgacagttttagctcatggggccaccatttccatctgtgcggtcttcaagttgtctctctgggaaggagtgaatacacaggattgttttaggggctggatggaagaacagcattcttccatcttcatgagtctaatccaatgatgataacaagcccaagtcattcactctttctcaaaatgtgtttacaaaataatatttgtttgttcaagctctgttgtttgtgcaatgttatggtatatttaccagccaattttcatttccgaagatctttgatagtgagctgttctaactgaaaccacatctttctcaytgttgcacctccactgccagcacagtgtttaattgaacaacatggtacgcagaactttacaaacattaactcatttaatatccaaaa

SEQ ID NO: 699669 - DNA, 1544 bp, Homo sapiens
tagcattgcttttatagtgttggatgatgtacatgatcttcagaagcaagatcctatgtaactatgtgtgtgtgatgttcagggggcattagcccagtgctctctttttcaaacaatgatacaaaacagaaacaaaacagaaaatcaccttcaggtttgggaagaatggtcagattctagcctccttccttttcctaagtttttcctaaactgaaaagcactgaaaaatggcctcagttatatagacagccacagtatgtaagactagatctgtgcttaagccagagaaaagaccctcctctgtttcagcagccttcctttctatagaggtagtggaatggaataaactcttcaatatctttttatctatgtttatctatctatctatctatctatctatctatctatctatctatctatctatccatccatccatccatccatagcttctcagccttttggctaagatcagtgtatttatctacatatttgccttccattttctttctagttctcttctcgtccctttcttaattttctttctcttgtattcataataaccttttcatttggttcctaccccaaaccacatgtttgtatatttgttcttataacttctggttattgcagttgtcataattttttgctgactgcctttaacaatctcatcaaacttggatatctttaggaagataaaacaacataaactatcactcatactaaatttcaatatctcaaattaatccaaaacatcataatttttcatgaaatcctgagagttaatgggtcagtaaataattgcatggttttctccaaaaaaaaaaaaagtatttttaccaccaaagtgaacagagaatgtgtatttaccccccaaaagactctgaaaaatatgtgaataattaattcctgcaaacataattctcatcccctggttggaattaatttgactgaaaccttagatgtattcctgagtttttcttgagtctacaaagtctacaatctagtcctaggggtcacagtttgtaacagttcttggaataacaagaaaatcactgcatgtgttcagctcctctttgtctctgtctatgaactttcattggtctaacattttgtcaacagttcatcaaggaaattaatgagcagtctgacagttttagctcatggggccaccatttccatctgtgcggtcttcaagttgtctctctgggaaggagtgaatacacaggattgttttaggggctggatggaagaacagcattcttccatcttcatgagtctaatccaatgatgataacaagcccaagtcattcactctttctcaaaatgtgtttacaaaataatatttgtttgttcaagctctgttgtttgtgcaatgttatggtatatttaccagccaattttcatttccgaagatctttgatagtgagctgttctaactgaaaccacatctttctcattgttgcacctccactgccagcacagtgtttaattgaacaacatggtaygcagaactttacaaacattaactcatttaatatccaaaa

SEQ ID NO: 699670 - DNA, 1544 bp, Homo sapiens
tagcattgcttttatagtgttggatgatgtacatgatcttcagaagcaagatcctatgtaactatgtgtgtgtgatgttcagggggcattagcccagtgctctctttttcaaacaatgatacaaaacagaaacaaaacagaaaatcaccttcaggtttgggaagaatggtcagattctagcctccttccttttcctaagtttttcctaaactgaaaagcactgaaaaatggcctcagttatatagacagccacagtatgtaagactagatctgtgcttaagccagagaaaagaccctcctctgtttcagcagccttcctttctatagaggtagtggaatggaataaactcttcaatatctttttatctatgtttatctatctatctatctatctatctatctatctatctatctatctatctatccatccatccatccatccatagcttctcagccttttggctaagatcagtgtatttatctacatatttgccttccattttctttctagttctcttctcgtccctttcttaattttctttctcttgtattcataataaccttttcatttggttcctaccccaaaccacatgtttgtatatttgttcttataacttctggttattgcagttgtcataattttttgctgactgcctttaacaatctcatcaaacttggatatctttaggaagataaaacaacataaactatcactcatactaaatttcaatatctcaaattaatccaaaacatcataatttttcatgaaatcctgagagttaatgggtcagtaaataattgcatggttttctccaaaaaaaaaaaaagtatttttaccaccaaagtgaacagagaatgtgtatttaccccccaaaagactctgaaaaatatgtgaataattaattcctgcaaacataattctcatcccctggttggaattaatttgactgaaaccttagatgtattcctgagtttttcttgagtctacaaagtctacaatctagtcctaggggtcacagtttgtaacagttcttggaataacaagaaaatcactgcatgtgttcagctcctctttgtctctgtctatgaactttcattggtctaacattttgtcaacagttcatcaaggaaattaatgagcagtctgacagttttagctcatggggccaccatttccatctgtgcggtcttcaagttgtctctctgggaaggagtgaatacacaggattgttttaggggctggatggaagaacagcattcttccatcttcatgagtctaatccaatgatgataacaagcccaagtcattcactctttctcaaaatgtgtttacaaaataatatttgtttgttcaagctctgttgtttgtgcaatgttatggtatatttaccagccaattttcatttccgaagatctttgatagtgagctgttctaactgaaaccacatctttctcattgttgcacctccactgccagcacagtgtttaattgaacaacatggtacgyagaactttacaaacattaactcatttaatatccaaaa

SEQ ID NO: 699671 - DNA, 1115 bp, Homo sapiens
cacacacacacacacacacacacacacacacacacacacacccccctctccctggaaacacaatgttaccattttcttctctctcaggctagtcggtgataagaactatgtttaaaggccaaaatagaacaaagctaacctccttcattgcaaacgcacaagatgccatttagaaaaacattgatgcaatcaccctggccctgttaaataaggggaccctaatgtggcccgcgatcaaactcacttcctcattaagagcacaagcctaaggtaagacagagcctcctttgtttaaaaagaggctgtgtgaactctgccacgggtccccagacacccctaagtcctctgttctgaacttgcaattaaatcgtaagaaaccaggtaccacagcagcagcagtttgacagtagattctttcagcaccagccagatgtgaaaggctttgaaagggaccaaaagacactcctgttgcccagggaggcaggaaacggtaacctctggtttgcagccctaccatcatctgataatgccgtttctaatatatttcaattcactttaataatagcagctgttttttgcaaaaccaaaggttattgattaacccagagcaagtaggaggtcactatttgatttgttatatttttcagcctaaaatgacttaaaaacagctcaataggaatgctcacatcartgatattttactactttctatgctctttttgaagtgtgaatagagtttcacaaattaaagggaaaaacgttttcttttaaaaaaattgtaggttattttcagagaatttgctctatggagaggcataataaaaaatcttcctccgggaagactgtattatagtgtcactaaattcagttctattcaacctctatcagcaatttggaagatgtagaggatgactttttactgtctgaaattacacaaagcttagagggatatttaatgtaataagctacttcaagatgaaaaattatcttgacattagaatcaataatacaaaatttgtcagcaataaatatgaaaatttacatttaggatttaataatcaattatgcaagaacggaataaaggaggctgggttcctttgaattcatatgagaaa

SEQ ID NO: 699672 - DNA, 1115 bp, Homo sapiens
cacacacacacacacacacacacacacacacacacacacacccccctctccctggaaacacaatgttaccattttcttctctctcaggctagtcggtgataagaactatgtttaaaggccaaaatagaacaaagctaacctccttcattgcaaacgcacaagatgccatttagaaaaacattgatgcaatcaccctggccctgttaaataaggggaccctaatgtggcccgcgatcaaactcacttcctcattaagagcacaagcctaaggtaagacagagcctcctttgtttaaaaagaggctgtgtgaactctgccacgggtccccagacacccctaagtcctctgttctgaacttgcaattaaatcgtaagaaaccaggtaccacagcagcagcagtttgacagtagattctttcagcaccagccagatgtgaaaggctttgaaagggaccaaaagacactcctgttgcccagggaggcaggaaacggtaacctctggtttgcagccctaccatcatctgataatgccgtttctaatatatttcaattcactttaataatagcagctgttttttgcaaaaccaaaggttattgattaacccagagcaagtaggaggtcactatttgatttgttatatttttcagcctaaaatgacttaaaaacagctcaataggaatgctcacatcagtgatattttactactttctatgctctttttgaagtgtgaatagagtttcacaaattaaagggaaaaamgttttcttttaaaaaaattgtaggttattttcagagaatttgctctatggagaggcataataaaaaatcttcctccgggaagactgtattatagtgtcactaaattcagttctattcaacctctatcagcaatttggaagatgtagaggatgactttttactgtctgaaattacacaaagcttagagggatatttaatgtaataagctacttcaagatgaaaaattatcttgacattagaatcaataatacaaaatttgtcagcaataaatatgaaaatttacatttaggatttaataatcaattatgcaagaacggaataaaggaggctgggttcctttgaattcatatgagaaa

SEQ ID NO: 699673 - DNA, 1018 bp, Homo sapiens
gggactttttgtttggttgtttttatctgctttttaagtcaacatgggagcgtcactgtgcattggttaccgaagcctagatgtttctgtggagcccgtgccccaactcctcagggctccttggtcccaagttagtcttaggaacaggctttgtgccccggcctacccccatrtacatacctccccttctggctgcagagacaatgcaaggtttaaataaagtggaaacataattctttgggaatgaagaaagacacaggaagccggttcttccaggtgagctcagtgcagttaaagccggcatgccccgacttttaggagctgtcacatgacctgcatctgtctctgaaatttgctaccaaaagcttgaagatcttccaggagctgacctgccctgggctgtcggccgttatatccgtcacccaggcctgaggcgggatgacgtgatgggaagactcagtcatcatccctcaaaacatttctcaagcaccttctctgggccaggccttaactagatgcagaaggcggccagggatgggacgaggtcctgtgtcaggggccctgtgtgtacatggcagggcattcaggggtagagggagcaggaggtggagcccctggacctgacctgagaccctggcttgcccactgagctccatctcctgacttggaaaagggaacggagcacagcactgtgtctcgggctgtgctgaggataaacggctgcctctccccattcccaggtccctctgctccccactctttcctccgcataccccatcatttaattgctcaggcagctgcctgtttcctcgatgagggcagcgccacatcctggtccctgccatctgcctggccccggggaacctgctgggtctgcagtagttgctcaggaaagacttgtggagggtggagatggaaggaggcattatgtgtttagagcatcccacacggcatccgaaacctcatggcaacccactcgtgtgggctgcagccttagtgtgcctcagtaaaattaatg

SEQ ID NO: 699674 - DNA, 649 bp, Homo sapiens
tgctattttttaaagaaatgagatacaaaacacatctttatatgccaatcattgattatgttaccaataataactttaaccacctggacatttgggagcaatttacatcaaactagtgcttttctggagaaacatttaccatctgcataatgtagaatgatatttcccattaatacctggttcatatctggggtatgtagcaagaatgaaaaagatgtttcttatgaaaggcctgtttcttgacagtatatgaatagtgtaaccattactttgtgttctattgaaatgatcaatagacagacaactttttctgcttataattgccaacaacagaaatgatggacattattatttctgtttgaaaacaaaacctatttctgcagttctatgattctggtttattcgtgctatctaatgaatgcttccaattacaacacataaaaaggacaattttatatcttctggttttcaaataaagtttgcatttcatccaatctggaccttagcartaaaattacggatgtcaaatattttttcaggtaagataattttttttaagcacagcagagcaattttatgtgatacagaaaattcttagaccaaaaggcgagagcttaagctattaatggctcaaacaatttgtattgac

SEQ ID NO: 699675 - DNA, 649 bp, Homo sapiens
tgctattttttaaagaaatgagatacaaaacacatctttatatgccaatcattgattatgttaccaataataactttaaccacctggacatttgggagcaatttacatcaaactagtgcttttctggagaaacatttaccatctgcataatgtagaatgatatttcccattaatacctggttcatatctggggtatgtagcaagaatgaaaaagatgtttcttatgaaaggcctgtttcttgacagtatatgaatagtgtaaccattactttgtgttctattgaaatgatcaatagacagacaactttttctgcttataattgccaacaacagaaatgatggacattattatttctgtttgaaaacaaaacctatttctgcagttctatgattctggtttattcgtgctatctaatgaatgcttccaattacaacacataaaaaggacaattttatatcttctggttttcaaataaagtttgcatttcatccaatctggaccttagcagtaaaattacggatgtcaaatattttttcaggtaagataattttttttaagcacagcagagcaattttatgtgatacagaaaattcttagaccaaaaggcgagagcttaagctattaatggctcaaacartttgtattgac

SEQ ID NO: 699676 - DNA, 649 bp, Homo sapiens
tgctattttttaaagaaatgagatacaaaacacatctttatatgccaatcattgattatgttaccaataataactttaaccacctggacatttgggagcaatttacatcaaactagtgcttttctggagaaacatttaccatctgcataatgtagaatgatatttcccattaatacctggttcatatctggggtatgtagcaagaatgaaaaagatgtttcttatgaaaggcctgtttcttgacagtatatgaatagtgtaaccattactttgtgttctattgaaatgatcaatagacagacaactttttctgcttataattgccaacaacagaaatgatggacattattatttctgtttgaaaacaaaacctatttctgcagttctatgattctggtttattcgtgctatctaatgaatgcttccaattacaacacataaaaaggacaattttatatcttctggttttcaaataaagtttgcatttcatccaatctggaccttagcagtaaaattacggatgtcaaatattttttcaggtaagataattttttttaagcacagcagagcaattttatgtgatacagaaaattcttagaccaaaaggcgagagcttaagctattaatggctcaaacaatttgtaytgac

SEQ ID NO: 699677 - DNA, 917 bp, Homo sapiens
tgttagattgtagttcactatggaaaaatcagttaaaatgcaatgaatggtatatgaacaagtttcatatgattaaacattgaagtttttactgtgaattgaaatatgtacattgtaactcattctgtcctgtttccaatattaagcctaactgaagtagactgactagtgcgcgcgcgcgcgcgcrcacacacacacacacacacacacacacacactccttttcagaaaagtttgtttagtggtagcactgctatttcagttagttgtaagttttgccaaaataatcattttggaaatacatagaaagcatttggcagaagatagtatatttatttgtatattctattcatattggtaataagagttttatgccttttgctaaggagaaattgctggcataaaatttatagttaatgatgtttgtacctattctttccagctttttaaggatactggtacagtaactatagtggcttactcttctaattttctgatgtctctttcctacttcagcccccaaagcaggttacagccaaggtgcaactcagtatactcaagcccagcaaactcgacaagtgacagccataaaaccagccacaccaagtccagctaccactactttctccatctatcctgtatcctccaccgtacagccagtagcagctgcggctactgtggtgccatcctatactcagagtgctacttacagtaccacagcagttacatattctggtaagactgataaactgtgtttaaatgagtaaacaaattaggaagagacttagtagaaactatcttgattgtctttgaaattaccttactcccaataataggaattaaattaattgatagacataaatataggtacataatgtgactgttctgtaaattgtatgcttttttgggggcgtggg

SEQ ID NO: 699678 - DNA, 1712 bp, Homo sapiens
acacaaaggaaggataaatgcttgcagtgatggataccccattcatgcattgtatgcctgtatccaaagatttctttctttttttttttttttgagatggagtctcgctctgtcgcccaagctgtagtgcagtggcgcgatctcggctcactgcaacctctgcctcctgggttcaagcgattctcctgcctcagcctcccaagtagctgggattacaggtgcgcacyaccatgcctggctaattttagggtttcaccatgttggccaggctggtctccaacttctgacctcaggtgatccacccacctcagccggcccaaagtgctgggattacaggtgtcagccaccatgcccagcccaaatatttcatgtatcccgttaaatatatacacctactatacccacaaaaattttttaaatgtttaaatgttttaaaaagacacaaagagaaattgaccacattgcttaaatgtgataccacaagggaagcccgctgaaactttaagatgaccctgactccacatcaagtgctaacagaggaaatggtttgtattttacaactaggactaaaaataagacccattttaagagcactttctcctggagaaaacacacatatcttgaatttaaagatacatatgcaaatgcctcaggccccaggtggtctttacggaagcagtccctgatcagatctctcatccacagcccacgtgcttctgcattacagaggtgggaagacatctgcaacaaatttggcggtgcttctgcacttctgctggagagaagggcagaaaaaaacctttacagatgcaaaacaagaaggcttctcattaggcatttggattaagaactattgctcaagaagccctgagcaaggcctacaagttctgatctctctaacctcctctcctatgactgtcccccttgtccatgggcctctgccatgctggcttccttgacgctccgccaacccttcagacacactcccacctcacgaccttcccgggggctgttccctctacctggacgactcttctctcagacctctcgtatcttcaagtctcggctcaaatgccacctttgcgaggaggaaaaagatttcttttctttcccatgatatttatcacctcctactacaccgtataatttacttaattatctataattcaccccgtttctcctttccccctcaaataagctccaggaatgcagagatctctgtcctgttcactgatgtctatcacaagcacttagtgcctgacacacagtaggagctcgagaagtattttctgaatgaatgaacaaatttcttgacctgaagattcagaagagtaagaagtgggtggaaaggatgatggtgaggggatgaggagaaagaagcgacagcggagaattcccaagggagagacaagcagagactggctgaggccaggccgacccccttttctccccgcagcgctgacgggaggcggacgtaggtgcagggcatcccgccagccgcacccgaggcactcagacgcaggcagcggaggccggcgggcttctgggctcactgagaaagtccagaggcaggacggacccacgcgggctccgagcaggccccgttgggggctccgacccacggccctacccctcccagcagtgcccacaaccccaggtcctctccagaatccccaggggcgttccgggccgcaatcccttctcggctcggg

SEQ ID NO: 699679 - DNA, 1712 bp, Homo sapiens
acacaaaggaaggataaatgcttgcagtgatggataccccattcatgcattgtatgcctgtatccaaagatttctttctttttttttttttttgagatggagtctcgctctgtcgcccaagctgtagtgcagtggcgcgatctcggctcactgcaacctctgcctcctgggttcaagcgattctcctgcctcagcctcccaagtagctgggattacaggtgcgcactaccatgcctggctaattttagggtttcaccatgttggccaggctggtctccaacttctgacctcaggtgatccacccacctcagccggcccaaagtgctgggattacaggtgtcagccaccatgcccagcccaaatatttcatgtatcccrttaaatatatacacctactatacccacaaaaattttttaaatgtttaaatgttttaaaaagacacaaagagaaattgaccacattgcttaaatgtgataccacaagggaagcccgctgaaactttaagatgaccctgactccacatcaagtgctaacagaggaaatggtttgtattttacaactaggactaaaaataagacccattttaagagcactttctcctggagaaaacacacatatcttgaatttaaagatacatatgcaaatgcctcaggccccaggtggtctttacggaagcagtccctgatcagatctctcatccacagcccacgtgcttctgcattacagaggtgggaagacatctgcaacaaatttggcggtgcttctgcacttctgctggagagaagggcagaaaaaaacctttacagatgcaaaacaagaaggcttctcattaggcatttggattaagaactattgctcaagaagccctgagcaaggcctacaagttctgatctctctaacctcctctcctatgactgtcccccttgtccatgggcctctgccatgctggcttccttgacgctccgccaacccttcagacacactcccacctcacgaccttcccgggggctgttccctctacctggacgactcttctctcagacctctcgtatcttcaagtctcggctcaaatgccacctttgcgaggaggaaaaagatttcttttctttcccatgatatttatcacctcctactacaccgtataatttacttaattatctataattcaccccgtttctcctttccccctcaaataagctccaggaatgcagagatctctgtcctgttcactgatgtctatcacaagcacttagtgcctgacacacagtaggagctcgagaagtattttctgaatgaatgaacaaatttcttgacctgaagattcagaagagtaagaagtgggtggaaaggatgatggtgaggggatgaggagaaagaagcgacagcggagaattcccaagggagagacaagcagagactggctgaggccaggccgacccccttttctccccgcagcgctgacgggaggcggacgtaggtgcagggcatcccgccagccgcacccgaggcactcagacgcaggcagcggaggccggcgggcttctgggctcactgagaaagtccagaggcaggacggacccacgcgggctccgagcaggccccgttgggggctccgacccacggccctacccctcccagcagtgcccacaaccccaggtcctctccagaatccccaggggcgttccgggccgcaatcccttctcggctcggg

SEQ ID NO: 699680 - DNA, 1712 bp, Homo sapiens
acacaaaggaaggataaatgcttgcagtgatggataccccattcatgcattgtatgcctgtatccaaagatttctttctttttttttttttttgagatggagtctcgctctgtcgcccaagctgtagtgcagtggcgcgatctcggctcactgcaacctctgcctcctgggttcaagcgattctcctgcctcagcctcccaagtagctgggattacaggtgcgcactaccatgcctggctaattttagggtttcaccatgttggccaggctggtctccaacttctgacctcaggtgatccacccacctcagccggcccaaagtgctgggattacaggtgtcagccaccatgcccagcccaaatatttcatgtatcccgttaaatatatacacctactatacccacaaaaattttttaaatgtttaaatgttttaaaaagacacaaagagaaattgaccacattgcttaaatgtgataccacaagggaagcccgctgaaactttaagatgaccctgactccacatcaagtgctaacagaggaaatggtttgtattttacaactaggactaaaaataagacccattttaagagcactttcycctggagaaaacacacatatcttgaatttaaagatacatatgcaaatgcctcaggccccaggtggtctttacggaagcagtccctgatcagatctctcatccacagcccacgtgcttctgcattacagaggtgggaagacatctgcaacaaatttggcggtgcttctgcacttctgctggagagaagggcagaaaaaaacctttacagatgcaaaacaagaaggcttctcattaggcatttggattaagaactattgctcaagaagccctgagcaaggcctacaagttctgatctctctaacctcctctcctatgactgtcccccttgtccatgggcctctgccatgctggcttccttgacgctccgccaacccttcagacacactcccacctcacgaccttcccgggggctgttccctctacctggacgactcttctctcagacctctcgtatcttcaagtctcggctcaaatgccacctttgcgaggaggaaaaagatttcttttctttcccatgatatttatcacctcctactacaccgtataatttacttaattatctataattcaccccgtttctcctttccccctcaaataagctccaggaatgcagagatctctgtcctgttcactgatgtctatcacaagcacttagtgcctgacacacagtaggagctcgagaagtattttctgaatgaatgaacaaatttcttgacctgaagattcagaagagtaagaagtgggtggaaaggatgatggtgaggggatgaggagaaagaagcgacagcggagaattcccaagggagagacaagcagagactggctgaggccaggccgacccccttttctccccgcagcgctgacgggaggcggacgtaggtgcagggcatcccgccagccgcacccgaggcactcagacgcaggcagcggaggccggcgggcttctgggctcactgagaaagtccagaggcaggacggacccacgcgggctccgagcaggccccgttgggggctccgacccacggccctacccctcccagcagtgcccacaaccccaggtcctctccagaatccccaggggcgttccgggccgcaatcccttctcggctcggg

SEQ ID NO: 699681 - DNA, 640 bp, Homo sapiens
ttttcaggttgttaattattagtgtacagacatgcaactgatttttgcacattgactttgccagtgacatgaacctgtatgtagaaaaccctaaagattgcacaaaaaaaatggttagcttgagacgtaaaccttaggcaaagagaagtttgtgatttgtaagaaatttaaaattaataggattaaaaagagagctgtgggccttgttatgtatttgctttggaagccctctaagaaaatttcaggtcaattttttattctctgccctactggaatgcccccagattatgtgacaatgaggtcttattttaatatgtgcagaatttgttaagactgacattctttgtttcagatttttacatatcagagaattcttgcatttttctggtgatgtcttattcytcttgtgtgggtcccaagtgagccctgatcctctcagatacattttatatactctgttggtgatgaatattttatctctggcaaatactgtccatgtctaattcccttgaggaccttggtatccaatattattgtaattataaaatcaatgttaacactaaagtcaaagagtcatgagcatgccctttcttgcttgtgaagagccatggggagataagcagtctgttcaggatggagt

SEQ ID NO: 699682 - DNA, 1682 bp, Homo sapiens
gaatgttggagaatctaatacttttaaatagtacaaaggtggttgacgaaggtggttttcctcttggcaacccctcaccaggtcaaagtctaaaacaaagtcaagcatgggaactggaggcaagtaagaggaggtctgattagttacttagcaatgaatcatgaggcagtaaaaagggaagtttcttttttagcattcttcagaggacaacccaaataatcattctcattaaatattcttaatgatttttttcatgaattttcccagatgtttcatatcttaaaagaatttgcttcactagcataagttgatagatagtatttgcatgaaaagagctacatgctataaaatattttttaaaaaactaaaaaaaaattatatttgggttaagtaaaayatgagtttatatattcaaaaatgcacgcagtcgtacattgagaaaatatgtagttatatgtgaaaaattgcacctgtgaagatttagaactttggtgacagtgcccttttctaaatcgttacctttcttagaaatatagtacaatatattcttaatgaaatattatttctcaatggtaacacatgatcaaagtttgatctttgtaatatattgaaaactacaaattacacttataccctaaaatagggcatttccaataaacatttgaactacactgccactcatgtcgcatactcaaagttaatagtattaaataatattacattatccaattctgagtctgtcccaagaaattagaagggctttaaactttttttctcagttttccttctcttcatcacagatacagtagcttacaattagctttatagtttcagcctttagtggtagagcctggaaatttttagaactctaacttgagaattagtgatgaaacaaagcatttaaaaataagcccctctttcttgtattattgaaaactattttattatctgttctgtactttgctcttcttctctggggatataaagctatgtgacactgttagagagcattcccaaaactactttatttcctatacatttacgataatctatctcttactttattatataatggcttttatgggcttttttttccttcagggttttcaaattgtatataaaatacactatttcttaaggacattgatagatgtgacaaattatgaattcctttgtgaaatgagtttataaatatgcattttaaaaagttgaacagatttcctgattccagatatcttagaatttatagtgtgagcaagatgttctccaagaaaagatgtagcatgctagtatgtaaattattcactggaatttttcatgtagttcaacccaggattgagaagactggtcataagattttcgggcaagctatttgttgttattgttatacctcacacttagctaatagaatcatatcactttcctctctgattattttttgctcaaaagaaaaaatatatataaaacaaaataggttttattatagaaaaatacagtcattaattgaagttaaccaagatgctgaatttttttaattccacagggaactttatagcagctagaacagattttaataaagcttagcaatttctctttattttcttgagagaactttaacttcttcaagagaatataaataatcatggcaaattgtttaacagatggtgggtggagcaggagtg

SEQ ID NO: 699683 - DNA, 1682 bp, Homo sapiens
gaatgttggagaatctaatacttttaaatagtacaaaggtggttgacgaaggtggttttcctcttggcaacccctcaccaggtcaaagtctaaaacaaagtcaagcatgggaactggaggcaagtaagaggaggtctgattagttacttagcaatgaatcatgaggcagtaaaaagggaagtttcttttttagcattcttcagaggacaacccaaataatcattctcattaaatattcttaatgatttttttcatgaattttcccagatgtttcatatcttaaaagaatttgcttcactagcataagttgatagatagtatttgcatgaaaagagctacatgctataaaatattttttaaaaaactaaaaaaaaattatatttgggttaagtaaaatatgagtttatatattcaaaaatgcacgcagtcgtacattgagaaaatatgtagttatatgtgaaaaattgcacctgtgaagatttagaactttggtgacagtgcccttttctaaatcgttacctttcttagaaawatagtacaatatattcttaatgaaatattatttctcaatggtaacacatgatcaaagtttgatctttgtaatatattgaaaactacaaattacacttataccctaaaatagggcatttccaataaacatttgaactacactgccactcatgtcgcatactcaaagttaatagtattaaataatattacattatccaattctgagtctgtcccaagaaattagaagggctttaaactttttttctcagttttccttctcttcatcacagatacagtagcttacaattagctttatagtttcagcctttagtggtagagcctggaaatttttagaactctaacttgagaattagtgatgaaacaaagcatttaaaaataagcccctctttcttgtattattgaaaactattttattatctgttctgtactttgctcttcttctctggggatataaagctatgtgacactgttagagagcattcccaaaactactttatttcctatacatttacgataatctatctcttactttattatataatggcttttatgggcttttttttccttcagggttttcaaattgtatataaaatacactatttcttaaggacattgatagatgtgacaaattatgaattcctttgtgaaatgagtttataaatatgcattttaaaaagttgaacagatttcctgattccagatatcttagaatttatagtgtgagcaagatgttctccaagaaaagatgtagcatgctagtatgtaaattattcactggaatttttcatgtagttcaacccaggattgagaagactggtcataagattttcgggcaagctatttgttgttattgttatacctcacacttagctaatagaatcatatcactttcctctctgattattttttgctcaaaagaaaaaatatatataaaacaaaataggttttattatagaaaaatacagtcattaattgaagttaaccaagatgctgaatttttttaattccacagggaactttatagcagctagaacagattttaataaagcttagcaatttctctttattttcttgagagaactttaacttcttcaagagaatataaataatcatggcaaattgtttaacagatggtgggtggagcaggagtg

SEQ ID NO: 699684 - DNA, 1239 bp, Homo sapiens
caagataagaaacaaagtcaatttaatattaatatatttctaatttgttaaagcaaaaattgtagtgccatcaaatgacaccaatcaagtgtgtgtatttgagatgatctaggcttaattatttaacaatgaagaatgagaacaatggcccagactctaaataatttgtgaatttcacagtgagcttttgaagttctcattatttaatgacactgtcacgattgaaatacaataaaaaaaagaaaatatcttttctccacattttatgggttttattgctactgttttggcaactcaaatatagcagccatctggttcctctggtaaggcttacaagtggtaacagggtggtccactgtgaaaatcattacgaactgaaagcaatgaactgaaagcattgataagctctcccccacacagtagaggcatagattagtgggtgtgaatgggtgtgcacatacacttgactgagagagagagccacacaaggtcacaggtaaaacaaagacaagaagagagaaatgtgaatttctaaagtacattttttagtattttaccacttatcaagttcattcctcatttttatgtcttattttaatttccttaaaattaaagttttatcatgtggacaatgctagtttgtaaatgtcctcttatttctttctgaggcattctacttaactgttgaaatgctttggttgtgtcttcacccaaatctcaacttgattagttcccataatccccatatgtcaagggagagacctggtgggaggtaattgaatcatgggggtggtttaccccatgctattctcatgatagtgagtgagttctcacaagatttgatggttttataaggggctttttcctcactgcactctgcacttttctttcatgccatcatgtgaagaaggacatgtttgcttccccttctgccatgattgtaagtttcctgaggacttcccagccatgctraactgggagtcaattaaacttcttcctttataaattacccgttctcaggtatgtctttattagcagtgtgagaacagactaatacatctgtcttctgttttatatgattaaaaaatcaggaatgacatttaatatttgatgtaacttttctccttgctctgcaactacacaaccaatgaaaatccaattacaggtgcttccttgagcaaatattaaataacatttgttaagtagttagtatatagcagagtttttgctaaatatttc

SEQ ID NO: 699685 - DNA, 666 bp, Homo sapiens
tattatcattaagctataaagacagcaggcaaatatgaaataatttgggaaatacagtacacataggactatcttatgaaaccttccatataataaaatctaatcraacaggaattgaagtgaaagccattgtaaaaaagaccaatggcaaaccgaactatttaaatatacaaccaagtttaaataaacatggaaattatggttatagaatataaatgcattttaacttaagaggtgaatattacagtatgctgaattaccttaggcctggttccccagaagtaccacctgaaatgcgaaaacaaagtcatttattaaggaaatgctccccagaaatactggcaaggaagcgggaaaggtaagtagggaaaggggagaaagcaaacaaggatacaaaggtgcaatttcaggcaaaactccagcagagcagagatgaggatttctgattaaacacagcaggttgagcacctgtttacctcttctccctctgaaaaatgatgttaaaaggcataaacccacaaggatgaggaggccaggagagaaaacaatagaaaaatgttggaagctagatagtagatgggacaatgccagttctggtcatgatggagtagctggattcatgcttaccttttcacaaaaactgtaagaagtgaaaagatgtattaa

SEQ ID NO: 699686 - DNA, 666 bp, Homo sapiens
tattatcattaagctataaagacagcaggcaaatatgaaataatttgggaaatacagtacacataggactatcttatgaaaccttccatataataaaatctaatcaaacaggaattgaagtgaaagccattgtaaaaaagaccaatggcaaaccgaactatttaaatatacaaccaagtttaaataaacatggaaattatggttatagaatataaatgcattttaacttaagaggtgaatattacagtatgctgaattaccttaggcctggttccccagaagtaccacctgaaatgcgaaaacaaagtcatttattaaggaaatgctccccagaaatactggcaaggaagygggaaaggtaagtagggaaaggggagaaagcaaacaaggatacaaaggtgcaatttcaggcaaaactccagcagagcagagatgaggatttctgattaaacacagcaggttgagcacctgtttacctcttctccctctgaaaaatgatgttaaaaggcataaacccacaaggatgaggaggccaggagagaaaacaatagaaaaatgttggaagctagatagtagatgggacaatgccagttctggtcatgatggagtagctggattcatgcttaccttttcacaaaaactgtaagaagtgaaaagatgtattaa

SEQ ID NO: 699687 - DNA, 667 bp, Homo sapiens
tgctacatacagtacctgttgattatgtcatctcaggctcttgacttggcagccattacatatatcaactagatttgtgaactccagaaaaatgcccatccactctgctttggatcctaccgcaatgttctccatggcagagtataagaagaactgctgttatgcattgataattttgcaaagcatataaatcaaagcatgattgaatgaatgaatgcagtgccatccttattaagctttccttgaatgacttctcccattttttcctatttctttagtggactgtacatatgcatgtggtttttacccactgtaagtaatcttaaacacttattaaagagaagtagtggtaaatgtaagactcctgcctaccaaaacatatagatcctcattgctgtgggtcttacagtgcagtcttggtgagctttcattcatttattcactctgcatcttgtgtgatgcatctcctcagcaccatgtcwtgtatcagatgccaggaacacagagattaacaaaacatggtctcacccatgaaagacattaacattattggtgttattgaatgagaggagctagatagccaggagacatcccaaaccctccaggaaatacattaatggagcaggacccaaaacccaagaggaaattctggccattattgagcctt

SEQ ID NO: 699688 - DNA, 649 bp, Homo sapiens
agattaaatgtccagaatcggtatggaacttaagcaaatttaccagcaaaaaaccaaacaaccccattaaaaagtgggcaaaggaaattaaccaatgctttcaaaagaagaaatacatgtggccaacaagtatatgaaaaaatgctccacaccattgatctttagagaaatacaagtcaaagccacagtgagatatcatctcataccagtcagcaaggctattaataaaaagtaaaaaaataacatgctggtgaggttgtagagaaaagggatcacttataaactgctggtgggaacgtaaattagttctaccattgtggaaagcagtttggtgacttctcaaagaacttaaaacacaattatcatttgacccagcaatcccattattaggtatacacccaaaggactataaattgttttaccataaagacacatgcatgcctatgttcattgcagtgctrttcacaatagcaaagacatggagtcaacctaaatgcccaccaaaggtagcccaacaatggtattgtttaaaaataaaaataatagaaagcaataaatgctgatgcttaagacagaatcatttcttccttctccaaaaataaaaatagaaattaatttttttaatgttatttgaaactttccagtcaat

SEQ ID NO: 699689 - DNA, 595 bp, Homo sapiens
taactcggggacccggctctgagcctgtgatctgaattcctgccattgcacccatcagcttcagtctartgtccaactcagggactgcctctcacggtgagccctccctgaaccttctggcccccacgtccccactcctgatctgccccagattcatctctggctattgggtggggcagaaaaagagtcccctctccaccagggtggggtaagggcagaaagcccccaacagccaggcccagagcacccagttggaagtcccctgccagcccggcctggcttggggagggtcttaccgcttcatgtgctcgctggccactccttggatgtaaacagacattcccacgttgagcccgcccgggatgggctggtagtaaggcagcgtctggagaagaggcctggtgaggggactcacaagccatctgcctgttgcagcctttacccctcccagaaaagccccccagtcccttaagcaggagagaggaaaccatgggggaggaccaggttgaagatgacgagggccaacagttagacgtggacacagacagcctgaggtcagggtaggagtaaatcgagggtcggggtcagctttggg

SEQ ID NO: 699690 - DNA, 652 bp, Homo sapiens
tcttccacaatggttgaactaatttacatccccaccaacagtgtaaaagcatttttatttctccacagccatatgcacattacactttgataaaaagttcaaaagtgtttaccaaaaggaaaaaggaaaaaaaacatatttaaccccagcactgatccccgttcagtacagtggacttaccactccaaggaagtattgccaggatgcttagagatatacagagatctgattttaggcagcctgagccttggacgagtcttagttatttcttgcatgcagcctccatgaaactaagccaaggaggtgtgtgggagagatcctgtgaacaggcaattgcctttgccctgactttctatcttagactgttttattgctctccccaaaactaataaagtgaactcaggaccttggcttcccatcatttccagaatgggagattttgaatccagctaaaaaacacaatgggatgggttcccatcctgaaaaactaagcccctgaacccaggcttgtggraaccccaaggtgtggggtggctggggatgacccatctcagagcagtcaagccttcctgcttgccaacatcactgtcagtgagaatagtctgctgccttcatttcattttcttctaaattccatatttctactaaagca

SEQ ID NO: 699691 - DNA, 816 bp, Homo sapiens
aatgaagaaataatcctaaaccttcacaaacactttaaagcaaaacaaaacaaaacaaaaaaamaagagggtacaattcccaaattatgttatatggctaccacaacacagatatatcatagctagactaggacaatgtatgaaaaaagttacaggctaatcttactcattagtatggagcagaaacctatatcccttcagctaatgacttgtgaaaagataacatgcaatgaccaagtttgttttatttcaggaaggcaaagtaaatacaaaaattgtgaaacttataaaagttgttcatcatattacattgagaagatcatgttaaactcttttattctgattactgttttctaattctaattttaattttcttaatgtttgtttcttatattttgcaggtacgtttttatgtgcattcacatttagaatggaggagtacattcacttggatttatccctttttcattatgaaatatatctctttgtttttagcaatgtttgttctaaagtctactctatctgatattgctatgactgcactagcttttcttggttagggtttgcatggtatgtcttttctcatcctttcatttttaacaactctgtgttcttacgccccaacttgtgagtcttaaacaggatatagcttggttttgtctttatactcaggctgccaatctttgcttcttggagcatttactcatttatatgtaatgtaattactgttatattgtgtttattgtcctccatttttttttctgtttctacttgacccacttgtttcatattctttggcctctcctgtcttgactt

SEQ ID NO: 699692 - DNA, 816 bp, Homo sapiens
aatgaagaaataatcctaaaccttcacaaacactttaaagcaaaacaaaacaaaacaaaaaaacaagagggtacaattcccaaattatgttatatggctaccacaacacagatatatcatagctagactaggacaatgtatgaaaaaagttacaggctaatcttactcattagtatggagcagaaacctatatcccttcagctaatgacttgtgaaaagataacatgcaatgaccaagtttgttttatttcaggaaggcaaagtaaatacaaaaattgtgaaacttataaaagttgttcatcatattacattgagaagatcatgttaaactcttttattctgattactgttttctaattctaattttaattttcttaatgtttgtttcttatattttgcaggtacgtttttatgtgcattcacatttagaatggaggagtacattcacttggatttatccctttttcattatgaaatatatctctttgtttttagcaatgtttgttctaaagtctactctatctgatattrctatgactgcactagcttttcttggttagggtttgcatggtatgtcttttctcatcctttcatttttaacaactctgtgttcttacgccccaacttgtgagtcttaaacaggatatagcttggttttgtctttatactcaggctgccaatctttgcttcttggagcatttactcatttatatgtaatgtaattactgttatattgtgtttattgtcctccatttttttttctgtttctacttgacccacttgtttcatattctttggcctctcctgtcttgactt

SEQ ID NO: 699693 - DNA, 2406 bp, Homo sapiens
actagcatgttaaacctaggtagtttcatttcaggaaagctacctgatgtctccagacagggcaagaggtgtagacatactttgatctgggaagcccagggaacgtgctccaggcccacaccattgtgaaagacagtaaacctgaatgtctgtgttcaagtttaccaaatcctggacaccaacaatcagaaaacatacctttaaacaaaaaggaagcaggtttaatgaaaccgaaaggaaggagcccttcacacagtggttagaaatcagccactggctggggcaatcagaygttaagtaacaattactccactcttttaaactgccttggttttactttatttttttctaattcatactacatttaactgtttaggttatgaaagctgattgtggaagtaggtcaagtgtattagataaattgatgggtgactgatatgcattgggttgtatgtgaacttgggaagcatgatctatttgctgaagttcacactcaagtccccctacagggggtcttctgagtccaatatcagagagacgacatggaaaacatgggagaagaattgattcattcatcagctgggatttagacagacacacccaaaatctgaatttctactttgcccctaatagcaggatagcttggaacaaactccttttgccttgatctgctcacccttttctttttttctgaggcaggatctcactgtgtttcccaggctggagtgcagttgcaccagcacggctcattgctgcctcagccccctgggctcaagcatttctcttgcctcagcctcctgagtagctgggactacaggcatgtgccacaacactcagctaattttttatattttttgtagtgatggggtctcaccatgttacccaggctggcatccaacgctgggctcaagaggtccttgtgcctcaacctcccaaagtactgggattacaggtgtgagccaccacgctgggacttcggctcacctttaaaatggggttatgacaacaattcctcatgaaaggagtgaagatggaaagattccacaaaactgaatgtcactaggcacactgaaggaactcaatagagtttcttctccctttttcattacacgttatggagagagaaaggcctaagaagcagatgtggaggcttggaggaaaataagaaacataaacacgcacacagaccaggagagagactcaagcaaaagacagacaaactatgttgaaatgacacattccacaccggagccaggggcttctctgccagtgctctcttcttccttttcccattttttttttttctgaaatgaagtctcactctgtcacctaggctggagtgcagtggccatgatcttggctcactgcaacctctgcctcctgggttcaagtgattctcctgactcagcttcctgagtagctgggattagaggcatgccccaccacgctggctaatttttgtatttttagtagagatggggtttttccatgttggccaggctggggtctcaaactcctgacctcgggtgatccacccacctcagcctcccaaagtgctgggattacaggcgtgagccacctcgcccggcctcatcttccttttcttaaagaacaaatacagttatgcttgtaacacatgctttaaacccttggaatcctcccatgcatattctagcagactggtagaaagtggaccagagacacagctacacttcgatcatagaaaatgtttggttacttgagtctgtcggaaaacatgatgccagccttccacaatagaactaagcaactccaattttatcattatgatggacattgaggttggttatagttttaaaaataccctttattgaacctgaaatttgtaaatgtttattatagaaaatttggaaaatacatttaactaataagaataaaatgaaatctgtctatacccatttcccttttaatcactttaaatattttgatgtatttccttccatctattgtactttcatatgtacacagttgagattatattgtgtcattcacccaattttactcattaatattataaatattcctccaaatcgttataaacttttagacaacaaatatattatggctataggctattccactgaatgtatctgccataaattatttcaccatttccctatagttggacatctgaggacattccatttttattttatgataatagtaaacattatgacaatgacaaatatcttgctgcataaaagttattttattgatgcttttcgggttttcttttcttcataattattggtacaattgtaattaccaggtcaaaggacattactatttttagacttattctgtgtgtgtgtgtgtgtgtctaattaaattcattttctaaagcattgcaccactatatactctcag

SEQ ID NO: 699694 - DNA, 2406 bp, Homo sapiens
actagcatgttaaacctaggtagtttcatttcaggaaagctacctgatgtctccagacagggcaagaggtgtagacatactttgatctgggaagcccagggaacgtgctccaggcccacaccattgtgaaagacagtaaacctgaatgtctgtgttcaagtttaccaaatcctggacaccaacaatcagaaaacatacctttaaacaaaaaggaagcaggtttaatgaaaccgaaaggaaggagcccttcacacagtggttagaaatcagccactggctggggcaatcagacgttaagtaacaattactccactcttttaaactgccttggttttactttatttttttctaattcatactacatttaactgtttaggttatgaaagctgattgtggaagtaggtcaagtgtattagataaattgatgggtgactgatatgcattgggttgtatgtgaacttgggaagcatgatctatttgctgaagttcacactcaagtccccctacagggggtcttctgagtccaatatcagagagacgacatggaaaacatgggagaagaattgattcattcatcagctgggatttagacagacacacccaaaatctgaatttctactttgcccctaatagcaggatagcttggaacaaactccttttgccttgatctgctcacccttttctttttttctgaggcaggatctcactgtgtttcccaggctggagtgcagttgcaccagcacggctcattgctgcctcagccccctgggctcaagcatttctcttgcctcagcctcctgagtagctgggactacaggcatgtgccacaacactcagctaattttttatattttttgtagtgatggggtctcaccatgttacccaggctggcatccaacgctgggctcaagaggtccttgtgcctcaacctcccaaagtactgggattacaggtgtgagccaccacgctgggacttcggctcacctttaaaatggggttatgacaacaattcctcatgaaaggagtgaagatggaaagattccacaaaactgaatgtcactaggcacactgaaggaactcaatagagtttcttctccctttttcattacacgttatggagagagaaaggcctaagaagcagatgtggaggcttggaggaaaataagaaacataaacacgcacacagaccaggagagagactcaagcaaaagacagacaaactatgttgaaatgacacattccacaccggagccaggggcttctctgccagtgctctcttcttccttttcccattttttttttttctgaaatgaagtctcactctgtcacctaggctggagtgcagtggccatgatcttggctcactgcaacctctgcctcctgggttcaagtgattctcctgactcagcttcctgagtagctgggattagaggcatgccccaccacgctggctaatttttgtatttttagtagagatggggtttttccatgttggccaggctggggtctcaaactcctgacctcgggtgatccacccacctcagcctcccaaagtgctgggattacaggcgtgagccacctcgcccggcctcatcttccttttcttaaagaacaaatacagttatgcttgtaacacatgctttaaacccttggaatcctcccatgcatattctagcagactggtagaaagtggaccagagacacagctacacttcgatcatagaaaatgtttggttacttgagtctgtcggaaaacatgatgccagccttccacaatagaactaagcaactccaattttatcattatgatggacattgaggttggttatagttttaaaaataccctttattgaacctgaaatttgtaaatgtttattatagaaaatttggaaaatacatttaactaataagaataaaatgaaatctgtctatacccatttcccttttaatcactttaaatattttgatgtatttccttccatctattgtactttcatatgtacacagttgagattatattgtgtcattcacccaattttactcattaatattataaatattcctccaaatcgttataaacttttagacaacaaatatattatggctataggctattccactgaatgtatctgccataaattatttcaccatttccctatagttggacatctgaggacattccatttttattttatgataatagtaaacattatgacaatgacaaatatcttgctgcataaaagttattttattgatgcttttcgggttttcttttcttcataattattkgtacaattgtaattaccaggtcaaaggacattactatttttagacttattctgtgtgtgtgtgtgtgtgtctaattaaattcattttctaaagcattgcaccactatatactctcag

SEQ ID NO: 699695 - DNA, 869 bp, Homo sapiens
ttcaggcacaagagctgagatcgctgacaaggccagcttcacttctccaaagaatccagcccctgcctgcctccctgtgagcaraaactgcacagcttagggctcctcctttgttaattaggatcaaatctcaatccctgataacccaaagaaaggaaaaggcagccagtcaggctaagaggctgtaaaagaacttccgctaatcctcccaaagcactcaagagaaggctttctgccaagtcagggtcatttaatgtattcacctttggaaaagatattaaaaatgattaagttcattaaaaaagaaagaaaagaaacctcctctaaagcaatgacctctactcagcagctgtgataaaacaagtaccttttcttaggatctgaaatgtgctaaaaatttcaacaaaactatgtagaaaggcaaggtacacccacaccagggagtgaatctttctggctaccaaaccagcaggagtcagaagcaaacatcactctaggcttggtgctacagagggatcagaagggggtaatatagtctctgtcctcaaatatcttacagtctggagaaagagatgacacatatacggaagataaactacctgattcgtacagagtggacacagtaagagatccctggagaggggacttaacgtgctgaaccttaaatgaggagttgaatttggaagagcagggaggaagatgagacattccaggcacagaatattttgagccagtgcaggaaatttacaataagggaaatgcatgtctggcccagagggaaagtgggtaagacagatggagtctttaagagcttaaacaccaaccaacgagctgtgaggttgctgtaaacatcagggcaagtgtatttt

SEQ ID NO: 699696 - DNA, 625 bp, Homo sapiens
cgaggggaccacagaaggagtgaccaacagagagaaaggcagacacatacagagggagcgagcgaggagagagacagagacacagagacccagagagagatgagaagacgcaaagggagatcgaggcacgtgcaccgcattgggtgcacacccggacagagatgcagagagcagcaatgagacagaaacagacagagatggagaaagggagaaatatgtgggcagagaaagagacacacgtgtgtgcacacacgcatgcatgcacagacacacacatgtgcacgtgcactcacacacagggaggagggtgcccgagaagctggagaggagagaggcgagcgaggggagcccgaaatagcccaggggaggcggtagcagcacacgtggcccttcccgcctcgccttgctcttttccaggaggcccctacaggggaagtgactccttgaggcctcagccccgggggagtggctgcgccccatccagacggatgaagaagrccagaccctccctcatctgactctgccctccagtccccctctgtcctcccagttggcagcagtgggtgggtgcagtgtttggaggatgggggcttcgtttcatcactgacccctcttcatgttgccc

SEQ ID NO: 699697 - DNA, 611 bp, Homo sapiens
ttccacaaaaatccagatactcaggttcccatcccttccctttaacatttttgtagggctgcttaagatccactgccagccgggcacagtggctcaggcctgtaatcttagcactttgggaggccaagacaactggatcacctgaggtcaggagttcgagactggcctggccaacatggcgaaaccccgattctactaaaaatacaaaaaaaaaaaaaaaattagcggggggcatggtggtgcatgcctgtagtcccagctacttgggaggctgagacrggagaattgcttgaacccaggaggcagaggttgcactgagctgagattgtgccactgcactccagcctgggcaactgagtgagactccatctcaaaaaaacaaaacaaaacaaaaaaaaccactgccacttataagtgtacttgtgctggcaagagagcaacagtggatggaggtcacagtgttataggagttcccagacaatgggatcatgccatcatctactacaaatgatgtgcttatgggtcggcttatgtaagaaatgagtcagatggcatctggggatcccatgccatttctctgataagtctggacacaaattatgtggggacca

SEQ ID NO: 699698 - DNA, 611 bp, Homo sapiens
ttccacaaaaatccagatactcaggttcccatcccttccctttaacatttttgtagggctgcttaagatccactgccagccgggcacagtggctcaggcctgtaatcttagcactttgggaggccaagacaactggatcacctgaggtcaggagttcgagactggcctggccaacatggcgaaaccccgattctactaaaaatacaaaaaaaaaaaaaaaattagcggggggcatggtggtgcatgcctgtagtcccagctacttgggaggctgagacaggagaattgcttgaacccaggaggcagaggttgcactgagctgagattgtgccactgcactccagcctgggcaactgagtgagactccatctcaaaaaaacaaaacaaaacaaaaaaaaccactgccacttatmagtgtacttgtgctggcaagagagcaacagtggatggaggtcacagtgttataggagttcccagacaatgggatcatgccatcatctactacaaatgatgtgcttatgggtcggcttatgtaagaaatgagtcagatggcatctggggatcccatgccatttctctgataagtctggacacaaattatgtggggacca

SEQ ID NO: 699699 - DNA, 611 bp, Homo sapiens
ttccacaaaaatccagatactcaggttcccatcccttccctttaacatttttgtagggctgcttaagatccactgccagccgggcacagtggctcaggcctgtaatcttagcactttgggaggccaagacaactggatcacctgaggtcaggagttcgagactggcctggccaacatggcgaaaccccgattctactaaaaatacaaaaaaaaaaaaaaaattagcggggggcatggtggtgcatgcctgtagtcccagctacttgggaggctgagacaggagaattgcttgaacccaggaggcagaggttgcactgagctgagattgtgccactgcactccagcctgggcaactgagtgagactccatctcaaaaaaacaaaacaaaacaaaaaaaaccactgccacttataagtgtacttgtgctggcaagagagcaacagtggatggaggtcacagtgttataggagttcccagacaatgggatcatgccatcatstactacaaatgatgtgcttatgggtcggcttatgtaagaaatgagtcagatggcatctggggatcccatgccatttctctgataagtctggacacaaattatgtggggacca

SEQ ID NO: 699700 - DNA, 1197 bp, Homo sapiens
ttaaccagaaggcagtacggagaggaaaaagtgtaaaggctctctcagtagcagaagagaatgaaaaagggagaaagtttggaacagaggagtgagggaaagtaaggcttaagacgaggcaggagaaaggagcaggagtcttggccaaaataaagatttgggttttgttccctaagccaggaaatgacatgatyagatttgcttttaaggatccttccaaactgctaaagacatgtagatcaagtattcattggctgggcgcggtagcccacgcctgtaatcccaccactttgggaggctgaggcgggaagatcccttgaggccaatagttctagaccagcctgggcaacacagtgagatcccatctctctccatttatttattttaaaaagagactcaggccgagcgcggtggctcacgccagtaatcccagcactttgggaggctcacgaggtgaggagttcgagaccagcctgaccaacatggtgaaactgcagtctctactaaaaataccaaaattagccagtcgtggtggcgcgcgcctgtaatctcagctacgcaggaggccgaggcaggaaaatcggttgaacccgggaggcggaggttgcagtgagccaagatcgcgccactgcactccagcctgggcgacagcccaagactccgtctcaaataaacatataaaaagaaagtcaaggttattcattgcctcccttggagactgtactcccccccaccatgtcaatcaacaaatatctgaacacctattttttttttttttttttttttttttgagacggagtctcgctctgtcgcccaggccggactgcggactgcagtggcgcaatctcggctcactgcaagctccgcttcccgggttcacgccattctcctgcctcagcctcccgagtagctgggactacaggcgcccgccaccgcgcccggctaattttttgtatttttagtagagacggggtttcaccttgttagccaggatggtctcgatctcctgacctcatgatccacccgcctcggcctcccaaagtgctgggattacaggcgtgagccaccgcgcccggcctctgaacacctattacatacggggatacagctaagaacttttcacagagacccccgcccctaacaaaactttacctaaaagggttgggagcatgtcctactctagtttcattccccgtt

SEQ ID NO: 699701 - DNA, 582 bp, Homo sapiens
tcaggaattaaaggaaactgtgagattcctgctcaggagaaatacatacctactctccaagtgtgagcagccgccatggagttcttgggacattactaagctggtgaaacttttatccagcctcgtatcatctcacttggagggtcaaggctgtcatcagcagggagagcgccactgggcacgtggtaaacttcagtagatttcagtaacgaatcttccatctgcctcccactcccttgcatatgtcttactttcttactcattcataaccgacaggcctgatacaaccttctggttgttttaatttccttaagcttctagtatagagttgatagctttgttctccttgatgacttgtagacaatctttctctatctggtgaaacaaagtacaggattaagaaaaaaacacaagccagatgtgggtcacgcctgtaatcccggcactttgagaggccgaggtgggcagattacctgaggtcwggagatcagggccagcctagccaacatggcgaaaccctgtctctactaaaaatacaaaaattagccaggtgtagtggcgggcgcctgtaatcccagctac

SEQ ID NO: 699702 - DNA, 650 bp, Homo sapiens
tctctactaaaaaaaaatacaaaacaattagccgggcgtggtggcgggcccctgtagtcccagctactcgggaggctgaggcaggagaatggtgtgaacccgggaggtggagcttgcagtgagctgagatcacgccactgcactgagggttctgtgagagtcagtaaaggttaaagccatttatatgtgtatggtccaaccatayacaatcggccctccatatccgcatgtcccacctttggagattgaacgaagagcgggttgaaaatacagtgttgaggtatggtggctcacacctgtaatctcgcacttcaggaatccaagcaggaggatcgcttcaggccaggagttcaagaccagcctgggcagcatagagacctcctttctactaaaaatttgggggaaaaaaaaaattagctgggcctcggggcccgcacctgtagtcccacctactcaggaggctgaggcagagggatcgcttaaacccaggaggtcgaggctgagtgagctataatccctccactgcactccagcttgggtgacagagaccctgtctcaaaaaaaaaggggggaaagaaaaggaggctgggcgcagtggctcactcctgtaatcccaccactttgggaggccgaggcaggcagatcacctg

SEQ ID NO: 699703 - DNA, 2198 bp, Homo sapiens
tggcagataataggcaagcagtaaaatttcagtgaacttgctagctgtcttttcattctgactttttatatcaaagtaattggtggacatttgctagtagatgaaactaatctggatagctaagcttacttattacagaatatgctttttacatatctcagcatttccaaatttcataaatgttaatgttaattaaatacatactttgaaggaaaaggaattcccttagatagcatatgttacagttcagctgtttttgaatattgtgtaaaagctttataatgactacacgctggaatgtcatattctttcccaaattgttggtctgatgccaacttgtgtgatttgctagtgtttggttcacatgcccagggaaaatgtcaaatattttctaaattaagttgtttcaattatgtaactacctcctttaccttagtatcagttttctctgccattatactgaatgtcatatgagaaagctatttagttttaaagtcacctgtattagccagttttcatgatgctgacgaaggcatactcaagactgggcaatttacaaaagaaagaggtttaatggagaactcacagttccaagtggctggggaaacctcacaatcatggtggaagggcaaggaggagtaagtcgcattttacatggatgacagcaggcaaagagagagcttgtgcagggaaactctagtttttaaaaccatcagatcttgtgagacttattcactatcataagaaaaacataggagagacctgcctccatgattcaattacctcccaccaggtccttcccacaacacgtgggaattcaagatgagatttgggtagggacacagccaaatatcattatcaccaccaatcttttaactattcaaaatcaagtcattctttcatgctttcaaattatatactacgaattttttgtcagacacaaatatagcagaatatatttttaaaaaagttccaccgccactatataattgtaatacagagagattgatgccccatttattgaattactactatgtgccaagaacaggtgtwtcagagggtaccagccagctaattgaggaaggtttggtttcctttcaaagataatattttaaaaggtcttcatatggtataagagaccacaagggatagtgcagaatgcacaagctcattgcaactgtaatgctgcaactgggccaaaaaggatatgacaaaggaggaaatcagaaatcagaaggacccagtcacataaagtcttactagtcaaaatgtggttcacagactagcagtattgacttcacctggaagctacatggaaaagaaacaatctcaggcccaaccctagactggcagaataaaacctatattttcataaattcccaagttgatttgaatgcatgttaatgtttgacaaatactagggtacaggatgcctctttgaaatcagtaactctgggtcaagaacacagccagctgaaggtgatctcatagggagaaaaactggggaataagtatcctgccattactgtcctccataacttccttgggtctctgtaggggtcctcattagccaaatataacaggaagcagggagtaaagtgaactgttagtgtggtttatgaagatccactgcccaaggcagagaattcaagggggcaaagtagaaaaggaatctggaatgacaggtggaaaagatctagaacaactaggctaggccattaaaaatgtaaagatgaaatacagtgtcctctgacttcaaatattccaaaacatattttgcaatttttttttctcataggcactcttaatattggaattgtgaccaaaggtaatactattttaatacaatgtccaatagccttttcatcctgaagatacttagcacatcctttggttttaaataaaaatatttttaaaaattgtcagaactaggtaacctagttaagattattacatatattctcctgttcggcttcacttttagaatcagttttaattttttctcttaccttttgggagtgagtccctcattactgtgtgatttcttttgtctgggatctcctactagatctggagcctactaacttagattaaaatcctatgtatttttatcaagctaaatagaaatttgataatgtggtggcatttcccactgtttgaactcaaggctataatcagtcagtctttcaaagactgaa

SEQ ID NO: 699704 - DNA, 2198 bp, Homo sapiens
tggcagataataggcaagcagtaaaatttcagtgaacttgctagctgtcttttcattctgactttttatatcaaagtaattggtggacatttgctagtagatgaaactaatctggatagctaagcttacttattacagaatatgctttttacatatctcagcatttccaaatttcataaatgttaatgttaattaaatacatactttgaaggaaaaggaattcccttagatagcatatgttacagttcagctgtttttgaatattgtgtaaaagctttataatgactacacgctggaatgtcatattctttcccaaattgttggtctgatgccaacttgtgtgatttgctagtgtttggttcacatgcccagggaaaatgtcaaatattttctaaattaagttgtttcaattatgtaactacctcctttaccttagtatcagttttctctgccattatactgaatgtcatatgagaaagctatttagttttaaagtcacctgtattagccagttttcatgatgctgacgaaggcatactcaagactgggcaatttacaaaagaaagaggtttaatggagaactcacagttccaagtggctggggaaacctcacaatcatggtggaagggcaaggaggagtaagtcgcattttacatggatgacagcaggcaaagagagagcttgtgcagggaaactctagtttttaaaaccatcagatcttgtgagacttattcactatcataagaaaaacataggagagacctgcctccatgattcaattacctcccaccaggtccttcccacaacacgtgggaattcaagatgagatttgggtagggacacagccaaatatcattatcaccaccaatcttttaactattcaaaatcaagtcattctttcatgctttcaaattatatactacgaattttttgtcagacacaaatatagcagaatatatttttaaaaaagttccaccgccactatataattgtaatacagagagattgatgccccatttattgaattactactatgtgccaagaacaggtgtatcagagggtaccagccagctaattgaggaaggtttggtttcctttcaaagataatattttaaaaggtcttcatrtggtataagagaccacaagggatagtgcagaatgcacaagctcattgcaactgtaatgctgcaactgggccaaaaaggatatgacaaaggaggaaatcagaaatcagaaggacccagtcacataaagtcttactagtcaaaatgtggttcacagactagcagtattgacttcacctggaagctacatggaaaagaaacaatctcaggcccaaccctagactggcagaataaaacctatattttcataaattcccaagttgatttgaatgcatgttaatgtttgacaaatactagggtacaggatgcctctttgaaatcagtaactctgggtcaagaacacagccagctgaaggtgatctcatagggagaaaaactggggaataagtatcctgccattactgtcctccataacttccttgggtctctgtaggggtcctcattagccaaatataacaggaagcagggagtaaagtgaactgttagtgtggtttatgaagatccactgcccaaggcagagaattcaagggggcaaagtagaaaaggaatctggaatgacaggtggaaaagatctagaacaactaggctaggccattaaaaatgtaaagatgaaatacagtgtcctctgacttcaaatattccaaaacatattttgcaatttttttttctcataggcactcttaatattggaattgtgaccaaaggtaatactattttaatacaatgtccaatagccttttcatcctgaagatacttagcacatcctttggttttaaataaaaatatttttaaaaattgtcagaactaggtaacctagttaagattattacatatattctcctgttcggcttcacttttagaatcagttttaattttttctcttaccttttgggagtgagtccctcattactgtgtgatttcttttgtctgggatctcctactagatctggagcctactaacttagattaaaatcctatgtatttttatcaagctaaatagaaatttgataatgtggtggcatttcccactgtttgaactcaaggctataatcagtcagtctttcaaagactgaa

SEQ ID NO: 699705 - DNA, 660 bp, Homo sapiens
agaatggcgtgaacctgggaggtggagcttgcagtgaggcaagatcatgccactgcactccagcctgggtgacagtgcaagactccctctcaaaaaaaaaaaaaaaaagaatgctccctggagaataatattttaccagtaacttttctgttttctgttttcatgtttctattataggctgtgtgtctcagcacttgctatggatagctttgcagagggggtgggagctgtgtatggcatgtttgatggagaccgaaatgaggagctcccgcgcctgctgcagtgtacgatggcagatgtgcttttagaagaggtacagcagtcaactaatgacacagttttcatggctaacaccttcttggtatctcacaggtaagcaggtgggttgaaaaatccctaactcagttctacttttggaaaatatatttttctaaaccagaaggtcagggtctaaattatggatacaggatcaaggagagaactcacgttgttgtcttctatgatcattctctatatgagcatggagtgcggggacttyggctctttcaaaagcctgtgggggtcatctgttttctctgttgaatccaaaggctgctgaggatctgggaagcccagaatttatgtgcaaaatgttgtgtgtgtatatatatgtggttgtac

SEQ ID NO: 699706 - DNA, 663 bp, Homo sapiens
tgtaatgtaatgagagcacttttcattgactgtgaactttttatttttgaatctgcactcgagccaatcttcttagaggcagcccggcaccttcatccataggcagagagagaactgggtgttggagacttattcgagggtataggaagggccctgtgaagttgatttaacttttggatgtcagactgtgaaagctcctgagaaacttggggtaataggatcttcttttggggatgaaaatggggaaggcgtgaggacctagactacttctccctagatcagaaaaagagaattaccccttgacaaatatgatacctgctaggtatttcccagggaaatttagggattggcstctttccctagcatgtggaggaattggcagacagcttcctaagggcggggagcgggggcccaaggctgacactgcttgcatccacgtgaccttaagttatggcagatgactctgaaacggactgaggccaatgagaacagatggatggagcactcaggttagacttgttccttctcctatgctggaggagagggatggttctctagaatgttggaggtgagttgagagctcgcctcttgaatgttgaacagtgtactcttctgaaaactgcatattcactttatgtggtttcagaatactgggctcaatac

SEQ ID NO: 699707 - DNA, 623 bp, Homo sapiens
ttcatcttctcagaggccccatgctcatatgcacgtgtcattgggatacactcttgggggatttggtacactctaatggatgtctaatgttcaacccctcgagaatctgaacttgagtccccagattgtcaaactactggtcagctattgagaattttagaactcaggtctttgatttgaagtagggaacatagtggctcacacagagtttaggtgctgttagaaagatgggaacaagagtgttttgccaccttatttttatatgggaaattttttttaatgaagaaaaaatgaaaatraaataacaggatgatagtgatgagtgatgtaaaacatcttacttagatggcagaaccttcgggttgtagaatagtgatgtctaaaaattaaagttattttgggaatacaccactttaatagtatagtcttataaaaattattcattatggtgaacccttcttgtctgctattcgtttcccaacctacttattggaaccacctcaaaacccagttctgaaatgaccttaccaaaagtaaatgtatttattttttagtcagcagaactctgtaattccaaatgttgttctgtgtggtagaattttttttcaggaaccattaggttg

SEQ ID NO: 699708 - DNA, 2003 bp, Homo sapiens
ataaaataatggcagatcaaaaagagtgacaaagaggaagcagcagggaagtaattggaaataggaaggcctgtgtggcctggggtgatcagggatggtgcctttgatgaagaggccgcaggagctgagacccaaaaygtaagaagccagaaataccaagggcgagaggaaaagcaagtgccaaggtcctgagacagaagagatgggcgaggcctggctttgcagcaaatgtaaccaggaactgagagagggaatgggctggggccggatggaaaaagccctcacaggtcacagcagagcagcgagtcatgcttttcaaagcatgctctggctgttaggaaataaatattttgagagggagcaggagtagaagcagggagggttgagcagggctggtgcctcaccactgagggctgcgctgcaccggcactaggccagcaagtgaaatccgggaaagaaaaaggatcggagggtggaaggcaggggcgttttaagaaacacacgtgcacatcttgggaaggttggaggagccaggccctcagtcgcctcctgtcaccccgtcctcctgggcctgtaccagctgccccagaaggagcgggcgggactggcagagggccagcatcctgggagagaagggctgggctcaaaggcgagaaggcacagatggcacccgtgagccacgctggcaccttcgtgctctggaagctacttagagggaatcccccggcagcccttggccggggcccacctcctacagccaggcctcctgccgccagggcgtgctcactggggcatcctccagatgcttctggagcctctgctgtgtaccaggcccatgtcagggacagggacaccgaggtgtggctgccacagtccccttccgggggatagtccctcctggcaggcacaggcaagctcagcaaaccaaggcgggcagagggcctggtggggccaggagggacagtcggtagagagcgaggtccaagagaggacgtatgggacacagaaggtggcaggggcacagccagcagatcacccatcccagcgtttagacctcagccctcagggtggcgtctgcagaccagcaccctcggcaccactcgggggccaacagaaatgcaggatccaggccaccccaggtaaccccaccctgggggatttctgggcacactcgtgtttgagaaatgctgcctggattatcttgagttcaaagtgctgaaagtcagatgctactgagaccaagctggaaagagaacatggggagtgcaggaaaggccccttgggaagaaaaatcactttcagtcgatttttttattttcacacatttgagagagacatggtgccaacttaatgctgccagcctgtgaccggcctccctgtggaggggactcgagcaaacagcagctgcctgtcctttggaggaggggcctctgctcagtgccaggcaggccacgccccactgttcactgcccagtctggccagaccttcccatttttcaagagaaccttgaaatctagattcgtctgtgaagtctcctaattttgaaaggctggcttagtatgctttatagcactgcaggtggctgcaggtccccacctgtaacctctgcctgggcagtggggagccattgagggttgttgagcacaggagagcagcagcgaggaattgcatgtgcatgtgtgtatgtgtgtgtgttcatgcatacatacgtgtacatgtatccaaaaagtgtgctggccagtgtacaggaaagttgggagggaggatgtaaaggcatgaggccagttaggaggcagctacctctctgtatagtggaggcttgttaagaaaaaaagccaactgttcataaagaaaagtggaagtctgggtagcagaaacagaaagcagaaaacaatggagagacatagcaggtggaatcacagagttgagtaatgcatccagcctagggggagcctcaagtgggaagaatctaagccaaaccctgggtacctgggatttcctg

SEQ ID NO: 699709 - DNA, 2003 bp, Homo sapiens
ataaaataatggcagatcaaaaagagtgacaaagaggaagcagcagggaagtaattggaaataggaaggcctgtgtggcctggggtgatcagggatggtgcctttgatgaagaggccgcaggagctgagacccaaaatgtaagaagccagaaataccaagggcgagaggaaaagcaagtgccaaggtcctgagacagaagagatgggcgaggcctggctttgcagcaaatgtaaccaggaactgagagagggaatgggctggggcyggatggaaaaagccctcacaggtcacagcagagcagcgagtcatgcttttcaaagcatgctctggctgttaggaaataaatattttgagagggagcaggagtagaagcagggagggttgagcagggctggtgcctcaccactgagggctgcgctgcaccggcactaggccagcaagtgaaatccgggaaagaaaaaggatcggagggtggaaggcaggggcgttttaagaaacacacgtgcacatcttgggaaggttggaggagccaggccctcagtcgcctcctgtcaccccgtcctcctgggcctgtaccagctgccccagaaggagcgggcgggactggcagagggccagcatcctgggagagaagggctgggctcaaaggcgagaaggcacagatggcacccgtgagccacgctggcaccttcgtgctctggaagctacttagagggaatcccccggcagcccttggccggggcccacctcctacagccaggcctcctgccgccagggcgtgctcactggggcatcctccagatgcttctggagcctctgctgtgtaccaggcccatgtcagggacagggacaccgaggtgtggctgccacagtccccttccgggggatagtccctcctggcaggcacaggcaagctcagcaaaccaaggcgggcagagggcctggtggggccaggagggacagtcggtagagagcgaggtccaagagaggacgtatgggacacagaaggtggcaggggcacagccagcagatcacccatcccagcgtttagacctcagccctcagggtggcgtctgcagaccagcaccctcggcaccactcgggggccaacagaaatgcaggatccaggccaccccaggtaaccccaccctgggggatttctgggcacactcgtgtttgagaaatgctgcctggattatcttgagttcaaagtgctgaaagtcagatgctactgagaccaagctggaaagagaacatggggagtgcaggaaaggccccttgggaagaaaaatcactttcagtcgatttttttattttcacacatttgagagagacatggtgccaacttaatgctgccagcctgtgaccggcctccctgtggaggggactcgagcaaacagcagctgcctgtcctttggaggaggggcctctgctcagtgccaggcaggccacgccccactgttcactgcccagtctggccagaccttcccatttttcaagagaaccttgaaatctagattcgtctgtgaagtctcctaattttgaaaggctggcttagtatgctttatagcactgcaggtggctgcaggtccccacctgtaacctctgcctgggcagtggggagccattgagggttgttgagcacaggagagcagcagcgaggaattgcatgtgcatgtgtgtatgtgtgtgtgttcatgcatacatacgtgtacatgtatccaaaaagtgtgctggccagtgtacaggaaagttgggagggaggatgtaaaggcatgaggccagttaggaggcagctacctctctgtatagtggaggcttgttaagaaaaaaagccaactgttcataaagaaaagtggaagtctgggtagcagaaacagaaagcagaaaacaatggagagacatagcaggtggaatcacagagttgagtaatgcatccagcctagggggagcctcaagtgggaagaatctaagccaaaccctgggtacctgggatttcctg

SEQ ID NO: 699710 - DNA, 2003 bp, Homo sapiens
ataaaataatggcagatcaaaaagagtgacaaagaggaagcagcagggaagtaattggaaataggaaggcctgtgtggcctggggtgatcagggatggtgcctttgatgaagaggccgcaggagctgagacccaaaatgtaagaagccagaaataccaagggcgagaggaaaagcaagtgccaaggtcctgagacagaagagatgggcgaggcctggctttgcagcaaatgtaaccaggaactgagagagggaatgggctggggccggatggaaaaagccctcacaggtcacagcagagcagcgagtcatgcttttcaaagcatgctctggctgttaggaaataaatattttgagagggagcaggagtagaagcagggagggttgagcagggctggtgcctcaccactgagggctgcgctgcaccggcactaggccagcaagtgaaatccgggaaagaaaaaggatcggagsgtggaaggcaggggcgttttaagaaacacacgtgcacatcttgggaaggttggaggagccaggccctcagtcgcctcctgtcaccccgtcctcctgggcctgtaccagctgccccagaaggagcgggcgggactggcagagggccagcatcctgggagagaagggctgggctcaaaggcgagaaggcacagatggcacccgtgagccacgctggcaccttcgtgctctggaagctacttagagggaatcccccggcagcccttggccggggcccacctcctacagccaggcctcctgccgccagggcgtgctcactggggcatcctccagatgcttctggagcctctgctgtgtaccaggcccatgtcagggacagggacaccgaggtgtggctgccacagtccccttccgggggatagtccctcctggcaggcacaggcaagctcagcaaaccaaggcgggcagagggcctggtggggccaggagggacagtcggtagagagcgaggtccaagagaggacgtatgggacacagaaggtggcaggggcacagccagcagatcacccatcccagcgtttagacctcagccctcagggtggcgtctgcagaccagcaccctcggcaccactcgggggccaacagaaatgcaggatccaggccaccccaggtaaccccaccctgggggatttctgggcacactcgtgtttgagaaatgctgcctggattatcttgagttcaaagtgctgaaagtcagatgctactgagaccaagctggaaagagaacatggggagtgcaggaaaggccccttgggaagaaaaatcactttcagtcgatttttttattttcacacatttgagagagacatggtgccaacttaatgctgccagcctgtgaccggcctccctgtggaggggactcgagcaaacagcagctgcctgtcctttggaggaggggcctctgctcagtgccaggcaggccacgccccactgttcactgcccagtctggccagaccttcccatttttcaagagaaccttgaaatctagattcgtctgtgaagtctcctaattttgaaaggctggcttagtatgctttatagcactgcaggtggctgcaggtccccacctgtaacctctgcctgggcagtggggagccattgagggttgttgagcacaggagagcagcagcgaggaattgcatgtgcatgtgtgtatgtgtgtgtgttcatgcatacatacgtgtacatgtatccaaaaagtgtgctggccagtgtacaggaaagttgggagggaggatgtaaaggcatgaggccagttaggaggcagctacctctctgtatagtggaggcttgttaagaaaaaaagccaactgttcataaagaaaagtggaagtctgggtagcagaaacagaaagcagaaaacaatggagagacatagcaggtggaatcacagagttgagtaatgcatccagcctagggggagcctcaagtgggaagaatctaagccaaaccctgggtacctgggatttcctg

SEQ ID NO: 699711 - DNA, 2003 bp, Homo sapiens
ataaaataatggcagatcaaaaagagtgacaaagaggaagcagcagggaagtaattggaaataggaaggcctgtgtggcctggggtgatcagggatggtgcctttgatgaagaggccgcaggagctgagacccaaaatgtaagaagccagaaataccaagggcgagaggaaaagcaagtgccaaggtcctgagacagaagagatgggcgaggcctggctttgcagcaaatgtaaccaggaactgagagagggaatgggctggggccggatggaaaaagccctcacaggtcacagcagagcagcgagtcatgcttttcaaagcatgctctggctgttaggaaataaatattttgagagggagcaggagtagaagcagggagggttgagcagggctggtgcctcaccactgagggctgcgctgcaccggcactaggccagcaagtgaaatccgggaaagaaaaaggatcggagggtggaaggcaggggcgttttaagaaacacacgtgcacatcttgggaaggttggaggagccaggccctcagtcgcctcctgtcaccccgtcctcctgggcctgtaccagctgccccagaaggagcgggcgggactggcagagggccagcatcctgggagagaagggctgggctcaaaggygagaaggcacagatggcacccgtgagccacgctggcaccttcgtgctctggaagctacttagagggaatcccccggcagcccttggccggggcccacctcctacagccaggcctcctgccgccagggcgtgctcactggggcatcctccagatgcttctggagcctctgctgtgtaccaggcccatgtcagggacagggacaccgaggtgtggctgccacagtccccttccgggggatagtccctcctggcaggcacaggcaagctcagcaaaccaaggcgggcagagggcctggtggggccaggagggacagtcggtagagagcgaggtccaagagaggacgtatgggacacagaaggtggcaggggcacagccagcagatcacccatcccagcgtttagacctcagccctcagggtggcgtctgcagaccagcaccctcggcaccactcgggggccaacagaaatgcaggatccaggccaccccaggtaaccccaccctgggggatttctgggcacactcgtgtttgagaaatgctgcctggattatcttgagttcaaagtgctgaaagtcagatgctactgagaccaagctggaaagagaacatggggagtgcaggaaaggccccttgggaagaaaaatcactttcagtcgatttttttattttcacacatttgagagagacatggtgccaacttaatgctgccagcctgtgaccggcctccctgtggaggggactcgagcaaacagcagctgcctgtcctttggaggaggggcctctgctcagtgccaggcaggccacgccccactgttcactgcccagtctggccagaccttcccatttttcaagagaaccttgaaatctagattcgtctgtgaagtctcctaattttgaaaggctggcttagtatgctttatagcactgcaggtggctgcaggtccccacctgtaacctctgcctgggcagtggggagccattgagggttgttgagcacaggagagcagcagcgaggaattgcatgtgcatgtgtgtatgtgtgtgtgttcatgcatacatacgtgtacatgtatccaaaaagtgtgctggccagtgtacaggaaagttgggagggaggatgtaaaggcatgaggccagttaggaggcagctacctctctgtatagtggaggcttgttaagaaaaaaagccaactgttcataaagaaaagtggaagtctgggtagcagaaacagaaagcagaaaacaatggagagacatagcaggtggaatcacagagttgagtaatgcatccagcctagggggagcctcaagtgggaagaatctaagccaaaccctgggtacctgggatttcctg

SEQ ID NO: 699712 - DNA, 892 bp, Homo sapiens
tggctcttaactctacccttccccactarctactagttttgtgtttattactctgtaatatttgtttacttctttatgctttcccctattgagctgtgagtcctttgaaggcagggcctctgtctgtcctgttcgccagtctcctgggtgctgtgtgaactgcacctggtacatagcagtcagttctgttagatgagaagaggaggatgccgtcagtggggggattgaaggaggccataatctcagggatggctgagctctgccagtcaaggaagcagcctttatgcctggtaaagagcaaagcttctgacttcccatcaggggcctctacactcttggaattctgggaaatcagaaattaagacccagaataattgctttgcaaaacatacacatcttacttctgcccaaccagtggtccctctgagccagtcattcaaaacatggatactgtctggccccccagcaccacattcagttgagtcaaggcactgctgcaccagatggaaggagggcccgtggcttgggaaacaagactagtggtctagccctgctttggcactgaattgcctgagacttttaaataatattagcagctgacatttattgggccctactgagtgccagaccctccccacacattaatactgccagtgaccctgtgaaggacaagatcattgtccccattttacaggggagagacctagactcagggaggttgagaacttgcccacagtccaactgtcagtgaataggagactcagggtgtgccccactcttaacacgtgctcagtatatatatattcatggagggaatgaataaacaaaggaaagagtggtgttctctaggggatttgggctgctgcagttcctagaaagccctcccagtccc

SEQ ID NO: 699713 - DNA, 1300 bp, Homo sapiens
tgtctatttgtttggtagataagatttacacagataaagtaacttctagttgcacagctagtacaagaaagactcacctccaccagagaatttattagtaatactcttgacttttcagaaggtcttataaagcctaagtaaagagctcctgcctttttgcttgggactgaatattagctctgtcacttatatcattggccttgggcaactctgcaaactctgtgaatccttcatttatcatgggtataaaactacctgcctcatatgttccatgataatgtttaaaataaaatgaagtagtgcatgtaaattgttttctacatattaaactccagaaagggtgggggtattgctttcctgttttttgtgkttttttttctattttttttctttttacttgaggtgtgtgcatgtatgtgtgtgtttctttttgttctggttgaaaaatcaaggcctttcagggactgcttttcctatgttcttctaaaggcaagaagttgaaactatcgtctagacaatgaggtaaaatcttgttgacagacagaatttctgctgacctgttgttaccctgacacctaagggtgagagagcacttgagaacagcaatcagtggcccatttcctcactcttcagtggactggagatactaattgcctgatagtccctcccactctgcctggattccctctccaaaggctcttttcattatacctgttgtttatggccaaacccatgagtcacatttagaaatcaaacatgaggaacttgaccccctctgatattctgaagctttgttgagctgttaaacaatgagtgagagaaattattattgttaaaaataaaaaattcagtggcatgaaatttcaagacagcattttcatttgaagccatgaataatgtagttatggtaatatagctgctattcataattacaaacacttcattcctccacatgttctcatgtcacacagagcaggctggtgagagctggtctgcttctgattgtttttgctgtgttttgcattataaattatattctactcaaccctgatgaccccaactctatggcagccattggcaccataaaagtcaatagcagcatgtctccgaacctcccctgcagaactaaatgtttatcttaagttagagcttggagtttaatcccattcaagagttagatttagttcacaatgcatcactctatttaccattttagcaacaaaatgaggttaaccacgaaattatgccttagaatccttccttagcatgagcacttccaaggccctgagagagatcctag

SEQ ID NO: 699714 - DNA, 654 bp, Homo sapiens
tgtccttcccgtattcattaattcatattaccctgcgcctagtcccattttcacttcctttgacactcctagtagttttgttaagtcttaccctgtaatttttgcttttaattttgatatctctttatgactttaacagtaaaaaggatgtatggtgttatcaactgcttccaaaataatatcttgtcgtgcagggagtacagttcttttcattcatacgtaagttcagtaattgctttcctaactgcaaagscaatctcattgagttgagcagctcctgaaagcagctttgagttcgaagtatgtgtgttacacccctacattagtgtgctgtgtaacaatgcacaatgtaacaaatgtacaaacgtaacgatgtatttttgtgaatgagagttggcatgcataacaatgaacaatgtacaaatgcaaatgtaacaatgtatttttgtgaatgagagttggcatgtcaaatgtagcctctagaaaaataattagtgttatagtctgaagatttgttttctaggccaggcgccgtggctcacgtctgtaatcccagcactttgagaggccaaggcgggcggatcacaaggtcaggagatcgagaccatcctggctaacacagtgaaacccgtctctactaaaaaatacaaaaaa

SEQ ID NO: 699715 - DNA, 1611 bp, Homo sapiens
cgcttgtgccctggatctattagtgacctgctgtgggaccttgggatggtcccttccccttgtcagtgaattgatggggttggaaaggctctcctgggaatcgtgaaatgcagggtctccaagcactagtgacaagtgaggtggcagcacctcagatcctgttccaggccctggggctaggcatctgccctcaggcttaggagcctccgtctgtgtcctctgccagcacacccgctttaccaagcacacgactttcccggggtcttgtacagtagaatgcagatcctgacccagaaggtgctggcggggcctgcagttctgcatttccagcaaggttcctagagaggtcagtactgctggtctgaggaccgcactttgagtagccaaagtctgaatttgatgtgggtcatggtatacacctgtgtaaaaagctatccaggccaggcgcagtgactcatgcctgtaatcccaacactttaggaggccaaggtgggaggatcacctgaggtcaggagtttgagaccagcctggccaacatggcaaaaccctgtttctactaaaaatacaaaaactagcccagcatggtggcacatagtctgtagtcccagccctttgggaggctgagacgggagaattgcttaatcccaggaggtcgaggctgcrgtgagccatgatcgtgccactgcactccagcctgagtgacagagtgagaccctggctcttaaaaaaaaaaggaaaaaaaagccatcaagctgcacatttaagatgagtgcacttgtctggtctgaaggtagtaagttatctcagtcaattgttcacaggcagttacagatccaactcctcattttactctttcccctttctcatgactgcacttgactagtctaaaagccaaaaagggctggttgcggtggctcacgcctgtaatctcaacactttgggaggccgaggtgggtggatcatttgaggttaggcgttcgagaccagcctggccaacacagcgaaaccccatctctactaaaaataaaaagtaattagccgggcgtggtggcacgcgcctgtaacctcagctactggggaggctgagggaggagaattgcttgaacccggtggcagagactgactgagccaagattgtgccactgcactccagcctgggcgacagagcaggactccacctcaaaaaataaaaataaaaaaatatccagcccaagaagggccgcaggatgaactcagaatggttaatgaaccatgagccaagtggtgagtactggccacccacggtgccccttagccctcccctccccctccccatctcctccatacactcatcctccaacacgccctcctggtccaggtgctagggcgggatgcaggcgcctcacattccagcagggcagccgtgtctgtctcaggaaatgcgtgtggtctccagctctggccgccaggagacaaagccacccgctttgttccttggcccccagcaggagggggaaggggagaatttccttaggagaggttccaagaagaggaattactgcttcaaagggagtgcaccatttcaggcggctgagagctgctgcgccgccttccagaaggggcccggcaccc

SEQ ID NO: 699716 - DNA, 717 bp, Homo sapiens
ctttgggtctcacatgaggccaccagggtcccaaaccacatctcctagagaccagtggattccttttgcccatctccctggggtctgcctgtacattctgtcttcccaaatgcagacgggccgtgggcaggggggaggacacttttgaggaacattccccatgcccatcagggccgcggcctatagcccagcggtagcttcaggcccagtacaggtgagggcctctcagctggaagggggaaggggacagccccgaggggtcactgactccctggtcacccggaggctccctccgtgtgcagcacctgcctctgagcctccttcgcacgccagaggcagagctatgggtgccctggagtggctctttcagtgctggccccagaccaaagggagagtcaacaccgaactccctgatgacccgagcaactgtgccccagggcactttaatggccagtccttttgagaagtgtggtgagatcctccagtgctctgtggggagagcccgacaccctccccacgaagtgtccaggagccaggcatcttgtcgcccacacatccagcagagctatcctggcaggcctcagccagcccctagtgagaaaattgcagggttggaatcagcattttttycccttaaacattttatggttttgagaagctgaacttgcaaagaatatacagcgggaaagtgaaaaaagacccaattttagaaccaca

SEQ ID NO: 699717 - DNA, 633 bp, Homo sapiens
cccgcatggggtggcagggaccgagcccattatagtcactcaggttcccaggctgatggaggcctcacgctcttacaatgctgccgcctcaacatgaggtttcagggcttcccacagtggaaggagcctggagagagccaccagctctgaaatgacagcccaggaagacacaggttgcttctgctcacatttcactccgtgaagcaaggcccaggaccccactgacctgcaagggggcacacgcccaggaggagagaactgaacaccttgggggatctagcaatgtctcccacactccagaaggccccaaacccgagaaccatgctgcccagaatgaatgccacagtgggaycagccacagccagacagattccactccaggacacccaaggccaggcacagccccagagccaaccagaggctcagaagacccctctcccattaggacgccacccctagggaaagggatggggtgggaagaaaacaaaaacaggagtcctgaatcaaaagagtgagcccagaaagagactatgcgagagcatagagacctttaagtgacaagaggagggtcccggccatcagcaggaatgggcgtcgggagagaagagaaacaagctgccctgcacagcccca

SEQ ID NO: 699718 - DNA, 633 bp, Homo sapiens
cccgcatggggtggcagggaccgagcccattatagtcactcaggttcccaggctgatggaggcctcacgctcttacaatgctgccgcctcaacatgaggtttcagggcttcccacagtggaaggagcctggagagagccaccagctctgaaatgacagcccaggaagacacaggttgcttctgctcacatttcactccgtgaagcaaggcccaggaccccactgacctgcaagggggcacacgcccaggaggagagaactgaacaccttgggggatctagcaatgtctcccacactccagaaggccccaaacccgagaaccatgctgcccagaatgaatgccacagtgggaccagccacagccagacagattccactccaggacacccaaggccaggcacagccccagagccaaccagaggctcagaagacccctctcccattaggacgccacccctagggaaagggatggggtgggaagaaaacaaaaacaggagtcctgaatcraaagagtgagcccagaaagagactatgcgagagcatagagacctttaagtgacaagaggagggtcccggccatcagcaggaatgggcgtcgggagagaagagaaacaagctgccctgcacagcccca

SEQ ID NO: 699719 - DNA, 633 bp, Homo sapiens
cccgcatggggtggcagggaccgagcccattatagtcactcaggttcccaggctgatggaggcctcacgctcttacaatgctgccgcctcaacatgaggtttcagggcttcccacagtggaaggagcctggagagagccaccagctctgaaatgacagcccaggaagacacaggttgcttctgctcacatttcactccgtgaagcaaggcccaggaccccactgacctgcaagggggcacacgcccaggaggagagaactgaacaccttgggggatctagcaatgtctcccacactccagaaggccccaaacccgagaaccatgctgcccagaatgaatgccacagtgggaccagccacagccagacagattccactccaggacacccaaggccaggcacagccccagagccaaccagaggctcagaagacccctctcccattaggacgccacccctagggaaagggatggggtgggaagaaaacaaaaacaggagtcctgaatcaaaagagtgagcccagaaagagactatgcgagagcatagagacctttaagtgacaagagsagggtcccggccatcagcaggaatgggcgtcgggagagaagagaaacaagctgccctgcacagcccca

SEQ ID NO: 699720 - DNA, 648 bp, Homo sapiens
gtaccaagctggccactgcttcacagctcacagtagacactgccagttgttcatttccagacagagccttaggtcagcctgccagagggaggagcagggaggaagtgtatctgccagctcccttccatcccatctcctcttaatcaaaagttcttcccaccagttcttcaccagactgaactcactcacatttctgggctgtaggctcagaggaagccagattccagcctgccctgcagtggagcactttgtgtgtatcagaaagtagtgagagrtgccagggctctgatggtagaaacaggaaaaatcacgcagaatcagtttccaccccagagagaggtagacagagaggccatgagaaactgaggggtcacacgtgatgcccatacaattttcaaacttaagggtacaaaaatcttatttgtgggagcttccccgaaggtcatttttctgggctcatcttgagaattctgggcctttagaactggggttggagtcagggattgtcttttctcatgagcatcctgggagactgagtaatggggtcactgggccgcatcagtagagacaaaggggccctcacttgtttgcaaatgtcctcatccacctgtgttgtcttcctgtcttctgtcttgttacatgctcttt

SEQ ID NO: 699721 - DNA, 663 bp, Homo sapiens
tagagactcactctgtcaccaggctggagtgcagtggcgtaatctcagctcactgcaacctctacctcctgggttcaagcgattctcctgcctcagcttccccagtagctgggactacaggcgcgtaccaccatgcctaactaatttctgtatttttagtagagacggggtttcatgttggccaggatggtctcgatctcttgatctcgtgatccgcccacctcggcctcccaaagtgctgagattacaggcatgagccaccgtgccaggtctccatttctactttaataaacttcctaaaaatatgatcacagctttatgtaatttgaatcctaaactaatcccataayaaaggtattatcccgattcactgacgaggaatctaggccagaagataacagataacttaatggaacagtttgacctgagttgaatggcttgagttcaaacccctcgctccaacaattgccattttaataatttcaggagggtaaattctctatatttctgtatttttccaataaaatgggtacactaataacacatcacaaaattgttgtgagtacttacaaagcacttaaaaacgtgtctggcaaacattaatagtaagtactatgtaagtgttgctattactaattattcctattattaatttcagtgaaa

SEQ ID NO: 699722 - DNA, 1008 bp, Homo sapiens
  misc_feature 863, 864, 865, 866, 867, 868, 869, 870, 871, 872, 873, 874,875, 876, 877, 878, 879, 880, 881, 882, 883, 884, 885, 886,887, 888, 889, 890, 891, 892, 893, 894, 895, 896, 897, 898,899, 900, 901, 902, 903, 904, 905, 906, 907, 908, 909: n = A,T,C or G
  misc_feature 910, 911, 912, 913, 914, 915, 916, 917, 918, 919, 920, 921,922, 923, 924, 925, 926, 927, 928, 929, 930, 931, 932, 933,934, 935, 936, 937, 938, 939, 940, 941, 942, 943, 944, 945,946, 947, 948, 949, 950, 951, 952, 953, 954, 955, 956: n = A,T,C or G
  misc_feature 957, 958, 959, 960, 961, 962: n = A,T,C or G
ttccaaggcactaatgggggatgtcactaagtttggtggattttcaatagtttaaaaataaaccttaccaacattcttaacctttctagtgggctttcccattgcttgtttctatagcatgtaatcatcacataaagaactatctacttatgtggaagccagaaagggaaaacaaaaccaatggaaaacacaaacataggcatgtttgttgtttcatattgagggttatttagcttggataataaatcattacaatgaatgtcaacacagcacaggggaacgggagtagttagttgcatatgctaatggaagacgcgcattactaataagggagagaatgaacaactctagccacatgctagttatcactgcaaatctcaagacaagccacgttcacactgagcatatgactgctgtatgacagttcaggcaaatattcacatgtcaacagcaatagctcccatactccatccaagactactgaagagtttaaaaataaagctctccttgtcatgcaccaagacatcaagcttaaacacatctgccagtcaaagggattttgccagtcttttacccccacaagtgtggtctacagacttcaagtatatcagagttcaaaatacaaagaactggaatgttatccacaagtaagtcctgcagcctcttcctttaaaatgttttaaatcctgagattctctgcctctctattgccactaagtgatcatagtcttaataataaactacagcagtagcctcttctcttttccctattattcttttgcttcctttctatctagcataaaatatagtgggtttcttttattgtgttgaagtatatgtaagaattatatttctaatcatannnnnnnnnnnnnnnnnnnnnnnnnnnnnnnnnnnnnnnnnnnnnnnnnnnnnnnnnnnnnnnnnnnnnnnnnnnnnnnnnnnnnnnnnnnnnnnnnnnnscattaagtacattcacactgttgggcagccatcatcaccatccat

SEQ ID NO: 699723 - DNA, 1398 bp, Homo sapiens
ttcaagcaacgttttattgtaattgttttctgttatcamcataaagtaatcaaaagggtcagaatctagtttaaagtgagtttattcgagtacaaagtttgaggacaagccccccaggaaacagaattcaaggaatggaagtcagagttccgaagtgtagacattggggatcatttatagacaaagttcagggaagtttaacagaatttcaccatctttctatgtaaggtttaatgcatagttacaacaatctgattagtcaaagtggtctttttcttttgagaaatgtatatttaaacattctactctgaagatgtaattgtcatggggccttgggcaccatcatgtctgagttaggtacaagactatagggaggcagttaatctataacaaagatcagtgattggaaaggggaggtctggtctcttctagtcatttatagaataagaacaatgaggaagagaggtaagctataatctaagatgcagaattgcagacatgccatgcgactcactcagtttccagggcttaacttcccccttgtcaaaatcaatttagaagatcctgaaattttattttattttatacttatattattaaacatgttttattagaatgtttcattgttgtggggagaattcctaaatttcctaagcataaacactctttgtttcttttcagtatatatttcttcccagtacatgttatttggacctaagtcttctgggatggcaatagagatgcaatggaggtcaaattccatcctttttagaggaatctatacaaattagagctagtaaggatataaaagatcattttatcaggtgcatcatccctaaacatacatacacatttacacacataatgtaaaatcctgttaaaagaagacgcttcccaatattcaagggctgtatagacgtgcttttagattaagaattagatgcattatgacagattttgctatgtaacaaactgccccaaaacttattaactcaaaacagcaagtattgatgtctcatgattctgtagattggccaggaagttcttccagtctgggctgttatgtgagtcagtgattcaaaactatccatctaggccttgaaggcgggggctagcctaacctttttcttctgccatgagactaaccctggcttcttcacgtgcgggtggaagggttcctaacagcaacagctgacaaacttaatgagcaagcactttttcagcctctgccacagtcacattttctatcctattggctaaagtaaatcacgaagtcaggctcagattcaaggggtgtagaaataggctccacttctgatgagtggcacggcaaagtcaacattgcaaaaagccaggcagagatattactgtggccagttttgcaaacaatccaccgta

SEQ ID NO: 699724 - DNA, 565 bp, Homo sapiens
cttttctcaaatcactgaaaccaaaataaaacaagtacctaatggtctttcctgggtctgcctctataatccaggtgcagtggaggttgttgtcatacggagctggatagccaggggacaatattcgtcctgatgtggctgcatggatctgaccaccacattccgctgtagaagacacagagagatgggaacgttcagcttcaggcatcacatgtttctatttagctacttttcaaaaccaaagccattatgtctgcattatatacatagagaaaaagaatcaccatcatctctctctcctgaccgtttcaatatttcttccaaatcattacctctgtggaaagtctttatcctccatgcaattaaagttgagagcataaagcaataagacactcatgtgataattctaataatatgtgataattctaataataacactgtacctmtagtctccataacagaatactagaaaaactgtctttcatagctgaaaacacacactcacagacacgtgcaaatctcagaatacataaaactcacactggaaagtgtgataaaattcctc

SEQ ID NO: 699725 - DNA, 571 bp, Homo sapiens
gtcatgcacctgctataatacctccaattaaactctgagtcccaaagggcaaaaccatgcttatacattgaaacacagcattgtgtcacgaaagatactgcatattaagcgcttaataagtatgtgttgaattaatgaatgggcatccttttaatagggaatatgttaacttttatatgttatcttttatctacacagactatgagtttctggtgagcaaggactgaggtcagttaattttrtatcttcggcgtctagcaaaatatctgaagccgagcaggcacttcatatgctaagtgattgcattaatgaatcaatgcggtaggccagaggatatgctactccagatttatgttctcaattagagaactacagagattttctattttttcattacttttttcattttaacacctattaaaaaattggaacaaaagcaaaacattatagtaagaagttatactatgaaagatatttcataaataaaaatagaatattacaagcctaaggtactatatataatttactagcttcatcatcaggaaagaaatcataattaaaaataaattca

SEQ ID NO: 699726 - DNA, 569 bp, Homo sapiens
tcgcctcggcctcctaaagtgctgggattacaggtgtgagccaccatgcccggcctctggttagctttccttttgcaccattgggatatcttgctattggtgtcacccacctcgctgttgggcaaggyatattgtgaagacactcaatggaaggagaaaacctgattactaatattatgctttttttttttttttgagatggagtctcactctgttgcccaggctggagtgcagtggcgcgacctcagctcacttcaacctccgcctcctgggttcaagtgattctcctacctcagcctccaaagtagctgggattacaggcgcccgtcaccacgcccggttaatttttgtatttttttaagtagagaaggggtttccccatgttggccaggctggtcttgaactcctgacctcaggtgatccacccaccttggcctcctaaagtactgggattacaggcgtgagccactgcgcccagcctactaatattattctatcaagtgctaataattatgaaggccatataaagtaatgtgaaaactgatctcttcaattaataggattattgg

SEQ ID NO: 699727 - DNA, 591 bp, Homo sapiens
catgacatcagcaagctgggaagaactttggatgtaatctaagcctaaactcctcattttacagatagtgaactatgatactggckatcatctacaaccaaaataataactgactcaaagtaacctgcacattcatgtaacatcggtggaacaactcaattacacattttcatgttttgaggccttaaatccttgttgtaagaggttgttcatttgaacccaggttcttaatgtttgcatgtatcttctaatttacagtcatgtgcagatttagatatatttaaaaatttcaaatcctgtacttcttccatagaccctgaattcacatttcattgttattaatggcatcaacatgccttttgtaaactatttaaaacaatgaataactttatacatttaagaattctgaattctattttctcttctctgcaactggatcagtggcgggggcttggagagagatgagaaaaacaagctctggactcccacagacttcagacattattaggtgctgtcattttctctgtatattctcattttcttccagtgacaatgtaatacttatgcaattaaacaaacatgatattaaat

SEQ ID NO: 699728 - DNA, 634 bp, Homo sapiens
aaaccattatatacaaaacgtaaagaaatgaaatacaaaaattaaaataaatgctgttctccctaataccttcatgttgttaactttgagccttagaaaaatgtgagaactgttttggctcagtagaagggtgctctgctccaacaatacaatgctttacagaccccaggtaacagaactccttcacaggggtgaaatgagtatttaatgagaacactgattgtcagccaaattttagcatgtaccctaagaaacaacggagatacaccatttcttacaaacagctcataaaaacagtagttaacaacaacaacaaaaaaamccacctagacttttaaaaaaatgattatgcttctttggagatgcagatatgtttgtatttggagttttctggccactttcctgtaatatttgcttaaataatttctttcaaccctttacgccaccacctgttatactgaggataaatacaagtctccaggagagaagcttcaaagtatctcactttatggaaacacaaaagcatcaaatcaggcagtttggttgtttaatcataaattgctattttccaactgctaaatttttttgtgtgtgtgatggtgtgttctgccaggtgaaactggcactatcacaa

SEQ ID NO: 699729 - DNA, 646 bp, Homo sapiens
ggcagttctaaactctacttgaatttcccaagtcagggaagggccacctgtggaaccattgcctctcccctgatgcccaagtacagctgcgtgcatacggcagaggtctagtttgggctttcgcttcagtggtcactgggagagaatttcagggtttcaggattttcccagttgtgatttcattttattgtcacaataactctgtgcaattgacagagtacacagtaaattcccaaggcatgtccatttattttgtctgttattgttgtttagccagtttgtattgagtcttttctttaagctagaaacttttaaatgagcatggatttatgtaaattaacccaaattatgcaccatattaaaggttaaaaagctgaggctgagagtagaccaggtgctcataccagattacatagcagaatcaaaatccagatcaatcagtttcccagtacatggctttttccaccaggggtcagtaaactctctttctgtaaaggtccagatagtaaacatgtaaggccatactatgtccataacaactactsacctctgtccttgcagtacaaaagcagtcctagacaatttgtaagaaatgagcatggctgtgttcctataaaatattattattttttctttaaaaaaaaaa

SEQ ID NO: 699730 - DNA, 615 bp, Homo sapiens
ggccaaagaggtggagcctgcaggccattttgcgaaagtttcaaatatcttggtactgaccccattaaaaaagcgtgaaggggaagcagccaagcctccagtggttttctcattagtgtcccccctcaccccagccccacccccattacaaacgtctgcatggataagaatcaaacaaagagatcttgcataaagtcctatgatcagtgctggctattgaaaacaaaatttcattttgcaaacttaataccaaaaacttgacattaaaaactttaaaagaaatgtgcgtgctctgggacagcttaatccccmaagagatctctgaggcattagtataagactgaacaagcaactggtgagctgtcccaccttccccagagcctttcttaaatatgcaactgtctcagattttccatactcctctgctggtttttcctccgaagagggaggaaggagacttcttggtcgtacagtttaagaaagcaaataaagccgcctttctccctaacgtagaggagccctttcaacacacacacacacacacacacacacacacacacacacacacacgtgtactttttaaaatataaatatgaaagaagaggaagggaggga

SEQ ID NO: 699731 - DNA, 805 bp, Homo sapiens
gagtgctgtggccccatcatagctcacagcagccttggacccctgagctcaagtgattctcaagcagtgcaccaccatacctggctaatttattttttttttaatttttagtttttgttgagacagggtttcactatgttgaccaggctggtcttgaattcctggcctgaagccatcctcccatgtcggcctctgaaaagcactgggattacaggtatgagccactgtgcttggctaaggtcatagtttataagtgactgtcatttactggcttcctaatcttttatactaccttaatttgttgatttcttcatgaaacttatttttaaaacttttttttaagaaataaagaaggcaaagagtttgagtgtcctcctgcacatagtatcactgttttttttttgggctactcctatgtactcagtactgtgtttgatactttaaatatattatttattttatacaattctggtatgatatgtatacaaataaaaatattgcaaaaatatcttaagtatcaagtcatctacagaaattatttgctaaaagtgacttcagaaaaagaagttattaccttacaatggaaggaatcaaggaaagttctatggaagtggtgacacacgtcctgtggattaaaaagttgggagaatatgttccatttcagctgccttaagtagtcttgaatgctcacatttggactctgagcagcgkgaaaaatgtcagcaagagtaactgatgcttgggatcagagcatttgcttgagcattccattcttcagctctttaaaatgtctttcttttattga

SEQ ID NO: 699732 - DNA, 605 bp, Homo sapiens
ttttttttttgagatggagtcttactcttgtcgcccatgctggagtgcaatggttcagtctcagttcactgcaacctccgactcctgggttcacctgattctcatgcctcagcctcccaagtagctgggattacaggtgaccaccaccacactggctaatttttttatatttttagtagggacagggtttcactatgttgcccaggcttgtctcaaactcctgacttcaggtggtctgcccacctcagcctcccaaagtgctgggattaaaggtgtgagccatggcacctggtccccagccaatttttaccccattcactatttcatcaaggctgtgtacatgtgagacttaatttcactttttyatatagtactgtatcaaacgttttattaaattccaactcaactctcctactcttctgtatctgacatttattgtcactttttctggaaaatctgtctacttatttggaataaataactgatccaaaaacccatagtcaaattttatgacttgggtacttctggagcttgaatattatcactaaattcagacattggatttgctgtacatccccagaaatttctcaaaaaataataatttc

SEQ ID NO: 699733 - DNA, 995 bp, Homo sapiens
tattttcttcattgtgagtccaataccaggtatgaatccaggtgcaaaacatctctgatgattatactcttggataaatgaggctgaattactatggttatgacattttctgctattccattctaagggcactcaagtaactggggaagaagcttcttcaacctcttagctgtgttgccttctgaataattgcctgaaatattgaatactgatattgtcagcagaaataatttataattttttaaagtaacttcctcttcaattgttgattttaaacacagctttcaaggagttgtggtctattattttaccttatattttatgtaagttgattatayagtttgtgaatagtttatcatgataaatatattttattcttttattgcaaactctttagggaatgaaaagtctggaaaacaaatgttacatatggaaacaaggtaatgcatatatcccagactcatcaaagattagaactggtaaagaacttaaattttaatcagtattaaagctttcattttctagattagaaacctagggaccagagaaaaaaatccaaagtcacagaaaacaggtacaataagatgacaaatccatgagagaagtaaaactgaggggatagacgcccaaattgtttcagttcttttcttgaagaaaagctaattgactacagcatagtgagctggaatccaggactaacacagctgtcacactgggttgaggaagcaaaggtttgttatgaggggaggctaaagctgttgggatccacagtgcaatgggaacgaagggattcagcaaggtagtctccagaaacttgtttgggtcctgtgtgagtcttcagctgagagctgggcagcacctgtgcagccttgagagttaccaaagaatagcttataaagttgtgagcagaacagagataacagtggtctagtgatgttggaagtaattgttttttcaaacagagtggagacacgtaatagtactctattagcatt

SEQ ID NO: 699734 - DNA, 594 bp, Homo sapiens
tcattaaaaaagtgaagtctcaccatttgcagcaatatggatggaactggaggtcattatgttaggtgarataagatagagaacaacaaatatcacatgttctcactcccacatgttctcatgtgtgggagctgaaaaagtgcatctcacagaggtagagaatagaatggtgactgttagaggctgggaagggagtgagagaggaggtagctgaagagaagttgtctaatgggtaaaaaatacagttggatagaaggaataagttgtagtattcaatagcacagtagggaaattgtagctaataacaatttattgaatattccaaattacctagaaaaggaaaaattgtaatgttcccaatctaaaaaaaagataaatgtttgaggtatagatattccaattaccctaacttgatcattacacactatatacaagtattaaaatatcacacacaaccccaaaatatgtacagctatgatgtatcaataaaaataccaaaaatactccaaaacacagatttaatatagaacttgcttcaaagctgtattttacccccattagacccaacatcagtgatttagtatcagcaaaata

SEQ ID NO: 699735 - DNA, 594 bp, Homo sapiens
tcattaaaaaagtgaagtctcaccatttgcagcaatatggatggaactggaggtcattatgttaggtgagataagatagagaacaacaaatatcacatgttctcactcccacatgttctcatgtgtgggagctgaaaaagtgcatctcacagaggtagagaatagaatggtgactgttagaggctgggaagggagtgagagaggaggtagctgaagagaagttgtctaatgggtaaaaaatacagttggatagaaggaataagttgtagtattcaatagcacagtagggaaattgtagctaataacaatttattgaatattccaaattacctagaaaaggaaaaattgtaatgttcccaatctaaaraaaagataaatgtttgaggtatagatattccaattaccctaacttgatcattacacactatatacaagtattaaaatatcacacacaaccccaaaatatgtacagctatgatgtatcaataaaaataccaaaaatactccaaaacacagatttaatatagaacttgcttcaaagctgtattttacccccattagacccaacatcagtgatttagtatcagcaaaata

SEQ ID NO: 699736 - DNA, 1086 bp, Homo sapiens
atctattattaccttagtctaaggaatcatcatatttccctggatcatcatcataacctcttgctaattcctaaattttttaacatgccacatcagactcaaatcctttaaaaacataacaaatcactaaatttccctgcataatatctgtctgtctataattccccccttatcttctgcatagcatacaattatgatcaagatcattttcatttattcatgttcccactaaaatgtgtatgtagccaggcatgaaggcacatacatgtagtcacagctacttgggaggctgaggcaggagaatggtgtgaacccaggaggcggacttgcagtgagccgagatcgcgccactscactccagcctgggcgacacagcgaaactcgttctcaaaaaaaaaaaaaaaaaaaaaaaaaaaaaaaaaaaaaattctcatacagaagtataatcattaagcggataatgactaaatcaaaattgtggccttcctaacatgggataactgaagagaacaactcctaacagttagatgcctatatgagaaggaaaaagagcactaaaatttattgtgtaaaatggatggcaggactaaattatctctacagtcccttccagcagtaaaattaaattaaattccataataattatgacaactcttgacatctactaagcatctgccctctctgtgccaggcactgtgctaggtgctttgcatgggttaatcagaatatgtccctaagactgtttctatgagatacctgtctatttaaacagccctaacagacaagagatccaagaggaagatagatcctttctttaaaatttatctgatataaagcaaaatggaaatggaaggtctaaaatctctgtggggtctgccttgttcactgagacaggcagtggctggcttttgtatgaagtgcttccctaaagatcagatgccagagctgctgagaagggtatcagaaagtaaaacaccagaacccagccgggcgcggtggctcacgcctataatcctagcactttgggaggccaaggcaggcggatcacttgaggtcaggagtttgagaccagtctggctaacatgg

SEQ ID NO: 699737 - DNA, 1839 bp, Homo sapiens
atttcagtattattcacaagagcgaagatatggagacaatgtgagtgtccatcagtgggcaaatagataaaaygtgtgtgcgtgtgtatgcacgtgtcggtatttcattgtatgtggacttctagtgtgtgaatatctagtccttgttggcatgataccttttgaaaggtaaggtagagtctttttcttttcttttttgaggtggagtcttgctctgtcgcccaggctggagtgcagtggtgcgatctccgctcactgcaagctccgcctcccgggttcacaccattctcctgcctcagcctcccaagtagctgtgactacaggcgcctaccaccacacccagccaagttttttgtatttttagtagagacggggtttcaccatgttagccaggatggtctcaatctcctgacctcgtgatgtgcctgccttggcctcccaaagtcctgggattacaggcatgagccaccgtgcctggccagtgtaaggtagaatctttttctaagatggagttacttacatcaagggtgctctatagacatttccttctttctagccccagcccaaggaatctttgaaggaaaggtagaagatacgtctcaaggttactactgaagaaaacacaaaaaactgttcgttggcagttaatagttgtctgggtattgctatttatgaaatagaataattaagactttaaattaaatttgatttaaacttgtcacctatagataaatgtcaagttttagaccttaaggtaattattgtatggttgaaaataaatacagcaccaatgatattttacttgacctattttgctatgcgatcagttttttttttgtatttaaaaattactaaattggctaggcatggtggctcacacctataatccaagcactttgagaggctgaggtgggcagagctcttgagcccaggagtttgaaccagcctgggcaacatggcaaaaccatgtctctacaaaaactaccaaaatcaactgggcgtggtggctcatgcctgtagtcccagctgtttgggaggctgaggtggaaggaccgcttgagcctgggaggttgaggctgcagtaagctgtgatcatgccactgcactccagcctgggtgccagaaaataactttgtctcaaaaaaaaaaaaaaaaatgttctcccaaaactctatccactttcccgcactaagtagagtgactgtaatctcacacagttgagaacatttagacataatgtggctttgtgggagaggtgaccttctagattctgaagggtttcaaggactcatttccaatagaacaactataattgcagtatcctagaaaagggcttagagagaagaagaggaaagaaaaaaaaggtgattcataaatacagatgtagacactaggacaataatacatgcgataattgtgaccttggcattcttactgtgaatttccattgaattgctgtaagttagattctctgttctgtttacttctttgcacatgactttatacttgtgtgtgaaaaaaaaaaaaactgaactgtgatttgaggatccttagcttttaatctaaaagaatgagttggtacgacctctggaacatacttctggaaggaagaattacctaagagaatggtttttctgctagtcagaaatctaagttttgtatgctagcttgcaagttaaggatagaaaaggctttccctggccgggtgcggtggctcatgcctgtcatctcagcactttgggaggccaaggcaggtggatcacgaggtcaagagactgagaccatcctggccaacatggtgaaaccctgtctctactaaaaataaaaaatcagctgggc

SEQ ID NO: 699738 - DNA, 1839 bp, Homo sapiens
atttcagtattattcacaagagcgaagatatggagacaatgtgagtgtccatcagtgggcaaatagataaaacgtgtgtgcgtgtgtatgcacgtgtcggtatttcattgtatgtggacttctagtgtgtgaatatctagtccttgttggcatgataccttttgaaaggtaaggtagagtctttttcttttcttttttgaggtggagtcttgctctgtcgcccaggctggagtgcagtggtgcgatctccgctcactgcaagctccgcctcccgggttcacaccattctcctgcctcagcctcccaagtagctgygactacaggcgcctaccaccacacccagccaagttttttgtatttttagtagagacggggtttcaccatgttagccaggatggtctcaatctcctgacctcgtgatgtgcctgccttggcctcccaaagtcctgggattacaggcatgagccaccgtgcctggccagtgtaaggtagaatctttttctaagatggagttacttacatcaagggtgctctatagacatttccttctttctagccccagcccaaggaatctttgaaggaaaggtagaagatacgtctcaaggttactactgaagaaaacacaaaaaactgttcgttggcagttaatagttgtctgggtattgctatttatgaaatagaataattaagactttaaattaaatttgatttaaacttgtcacctatagataaatgtcaagttttagaccttaaggtaattattgtatggttgaaaataaatacagcaccaatgatattttacttgacctattttgctatgcgatcagttttttttttgtatttaaaaattactaaattggctaggcatggtggctcacacctataatccaagcactttgagaggctgaggtgggcagagctcttgagcccaggagtttgaaccagcctgggcaacatggcaaaaccatgtctctacaaaaactaccaaaatcaactgggcgtggtggctcatgcctgtagtcccagctgtttgggaggctgaggtggaaggaccgcttgagcctgggaggttgaggctgcagtaagctgtgatcatgccactgcactccagcctgggtgccagaaaataactttgtctcaaaaaaaaaaaaaaaaatgttctcccaaaactctatccactttcccgcactaagtagagtgactgtaatctcacacagttgagaacatttagacataatgtggctttgtgggagaggtgaccttctagattctgaagggtttcaaggactcatttccaatagaacaactataattgcagtatcctagaaaagggcttagagagaagaagaggaaagaaaaaaaaggtgattcataaatacagatgtagacactaggacaataatacatgcgataattgtgaccttggcattcttactgtgaatttccattgaattgctgtaagttagattctctgttctgtttacttctttgcacatgactttatacttgtgtgtgaaaaaaaaaaaaactgaactgtgatttgaggatccttagcttttaatctaaaagaatgagttggtacgacctctggaacatacttctggaaggaagaattacctaagagaatggtttttctgctagtcagaaatctaagttttgtatgctagcttgcaagttaaggatagaaaaggctttccctggccgggtgcggtggctcatgcctgtcatctcagcactttgggaggccaaggcaggtggatcacgaggtcaagagactgagaccatcctggccaacatggtgaaaccctgtctctactaaaaataaaaaatcagctgggc

SEQ ID NO: 699739 - DNA, 1839 bp, Homo sapiens
atttcagtattattcacaagagcgaagatatggagacaatgtgagtgtccatcagtgggcaaatagataaaacgtgtgtgcgtgtgtatgcacgtgtcggtatttcattgtatgtggacttctagtgtgtgaatatctagtccttgttggcatgataccttttgaaaggtaaggtagagtctttttcttttcttttttgaggtggagtcttgctctgtcgcccaggctggagtgcagtggtgcgatctccgctcactgcaagctccgcctcccgggttcacaccattctcctgcctcagcctcccaagtagctgtgactacaggcgcctaccaccacrcccagccaagttttttgtatttttagtagagacggggtttcaccatgttagccaggatggtctcaatctcctgacctcgtgatgtgcctgccttggcctcccaaagtcctgggattacaggcatgagccaccgtgcctggccagtgtaaggtagaatctttttctaagatggagttacttacatcaagggtgctctatagacatttccttctttctagccccagcccaaggaatctttgaaggaaaggtagaagatacgtctcaaggttactactgaagaaaacacaaaaaactgttcgttggcagttaatagttgtctgggtattgctatttatgaaatagaataattaagactttaaattaaatttgatttaaacttgtcacctatagataaatgtcaagttttagaccttaaggtaattattgtatggttgaaaataaatacagcaccaatgatattttacttgacctattttgctatgcgatcagttttttttttgtatttaaaaattactaaattggctaggcatggtggctcacacctataatccaagcactttgagaggctgaggtgggcagagctcttgagcccaggagtttgaaccagcctgggcaacatggcaaaaccatgtctctacaaaaactaccaaaatcaactgggcgtggtggctcatgcctgtagtcccagctgtttgggaggctgaggtggaaggaccgcttgagcctgggaggttgaggctgcagtaagctgtgatcatgccactgcactccagcctgggtgccagaaaataactttgtctcaaaaaaaaaaaaaaaaatgttctcccaaaactctatccactttcccgcactaagtagagtgactgtaatctcacacagttgagaacatttagacataatgtggctttgtgggagaggtgaccttctagattctgaagggtttcaaggactcatttccaatagaacaactataattgcagtatcctagaaaagggcttagagagaagaagaggaaagaaaaaaaaggtgattcataaatacagatgtagacactaggacaataatacatgcgataattgtgaccttggcattcttactgtgaatttccattgaattgctgtaagttagattctctgttctgtttacttctttgcacatgactttatacttgtgtgtgaaaaaaaaaaaaactgaactgtgatttgaggatccttagcttttaatctaaaagaatgagttggtacgacctctggaacatacttctggaaggaagaattacctaagagaatggtttttctgctagtcagaaatctaagttttgtatgctagcttgcaagttaaggatagaaaaggctttccctggccgggtgcggtggctcatgcctgtcatctcagcactttgggaggccaaggcaggtggatcacgaggtcaagagactgagaccatcctggccaacatggtgaaaccctgtctctactaaaaataaaaaatcagctgggc

SEQ ID NO: 699740 - DNA, 1839 bp, Homo sapiens
atttcagtattattcacaagagcgaagatatggagacaatgtgagtgtccatcagtgggcaaatagataaaacgtgtgtgcgtgtgtatgcacgtgtcggtatttcattgtatgtggacttctagtgtgtgaatatctagtccttgttggcatgataccttttgaaaggtaaggtagagtctttttcttttcttttttgaggtggagtcttgctctgtcgcccaggctggagtgcagtggtgcgatctccgctcactgcaagctccgcctcccgggttcacaccattctcctgcctcagcctcccaagtagctgtgactacaggcgcctaccaccacacccagccaagttttttgtatttttagtagagacggggtttcaccatgttagccaggatggtctcaatctcctsacctcgtgatgtgcctgccttggcctcccaaagtcctgggattacaggcatgagccaccgtgcctggccagtgtaaggtagaatctttttctaagatggagttacttacatcaagggtgctctatagacatttccttctttctagccccagcccaaggaatctttgaaggaaaggtagaagatacgtctcaaggttactactgaagaaaacacaaaaaactgttcgttggcagttaatagttgtctgggtattgctatttatgaaatagaataattaagactttaaattaaatttgatttaaacttgtcacctatagataaatgtcaagttttagaccttaaggtaattattgtatggttgaaaataaatacagcaccaatgatattttacttgacctattttgctatgcgatcagttttttttttgtatttaaaaattactaaattggctaggcatggtggctcacacctataatccaagcactttgagaggctgaggtgggcagagctcttgagcccaggagtttgaaccagcctgggcaacatggcaaaaccatgtctctacaaaaactaccaaaatcaactgggcgtggtggctcatgcctgtagtcccagctgtttgggaggctgaggtggaaggaccgcttgagcctgggaggttgaggctgcagtaagctgtgatcatgccactgcactccagcctgggtgccagaaaataactttgtctcaaaaaaaaaaaaaaaaatgttctcccaaaactctatccactttcccgcactaagtagagtgactgtaatctcacacagttgagaacatttagacataatgtggctttgtgggagaggtgaccttctagattctgaagggtttcaaggactcatttccaatagaacaactataattgcagtatcctagaaaagggcttagagagaagaagaggaaagaaaaaaaaggtgattcataaatacagatgtagacactaggacaataatacatgcgataattgtgaccttggcattcttactgtgaatttccattgaattgctgtaagttagattctctgttctgtttacttctttgcacatgactttatacttgtgtgtgaaaaaaaaaaaaactgaactgtgatttgaggatccttagcttttaatctaaaagaatgagttggtacgacctctggaacatacttctggaaggaagaattacctaagagaatggtttttctgctagtcagaaatctaagttttgtatgctagcttgcaagttaaggatagaaaaggctttccctggccgggtgcggtggctcatgcctgtcatctcagcactttgggaggccaaggcaggtggatcacgaggtcaagagactgagaccatcctggccaacatggtgaaaccctgtctctactaaaaataaaaaatcagctgggc

SEQ ID NO: 699741 - DNA, 1839 bp, Homo sapiens
atttcagtattattcacaagagcgaagatatggagacaatgtgagtgtccatcagtgggcaaatagataaaacgtgtgtgcgtgtgtatgcacgtgtcggtatttcattgtatgtggacttctagtgtgtgaatatctagtccttgttggcatgataccttttgaaaggtaaggtagagtctttttcttttcttttttgaggtggagtcttgctctgtcgcccaggctggagtgcagtggtgcgatctccgctcactgcaagctccgcctcccgggttcacaccattctcctgcctcagcctcccaagtagctgtgactacaggcgcctaccaccacacccagccaagttttttgtatttttagtagagacggggtttcaccatgttagccaggatggtctcaatctcctgacctcgtgatgtgcctgccttggcctcccaaagtcctgggattacaggcatgagccaccgtgcctggccagtgtaaggtagaatctttttctaagatggagttacttacatcaagggtgctctatagacatttccttctttctagccccagcccaaggaatctttgaaggaaaggtagaagatacgtctcaaggttactactgaagaaaacacaaaaaactgttcgttggcagttaatagttgtctgggtattgctatttatgaaatagaataattaagactttaaattaaatttgatttaaacttgtcacctatagataaatgtcaagttttagaccttaaggtaattattgtatggttgaaaataaatacagcaccaatgatattttacttgacctattttgctatgcgatcagttttttttttgtatttaaaaattactaaattggctaggcatggtggctcacacctataatccaagcactttgagaggctgaggtgggcagagctcttgagcccaggagtttgaaccagcctgggcaacatggcaaaaccatgtctctacaaaaactaccaaaatcaactgggcgtggtggctcatgcctgtagtcccagctgtttgggaggctgaggtggaaggaccgcttgagcctgggaggttgagsctgcagtaagctgtgatcatgccactgcactccagcctgggtgccagaaaataactttgtctcaaaaaaaaaaaaaaaaatgttctcccaaaactctatccactttcccgcactaagtagagtgactgtaatctcacacagttgagaacatttagacataatgtggctttgtgggagaggtgaccttctagattctgaagggtttcaaggactcatttccaatagaacaactataattgcagtatcctagaaaagggcttagagagaagaagaggaaagaaaaaaaaggtgattcataaatacagatgtagacactaggacaataatacatgcgataattgtgaccttggcattcttactgtgaatttccattgaattgctgtaagttagattctctgttctgtttacttctttgcacatgactttatacttgtgtgtgaaaaaaaaaaaaactgaactgtgatttgaggatccttagcttttaatctaaaagaatgagttggtacgacctctggaacatacttctggaaggaagaattacctaagagaatggtttttctgctagtcagaaatctaagttttgtatgctagcttgcaagttaaggatagaaaaggctttccctggccgggtgcggtggctcatgcctgtcatctcagcactttgggaggccaaggcaggtggatcacgaggtcaagagactgagaccatcctggccaacatggtgaaaccctgtctctactaaaaataaaaaatcagctgggc

SEQ ID NO: 699742 - DNA, 578 bp, Homo sapiens
tgtgacatccaatttggtagctcagagccagtttattagggtaaggcttgcaaaatctggcttcagtatgagtggtctccccgggtgccaagtgatattgtaggatttagcatacacattagggctgggagcagtggctcacacctgtaatcccagcgctttgggaagctgaggcaggcggatcacttgaggctaggagttcgagactagcctggccaacatggcgaaaccccrtctctactaaaaatacaaaaaattagctgagcgtggtcgcacacacctgtaatcccggctactcaagaggctgaggcatgagaatcgcctgaaacccggaggtggaggttgcagtgagccgagatctcgccagtgcactccagcctcggtgacatagtgagactctgtctcaaaacaaaaaacaaaaaacatatatattagtaattgtttgttcctttgatgggcagaaatgcaaaaacaaccaatttttaatgatgatatcctttctaagagggtatagaaagtgggttgcatccatcaggaaactttatgataatctataatctaaaaacattctccaaacc

SEQ ID NO: 699743 - DNA, 1238 bp, Homo sapiens
tgtgggggaggaaatgagtgggagaggagacagccacctgctcctgtggagggcttctgtggggtgaagctcaatcctagggtgatgggagttcctttgtctccatcagttgcacagccagggacagagagaagggttgggacctggaaatcagagtggcagaacaagcactaaatgaatgttctattgttatgatttgtggttctggaactgggcagaagcctgtatcctgggacagaatggcaggtcatagcaggaccagccattacaaaatgggctgctgcaccttatgaaaatttaggtagggactttcagccttcctgctcaaaagggtgggctttagctacactcccggaccaaacagagcccctactactggcttcatgtgaaatattttctagaaaatactgacgcacaggccattttcagaccaattacacctttgtccctagaggtgctacccaggtattttataaaagatttctaaatgattgtagtgtgcagccaggggtttagagctacccatgcagagccaagctgtcctgttcatgggcagaggctgaagagaccaggaagggcaggagatgaagaaagaattgtctaggtctcttggaaagatcaagactctttgaagcttaaacacttaatttttatctccaaataatacaaccataaatttattgagcataattggaaaagggatttactctggaataagtgtctttttatgtcaaatattaatagaatggtattaatttgaaaaatgattcacttccataaaaagcttgctttccaaacaaaataatacatttcttaatataaaagtttaaaagaaattaataaaagtttacatgttcttgatttatgagtaaataaggcattgaaattacaaaattttattctgttggatgatctatatcataataccttctgacaaaaatgcttatctattcttaagatgttttgtttattcttttgtttaccttactgccaaaatatttagcctcatcaytggtaataaaatagtcaattttttcatttatgcaacaaaggtttactgttaaaacataaagcattttttggtttgtttgtttattttaatttgtcacaggtaaacttagcatgcctgtgtcagcagattcaaattccagcaaagggacctgtccccatggatttaccatagaaaggttgcataaaattgtaataaacaatttttctgggctcaaaaaaaatgtgca

SEQ ID NO: 699744 - DNA, 1238 bp, Homo sapiens
tgtgggggaggaaatgagtgggagaggagacagccacctgctcctgtggagggcttctgtggggtgaagctcaatcctagggtgatgggagttcctttgtctccatcagttgcacagccagggacagagagaagggttgggacctggaaatcagagtggcagaacaagcactaaatgaatgttctattgttatgatttgtggttctggaactgggcagaagcctgtatcctgggacagaatggcaggtcatagcaggaccagccattacaaaatgggctgctgcaccttatgaaaatttaggtagggactttcagccttcctgctcaaaagggtgggctttagctacactcccggaccaaacagagcccctactactggcttcatgtgaaatattttctagaaaatactgacgcacaggccattttcagaccaattacacctttgtccctagaggtgctacccaggtattttataaaagatttctaaatgattgtagtgtgcagccaggggtttagagctacccatgcagagccaagctgtcctgttcatgggcagaggctgaagagaccaggaagggcaggagatgaagaaagaattgtctaggtctcttggaaagatcaagactctttgaagcttaaacacttaatttttatctccaaataatacaaccataaatttattgagcataattggaaaagggatttactctggaataagtgtctttttatgtcaaatattaatagaatggtattaatttgaaaaatgattcacttccataaaaagcttgctttccaaacaaaataatacatttcttaatataaaagtttaaaagaaattaataaaagtttacatgttcttgatttatgagtaaataaggcattgaaattacaaaattttattctgttggatgatctatatcataataccttctgacaaaaatgcttatctattcttaagatgttttgtttattcttttgtttaccttactgccaaaatatttagcctcatcactgrtaataaaatagtcaattttttcatttatgcaacaaaggtttactgttaaaacataaagcattttttggtttgtttgtttattttaatttgtcacaggtaaacttagcatgcctgtgtcagcagattcaaattccagcaaagggacctgtccccatggatttaccatagaaaggttgcataaaattgtaataaacaatttttctgggctcaaaaaaaatgtgca

SEQ ID NO: 699745 - DNA, 1238 bp, Homo sapiens
tgtgggggaggaaatgagtgggagaggagacagccacctgctcctgtggagggcttctgtggggtgaagctcaatcctagggtgatgggagttcctttgtctccatcagttgcacagccagggacagagagaagggttgggacctggaaatcagagtggcagaacaagcactaaatgaatgttctattgttatgatttgtggttctggaactgggcagaagcctgtatcctgggacagaatggcaggtcatagcaggaccagccattacaaaatgggctgctgcaccttatgaaaatttaggtagggactttcagccttcctgctcaaaagggtgggctttagctacactcccggaccaaacagagcccctactactggcttcatgtgaaatattttctagaaaatactgacgcacaggccattttcagaccaattacacctttgtccctagaggtgctacccaggtattttataaaagatttctaaatgattgtagtgtgcagccaggggtttagagctacccatgcagagccaagctgtcctgttcatgggcagaggctgaagagaccaggaagggcaggagatgaagaaagaattgtctaggtctcttggaaagatcaagactctttgaagcttaaacacttaatttttatctccaaataatacaaccataaatttattgagcataattggaaaagggatttactctggaataagtgtctttttatgtcaaatattaatagaatggtattaatttgaaaaatgattcacttccataaaaagcttgctttccaaacaaaataatacatttcttaatataaaagtttaaaagaaattaataaaagtttacatgttcttgatttatgagtaaataaggcattgaaattacaaaattttattctgttggatgatctatatcataataccttctgacaaaaatgcttatctattcttaagatgttttgtttattcttttgtttaccttactgccaaaatatttagcctcatcactggtaataaaatartcaattttttcatttatgcaacaaaggtttactgttaaaacataaagcattttttggtttgtttgtttattttaatttgtcacaggtaaacttagcatgcctgtgtcagcagattcaaattccagcaaagggacctgtccccatggatttaccatagaaaggttgcataaaattgtaataaacaatttttctgggctcaaaaaaaatgtgca

SEQ ID NO: 699746 - DNA, 889 bp, Homo sapiens
atttgtaaacwttgtaattgatgactgaattggcctttgtatgtcaagtatgtttaccagcaacctaggatacaatgtttaagccagtttgttgttgcctctgccttaggtaagggagacccgtgctgcctaccatccaaatatttctcaaattttcccaaagcctgtccaagcactccttaaccataccactcttctagatatttaggagccaccaggccaatccatttacacaaagtagagagagcgtattctggttatttattgctgtatgacagattatcctgaaacctagcagcttaaaacagcaactattttattatgtctcatgattttgaggggcagggtagggctcagatgtctggcacctgtgcgtggatggctggaaggtcaagatcagctaggactgtcaaccagagcaattacatgtggcctctcctgcgtgttggtctcagagtataaggacttctttctttttttttttttttttttttttgagacggagtctcgctctgtcgcccaggctggagtgcagtggcgcgatctccgcttactgcaagctccgcctcccgggttcatgccattctcctgcctcagcctcccgagtagctggaactacaggcgcccgccaccacgcccggctaattttttgtacttttagtacaaaaaaatttagtagagacggggtttcaccctgttagccaggatagtctcaatctcctgaccttgtgatctgcctgcctcggcctcccaaagtgctgggattacaggcgtgagccaccgcgcccagccgaggacttctttaaaaaaaaaaaattacgtaaattgcaaactttttcttgtatttttgtttactgtttggtaaaatattcgttacataaaatttacc

SEQ ID NO: 699747 - DNA, 889 bp, Homo sapiens
atttgtaaactttgtaattgatgactgaattggcctttgtatgtcaagtatgtttaccagcaacctaggatacaatgtttaagccagtttgttgttgcctctgccttaggtaagggagacccgtgctgcctaccatccaaatatttctcaaattttcccaaagcctgtccaagcactccttaaccataccactcttctagatatttmggagccaccaggccaatccatttacacaaagtagagagagcgtattctggttatttattgctgtatgacagattatcctgaaacctagcagcttaaaacagcaactattttattatgtctcatgattttgaggggcagggtagggctcagatgtctggcacctgtgcgtggatggctggaaggtcaagatcagctaggactgtcaaccagagcaattacatgtggcctctcctgcgtgttggtctcagagtataaggacttctttctttttttttttttttttttttttgagacggagtctcgctctgtcgcccaggctggagtgcagtggcgcgatctccgcttactgcaagctccgcctcccgggttcatgccattctcctgcctcagcctcccgagtagctggaactacaggcgcccgccaccacgcccggctaattttttgtacttttagtacaaaaaaatttagtagagacggggtttcaccctgttagccaggatagtctcaatctcctgaccttgtgatctgcctgcctcggcctcccaaagtgctgggattacaggcgtgagccaccgcgcccagccgaggacttctttaaaaaaaaaaaattacgtaaattgcaaactttttcttgtatttttgtttactgtttggtaaaatattcgttacataaaatttacc

SEQ ID NO: 699748 - DNA, 889 bp, Homo sapiens
atttgtaaactttgtaattgatgactgaattggcctttgtatgtcaagtatgtttaccagcaacctaggatacaatgtttaagccagtttgttgttgcctctgccttaggtaagggagacccgtgctgcctaccatccaaatatttctcaaattttcccaaagcctgtccaagcactccttaaccataccactcttctagatatttaggagccaccaggccaatccatttacacaaagtagagagagcgtattctggttatttattgctgtatgacagattatcctgaaacctagcagcttaaaacagcaactattttattatgtctcatgattttgaggggcagggtagggctcagatgtctggcacctgtgcgtggatggctggaaggtcaagatcagctaggactgtcaaccagagcaattacatgtggcctctcctgcrtgttggtctcagagtataaggacttctttctttttttttttttttttttttttgagacggagtctcgctctgtcgcccaggctggagtgcagtggcgcgatctccgcttactgcaagctccgcctcccgggttcatgccattctcctgcctcagcctcccgagtagctggaactacaggcgcccgccaccacgcccggctaattttttgtacttttagtacaaaaaaatttagtagagacggggtttcaccctgttagccaggatagtctcaatctcctgaccttgtgatctgcctgcctcggcctcccaaagtgctgggattacaggcgtgagccaccgcgcccagccgaggacttctttaaaaaaaaaaaattacgtaaattgcaaactttttcttgtatttttgtttactgtttggtaaaatattcgttacataaaatttacc

SEQ ID NO: 699749 - DNA, 889 bp, Homo sapiens
atttgtaaactttgtaattgatgactgaattggcctttgtatgtcaagtatgtttaccagcaacctaggatacaatgtttaagccagtttgttgttgcctctgccttaggtaagggagacccgtgctgcctaccatccaaatatttctcaaattttcccaaagcctgtccaagcactccttaaccataccactcttctagatatttaggagccaccaggccaatccatttacacaaagtagagagagcgtattctggttatttattgctgtatgacagattatcctgaaacctagcagcttaaaacagcaactattttattatgtctcatgattttgaggggcagggtagggctcagatgtctggcacctgtgcgtggatggctggaaggtcaagatcagctaggactgtcaaccagagcaattacatgtggcctctcctgcgtgttggtctcagagtatraggacttctttctttttttttttttttttttttttgagacggagtctcgctctgtcgcccaggctggagtgcagtggcgcgatctccgcttactgcaagctccgcctcccgggttcatgccattctcctgcctcagcctcccgagtagctggaactacaggcgcccgccaccacgcccggctaattttttgtacttttagtacaaaaaaatttagtagagacggggtttcaccctgttagccaggatagtctcaatctcctgaccttgtgatctgcctgcctcggcctcccaaagtgctgggattacaggcgtgagccaccgcgcccagccgaggacttctttaaaaaaaaaaaattacgtaaattgcaaactttttcttgtatttttgtttactgtttggtaaaatattcgttacataaaatttacc

SEQ ID NO: 699750 - DNA, 1408 bp, Homo sapiens
gcctggcacccaggatatagcctttatcctgtataaaggataagaagataaagacagaggcttttccttctgtatggagtagacacaggagttcaagtttatctcccagagtgttccatcasggcaaaaatttctggaatatgaggtctagcagagactgttctttctctgggcccagtaagaaggtactctgaaattggtagtgagccagaatttagccatagacaaatagatctttttgctaacacttactaaagacagaacactttgggaattcagatacaggagaatcttttatggcattttaaaatagccctgccctccactcctcccctaacttcagacaaatcactttagattaccgaataaaaaattaaggaagagcatctatttcagatgcagaacaaacaaatcttaagatgtttcttgaatatcatttaaatttagagtaaggaaaaactatgcatctgtcctctatgtttgatgcttacctcttgtcttttagctactatacactgaataagtgacccagggaaatataaggaactaattttgaatagtttcattttcaaaagtaagaatttgggtttctaaggaaaatgagttatttttaatatccatatatacacttttgttttatagcaattaaatacccacatcaggtaaactctgcccaaggttgccctatatttttgggtccccggagggtttttgggttttttttctttttagttattattgcttattcgtgtttgttttttgtttttgcagttctgttgttcagctagagaagttgtgaattttctgccttagcaggacagactctaaccttaggatactagactaacactttttgttttgcaactggaattagtaaaatacattttctccacttattcggtaattttttttgttttttttgagacagagtcttactctgtcacccaggctgtagtgcagtggtgcaatctcggctcactgcaacctccgtctcccgggttcaagcaattctcctgcctcagcctcccgagtagctgggattacaggtacccaccaccatgtctggctaatttttttgtatttttagtagagacggggtttcaccatgtggccaggctggccttgaactcctgacctcaggtaatccacctgcttcagcctcccaaagtgctgggattacaggcgtgagccaccgcgcctgtcctgttctgtaatttttaaagattctgacttcacttgggtaaggagggggcaaaagtacctttgacgaaataatgcttcaacaatagccctcccaggggacttaggcacacatgtctctcaccaccactgggaattactttatgtttggtgacaaagaccccatggtagtttgcaaggccaaacagtatagtcatccatcctgttc

SEQ ID NO: 699751 - DNA, 637 bp, Homo sapiens
atttcagccaaaacttctcattctactaagaaacagaaaatgcatgtatcttatttttaatacatgtactaaaattagcattgatatactaaatagacacgtgtagcttacacaacaatttcagatcttctaattcttaaagctagggactttagtatccatgtattaattaatcctgctcatataatgggaagtagtcaaaaaattgacaacagaaaaaactgttggcattgtgtcttatgcctcatcgagcaaataatagcacaccaccctcattttcagcaaagtagatttgaggaggtagagaaaagaaaaatttccggaactcattgattattctaattttatggagctttgtttaaaaaagttcaagttctaaacagttgctgtcatctttgcttcatttatttagtgcttctatttctgtctcaaaatcattttcaggactttcaaaaattgtattattacaaaratagaatctgacttctcatcctgtttttataacgtattacttaatatactacatcttctagaacataaacatctttccaaacaccacatttctttttgtttttaaatatagcagctatcatatgagtagcttttacatattttatttctgcttttgatcttcaac

SEQ ID NO: 699752 - DNA, 637 bp, Homo sapiens
atttcagccaaaacttctcattctactaagaaacagaaaatgcatgtatcttatttttaatacatgtactaaaattagcattgatatactaaatagacacgtgtagcttacacaacaatttcagatcttctaattcttaaagctagggactttagtatccatgtattaattaatcctgctcatataatgggaagtagtcaaaaaattgacaacagaaaaaactgttggcattgtgtcttatgcctcatcgagcaaataatagcacaccaccctcattttcagcaaagtagatttgaggaggtagagaaaagaaaaatttccggaactcattgattattctaattttatggagctttgtttaaaaaagttcaagttctaaacagttgctgtcatctttgcttcatttatttagtgcttctatttctgtctcaaaatcattttcaggactttcaaaaattgtattattacaaagawagaatctgacttctcatcctgtttttataacgtattacttaatatactacatcttctagaacataaacatctttccaaacaccacatttctttttgtttttaaatatagcagctatcatatgagtagcttttacatattttatttctgcttttgatcttcaac

SEQ ID NO: 699753 - DNA, 637 bp, Homo sapiens
atttcagccaaaacttctcattctactaagaaacagaaaatgcatgtatcttatttttaatacatgtactaaaattagcattgatatactaaatagacacgtgtagcttacacaacaatttcagatcttctaattcttaaagctagggactttagtatccatgtattaattaatcctgctcatataatgggaagtagtcaaaaaattgacaacagaaaaaactgttggcattgtgtcttatgcctcatcgagcaaataatagcacaccaccctcattttcagcaaagtagatttgaggaggtagagaaaagaaaaatttccggaactcattgattattctaattttatggagctttgtttaaaaaagttcaagttctaaacagttgctgtcatctttgcttcatttatttagtgcttctatttctgtctcaaaatcattttcaggactttcaaaaattgtattattacaaagataraatctgacttctcatcctgtttttataacgtattacttaatatactacatcttctagaacataaacatctttccaaacaccacatttctttttgtttttaaatatagcagctatcatatgagtagcttttacatattttatttctgcttttgatcttcaac

SEQ ID NO: 699754 - DNA, 595 bp, Homo sapiens
ccatgcacgtcccatgcaccccaccatgctcctggagacacctttgttacagccctccccatactgccttcattaggtggagactcctggggaaagagcccagcctgaccgagcccatgtgcccactgcctggcatatgggcacctcacattgctcatccccacacctggcacatggcaagcactccatagatgttggtccactctgtccctaaggtccccaagttcacgtgaccactcccataattccatgcacctggccctcaggatgcaggaggtcggggagcactcaccctgagctgagcttctgcaggcagcaacatcctggttcttcctccggctccagggaccccaggaaaagcaggctagcagtccggggaggcctggcctctcccaggctccttccactaggaagaacacaaaacctgagtcagagggtcacatggttcccacttcacaagactgagagatttcgtttagcaaatcaagtgccccaacggtcaactgccctagtttcaactgtctgattaaaaacacagagtctgatttgcaaaagtgggtgkgtttttaaaaccgaactttaaaaatgattgctt

SEQ ID NO: 699755 - DNA, 1223 bp, Homo sapiens
tttttatttctggcataaatgaatatctttcagaaactatgcttcctgggatccagtcaaagtatcttaaataacaattccacttagacttttccagcaggcaagaaagggtaatattggtggcttataaagttttgggcttattgatacagtttgtggactggaacaaaaaggagatttctttatttaatgaagttgatctcaactatccctgtgcctcagggatagatttttttaaaaatctggagtttttaagaactaaaggtgttgagcccaactttttgagattccatgtcaattggctgggtggctaggtggggggagaagtgagtatttttacaaacctctgagtagattctaatgtacagtcatagttgggaaccattgatttgtcaccaaaatggtaagctgtgagtgcatatacagatccaacatcaycttcaggaaactaggcaagccatagcttcttatgtcttttgtgtggtatttcccttggagtcctaaaaaaatggcttaaacttgagcctcacaatgggtaagtttgcctctgctttttcttttgcaaagctattatataaatgtccaaattattgatgaagatcagggtgagaggattaaagagagggaaaggcagagagcatctctcacaacatggaacaatgaaagaaagcacatgtgcttttgttttggcaaagtatgccactaatctagttatatccatcatgtcaagcttgcttacaaatgtattgttgtctgtctatagagatgtgacattaagtagcccatatactgtgttttttatttgtttataggttaattgttcagaatattgatctcctgggctcattttcccattctttctgaaataccctttcaaatcaacaaacataaaatagaacagattcttccacacaggggactcttaaatgatgcagattctttctacttggtgcctattaaaaaatcacttttgtaagaaagcataatccagtatacatattgctgctactccagaagttactgcattattttaggccctaaattttggaggaatggatgaaactaattaggatgcactaaatttttgaccacttaccgtttttgttaatttagctatatatatatatatatatacacacacacacatatatatatacatatatacatatatatacacatatacacatatatacatatatacacatatatacacatatatatac

SEQ ID NO: 699756 - DNA, 1206 bp, Homo sapiens
cattgtttgtcctatctgacccaacgtataataagtgaagcagattatcttcattcaccaaactggctctaatttacttcttataatctttatcaaattcaccctcaaaggaagatttaccattgttgagagtattatacagaaccaaaacatgttctagagaaaatagcaaaagaagagtttttaaataaaagtaggcattaatggtatccatggaaaaagcagacagcttttccaggtaactgctggcaaatggacatcactcatttgaatgtaaatcctggtattatgatgttctttagaatactgatattttgtgctcatgtcctatgtatcatgcaactgctgtgtcattcaaatgaaaattcattacctattttcaggtgggaaatggtggtgctcaccagtatctctgttccttctcttcatttctgacacacagctagatgacacttaccagctttcttgcagtgagctggagccatgaaatgtggatggaagtgatgaggatcttttccagggctggcctcaggaccctctccacaatccggcatattatcttattcccattctgctgggggatggcagggctctgcatagaggactctgaagcactagaagagtctagaaccactaggtggatggatcctgggtccttgagtgactgcatgaagcagacctctcacatacatacacatacctcattcaatttcagtggtctctgatttgagtgacaaatgaatatttactgtgataagtcactgagatttggggcttgttatagcaattagcctcccctcacacaattttgacttaaatagaaataacattggccgggcatggtagttcacgcctataatcccaacactttgggaggtcgaggtgggcggatcacttgaggtcaggagtttgagaccagtcctggccaatatggtgaaaccccatctctactaaaagtacaaaaattagccggacatggtggtgcacacctgtaattccagctactcsggaggctgaggtgggagaatctcttgaacctgggaagtggaggttgtagtgagcagtagagatcgtgccattgtactccagcctgggtgacagagcgagactctgtcacaaaaaaataaaaaaagaaataacattaaacatttattcatgttctcagaaaagaaatgcaatttgacacgtacttacaactcacctgca

SEQ ID NO: 699757 - DNA, 1206 bp, Homo sapiens
cattgtttgtcctatctgacccaacgtataataagtgaagcagattatcttcattcaccaaactggctctaatttacttcttataatctttatcaaattcaccctcaaaggaagatttaccattgttgagagtattatacagaaccaaaacatgttctagagaaaatagcaaaagaagagtttttaaataaaagtaggcattaatggtatccatggaaaaagcagacagcttttccaggtaactgctggcaaatggacatcactcatttgaatgtaaatcctggtattatgatgttctttagaatactgatattttgtgctcatgtcctatgtatcatgcaactgctgtgtcattcaaatgaaaattcattacctattttcaggtgggaaatggtggtgctcaccagtatctctgttccttctcttcatttctgacacacagctagatgacacttaccagctttcttgcagtgagctggagccatgaaatgtggatggaagtgatgaggatcttttccagggctggcctcaggaccctctccacaatccggcatattatcttattcccattctgctgggggatggcagggctctgcatagaggactctgaagcactagaagagtctagaaccactaggtggatggatcctgggtccttgagtgactgcatgaagcagacctctcacatacatacacatacctcattcaatttcagtggtctctgatttgagtgacaaatgaatatttactgtgataagtcactgagatttggggcttgttatagcaattagcctcccctcacacaattttgacttaaatagaaataacattggccgggcatggtagttcacgcctataatcccaacactttgggaggtcgaggtgggcggatcacttgaggtcaggagtttgagaccagtcctggccaatatggtgaaaccccatctctactaaaagtacaaaaattagccggacatggtggtgcacacctgtaattccagctactcgggaggctgaggtgggagaatctcttgaacctgggaagtggaggttgtagtgagcagtagagatcgtgccattgtactccagcctgggtgacagagcgagactctgtcacaaaaaaataaaaaaagaartaacattaaacatttattcatgttctcagaaaagaaatgcaatttgacacgtacttacaactcacctgca

SEQ ID NO: 699758 - DNA, 2205 bp, Homo sapiens
aacctttcttctttttctaccattggcggatcctctcaaacctttcatccaagcaagaggtctgggcatcattttccagcccttctttttaaagcttaaagcttattcttctataaccaataagcaaataagccctgttaatgccactgcagtttttccactcgttgtctatcaacatttctgttgcctcagttcagatccatgacatcgtctctcattgcaattcagctctacctcccaccttcaaaaaatagctttttttttttttttttttttttgagatggagtttcactcttgttgcccaggctggagtgcaatggcgtgatatcagctcacctccacctccaccaccacctcctgagttcaagccattctcctgcctcagcctcccgagtagctgggattatggtgcctgccaccacactcagctaattttttttttgtatttttagtagagatggggtttcactatcttggccaggctggtcttgaactcctgatctcaggtgatccgcctgcctcggcctcccaaagtgctgggattacaggcatgagccaccacacccggcctaaaatagctttctaaatgagaaggtgattgcattatttccattctttgcattctttagtgactctatttacccaaagagacacagtcaacatttttaagaatgacattcaatgccctctactttcctaccttacctactgccaggtcccaatgatacagtagttaagaagaaattactcaggcagatagtgagggcaggaagtcctcagtaaggttttccttttaatgaaaagccgccccaaattattttcctttctaacaaagagcagcctgtaaaatcgagctgcagaacatagatgctgacagttatgccaatcatgttcaagatggcggctctatcttcccttctcttwctttgtcagccacgtatataaaaaggagcagacaagatggcctggtcaactggaaagcccatttgcataataagattagggtagggtcctcagccttccctgcgcatcatgtaaacgtcatacctgatcgaatcaatctgtgagccatatgtcaatcagacaccgcctccccaagccagactaaaaaatccagcacattcacagccagccagtctttttcctctcggaagtccccactctctcactagagagagaactgttttcctttctctttttttctctttctttcgactattaaacctccactcctaaactcctagtgtgtgtccctgtcctaaattttcctggcgcgaggcgatgaaccctccggtttgtaccccagacaacgtagccacttcaccatcatgcatggcccagggcttctgtcttagagcaaatagtctgtttctaaacattctatgctgcttccccctctgtgctttgatgaagcgtcatttcttttgtgttttgtgtgctcttctcatccttcatcctctataaactctcccctaacttgggtagcttaaagcaggctgtctattcacacccccatcgcgctgctatgactgtgagtacacttgataagatgttatttgtttatgtgtccatctttctatttgtctataagctttttgaaaggtgggaggatgtctcactcatatatcaagccctagctcctggtacagaatttaatatatcaaggagctttaataatggactggacaattaagttgatgaatagattattatactttaagcagctttgagtaacgattttgtttctggctgcatttctgagtggaaaagaatctgtaaccacactgagagtcacctctttcataggcgccttgcgtgggagagacgaaggagcggagatgcccagtacagtcggcgtcctcctcagtgtgtggaaacccgcagtgctctgtgggaggcacaggtgggtccagcttgacatttgcaactcaggagagatgacgaggagaaaaactattaataggcccaatgtgtataatgaactgattaatagtaggatgtccaaaatgtcttcatccacagaatggtgggcatgttgctttttgactggttccttggggattatttgttgggaaatagatgagaattcttggtctaccatacccaggagactctcagatgaagagaaccccttccaagacattgtcaacattcagcagacacgacagagatagccccactgcagtttggagatatgaccagaa

SEQ ID NO: 699759 - DNA, 2205 bp, Homo sapiens
aacctttcttctttttctaccattggcggatcctctcaaacctttcatccaagcaagaggtctgggcatcattttccagcccttctttttaaagcttaaagcttattcttctataaccaataagcaaataagccctgttaatgccactgcagtttttccactcgttgtctatcaacatttctgttgcctcagttcagatccatgacatcgtctctcattgcaattcagctctacctcccaccttcaaaaaatagctttttttttttttttttttttttgagatggagtttcactcttgttgcccaggctggagtgcaatggcgtgatatcagctcacctccacctccaccaccacctcctgagttcaagccattctcctgcctcagcctcccgagtagctgggattatggtgcctgccaccacactcagctaattttttttttgtatttttagtagagatggggtttcactatcttggccaggctggtcttgaactcctgatctcaggtgatccgcctgcctcggcctcccaaagtgctgggattacaggcatgagccaccacacccggcctaaaatagctttctaaatgagaaggtgattgcattatttccattctttgcattctttagtgactctatttacccaaagagacacagtcaacatttttaagaatgacattcaatgccctctactttcctaccttacctactgccaggtcccaatgatacagtagttaagaagaaattactcaggcagatagtgagggcaggaagtcctcagtaaggttttccttttaatgaaaagccgccccaaattattttcctttctaacaaagagcagcctgtaaaatcgagctgcagaacatagatgctgacagttatgccaatcatgttcaagatggcggctctatcttcccttctctttctttgtcagccacgtatataaaaaggagcagacaagatggcctggtcaactggaaagcccatttgcataataagattagggtagggtcctcagccttccctgcrcatcatgtaaacgtcatacctgatcgaatcaatctgtgagccatatgtcaatcagacaccgcctccccaagccagactaaaaaatccagcacattcacagccagccagtctttttcctctcggaagtccccactctctcactagagagagaactgttttcctttctctttttttctctttctttcgactattaaacctccactcctaaactcctagtgtgtgtccctgtcctaaattttcctggcgcgaggcgatgaaccctccggtttgtaccccagacaacgtagccacttcaccatcatgcatggcccagggcttctgtcttagagcaaatagtctgtttctaaacattctatgctgcttccccctctgtgctttgatgaagcgtcatttcttttgtgttttgtgtgctcttctcatccttcatcctctataaactctcccctaacttgggtagcttaaagcaggctgtctattcacacccccatcgcgctgctatgactgtgagtacacttgataagatgttatttgtttatgtgtccatctttctatttgtctataagctttttgaaaggtgggaggatgtctcactcatatatcaagccctagctcctggtacagaatttaatatatcaaggagctttaataatggactggacaattaagttgatgaatagattattatactttaagcagctttgagtaacgattttgtttctggctgcatttctgagtggaaaagaatctgtaaccacactgagagtcacctctttcataggcgccttgcgtgggagagacgaaggagcggagatgcccagtacagtcggcgtcctcctcagtgtgtggaaacccgcagtgctctgtgggaggcacaggtgggtccagcttgacatttgcaactcaggagagatgacgaggagaaaaactattaataggcccaatgtgtataatgaactgattaatagtaggatgtccaaaatgtcttcatccacagaatggtgggcatgttgctttttgactggttccttggggattatttgttgggaaatagatgagaattcttggtctaccatacccaggagactctcagatgaagagaaccccttccaagacattgtcaacattcagcagacacgacagagatagccccactgcagtttggagatatgaccagaa

SEQ ID NO: 699760 - DNA, 714 bp, Homo sapiens
gcatagttttgtttttctgtctctgacatttactaatcctttaatcacacaacatttgttcaacttctcagagtatatttcctcaccacgagagattgaggattaacctgatgagtggatctataagtagcacaatccagttcctggattatatcagaaagtsaataaatggcatttcttggtgtattattttcatttttcttcttttcatttaatgaatgactttttaagagccataggctacacacttcaggagtttaaagacaattcatccatgtctactatcctggaagagtccggagtcccagggtaacaagtggacgtgccaacagaaaggtgtgatgatggaagctatacaggtagactggacacagtgcagtgacatctccactaattttctttttaaagaagaaaatacttaacttgtgaacaaaaaaggaaaagttccatgccagagggacaggtcagaggaagatcatggtacactggaataaaagcagttcggtacagtgaatttctaaaacccaaaccaaggtggggagggacagacaggtgcaggcaagtcatggaggcctgcatagccatcccaggagagcaggcccatgaactcacaatactttttattgaggaaatcattttgataggaatcttttcaaacatattttccccaacatattttttatttattcattaaaaaatttaaaccattttatt

SEQ ID NO: 699761 - DNA, 602 bp, Homo sapiens
aacattttttatctgatgccatccttacaatcttagcctgaaattattataatttttttctatttaaatattttttggtttcattttggccaaagcagttgttccatgataaactaagatcacatgtgtttaacatgatttaacaattggagtattttctgttttattttttggcatagctttgatactaagtttttatatgtcttggtaatcatgctgaatttatcctactattagcaagtaagtccagggacaaagtcaggaaggctcattgttaattaaagcagtatgaagtaatggtccataaatgtggttataaatacatgtactatatttgttaaatttatgaaatttatagacatttcctatacaccaaaaawctcaagaggttgacatgaacaaaaacattaatttagttgtgggaaaaggaaagcaaaagtaagtttaccagagaaagatcttaactgcagaatccatttctgctatctttgcctctattctatttctgtttatttttatgtaaaattctgtccttgaaatcttagtatttaatttactttgtgttagtaataatttatgtttataataaataagtaaagctt

SEQ ID NO: 699762 - DNA, 583 bp, Homo sapiens
aaaaaatgacagaaaatttacttcaatatgtaaaaaaatggttaagtagttcttattttaaaaatccatatattgaggcaaaatacttgttttgttatttctgtctgtttcttctgaatctgttcccttgaactttatcactgaagatttttctatcagcctttttcaataaacagatcctgttgactcatgaacctgtctcatcacctccgtggggcgggtagagccagctaaagttcagatatatgctttgtccatggaggaacaaatatattttgtctgtgcagtggctctttctcttctgaaaagtatctaaactcagagtttattgccctaagtatmcaaacatgcttattattcagtttctcatcttgttcaatttgtttaatggatagaacattcttatttgatacaagatgttcatactaagatatactcaagataattttaacatataaataggaaaaggtgatttttgtaatagattttacaaatagacaaaaaggaggaggaatgattgtactaggcataattagtgcctgcagcttttctccacttctcacagctttaagccaaacatgta

SEQ ID NO: 699763 - DNA, 993 bp, Homo sapiens
tactgctagagtaattaaaacattatgccacaggggtagaaataagtagtcagatcgttagactagaaaccaaaagtagactcaaatacacaaagaaatagggtttatgataaaaatcacattacaaatcaataggcaaaagatggactaaataatactgttcaataaattatgctggcttaacttgctggctgttcaaaaaaaagttaagccagattgctacctcattcctttctccaaatagagtatggtggctcaaaattttttaaaaaaatatagctaaatacattatagtcttggtgtaggcaagaaatattttcaagtagaatagaaaactcacaagccctaagaaaaaaattgataaacataattgcatacaagtaaaaaggtctctacaaccaaaagaattgttgtaagtactaacatttttccaaaaaataaatagaaaagaaggtttgtatcaggagctaattttctatcaagagtatatacaataaaaaagaaaaagactcaaaaaatttaaatgtataaaagatgctaaatctcactagtaaattttaaacggcaaatcaaactaatgagataccatttgtctcctatcacactgtcaagatttttagaagtttgataatagtgttaagagaaataagcactctgagacaacatgagcgaaagcgtaaacaatctttgtgaggaattattagtcaaaatctaccaaatgcccattccctttgtctctgtaattctackggtaggcatttactttacatatataatcaaaaaaagcacacttagatttatattaacagaacataaaagaaaaaccatcatctcgatcgatgcagaaaaagcattcacaaaaaattcaacatttattcaaaatttaaaaacaacaacaaaaatctctcaacagactagaaagtgaaaggaacttcttcatctgatacaggaatctaggaaaaacctgaagttaacaccacacttaatggtgaa

SEQ ID NO: 699764 - DNA, 993 bp, Homo sapiens
tactgctagagtaattaaaacattatgccacaggggtagaaataagtagtcagatcgttagactagaaaccaaaagtagactcaaatacacaaagaaatagggtttatgataaaaatcacattacaaatcaataggcaaaagatggactaaataatactgttcaataaattatgctggcttaacttgctggctgttcaaaaaaaagttaagccagattgctacctcattcctttctccaaatagagtatggtggctcaaaattttttaaaaaaatatagctaaatacattatagtcttggtgtaggcaagaaatattttcaagtagaatagaaaactcacaagccctaagaaaaaaattgataaacataattgcatacaagtaaaaaggtctctacaaccaaaagaattgttgtaagtactaacatttttccaaaaaataaatagaaaagaaggtttgtatcaggagctaattttctatcaagagtatatacaataaaaaagaaaaagactcaaaaaatttaaatgtataaaagatgctaaatctcactagtaaattttaaacggcaaatcaaactaatgagataccatttgtctcctatcacactgtcaagatttttagaagtttgataatagtgttaagagaaataagcactctgagacaacatgagcgaaagcgtaaacaatctttgtgaggaattattagtcaaaatctaccaaatgcccattccctttgtctctgtaattctactggtaggcatttactttacatatataatcaaaaraagcacacttagatttatattaacagaacataaaagaaaaaccatcatctcgatcgatgcagaaaaagcattcacaaaaaattcaacatttattcaaaatttaaaaacaacaacaaaaatctctcaacagactagaaagtgaaaggaacttcttcatctgatacaggaatctaggaaaaacctgaagttaacaccacacttaatggtgaa

SEQ ID NO: 699765 - DNA, 2846 bp, Homo sapiens
gagtcacttaaggtctcctttcgaaatatacaaatctcaaattttgyctaaaagatgaggagaggctgaagttttaggaatatgaaatatgttaagaagagaacccaagccctgatttggagaaaatcatggaggcttttattattctcccagcagtaatttcaagtgttttttaggaaaaaaaaaatagcaattatctctttttcaaaaagggttctaacaggaaaacagaaacttttgtcatttaggcaacaaggattaatacaggaaattagacgttaaaaccagaaaagagcaggaaacgtgatggtcaggatgggaagtgactttaagcattcagcaaatcagaaggtccaagaataacagggaatttgctgctgatttacttcaaaataggaaatctccagggcaaagtgcctgaaacctctggcaaacctctgaaatatctgtcatttgatgaagcccctaaacctgtctgtcccgttgaggaataacagcaccttctgttacccttttgacttcaaagtctcatatgagcacttcatattggagaaattgatactgaactctatagatgaagacatgtttaccccctccacaaaaggagaaatacatattcttagcaattactgttagttccaatatgatttggctatgtcctcactcaaatcttatcttgaatggtacttcccataatccccacatgtcgtgggagggacctggtgggaggtaattaaataatgagggcgggccaggcgaggtggctcacgcctgtaatcccagcactttgggaggctgaggcaggcggatcacgaggtcagcagatcgagaccatcttggctaacacggtgaaaccctgtctctactaaaaatacaaaaaattagccgggcgtggtggcgggcacctgcagtcccagctactcgggaggctgaggcaggagaatggcgtgaacccgggaagcggagcttgcagtgagccgagattgcgccacagaactctagcctgggcgacggagggagactccgtctcaaataataataataataataataataataataataataataatgagggcgattacctccatgccgttctcatgatagtgacttctcaaaagacctgatggttttataagagtcttttcccccacttcgttctgcacttctccttgctgccgccatttgaagaaggacaagtttgcttccccttcggccatgatggtaagtttcctgagacctccccagctctgatgaactgtgactcaattaaacctctttcctttataaattacccagtctcaggtatgtctttataaacagggtgagaacggactaatagagatcctaacacctaattccatcacaattcctctgatatcctacaacctatccttgtctgtatgacaaggataaccacaaccaatatgctttatatttaaatgatggaggaagaggagaggaaagaacacaaataaattaatatatactttgcatatattatatataataaatatataataaattaatatatactttgttaatatgtccataacaaagcaaggaagaaaatacttataagaataaatgctgtatttattttatttagttttattttattttattttattttattttatatttctgcaactggtcacaagattgagattatttgaagaacaatcttagccacaagggaaatggaattggtgctacatatcctggtggaatctttgcttcttgaggaattaagaactgcaaactaccagagcctaaagacgtggggattagaaacaaatatcgtctgagtgggctattaggtataatcgtgagggctgccacttccattttaacacttggtatccaggactccgttctgggtatgtgaaaaatcaggtaccatgtactggtcacttgttccaagtatatatttaatgcatgttttagaacatctcattaaacttgcaaagggttgattcctaccaggtgcttggaccaactgcagggctttctctttctctggtaaccaaacaacaataatgacaacttaaaactatcttcaggtgttcctaataggagtattttaaagagtagctccttacctaaaggaataaatctcaaacagcataatttcactggcaatattatggaaacagggaggcattctctctcaagttacttgatatatgagccctttcactaaatctgctttaattttccatcatggaagaacactttccagaaataggaattgtaagaaaaattcccaagaatataatttattttaccatctgcttttcttagaaaacaatcagttaataaaatcagttaataacataattgccttggcaccatgttctgagttgtacatgtactacgttagaatgaaaaatgcggtttgttatggattgaggaaagagttccttgaaatcgttttttctccctcctttaaaaaaaattatgtattaattttttttttttttttgagacggaagtctcactgtgtctctcaggctggagtgcaatggcgcaatctctgctcactgcaacctccacctcctgggttcaagcgattctactgcctcaacctcccgagtagctggaactacaggcacacgtcaccatgcccagctaatttttgtatttttagtagagacgaggtttcaccatgttggccatgctggtctcaaactcccaaccccaaatgattcacctgcctcggcctcccaaagtgctgggattactggcatgagctactgtgcctggccctcccttcttattttgagttactttttggaaatatattttattttgaccttcaccataaaaaacttttaatactttat

SEQ ID NO: 699766 - DNA, 1205 bp, Homo sapiens
tgaggtttctgaaaaaaaagtccatcacaaattaatgtaaaaaatgcacarcaaattgtatctgtactccagacagctttttcataaatttttacgagtagagttaaactagactgtgtagatcacttatacaaattatctccataataagaggctcctgtcatttctgagtgtatgtgtttgcatgtaattgtgtccatcggatttatcttgactttttagacaaactattgcaattctaaagatttgaaaattagctcaatttaatccaccaccacaaccaccattacaactactaacaataacaaaacttctcaagttattctttgttatcgtactacttcaaaaataatggcttcattggctgaatttagtagctgtatgtgcagatattgcatatcttttataaacaaagctacaactcaaatacgcaccttttatatatatatatcataactaaatcctactgaggataaacaattgatgagagagagagaaaagtcagaactcagcgaagttactatcaacacagataatttctctgtggtctttgagcaccattttacttagaaaggtgcttagattaacaaaaatgtgggaggaaaataagaagaactgactaaacacatgtttagtgtctgtatgattaggttcaggaacaatgccaggaggaaactatgtaagatctcatctgattttagatacttgtcaaaaaagaactaagaagagaatatcttactgatgagatgctgtctttttaagtttggtagaacaaaaagcaagttcacttctttaataagtacaaataaacaagactgatgaggtgaacaaaaatcaatccacagattccaaaaattttacaactgtttattttcagttcaaacatgattgatgtcaattagatgcagatctgtcctggtgattctcaggaaatctaccgtgtcagataatcaccttccgtgaaactcagaaaatccagtgctatgctttaacctatcttttccccaaatccttaaattccatacattctttaaaattatttaatttttatcactatttttcatttctgctaatattaatattttacttacaaaatacagcaaatacttaatattttttatgtacagcatttttcttattactggcatattttaaactttattttttgtgagaattttttttacagtactatggaaaatccttcc

SEQ ID NO: 699767 - DNA, 546 bp, Homo sapiens
tattgcagtgtctagatatagtattagaagatcgcctcaaaataatacagtcctataattctgctcatgttacctgacaacatagaattttcaattttatttttttctatgtgtttttcatttttctacttgcagaataggttattttaaatgtaagcataatttaagaccgattaataatagtaagtatggtatagatatgaatccagaggaaatggtattccctcaatgggtcattttatttccagttaatgatatacagatccaacagcagagagagagctgtagcctacagctactacttccatctaatacactgcttcaatttcttttgaaaatgtacaaaacaatagtatagttttcaatctgttaattaccctgctagagtttcaacaataaccacaaaaggaatgmtaaacctgctgcacaaatttatttagatttgctttggctattttatactttaccttaaaataattaagtcacaaattagatctatagaacagctccttgatcatatggcttatttgcttttttaataactgt

SEQ ID NO: 699768 - DNA, 635 bp, Homo sapiens
ttgaccattttyctaatggtgagatgtggtgagctaacccaccactcaggttcatgctgcatttcaaagcttactgacctgctttctgctgagctggtatatcctaactctggtcaagtaagagatgacccatagaacaaagatctacatcccaggaattttaagttaggtgaaggtcagactttccttcttgaaataactctgggccagagttaccagcttggattacaaatggcaggccactagaaaaattaaattatccagaaatttgtgatgtggctttcactgaaatgaaaagtcatcaggttgtctctttgatctgaggttgaagactctggtgctaccatattgggatgagaatcaatgagggacgaagaggctgtcctccagccagttcatgctatcagataagtgtggctgaaaagcactggacagcaggtctaggtgaaggtcagctaggcatgaggaggaggaatgcagggttaaggaagtttcctgagggcacagactgtgaatagtaagagacaccaacttccaaactcccttcttgactttgttgccataatacaatcacctctgaggtcatacaggattgctgggcgcatggctcaacacctgtaatcccagcactttga

SEQ ID NO: 699769 - DNA, 587 bp, Homo sapiens
gttccagccaatccacacggctctcatggctgacggtgccaatgttgtagccaccaatcagatccactatagaataaaggagacagggttaagaagagagattccacacatatacatagtatggccaacacacataattttgctaggatgcctaggaagctaggtctcttttagaattgtagaggttttgtttaactatgttgttaactcaaaaggtccasacccacagaaatgtcatcactctctggggcttatggagttacctcagagcagactagaactattgagcaagtggcttctcctactcacagaatcccctcgaaggcagcactgagcacattaaagataagcctgatacaatacagcagtgagacaaggctgatgaatcaatgaccttgatggtcatatgctctaagaagtcacccgtatatttgaatgcctactgtgtaagagcactgcaagggtggatggtggggaaggcaacagacaaacctctgactaaagttaggctggtcactgcagaggatgaatattttagtttggtttgaatcttctagacattatcagaaactatcacatttagagca

SEQ ID NO: 699770 - DNA, 587 bp, Homo sapiens
gttccagccaatccacacggctctcatggctgacggtgccaatgttgtagccaccaatcagatccactatagaataaaggagacagggttaagaagagagattccacacatatacatagtatggccaacacacataattttgctaggatgcctaggaagctaggtctcttttagaattgtagaggttttgtttaactatgttgttaactcaaaaggtccagacccacagaaatgtcatcactctctggggcttatggagttacctcaragcagactagaactattgagcaagtggcttctcctactcacagaatcccctcgaaggcagcactgagcacattaaagataagcctgatacaatacagcagtgagacaaggctgatgaatcaatgaccttgatggtcatatgctctaagaagtcacccgtatatttgaatgcctactgtgtaagagcactgcaagggtggatggtggggaaggcaacagacaaacctctgactaaagttaggctggtcactgcagaggatgaatattttagtttggtttgaatcttctagacattatcagaaactatcacatttagagca

SEQ ID NO: 699771 - DNA, 1103 bp, Homo sapiens
tgaaaatggttaatatatatttgaagtatggatattacacacttatatttgctttctgaaaagttgttcctgtgacactggaaggaattaattgcaagaatatacaataaaatatttttgtagtaattcaagcgagatattatagaataactaggaattgagagtaaagtaagtgttggggaaatacaaagaaggtagackcttcagaacatggtacagggtcacttggttatagtgggttagagaaagagaagatgaggtttactctcagttttcagagttggataactgaaggagtggtgacatgattcaacaaaatggaatacagaaagaaaaagagaaagaagcataattagttctagaaatgttgagcttttaggtcctgtgggatagttacaaggagttttcaagtttgtgataagatatatggctctgatgctttggagagggatgtggtttgaaagtataaattcagaaatcatggccacatagataaaagtcagtatcacaggaaaattcaatgacattgtatttggataactaacactaggtactaaaacaaattaccaaaaattcttactggcttaagataataaggtttattttctatgcacctcatggttcagagcaatcctctgattttggtgggggagatatttctattccatcaaccgttcagaaacctcaggttacttctttgcagtagctcccatgtcttctagagctcagaatactctggtcgatcctctgcatctgactgacccaagaacaaaaaaagctgggagaatgttaacaagttttaggggtcaggctagaagtaatgttagaatggagcttctccacctgggcgcagtggctcatgcctgtaatcccagcactttgggagaccaaatccggtggattacctgaggtcaggagtttgagaccagcctggcgaacatggtgaaaccccgtctctactaaaaatacaaaagttagccgggtgtggtggcacacacctgtaatctcaggtactcgggaggctgaggaaggagaattgcttgaacccgggaggcggaggttgcactgagccgagattgcgccattgcactccagcctgggtg

SEQ ID NO: 699772 - DNA, 1103 bp, Homo sapiens
tgaaaatggttaatatatatttgaagtatggatattacacacttatatttgctttctgaaaagttgttcctgtgacactggaaggaattaattgcaagaatatacaataaaatatttttgtagtaattcaagcgagatattatagaataactaggaattgagagtaaagtaagtgttggggaaatacaaagaaggtagacgcttcagaacatggtacagggtcacttggttayagtgggttagagaaagagaagatgaggtttactctcagttttcagagttggataactgaaggagtggtgacatgattcaacaaaatggaatacagaaagaaaaagagaaagaagcataattagttctagaaatgttgagcttttaggtcctgtgggatagttacaaggagttttcaagtttgtgataagatatatggctctgatgctttggagagggatgtggtttgaaagtataaattcagaaatcatggccacatagataaaagtcagtatcacaggaaaattcaatgacattgtatttggataactaacactaggtactaaaacaaattaccaaaaattcttactggcttaagataataaggtttattttctatgcacctcatggttcagagcaatcctctgattttggtgggggagatatttctattccatcaaccgttcagaaacctcaggttacttctttgcagtagctcccatgtcttctagagctcagaatactctggtcgatcctctgcatctgactgacccaagaacaaaaaaagctgggagaatgttaacaagttttaggggtcaggctagaagtaatgttagaatggagcttctccacctgggcgcagtggctcatgcctgtaatcccagcactttgggagaccaaatccggtggattacctgaggtcaggagtttgagaccagcctggcgaacatggtgaaaccccgtctctactaaaaatacaaaagttagccgggtgtggtggcacacacctgtaatctcaggtactcgggaggctgaggaaggagaattgcttgaacccgggaggcggaggttgcactgagccgagattgcgccattgcactccagcctgggtg

SEQ ID NO: 699773 - DNA, 1103 bp, Homo sapiens
tgaaaatggttaatatatatttgaagtatggatattacacacttatatttgctttctgaaaagttgttcctgtgacactggaaggaattaattgcaagaatatacaataaaatatttttgtagtaattcaagcgagatattatagaataactaggaattgagagtaaagtaagtgttggggaaatacaaagaaggtagacgcttcagaacatggtacagggtcacttggttatagtgggttagagaaagagaagatgaggtttactctcagttttcagagttggataactgaaggagtggtgacatgattcaacaaaatggaatacagaaagaaaaagagaaagaagcataattagttctagaaatgttgagcttttaggtcctgtgggatagttacaaggagttttcaagtttgtgataagatatatggctctgatgctttggagagggatgtggtttgaaagtataaattcagaaatcatggccacatagataaaagtcagtatcacaggaaaattcaatgacattgtatttggataactaacactaggtactaaaacaaattaccaaaaattcttactggcttaagataataaggtttattttctatgcacctcatggttcagagcaatcctctgattttggtgggggagatatttctattccatcaaccgttcagaaacctcaggttacttctttgcagtagctcccatgtcttctagagctcagaatactctggtcgatcctctgcatctgactgacccaagaacaaaaaaagctgggagaatgttaacaagttttaggggtcaggctrgaagtaatgttagaatggagcttctccacctgggcgcagtggctcatgcctgtaatcccagcactttgggagaccaaatccggtggattacctgaggtcaggagtttgagaccagcctggcgaacatggtgaaaccccgtctctactaaaaatacaaaagttagccgggtgtggtggcacacacctgtaatctcaggtactcgggaggctgaggaaggagaattgcttgaacccgggaggcggaggttgcactgagccgagattgcgccattgcactccagcctgggtg

SEQ ID NO: 699774 - DNA, 1550 bp, Homo sapiens
ggaaaccaacttaacacactgctcagatgtcacaatggttattagtaaagccaaacaggcatcctctctggtatatatgtatttttaaaaaaccttttttagctggaccaagagaaacagatatgtcatctctatttgaaccacatatttggtgaaacgctaaagagaagatacaaaaaattcctgcccagaggtatcactctttggatgcagaacaaccctctatcctaatcttgataagactgtgccctattacagctccttttatttccatgagattctttcattctatagctttatatgtaccctaacaatagtgaacaccagcattcccaatcccacttacttgagtttgagaatttctcttcctagacactaaactataacttgggaggcactatattttgcttcccgtattgcaactaaagtaaagctttgcacaaagtagacactcagttaatatttgtctaatgaagaaatgggaggagtattttaatggtagatgtggatttacctgggtttagaactacttggcaagtcttagctatgaaaaagtctttttcccctccatggagcaaacacttgaagaaattttcataccttgtaattagaaggacaaattattatttttattatttttgtactaagcatccctttctatcttcttatggttactgtgtcccttctcctcacttcctttccccacaaacatgcacatgtcctttggaaaactacttgtcctttgattcctaggtttctatccctgcccccaagaagctatatagcccccacaactggtcaatcataattccttatcttcctggggtttggcacatgacctaccaagataaaacttctgcccttgagttttataaaggggctatggagaggaaagctcttttaatctcctgagtttgccaagctgtgttaatgtaagtgtgaatttgttagcccacccctcacatctcattcctaccaaaccacaaaaagtcatctgtcttcagtagatgtggttgaaagaatcacatacgaaaatacagcctggagagagacaggaagatctagcaatgttttatgtctctagacttctccaagccaccatcaccttgtatttctttttaataagagccaataaattcccttttaattttcagtttttttgaattgggtttttaycacttgcaaccaaacaagatactatatgcaaaacttgaagaactaactctaaaactgacaggagtacgttttaaaattgaagcccttcccctgcaaacacctcaccagcacctcagttcttaaagcatattagaacatcaatagtacctgtaaacccaacattttgggaagctgaggctggaagatcacctgagaccaggagtttgagaccagcctggacaacatagtgagacccttgatctacaaaagacttttgaaattagcccggtgtgatggagtgtgcctgtagtcctagctactcaggaggctgatgcaggaggatcacttgagcccaggagttcgagggtgcagagagccataactgagccactgca

SEQ ID NO: 699775 - DNA, 1550 bp, Homo sapiens
ggaaaccaacttaacacactgctcagatgtcacaatggttattagtaaagccaaacaggcatcctctctggtatatatgtatttttaaaaaaccttttttagctggaccaagagaaacagatatgtcatctctatttgaaccacatatttggtgaaacgctaaagagaagatacaaaaaattcctgcccagaggtatcactctttggatgcagaacaaccctctatcctaatcttgataagactgtgccctattacagctccttttatttccatgagattctttcattctatagctttatatgtaccctaacaatagtgaacaccagcattcccaatcccacttacttgagtttgagaatttctcttcctagacactaaactataacttgggaggcactatattttgcttcccgtattgcaactaaagtaaagctttgcacaaagtagacactcagttaatatttgtctaatgaagaaatgggaggagtattttaatggtagatgtggatttacctgggtttagaactacttggcaagtcttagctatgaaaaagtctttttcccctccatggagcaaacacttgaagaaattttcataccttgtaattagaaggacaaattattatttttattatttttgtactaagcatccctttctatcttcttatggttactgtgtcccttctcctcacttcctttccccacaaacatgcacatgtcctttggaaaactacttgtcctttgattcctaggtttctatccctgcccccaagaagctatatagcccccacaactggtcaatcataattccttatcttcctggggtttggcacatgacctaccaagataaaacttctgcccttgagttttataaaggggctatggagaggaaagctcttttaatctcctgagtttgccaagctgtgttaatgtaagtgtgaatttgttagcccacccctcacatctcattcctaccaaaccacaaaaagtcatctgtcttcagtagatgtggttgaaagaatcacatacgaaaatacagcctggagagagacaggaagatctagcaatgttttatgtctctagacttctccaagccaccatcaccttgtatttctttttaataagagccaataaattcccttttaattttcagtttttttgaattgggtttttaccacttgcaaccaaacaagatactatatgcaaaacttgaagaactaactctaaaactgacaggagtacrttttaaaattgaagcccttcccctgcaaacacctcaccagcacctcagttcttaaagcatattagaacatcaatagtacctgtaaacccaacattttgggaagctgaggctggaagatcacctgagaccaggagtttgagaccagcctggacaacatagtgagacccttgatctacaaaagacttttgaaattagcccggtgtgatggagtgtgcctgtagtcctagctactcaggaggctgatgcaggaggatcacttgagcccaggagttcgagggtgcagagagccataactgagccactgca

SEQ ID NO: 699776 - DNA, 3078 bp, Homo sapiens
  misc_feature 1421: n = A,T,C or G
cctgcctcggcctcccaaagtgctgggattacaggcgtgaaggggtagattactaactcaatgtttcttaaatggaagtctaaagaattttggagatgtccatacttctcagaatctttaactccatataaagtgagagaagcagcaggccttatttccaacaaagttattggactttgtgtttcacattttggatctggaktcactcacctgacaagtgaattcatgggatttcttatttataccagagaaagggtcaaaaaggcaaagtgaaactgtcaaacaagagatcagttactaaaatggcagaactacatatgtagtctgtgatgccgtggtccaggcccagtctcgctagtcaggctgacacagggtgtaatcactatggaagcaaatccgtctctcctacccgcccttatccacttgttccctgtccctcagcatagtccaagggcaatgttgatcaccacctatgaggagggctaggagaaatactgctccttccccatccccaaacacacattccttacagcccgtgatggacacgtgtgattcacacatgtaccaagtgttggaaacacctgagctagatgttgcacacacgtggcttttgggtgagatgggtcataggcacacccatcacattgttggaggaagggtcaaacatccaggctggctctgtgaccttaaattagacaatgacccctgaagccagcacccagtgaaaggggtccctggcccccctgcctgatttccacagtgcccttggccacttcccctccagcttgcttgggccctgttccaaatctgtgggtgggctcttcacccttgtgatgcctccatccactttgtgtctcacatgtgccttgtagtcactcaacaatcaatgcccagttgaacccaggtcaaccccccaaggatcatagcctcagaacaaaccccaggttaaccttaaccctaaatagtgtgccaaggtttatagcctcaattctaaagttaaaaaaaattcaagtatatacatacatatatatacacatatatatgtttctcagaggaatattatgatgcatgaaaagatacaggttataaaccaaaatatataaagaaagagcatttatttgaatgtcatctgcttttttctcttattttcataatattaaaaataaaagttaactattctttcctggaattccaataaattaaaattattcaatggtataatttgacaatgggcaaatttttcattctgagactattccattcctggaaactctttgatgaaaatgcataatgatccaatggccaaggtagtttagaaaccagctttgtctgacctaagtcatctgttttgtatttcccgtatataaaataataatatctcatctacaaatactaagaaactatgaatttttttgagacanagtttcactcttgttgccctggttggagttcagtagcatgatctcggctcactgccacctccatctccctggttcaagctattctcgtgcctcagcctcccaagtagctgggattacaggcacaccccactacgtccagctaattttttgtatgggggggagagatggcgtttcaccatgttggcccagctggtctcaaactccggacctcgtgatctgcccgcctcggcctcccaaagtgctgggattacaggtgtaagccaccatgcccagcctgtagaggcctttttctgccacctccgcatagtctctcctgatggacaccctttgtgcaaaattatccacaacgtgttctcttctcttaagcatcttcacagtcctctctcatactctgttccaacatggtcacttatgtgcactttatgtctccccttctcttgaatgtgaggttgttatataagaagatttgagataagtaatgcattaccctatctgatttgctatcctttaatctatttctccagggtcttttctctgcaaaaggaagagtgaacagtgtatcctgttcccagtgacttggcaggtcctggtcatgaatcagccattctacctttaatcttagtggaccaacctgtctcaaaagaaaaactacttctaagtgaaatgtaaatgatactggctttatgcaagggtgcactgccgattaatagcataaaaatgaggtttttaaaatatcaaatacttatataattttcattgtgccagaaatggctctaagtattttacaaaccttgcttatttaacttcataaccacactacaagctgggcactattacccctatttgcagaaaccacagccagagagtgaagtaagctgtgcaaggtcatcaacagccagtcaacagccagtcaatggccagtcaactcaacagtcagtcaacggcagacaggttgggtccagtccatgccctcaattacagccatgctgcatgtgagtatggagtgagcggtatttttaaaaaagcaaaaaatgttatataaactgcagattttattgatattaattcattgtcactaaagggaaaatgtgctaactattaagaatgcaatttagaggttatgagtttgaattggatgtttgaagttatccagtttcttaggcaacacagaaaagcaacttgaatagttcaatgacatgtaacctttcagaatattttgctttatggttttatcatagttgcttttttatccccatgaatagagcaagaccttcagaataaattgttctcaaataagtaatgcaatattttatgttctggtcttttaagaaatctttactcaattctgtgatgtattgaaagatatagaatattgtaaaataacagatgacttgtggtacacttcagtgaaatttaaaactccacaattgtttgcataaaaacatcaaaacagagaggaaacatagtatggtgttatcttaaagccgcaggagtcatcaaaatagtccagttagactcaaaaagggaccaataattattttccagtaaccttgtatactcggccagtgctaaatagcagtgatagatacttcctgagaaggcgatagcaggaaagaaggggttttttagctggaagccctaaaaaatgtgcaggatg

SEQ ID NO: 699777 - DNA, 3078 bp, Homo sapiens
  misc_feature 1421: n = A,T,C or G
cctgcctcggcctcccaaagtgctgggattacaggcgtgaaggggtagattactaactcaatgtttcttaaatggaagtctaaagaattttggagatgtccatacttctcagaatctttaactccatataaagtgagagaagcagcaggccttatttccaacaaagttattggactttgtgtttcacattttggatctggattcactcacctgamaagtgaattcatgggatttcttatttataccagagaaagggtcaaaaaggcaaagtgaaactgtcaaacaagagatcagttactaaaatggcagaactacatatgtagtctgtgatgccgtggtccaggcccagtctcgctagtcaggctgacacagggtgtaatcactatggaagcaaatccgtctctcctacccgcccttatccacttgttccctgtccctcagcatagtccaagggcaatgttgatcaccacctatgaggagggctaggagaaatactgctccttccccatccccaaacacacattccttacagcccgtgatggacacgtgtgattcacacatgtaccaagtgttggaaacacctgagctagatgttgcacacacgtggcttttgggtgagatgggtcataggcacacccatcacattgttggaggaagggtcaaacatccaggctggctctgtgaccttaaattagacaatgacccctgaagccagcacccagtgaaaggggtccctggcccccctgcctgatttccacagtgcccttggccacttcccctccagcttgcttgggccctgttccaaatctgtgggtgggctcttcacccttgtgatgcctccatccactttgtgtctcacatgtgccttgtagtcactcaacaatcaatgcccagttgaacccaggtcaaccccccaaggatcatagcctcagaacaaaccccaggttaaccttaaccctaaatagtgtgccaaggtttatagcctcaattctaaagttaaaaaaaattcaagtatatacatacatatatatacacatatatatgtttctcagaggaatattatgatgcatgaaaagatacaggttataaaccaaaatatataaagaaagagcatttatttgaatgtcatctgcttttttctcttattttcataatattaaaaataaaagttaactattctttcctggaattccaataaattaaaattattcaatggtataatttgacaatgggcaaatttttcattctgagactattccattcctggaaactctttgatgaaaatgcataatgatccaatggccaaggtagtttagaaaccagctttgtctgacctaagtcatctgttttgtatttcccgtatataaaataataatatctcatctacaaatactaagaaactatgaatttttttgagacanagtttcactcttgttgccctggttggagttcagtagcatgatctcggctcactgccacctccatctccctggttcaagctattctcgtgcctcagcctcccaagtagctgggattacaggcacaccccactacgtccagctaattttttgtatgggggggagagatggcgtttcaccatgttggcccagctggtctcaaactccggacctcgtgatctgcccgcctcggcctcccaaagtgctgggattacaggtgtaagccaccatgcccagcctgtagaggcctttttctgccacctccgcatagtctctcctgatggacaccctttgtgcaaaattatccacaacgtgttctcttctcttaagcatcttcacagtcctctctcatactctgttccaacatggtcacttatgtgcactttatgtctccccttctcttgaatgtgaggttgttatataagaagatttgagataagtaatgcattaccctatctgatttgctatcctttaatctatttctccagggtcttttctctgcaaaaggaagagtgaacagtgtatcctgttcccagtgacttggcaggtcctggtcatgaatcagccattctacctttaatcttagtggaccaacctgtctcaaaagaaaaactacttctaagtgaaatgtaaatgatactggctttatgcaagggtgcactgccgattaatagcataaaaatgaggtttttaaaatatcaaatacttatataattttcattgtgccagaaatggctctaagtattttacaaaccttgcttatttaacttcataaccacactacaagctgggcactattacccctatttgcagaaaccacagccagagagtgaagtaagctgtgcaaggtcatcaacagccagtcaacagccagtcaatggccagtcaactcaacagtcagtcaacggcagacaggttgggtccagtccatgccctcaattacagccatgctgcatgtgagtatggagtgagcggtatttttaaaaaagcaaaaaatgttatataaactgcagattttattgatattaattcattgtcactaaagggaaaatgtgctaactattaagaatgcaatttagaggttatgagtttgaattggatgtttgaagttatccagtttcttaggcaacacagaaaagcaacttgaatagttcaatgacatgtaacctttcagaatattttgctttatggttttatcatagttgcttttttatccccatgaatagagcaagaccttcagaataaattgttctcaaataagtaatgcaatattttatgttctggtcttttaagaaatctttactcaattctgtgatgtattgaaagatatagaatattgtaaaataacagatgacttgtggtacacttcagtgaaatttaaaactccacaattgtttgcataaaaacatcaaaacagagaggaaacatagtatggtgttatcttaaagccgcaggagtcatcaaaatagtccagttagactcaaaaagggaccaataattattttccagtaaccttgtatactcggccagtgctaaatagcagtgatagatacttcctgagaaggcgatagcaggaaagaaggggttttttagctggaagccctaaaaaatgtgcaggatg

SEQ ID NO: 699778 - DNA, 3078 bp, Homo sapiens
  misc_feature 1421: n = A,T,C or G
cctgcctcggcctcccaaagtgctgggattacaggcgtgaaggggtagattactaactcaatgtttcttaaatggaagtctaaagaattttggagatgtccatacttctcagaatctttaactccatataaagtgagagaagcagcaggccttatttccaacaaagttattggactttgtgtttcacattttggatctggattcactcacctgacaagtgaattcatgggatttcttatttataccagagaaagggtcaaaaaggcaaagtgaaactgtcaaacaagagatcagttactaaaatggcagaactacatatgtagtctgtgatgccgtggtccaggcccagtctcgctagtcaggctgacacagggtgtaatcactatggaagcaaatccgtctctcctacccgcccttatccacttgttccctgtccctcagcatagtccaagggcaatgtygatcaccacctatgaggagggctaggagaaatactgctccttccccatccccaaacacacattccttacagcccgtgatggacacgtgtgattcacacatgtaccaagtgttggaaacacctgagctagatgttgcacacacgtggcttttgggtgagatgggtcataggcacacccatcacattgttggaggaagggtcaaacatccaggctggctctgtgaccttaaattagacaatgacccctgaagccagcacccagtgaaaggggtccctggcccccctgcctgatttccacagtgcccttggccacttcccctccagcttgcttgggccctgttccaaatctgtgggtgggctcttcacccttgtgatgcctccatccactttgtgtctcacatgtgccttgtagtcactcaacaatcaatgcccagttgaacccaggtcaaccccccaaggatcatagcctcagaacaaaccccaggttaaccttaaccctaaatagtgtgccaaggtttatagcctcaattctaaagttaaaaaaaattcaagtatatacatacatatatatacacatatatatgtttctcagaggaatattatgatgcatgaaaagatacaggttataaaccaaaatatataaagaaagagcatttatttgaatgtcatctgcttttttctcttattttcataatattaaaaataaaagttaactattctttcctggaattccaataaattaaaattattcaatggtataatttgacaatgggcaaatttttcattctgagactattccattcctggaaactctttgatgaaaatgcataatgatccaatggccaaggtagtttagaaaccagctttgtctgacctaagtcatctgttttgtatttcccgtatataaaataataatatctcatctacaaatactaagaaactatgaatttttttgagacanagtttcactcttgttgccctggttggagttcagtagcatgatctcggctcactgccacctccatctccctggttcaagctattctcgtgcctcagcctcccaagtagctgggattacaggcacaccccactacgtccagctaattttttgtatgggggggagagatggcgtttcaccatgttggcccagctggtctcaaactccggacctcgtgatctgcccgcctcggcctcccaaagtgctgggattacaggtgtaagccaccatgcccagcctgtagaggcctttttctgccacctccgcatagtctctcctgatggacaccctttgtgcaaaattatccacaacgtgttctcttctcttaagcatcttcacagtcctctctcatactctgttccaacatggtcacttatgtgcactttatgtctccccttctcttgaatgtgaggttgttatataagaagatttgagataagtaatgcattaccctatctgatttgctatcctttaatctatttctccagggtcttttctctgcaaaaggaagagtgaacagtgtatcctgttcccagtgacttggcaggtcctggtcatgaatcagccattctacctttaatcttagtggaccaacctgtctcaaaagaaaaactacttctaagtgaaatgtaaatgatactggctttatgcaagggtgcactgccgattaatagcataaaaatgaggtttttaaaatatcaaatacttatataattttcattgtgccagaaatggctctaagtattttacaaaccttgcttatttaacttcataaccacactacaagctgggcactattacccctatttgcagaaaccacagccagagagtgaagtaagctgtgcaaggtcatcaacagccagtcaacagccagtcaatggccagtcaactcaacagtcagtcaacggcagacaggttgggtccagtccatgccctcaattacagccatgctgcatgtgagtatggagtgagcggtatttttaaaaaagcaaaaaatgttatataaactgcagattttattgatattaattcattgtcactaaagggaaaatgtgctaactattaagaatgcaatttagaggttatgagtttgaattggatgtttgaagttatccagtttcttaggcaacacagaaaagcaacttgaatagttcaatgacatgtaacctttcagaatattttgctttatggttttatcatagttgcttttttatccccatgaatagagcaagaccttcagaataaattgttctcaaataagtaatgcaatattttatgttctggtcttttaagaaatctttactcaattctgtgatgtattgaaagatatagaatattgtaaaataacagatgacttgtggtacacttcagtgaaatttaaaactccacaattgtttgcataaaaacatcaaaacagagaggaaacatagtatggtgttatcttaaagccgcaggagtcatcaaaatagtccagttagactcaaaaagggaccaataattattttccagtaaccttgtatactcggccagtgctaaatagcagtgatagatacttcctgagaaggcgatagcaggaaagaaggggttttttagctggaagccctaaaaaatgtgcaggatg

SEQ ID NO: 699779 - DNA, 774 bp, Homo sapiens
cccctcaccccttttgccatgtgaggacatagagaaaagatgaccaactctgaactagagagtaggtcctcaccagacacaaaatctgttagcacctcgaacttggacttccagcctctagaactgtgagaaatagatttcatttgtttataagccccccagttttgttattaaaacccaaactgattaagacagaytgtgaagacagactgcctgggtttgaatttaccattgaaccattttgcgacagtgaaccaatgatttaaattcaatcaccctcagtttcttcatctatacaatacagatcataataggactacatgcataggatcgttgtgaggattcaacaaggtaattagtgtataaagtttaacacagctcctggcacagactttactaagtgcattctatttttattcagtttatttattttacacatttcaggagccaatggtctaacagcaaagcaagagtttaactcatataaagcaggaagtggtaagagctgtaaaggtattatagacaatttgcaatgggaatttgatggacaaagaaatgttctcctctggatgagacaagaagaaaacctaggaagatgaatgaagaagtggcatttaagatggactttgaaggacaggttggatcggaagtgccaggaaaatcaccagcaagggtctgggcacctgtgtcatccatggctcagtgggaagatggaattgacttgcacatgatactaacagctggagttggaaaggcccaccacagagataatgt

SEQ ID NO: 699780 - DNA, 774 bp, Homo sapiens
cccctcaccccttttgccatgtgaggacatagagaaaagatgaccaactctgaactagagagtaggtcctcaccagacacaaaatctgttagcacctcgaacttggacttccagcctctagaactgtgagaaatagatttcatttgtttataagccccccagttttgttattaaaacccaaactgattaagacagactgtgaagacagactgcctgggtttgaatttaccattgaaccattttgcgacagtgaaccaatgatttaaattcaatcaccctcagtttcttcatctatacaatacagatcataataggactacatgcataggatcgttgtgaggattcaacaaggtaattagtgtataaagtttaacacagctcytggcacagactttactaagtgcattctatttttattcagtttatttattttacacatttcaggagccaatggtctaacagcaaagcaagagtttaactcatataaagcaggaagtggtaagagctgtaaaggtattatagacaatttgcaatgggaatttgatggacaaagaaatgttctcctctggatgagacaagaagaaaacctaggaagatgaatgaagaagtggcatttaagatggactttgaaggacaggttggatcggaagtgccaggaaaatcaccagcaagggtctgggcacctgtgtcatccatggctcagtgggaagatggaattgacttgcacatgatactaacagctggagttggaaaggcccaccacagagataatgt

SEQ ID NO: 699781 - DNA, 607 bp, Homo sapiens
agtttcctgaggcctccccagccacgctgaatcgtaattcaatgaaacctctttcctttataaattaccaagcctcggtatgtctttattagcagcatgagaatggactaatacaccatgccctcagactcttgacccatcagaagtcaacatcctcaaatcatraagttagaaagaaaaggaggctgtgtattttgcaatgtagacccacatcaagtggttttcaattcacttctgcttcagaggaaagagcaacaaaattatttttgcacacatttcaaatatatgaaatgctacattaattatagtttttacagaaatctcattgtcatcttcagaatcattactttcctaaaggtaacatgtgtactcagttggaatcagctaaatttttgttgacaacttgcaactcttcttgtaaatgagtgttgcagtttacattgaagtcgacatttgatgtttagtactatattgtgcattatccctgaattaaaaaaataataataaatgaatggttcaaagtgtattcattgaaatatagcacagaactagtgatgagaatagtaagctgaaatgaaaaattcaaaattatatatacattgatata

SEQ ID NO: 699782 - DNA, 2566 bp, Homo sapiens
ttaccatgccgttgagctggtgaaggctgtcccagagggtagggccaaccttagtatagtactgaactccagtgctgctccacttcttatgacagctgttggcatctttttgcatctactgttgacagttatcataaataatstgaatcttcatctagttcagtgtctaattcatatcttgctaatggcaacaaataaatgacctgtgcaggaatctggcataacccttcagctggtgtgcctagatctggttggctttgctgcgaacatgtgctttgttgctgagaacaatttgggagtgttagggacactaggcaaggcttgaatcatcagctgtacaaaagacagtgaaattcaaagcccaaacacagataacgtttcctcagatgttccatcatttcaaggtaagctggagctgaagaattttgaaatatgatgtcagacacaagcaaaaggaagaggactatgtgtacagagactgaaaacttgcattctattataaaattatttaactagttaattaactcaaggctaagcaattctgggcagggtcttcctcctctgtttccctaaatgtcaaggagggaaaaaaaaattgaatctgttgctctgtttctgcaagtgtcgaaatgaaatattaaatctcctgcttctaggctctctctagctcttatagtttgttactcccatctctgaccagatcatatcaaatatttctaaataatgagatagacagcgtgaccaaggagcaaagcccctttgaaggtttcctacacccatttattccctgttaaatgttatgttcaaacaatatttagctgtataacataaaatgctttcatttctgcccctaaagttgggcaaatttgactgtctctgcttatgctggggatgaatggccgagaagtgtctccacagtgtcagtgtggcctcttcaggaaaggggtaggtcctttccatcacagaggaagaggtattctctaactgttttccacaggacagagattaagatgttggttacatcctcccatagcctccccagagatgaatcccctcagattctgcctaagcaaaatctgctacaggaatactattacacctcaaacaaagacaaatatattcaataagtgaactctcagaatccataaaatagacaaagtccaagcatagagacatgttacaagaaggtggtgcagtgaactttaggattttttgagtaaggacaatggattacatattaagttttctaatcctcaaaaaagaaaataatcagtactggtgctaggtaaatttcacgcccaccaggagattttttttaaggatccccacaatatattctagaatcttattagtaaaagaaactacaataaatatacacatatgaggttgtattaattaaaaatgtattctgtttattgcatttacagaaagcaattagcagctgtacgcctaaaaaaaaaaaaatggagcataagcataagtggtcaccatatcatccttttctttttttttttttttttctttttttgagatggagtctcactcttgttgcccaggctggagtgtaatggctcgttctgggggtggcgcaacctctgcctctgaggcctccagcgattctcctgcctgaggctgctgagtagctgggattacatgcatgcaccaccttgccacgctaattttgtttttttagtagagacagggtttctccatgttggtcaggctggtcttgaactcccaacctcaggttatccacctgcctcagcctcccagagctctgggattacaggtgtgagccactgcgcctggtcaatagtatccatttcattagccaggtgagactaaatggaatgaatacctgtaacccggctagaacaatgcctgacacagtcacagcccagtaaatgtctgtggtgatttcagcacctgaatgggattccttgtttacccttgtttaccttgtttaccttgttttgcccttatctcagagtataatttccacatcttccttaagtctttccttccaggtaaaccctctttcccctttcttcgtggtggtctctatcacctcaatttcaaacacctttctgagttatttgcaaaatggcctcctgttttctgggtgtttctagctgtggaaatagaattgagacatttaagaacctgatttcacttgctcagtcttaaaaatcaatgttcaagtcttggcatgtagtgaaggcttaacatggttttttcacatcaccacaggtgcaaaagtttgaacatcacaatgaaaaacattaaaaaaaaaagatcactgtaaatctaaagcttcttgttcccagacacccatctcgtttccaagaaagcctcagccacaggttccatttcatttgattttcccataggcaagcttgcgcatggctgctgggggccgtgcctcgcgtggctgtcatagcgggaaggcttccatccttaggaggcatgcactcaacagaattctgtaagggaaggattgtttttatgtacaactctgataccatgattgttttcttgtgcctagagagcaatgtggctatatatt

SEQ ID NO: 699783 - DNA, 1660 bp, Homo sapiens
  misc_feature 297, 298, 299, 300, 301, 302, 303, 304, 305, 306, 307, 308,309, 310, 311, 312, 313, 314, 315, 316, 317, 318, 319, 320,321, 322, 323, 324, 325, 326, 327, 328, 329, 330, 331, 332,333, 334, 335, 336, 337, 338, 339, 340, 341, 342, 343: n = A,T,C or G
  misc_feature 344, 345, 346, 347, 348, 349, 350, 351, 352, 353, 354, 355,356, 357, 358, 359, 360, 361, 362, 363, 364, 365, 366, 367,368, 369, 370, 371, 372, 373, 374, 375, 376, 377, 378, 379,380, 381, 382, 383, 384, 385, 386, 387, 388, 389, 390: n = A,T,C or G
  misc_feature 391, 392, 393, 394, 395, 396: n = A,T,C or G
catattgtgggtgaatttgtttttctatttgctattaagtttggctcatagggaactctgacaaaatggtctctaaactgaatttgacatcagcgactagtccaaattctgcatctcctcagtaggtcggatactttgtttgatctgatttagaatgctgagtcaagcataccattctccctaaccttctgaaagttgtgattctctgtgggtttttggtttaatcaatagtaacagggccctatcgatagaggaggttcaagctggtctctgccagtgaaaaattcaatgccaaannnnnnnnnnnnnnnnnnnnnnnnnnnnnnnnnnnnnnnnnnnnnnnnnnnnnnnnnnnnnnnnnnnnnnnnnnnnnnnnnnnnnnnnnnnnnnnnnnnnatgtatttccattgtgaccccctcacttattatttttaattgttgcatagtagatagccacactttcaggggtccatgtgataatatattcatataatttgtaagaatcaaattggtgtacttgggatatctgtcattttcaatatttgtccttttttaatgctagaagcgcttgaattattctcttctagctattttgaaacgtacaatagattattgagaactctaattaccctactgatctattggacactggttcttactycttctatcaaaccatatatgtgaacctattaatcaacttcttagaagctcattttgacgtagcttgtgggacatacattttggtaacaacgattgttaacagggcacatgctatgtgctggccaccgcataaccgctttacactcatcatttcttttagttcacaacaaaaataaggctgaggctggtagtattttaatctccctgtgcagatgagaaaataaatgttgagacaataagtttcccacccaagttgacacactgacaggcagaagagttggagatttaagtcttgatgagtcagtccttagagctcgagtttttaagcccactctgacaaagcaagcccacccattgttccctccacatgtaatgacatcacagaatacagacttcatggcatcacgttgtgagttctgtgtggagcattttaagaggaatctgtctgcgtaccctaagtgatggaaaagccgcttgtagattcatgggagtcctgacgggtggctgcacttaggtgagaaatgagttaaatgcaatcaccctaccagttgtgggggtcggggggtgcgggtggtggtggtgggggggcgcggggggagggcggcaagctccaggctggccatgactcacctacatagagacaagcacacacttacaagccaagaagcgagtttggcaagtttggccgagagcaacaaagggatggaatgcttccagaaggagctctctgaagtgcctgaagggcaagactgagagtgactgagggagagctgcattcagagcagctagtgttcagtcttggaagatgccacggggtctttcttttaaatctctgcagtttcagaaagcaggctacacctggcacttgtgatagccagagcaaaggaagctggtggagaaagaaatgtgtctgtaacacagagttccaaaaacagcattctgccagctctcaatcctgccctttcctgattgtgacttgagagagaacgaagttgccctg

SEQ ID NO: 699784 - DNA, 633 bp, Homo sapiens
gggaggccgaggtgggtggatcacgaggtcaggagattgagaccatcctggctaacacagcgaaaccccgtctctactaaaaatacaaaaaaattagccgggaatggtggcgtgtgcctgtagtccccgctacttgggaggctgaggcaggagaatggtgtgaacccgggagatggagcttgcagtgagctgagattgtgccactgcactccagcctgggcgacagagcgagactctgtctcaaaaaacaaaaaaaaamcaaaaaaaaaaaaaaacaaaagaataccctgctcctgattcaggagagggcatctaaagctttagaaaacattgaattatatttacatacattgtttttcttcttacagcattcctgagggttgttccattgttcttgtttagggtgaatttggtagaagactcagttttttatttgcaggctaaattggattatctttgttacttgcatttttacctgatctacccaggcatataaggatagatttgtttgtgatgtaggcagcggtgtctttcaatatagtagaaaaagaaaataatcagcataagcaaagatctcagtgcacaggccacacagaatggacgccgccctgctggatacctttacacccttgc

SEQ ID NO: 699785 - DNA, 2354 bp, Homo sapiens
  misc_feature 415, 416, 417, 418, 419, 420, 421, 422, 423, 424, 425, 426,427, 428, 429, 430, 431, 432, 433, 434, 435, 436, 437, 438,439, 440, 441, 442, 443, 444, 445, 446, 447, 448, 449, 450,451, 452, 453, 454, 455, 456, 457, 458, 459, 460, 461: n = A,T,C or G
  misc_feature 462, 463, 464, 465, 466, 467, 468, 469, 470, 471, 472, 473,474, 475, 476, 477, 478, 479, 480, 481, 482, 483, 484, 485,486, 487, 488, 489, 490, 491, 492, 493, 494, 495, 496, 497,498, 499, 500, 501, 502, 503, 504, 505, 506, 507, 508: n = A,T,C or G
  misc_feature 509, 510, 511, 512, 513, 514: n = A,T,C or G
cccattacaactaagaagaaacggacattcagaaagatcctttttgtatttgatagtctagtacaagatagagatatcattgcccttttcatgcaaatttattttgtttcattttgccacttgcttcatgaacatgtatagagtgcattccacctaccagccacagtgaggtcctgtagaaaaaggattcactctgtaatccactgaatgaggtttaagtcccagatcttgtaattatgcacctagagattgatttgaagcatgcagctgcttaaccattctgagttttatatcttccatttaaatatgaggaaactcatacctactttataataaacacgtcatgacttaaaaaaggcaggtgttccgttaatcagtcttgttattattttactttcttgtgaccgagaattcnnnnnnnnnnnnnnnnnnnnnnnnnnnnnnnnnnnnnnnnnnnnnnnnnnnnnnnnnnnnnnnnnnnnnnnnnnnnnnnnnnnnnnnnnnnnnnnnnnnngaattcggcacctgatacattatttgcccagggtcacactgwgtacttgagctgagaactaaacccagctttgtgtaattgacaggggatgagctctttacctctgggttataacctctgaatttaaagcacctctaacacattctggaacagtaagcccttaattaatatttgtctccctcatcctaaaaagaaaataattttattagccttagtgatttataaataattttattagctctagtgatttgtaaatgaagaagtgattaatgattaatccattccatatgcatactttgcatttgatacaaaagtaaatgtaatagtttgtttctactgttagaatttttggtataactttggtaatatttcagaacattcaaaacttgcaaaacagtaatagaaacatcccacattttttaggaactagatgccagctatgagaaactggtattaagctagattttacaagtttgaagttgcatttgatgtactttcttcctaacatctcggcttttctaagaaatatgttttcagcatatcaaaagcacgcgtgttgtctctaagcgtttcacactattcataatgtaatttagataataaaaccactgggaaaatggaaaccaatgtagctgaataaatagagctaatcaatcccattgtgtttctagaatacagtttatttaattcatttttattgtgtaaaatttgggaagtacttaaaagtataaaagaaaacatccacaatcatattgcctacagatgacttccactggtattttggtttcaatcttttattatttatttattttgcctttgtctcatcattgagatcagtctgtatacagtattttaaatttggccatacactttgaattttattatatgcattttctttgttactagaaaaaatctgacagagtttaatggctatttatcgttccactatgaggatgcttcattatttactaatcatttccctgttgttgatattttcttatatccaagtttttgccactgtaaacaatataatattgatcactatgagggcatcagacacaaaactttatttctttacttaggataatttccttggtcggcattttacatatctgaattactaaatcagtgggctttatattataaaggcttctgatatatgttgtccatttgctctatataaaaagtagttgttagtttacattcatgctagccgtctatctcctttagtctctaagttttgttttttaagtctataattagaaaacaaaatgtaacaaaacaaaacaaatacaaactcttcctaggaaaattccaatctgctattttgtgaagaggctgaaattaaactggtttctacatgatccatacttcatgtgtcttctttcatcagcagatagcattttctttaatctcaaggttggggtaagggggcctttgacatgaatctctctgatatactcttaagtaagaaccaatctttgcaggcctatgtgaaattgtcaagcatggaggaaggaatgagaatttgatgggcacctattgtcaataattttattctttaacttttctctttttgtctcatgattctctgctctgcacactttcaattccaaacactgttagctgggtgttgtagtcccagctacttggtaggctgagtcaagaggattgcttgagcccaggagtttcaagctgcagtgagcaatgatcacacaactgtacttcagcctaggtgacagagtgagactctgtctctaaataaataaaaaataaaaataaaaataaaataaaactctaaacacttgagatagccaagccataatcctacagggatgca

SEQ ID NO: 699786 - DNA, 656 bp, Homo sapiens
tttttcaccatttaccaagatgactttctgagattgtgtgatttgcacagtgggttttgraaacaccatcaaagttattgggtttcctcattgatacatcaatgtaggtgcatcggaagcataccacactccattcaacttaaaacccaatgacaattttacacataatagggtgagaggtctcatacagatattatttttatcaatatttagtattttagaaataatttctaaatgatatttgagggagtccgggaaggagatgtgagaaatttaatatattttaactcatgtcttagttcagacattgagcctcttaggagatgagttagttatttatctacacatgcttttcttctcttttcattaatttaatttaattccatttatatgtaacctgagagtaccattcccctgcagtatgcccactccatttgtacactgaattgaagtcatcatgcctgctttaatggctgtgaaggacttagaaattaatagctctctcttgaattagtaaattatatttttccaaagagagaaaagtgcctcataaaaataagtgactagagtcacttttattttatttttataacaagtctttttatgctgtcgttttaaaccccctttaacaataacatcttacatttatatcatac

SEQ ID NO: 699787 - DNA, 613 bp, Homo sapiens
taagtttccccaaatatatgattattcaattcacccacaagtcttttttccattttttcaaaaatacaataatattattattagctatagtcaccatgttgcacaatagctctcttgaacttattccttctgtgtaatgaaaaagttgtatcttttgattaatatctctttaacaagaaagactttcttgctgggatgtttatacactgattaaaaataacaataatatgctgccaaatgtagagggttcagaataataaaataagaattggaggtaaatttgtaaaaayatttttggctgaactgaagaaaataatgtatacttcacattttaaaatctttgtatgcatgcacacatacaaatatatatatatttcttaatagtatgaataatgaaacaatcttccaatttgaataagtaagtctaattcaaaaagttaattttttcagactctatgtttttaattttttagttttattagaaaaagagcagaaaaccctaatctgtcttattgttatcagaaaactttttaaaaatgtatccctccattttcaataaatactatatttgctgattatgttgaacaccatatgccatatatagttcttaaca

SEQ ID NO: 699788 - DNA, 3725 bp, Homo sapiens
caaaaggttgttgtaccgagctgtgattgtgacaaatgatttactattaggaacattctgtaattattgttcggtgggaccgcagaccgatacatcattaacatgatagacggcctttgataccagcaaaaataactaaattaataaaaatggcttcattccaatccctgtcagaaagccaatactcagaacaatcaagcagcagtgatacctgagaaggccatagtttatatcccccaacaaatcaggtttcatacagaagcaataaaatatttgtatatataatctctgtaatatggatctgtataatataagagattttatggagatcagctctaaacaaaaatataggatatgtaaatattttcttccaaatgatttagatgtaaatttatgcttttatgcaattggattgcagttttagaatattagaatttgcctttgacatcttttctttcaagatgtcttaagcactgagaaacattttaatgtagattctacaggctaaagtttcgtttttcctttctcttattttcttctctttttcctttctcccttccttccatcctttctttccttctttcttctttctttcaatcctttcctcctttctttcttttcatcaacaaatccctaatttatgctttaaatccttagcctcacatttctgacatttctacacagaatgagaggaaagaaagatctatttctgagtactctgttgaaatagacttatagaaacaaaatgcagactacgggcatcgatacaaaacctttgaggtccacctaagtagaaatcacaattacatttctaggttttttttgcactttagtactgaaaacaaatttcaattaaaaaatggacaattataataagggggacctgcatagaaatctaagactaggagctctcaagaaatcagagaaagtataacagaaagcaactgttttctattattttcttccttacttattttctctctttcagtgtatttttgtctgcaatctcatatccaaaactcttgggatgagatgtgtcctgtaattcagaaccgttatgattttggaagacatcttggccacaaagccaaatactatctgccatcatcagggaacctagggtggcatccattaatatgtatgcaacaacacatatgaatacacaccaactgggataaataaagactgcatcgtccacataggtgtgggtcacattttgctacaaatgaaatcaacttaggtcaaaaataaatgttgtgtagagacttttagattaaggaattgcaactgaactgttcaaaccaactctaagaatcctgttaatttaaatataatctaaattcatcttgtgtgattccattcactttgaatacttttttaaagactttattcttttagagcagttttagtcttacagtagaattgagaggaaggaacaaagattccccatataccccctttttttttttttgagacagggtctcactctgtcacccagtctggagtgcactggcatgatctcagcttactctaacctccacatcccaggttcaagtgattctcctgcctcagccgcctgagtagctgggattacaggtgtgaaccaccacacccagctaatttttgtatttttagtagagacagggtttcaccatgttggccaggctggtctcaaactcctgacttcaggtgatctatccttctcggcctcccaaagtgctgggatgacaggcatgagccaccatgccgggcctcatataccctcacattctcacatgcagtgacttccttccatcttccaccagacaggtgcctttgttacaactgacgaacctacagtgacacatcatcaccacccaaagtccacagtttacgttagtgttcattcttggcgtactttctgtggatattccatttcattatacatttgtccttttgcacattgtgacggggttgttccactcttttttctttttttttttttaataagagacaggggtcttgccatgttgctcaagctagtctggaacccctgggttcaagccatcctcctgcctcagcctcccaaagtgtggggattacaggtgtgagccaccatgcctggctttttccactctttgtaggagcttgaaaataatagaaatcaccacttaatggatactcaataaatacaagttattggttgagtaactggtattgtaacatagcagccttttagaaatgtgctcctgtgacttcatacttctacagaagttgcaaggatctaaacgcttcaaactctgataaactttattcactgacaaatttattctcagaaatgttcatacctttgtggaaaaggtataaaaatagtctgtaattgtctacatagtagatattttattaagtaaagacattgttttcaaagccagatttctatctaaratgattttgaaaaatatcgctgctcagttcttccaatgccattggcataagtgaaatcactgtcagcggctggctataaagggaagagttgtacagaattgtagctcagagatgctgagatgatatcaaatgtcattttgattctgaaactaaagaagggaagagtattgtgcaaggtgaggggaggcatgcaggtaagggatccagtgcaacctttcctgggtagtcagcgagagaatcatgcaattgttgttatggctaaagcttgattgagacctattttaaaactcgtcttttctgctttggccttctcttaaaggaagacaaatgcccttgaaaaggagtcttaaaagtatgattcacggacttgggaagaattacaggatgcagacagcctagagtggtgcctcctgcccccaaaggagttcacatttccttcctcttaatctgagtgaaccattaaaaagttagtcagttccctggaggctctttctgaggaatctcctaaaaggaaataccctgcactggaaaggtaatttacctagacaggatttaaaaaactaagttccagttcagagataaccagcgactttatatgggctggtgtattcctccttttaaggattctcccctgaagttagttaacaaatcaaaaaggtaggcagaacaacatcaagaaagaacacactacccttgcacattttatttatttatttttatatgcaattaagtcctcaaacggatagtttcactgctgttgtaatatcaaactgtaaatatgcaatacattgattttttttttcctgaaaataggctcgtattcaaaccagaaacattttgtgttctattctgagaatgtttttaattattttagctagtgggaaaactcttttctttgggatagggatgtgggaggggaacaaaaatctgtgttctggaccttagggagtgctgtggtaattcagtttctgaggtcttcaggaagccgggcttaggagttgattcccttttatggctaaataactcttatgaatttgtcttttcaaagtccactggaaactggaaagaggagcatgattacagaaagctgcagctgtgaatatttgcagagcagcttagtttcccatctctatcaattctctctcccctgcccccacctccagcaactaatatcttagcatcttatggagtaatatgatagaactgtcaagaatgaatgaggactttgggccgtattaattcccatcaacaaactaatgtctaatgttttgtaggctacagataagaagttgaccactgca

SEQ ID NO: 699789 - DNA, 3725 bp, Homo sapiens
caaaaggttgttgtaccgagctgtgattgtgacaaatgatttactattaggaacattctgtaattattgttcggtgggaccgcagaccgatacatcattaacatgatagacggcctttgataccagcaaaaataactaaattaataaaaatggcttcattccaatccctgtcagaaagccaatactcagaacaatcaagcagcagtgatacctgagaaggccatagtttatatcccccaacaaatcaggtttcatacagaagcaataaaatatttgtatatataatctctgtaatatggatctgtataatataagagattttatggagatcagctctaaacaaaaatataggatatgtaaatattttcttccaaatgatttagatgtaaatttatgcttttatgcaattggattgcagttttagaatattagaatttgcctttgacatcttttctttcaagatgtcttaagcactgagaaacattttaatgtagattctacaggctaaagtttcgtttttcctttctcttattttcttctctttttcctttctcccttccttccatcctttctttccttctttcttctttctttcaatcctttcctcctttctttcttttcatcaacaaatccctaatttatgctttaaatccttagcctcacatttctgacatttctacacagaatgagaggaaagaaagatctatttctgagtactctgttgaaatagacttatagaaacaaaatgcagactacgggcatcgatacaaaacctttgaggtccacctaagtagaaatcacaattacatttctaggttttttttgcactttagtactgaaaacaaatttcaattaaaaaatggacaattataataagggggacctgcatagaaatctaagactaggagctctcaagaaatcagagaaagtataacagaaagcaactgttttctattattttcttccttacttattttctctctttcagtgtatttttgtctgcaatctcatatccaaaactcttgggatgagatgtgtcctgtaattcagaaccgttatgattttggaagacatcttggccacaaagccaaatactatctgccatcatcagggaacctagggtggcatccattaatatgtatgcaacaacacatatgaatacacaccaactgggataaataaagactgcatcgtccacataggtgtgggtcacattttgctacaaatgaaatcaacttaggtcaaaaataaatgttgtgtagagacttttagattaaggaattgcaactgaactgttcaaaccaactctaagaatcctgttaatttaaatataatctaaattcatcttgtgtgattccattcactttgaatacttttttaaagactttattcttttagagcagttttagtcttacagtagaattgagaggaaggaacaaagattccccatataccccctttttttttttttgagacagggtctcactctgtcacccagtctggagtgcactggcatgatctcagcttactctaacctccacatcccaggttcaagtgattctcctgcctcagccgcctgagtagctgggattacaggtgtgaaccaccacacccagctaatttttgtatttttagtagagacagggtttcaccatgttggccaggctggtctcaaactcctgacttcaggtgatctatccttctcggcctcccaaagtgctgggatgacaggcatgagccaccatgccgggcctcatataccctcacattctcacatgcagtgacttccttccatcttccaccagacaggtgcctttgttacaactgacgaacctacagtgacacatcatcaccacccaaagtccacagtttacgttagtgttcattcttggcgtactttctgtggatattccatttcattatacatttgtccttttgcacattgtgacggggttgttccactcttttttctttttttttttttaataagagacaggggtcttgccatgttgctcaagctagtctggaacccctgggttcaagccatcctcctgcctcagcctcccaaagtgtggggattacaggtgtgagccaccatgcctggctttttccactctttgtaggagcttgaaaataatagaaatcaccacttaatggatactcaataaatacaagttattggttgagtaactggtattgtaacatagcagccttttagaaatgtgctcctgtgacttcatacttctacagaagttgcaaggatctaaacgcttcaaactctgataaactttattcactgacaaatttattctcagaaatgttcatacctttgtggaaaaggtataaaaatagtctgtaattgtctacatagtagatattttattaagtaaagacattgttttcaaagccagatttctatctaagatgattttgaaaaatatcgctgctcagttcttccaatgccattggcataagtgaaatcactgtcagcggctggctataaagggaagagttgtacagaattgtagctcagagatgctgagatgatatcaaatgtcattttgattctgaaactaaagwagggaagagtattgtgcaaggtgaggggaggcatgcaggtaagggatccagtgcaacctttcctgggtagtcagcgagagaatcatgcaattgttgttatggctaaagcttgattgagacctattttaaaactcgtcttttctgctttggccttctcttaaaggaagacaaatgcccttgaaaaggagtcttaaaagtatgattcacggacttgggaagaattacaggatgcagacagcctagagtggtgcctcctgcccccaaaggagttcacatttccttcctcttaatctgagtgaaccattaaaaagttagtcagttccctggaggctctttctgaggaatctcctaaaaggaaataccctgcactggaaaggtaatttacctagacaggatttaaaaaactaagttccagttcagagataaccagcgactttatatgggctggtgtattcctccttttaaggattctcccctgaagttagttaacaaatcaaaaaggtaggcagaacaacatcaagaaagaacacactacccttgcacattttatttatttatttttatatgcaattaagtcctcaaacggatagtttcactgctgttgtaatatcaaactgtaaatatgcaatacattgattttttttttcctgaaaataggctcgtattcaaaccagaaacattttgtgttctattctgagaatgtttttaattattttagctagtgggaaaactcttttctttgggatagggatgtgggaggggaacaaaaatctgtgttctggaccttagggagtgctgtggtaattcagtttctgaggtcttcaggaagccgggcttaggagttgattcccttttatggctaaataactcttatgaatttgtcttttcaaagtccactggaaactggaaagaggagcatgattacagaaagctgcagctgtgaatatttgcagagcagcttagtttcccatctctatcaattctctctcccctgcccccacctccagcaactaatatcttagcatcttatggagtaatatgatagaactgtcaagaatgaatgaggactttgggccgtattaattcccatcaacaaactaatgtctaatgttttgtaggctacagataagaagttgaccactgca

SEQ ID NO: 699790 - DNA, 3725 bp, Homo sapiens
caaaaggttgttgtaccgagctgtgattgtgacaaatgatttactattaggaacattctgtaattattgttcggtgggaccgcagaccgatacatcattaacatgatagacggcctttgataccagcaaaaataactaaattaataaaaatggcttcattccaatccctgtcagaaagccaatactcagaacaatcaagcagcagtgatacctgagaaggccatagtttatatcccccaacaaatcaggtttcatacagaagcaataaaatatttgtatatataatctctgtaatatggatctgtataatataagagattttatggagatcagctctaaacaaaaatataggatatgtaaatattttcttccaaatgatttagatgtaaatttatgcttttatgcaattggattgcagttttagaatattagaatttgcctttgacatcttttctttcaagatgtcttaagcactgagaaacattttaatgtagattctacaggctaaagtttcgtttttcctttctcttattttcttctctttttcctttctcccttccttccatcctttctttccttctttcttctttctttcaatcctttcctcctttctttcttttcatcaacaaatccctaatttatgctttaaatccttagcctcacatttctgacatttctacacagaatgagaggaaagaaagatctatttctgagtactctgttgaaatagacttatagaaacaaaatgcagactacgggcatcgatacaaaacctttgaggtccacctaagtagaaatcacaattacatttctaggttttttttgcactttagtactgaaaacaaatttcaattaaaaaatggacaattataataagggggacctgcatagaaatctaagactaggagctctcaagaaatcagagaaagtataacagaaagcaactgttttctattattttcttccttacttattttctctctttcagtgtatttttgtctgcaatctcatatccaaaactcttgggatgagatgtgtcctgtaattcagaaccgttatgattttggaagacatcttggccacaaagccaaatactatctgccatcatcagggaacctagggtggcatccattaatatgtatgcaacaacacatatgaatacacaccaactgggataaataaagactgcatcgtccacataggtgtgggtcacattttgctacaaatgaaatcaacttaggtcaaaaataaatgttgtgtagagacttttagattaaggaattgcaactgaactgttcaaaccaactctaagaatcctgttaatttaaatataatctaaattcatcttgtgtgattccattcactttgaatacttttttaaagactttattcttttagagcagttttagtcttacagtagaattgagaggaaggaacaaagattccccatataccccctttttttttttttgagacagggtctcactctgtcacccagtctggagtgcactggcatgatctcagcttactctaacctccacatcccaggttcaagtgattctcctgcctcagccgcctgagtagctgggattacaggtgtgaaccaccacacccagctaatttttgtatttttagtagagacagggtttcaccatgttggccaggctggtctcaaactcctgacttcaggtgatctatccttctcggcctcccaaagtgctgggatgacaggcatgagccaccatgccgggcctcatataccctcacattctcacatgcagtgacttccttccatcttccaccagacaggtgcctttgttacaactgacgaacctacagtgacacatcatcaccacccaaagtccacagtttacgttagtgttcattcttggcgtactttctgtggatattccatttcattatacatttgtccttttgcacattgtgacggggttgttccactcttttttctttttttttttttaataagagacaggggtcttgccatgttgctcaagctagtctggaacccctgggttcaagccatcctcctgcctcagcctcccaaagtgtggggattacaggtgtgagccaccatgcctggctttttccactctttgtaggagcttgaaaataatagaaatcaccacttaatggatactcaataaatacaagttattggttgagtaactggtattgtaacatagcagccttttagaaatgtgctcctgtgacttcatacttctacagaagttgcaaggatctaaacgcttcaaactctgataaactttattcactgacaaatttattctcagaaatgttcatacctttgtggaaaaggtataaaaatagtctgtaattgtctacatagtagatattttattaagtaaagacattgttttcaaagccagatttctatctaagatgattttgaaaaatatcgctgctcagttcttccaatgccattggcataagtgaaatcactgtcagcggctggctataaagggaagagttgtacagaattgtagctcagagatgctgagatgatatcaaatgtcattttgattctgaaactaaagaagggaagagtattgtgcaaggtgaggggaggcatgcaggtaagggatccagtgcaacctttcctgggtagtcagcgagagaatcatgcaattgttgttatggctaaagcttgattgagacctattttaaaactcgtcttttctgctttggccttctcttaaaggaagacaaatgcccttgaaaaggagtcttaaaagtatgattcacggacttgggaagaattacaggatgcagacagcctagagtggtgcctcctgcccccaaaggagttcacatttccttcctcttaatctgagtgaaccattaaaaagttagtcagttccctggaggctctttcygaggaatctcctaaaaggaaataccctgcactggaaaggtaatttacctagacaggatttaaaaaactaagttccagttcagagataaccagcgactttatatgggctggtgtattcctccttttaaggattctcccctgaagttagttaacaaatcaaaaaggtaggcagaacaacatcaagaaagaacacactacccttgcacattttatttatttatttttatatgcaattaagtcctcaaacggatagtttcactgctgttgtaatatcaaactgtaaatatgcaatacattgattttttttttcctgaaaataggctcgtattcaaaccagaaacattttgtgttctattctgagaatgtttttaattattttagctagtgggaaaactcttttctttgggatagggatgtgggaggggaacaaaaatctgtgttctggaccttagggagtgctgtggtaattcagtttctgaggtcttcaggaagccgggcttaggagttgattcccttttatggctaaataactcttatgaatttgtcttttcaaagtccactggaaactggaaagaggagcatgattacagaaagctgcagctgtgaatatttgcagagcagcttagtttcccatctctatcaattctctctcccctgcccccacctccagcaactaatatcttagcatcttatggagtaatatgatagaactgtcaagaatgaatgaggactttgggccgtattaattcccatcaacaaactaatgtctaatgttttgtaggctacagataagaagttgaccactgca

SEQ ID NO: 699791 - DNA, 635 bp, Homo sapiens
ctcccacttctaagtgagaacaggcagtatttgtttttcagtttctgtgttagtgtgctaaggataatggcttccaagataagttttgaaaagctattgatctcatattctaagttaatgtcccaaagcaagcttgtccaacctgyggcccatgggctgcatgcagcctaggaagactttgaatgcggccccacacaaattcatcaactttgttaaaacaatatgagatatttttgcgattttttttttagctcagcagctatcattagtatattttatctgtggcacaagacaattatttttccaatgtggcccagaaaaggcaaaagattggacactcctgcagcctaaaggaaaaaaaattagtccccagatattacagtcctcaggaatttccatctacatggaacatttatatttataagataaaagttaaactctgctgggaacataggagaatactctagactttacttatatcttaatggtttaatttaaaatagttattttaaaggtgttttaaaattattttaatacattcagtatgtaattttggattcatttacttatctttcaatattatgttctttcacaaaaagtatatttttcacataatagtcaatattttctagaat

SEQ ID NO: 699792 - DNA, 635 bp, Homo sapiens
ctcccacttctaagtgagaacaggcagtatttgtttttcagtttctgtgttagtgtgctaaggataatggcttccaagataagttttgaaaagctattgatctcatattctaagttaatgtcccaaagcaagcttgtccaacctgtggcccatgggctgcatgcagcctaggaagactttgaatgcggccccacacaaattcatcaactttgttaaaacaatatgagatatttttgcgattttttttttagctcagcagctatcattagtatattttatctgtggcacaagacaattatttttccartgtggcccagaaaaggcaaaagattggacactcctgcagcctaaaggaaaaaaaattagtccccagatattacagtcctcaggaatttccatctacatggaacatttatatttataagataaaagttaaactctgctgggaacataggagaatactctagactttacttatatcttaatggtttaatttaaaatagttattttaaaggtgttttaaaattattttaatacattcagtatgtaattttggattcatttacttatctttcaatattatgttctttcacaaaaagtatatttttcacataatagtcaatattttctagaat

SEQ ID NO: 699793 - DNA, 635 bp, Homo sapiens
ctcccacttctaagtgagaacaggcagtatttgtttttcagtttctgtgttagtgtgctaaggataatggcttccaagataagttttgaaaagctattgatctcatattctaagttaatgtcccaaagcaagcttgtccaacctgtggcccatgggctgcatgcagcctaggaagactttgaatgcggccccacacaaattcatcaactttgttaaaacaatatgagatatttttgcgattttttttttagctcagcagctatcattagtatattttatctgtggcacaagacaattatttttccaatgtrgcccagaaaaggcaaaagattggacactcctgcagcctaaaggaaaaaaaattagtccccagatattacagtcctcaggaatttccatctacatggaacatttatatttataagataaaagttaaactctgctgggaacataggagaatactctagactttacttatatcttaatggtttaatttaaaatagttattttaaaggtgttttaaaattattttaatacattcagtatgtaattttggattcatttacttatctttcaatattatgttctttcacaaaaagtatatttttcacataatagtcaatattttctagaat

SEQ ID NO: 699794 - DNA, 616 bp, Homo sapiens
taagagttcagcaaatgaaaaaattgctactgctcttcataaagctctcaatgggttaaccgcttggacatctggtgaaatactagcctcagctgtttaagtgacatcttcttgggtcaaatttctctcctcacttcagtccatctgctcacagcttatcataataaacacttctaagttaaagagcaaagagtacacagcaacgagagagggacagcatcttggatattggctagacaataatattagagcaaaaacaacacccagctatctactcttctttcctccagccccattccacactgcccattcacccctsccccgacccttccctgccccgtgtgtggcagccacatgccaggtgggagagaagctgaagggaagaaatcaaagctacccataagtgactgaagagaagaaataggcctaatgggaagaataatgccaggtggaaaatctatgtgtcacttgcttttggaccaatgaaagtagaatgtattatgtgattgatactccatagaatagaatcttcttaatgtagtgtcttggggatctgggcacttggcttatctaggaactgtaccaagttattctgagactttagcaaaaagtctaa

SEQ ID NO: 699795 - DNA, 2454 bp, Homo sapiens
tcctgtagtaggaaagaaacaagattgaagtgagtccaacagagagtggaaaacaggacagaaatctcatctaagatgtttttctgttaagtgggcacagagaaatgcagccacagatagaggaagtcatggtagcaaagaagaaaggtttttgtttagttttggtgattttttttttttaartctccatcctttaacaagaaatcacaaagccttgtacacataccggtctactgaaaatgtgaaagtgaccacagtaaggctcaatggccaggcatgcatgaagtgtgagatattccacatacaaggctttggcagacaactaatttaccctagtatgcattaaatattttagtttttatgcatttttgtgtaagtcttgccaaaatatactaactgattctctactttctgaatcatattatggacagcaattatatctggactacatagtacagcgatgtcctctcagggagtataaaagtgggtttgaatatgtgctacctcacaagatgatcccagaaaactagagattttcaattagctttgaatctctttaagatcatcagctgttcctcgcagtcatagatgtgcaagtttacctggcccagtggatctcagtgtggctgcagagtagaattgcctgctgggggtcagggagaggtttttaaaaataccagtgccaggccgggtgtggtggctcacgcctgtaatcccagcattttgggaggcccaggcaggtggatcaggaggtcgggagatccagatcatcctggttaacacggtgaaaccccatctctactaaaaatacaaaaaattagccgggcatggtggtgggcgcctgtagtcccagctactcgggaggctgaggcaggagaatggcgtgaacccgggaagcggagcttgcagtgagccgagattgcaccactgcactccagcctgggcagcagagcgagactccgtctcaaaaaaaaaaaaaaaaaggcagtgccaagataccaaagattctgacccaatccatgtgaggtggggcctgagcattagaggtttttttttctttagttttggcaggtggttctaacatgcaacaagggttgaaaatcattgatagaactctaacttcatcttttaagatgagcaaacagatccacagaggttgtataaaatagaagcacataacttccagtagtcagtgtactatgcctctttcaaagatccttgtccccaacttgtatatgggccaggagattaattcattcactggaacatttgttgagctcttactatgtgctagaatccagtcaaagcacctagagacaaaggtaaatacgacagtgggttagtggtgagtagttcagaatccacggggttaaaactgcaaaaataaaattatagttaaatgtatgataatcatttataccatggagtacagactagggaatgactgaagactatctaaaatcaaagaaagtagttctgggcaggagcctgaatacagagcatgggctttagtggcaacacaattcctactgaaaccacagaaccatgataggccagtaaacagcctgtagagcatcactgcaaccagctgaccctaaactagatttgcctacatcaatccccttttcttgtgaaatgttgtgggtttagctttttataattataagccctgactttgcctttgttcaaggagaccgcctccacagaggctgttcttccttgtctataccatcaaatccttggtgctttaaatactcgtctctgagttgttatttaacctatctactttatatgcttacgtgtttctcacttcaaagacttcacttgtgttcaagtgcaggacacttaaggagcattcttaagtaatttctggataagacagctacagctatggaaagagagcttaacttaaaatgtaaagtgcacttaatgtatgccagaaatgtcctaggtgctttgcatgaaatttacttattccttaaggaactctctgagctaggtactgttaatatcatacccattttgcagaagagaaaactgagacaagcaagattaagcaactagcacagagtctcgattggtaaggctttgaacccaggcatctgattccagagccaacatgctctgtactactccatactgaatactgataagaaatgtgcagatcctaccaaaaggcagaaaggaagcttaactgagggacataaaagaggaccaattacattgaaaaccatactatattcctggaaggacatgctcaatactcaatgtcaatttttcttcctctaccagattaatttgtaaattgaatgaaattctgactaagatctcagagacttttccagaaccaagcaaacattgttcttttagatataaaagtcaacccaatgaaaaaatattcaaagtgaagaataatgaaagacaatcagctctactaaataatgaattgcacta

SEQ ID NO: 699796 - DNA, 1064 bp, Homo sapiens
tcgagaccatcctggctaacacagtgaaaccccatctctactaaacatacaaaaaattagccaggcatggtgacgggcgcctgtagtcccagatattctggaggctgaggggagagaatggcgtgaacccgggaggtggagcttgctatgagccgagatcacaccactgcgctctagcctgggcaacagagcgagactctgtcaaaaaaaaaaaaagaaagaaaggaaagaaagaaaggaaaggaagaaataatcaaaaagaaaggataaaagttcaccatagtattattgctcacaggaatgttattaatagtcatgccatatgtccttcagtcttttctctatgcaaattcctttttaaaataagattatgctaacaaactgtttttaagcttaatttttatttcatatcaggtgatatgcacttgttgtgacatctttgggtgctggtctccatctttacagtccagaaaagattgttatccagatgccttaaagcccctcaagcatttccaattggaaaatgaatagttctgaaagtaaaggtgcagactgaaaacttgtgcagtccaacctcaactttgctgtaaacaaattttttctttgtctttaaacatctttatcccatcaaatctttaatcattcaattaaaacataaccgaacaccaattatgcacaaagtcctgtgccaggcatttagggggcaccaatgcaaatcagatacatcattacagttatgtttgagggagccaggtgctaaacttcataaaggcattctgtctggggttgagattaaaatgtaaatatatttcaggactacggaggtaaggctagacaaccctccttcaccgtatctattgcattctccagttttcggggaggttgagaggcttcctggggagaaagttgaaaactgcaagtggcgttcggaaatacataaacttgtgggaactccgaagtggagcagggagatccaacagattcaaactgtaaagtgtcccatttcaggacctctgaaaaaaaatcatcctaaagaawccagactcctccacggggttaataca

SEQ ID NO: 699797 - DNA, 1064 bp, Homo sapiens
tcgagaccatcctggctaacacagtgaaaccccatctctactaaacatacaaaaaattagccaggcatggtgacgggcgcctgtagtcccagatattctggaggctgaggggagagaatggcgtgaacccgggaggtggagcttgctatgagccgagatcacaccactgcgctctagcctgggcaacagagcgagactctgtcaaaaaaaaaaaaagaaagaaaggaaagaaagaaaggaaaggaagaaataatcaaaaagaaaggataaaagttcaccatagtattattgctcacaggaatgttattaatagtcatgccatatgtccttcagtcttttctctatgcaaattcctttttaaaataagattatgctaacaaactgtttttaagcttaatttttatttcatatcaggtgatatgcacttgttgtgacatctttgggtgctggtctccatctttacagtccagaaaagattgttatccagatgccttaaagcccctcaagcatttccaattggaaaatgaatagttctgaaagtaaaggtgcagactgaaaacttgtgcagtccaacctcaactttgctgtaaacaaattttttctttgtctttaaacatctttatcccatcaaatctttaatcattcaattaaaacataaccgaacaccaattatgcacaaagtcctgtgccaggcatttagggggcaccaatgcaaatcagatacatcattacagttatgtttgagggagccaggtgctaaacttcataaaggcattctgtctggggttgagattaaaatgtaaatatatttcaggactacggaggtaaggctagacaaccctccttcaccgtatctattgcattctccagttttcggggaggttgagaggcttcctggggagaaagttgaaaactgcaagtggcgttcggaaatacataaacttgtgggaactccgaagtggagcagggagatccaacagattcaaactgtaaagtgtcccatttcaggacctctgaaaaaaaatcatcctaaagaatccagactcctccacrgggttaataca

SEQ ID NO: 699798 - DNA, 880 bp, Homo sapiens
gaatggtattccctaaaacatctctttttctggccttgtttctgactggggtaaaattatttggtcttggcaggctctaaaatgagtacttgaaccctcactttattcaatgcattatatcactatgttctttggttttgaaactacactttctccagtgcagttctaaattttccactggacatcccctagctgtttgctgatagctgtttcctttaaaaaggaaaaatttgatacaaattgaaaatgttaacaagaagagcatagctgaaacgctaatcgtattactaaagtcacctggagacacattagtatcaaatgtgcctttgtaacatatgcttcacttttttcaatttataactacataaaatgaacccccttcctctggcgcaagtctcttttgttcctattcaatttctactccctcttaactaaaacasaaggagtcagaacactctgtagagaggacactatcttaatcctctggacaaaggacactgttgattaaatgcaaggtcttgactgaaggagatccttgggagggtcccatcggagatgatctttctgattaggaattgtgtcaggcattttggagttctgccatcaaatgctgcgtggtgagcttctacacatctcctgccaccacctattgtagcagagaagccacagcaaaggtcaatttcccagacacaaaaacaggtcccactcctgtgaagggcaatcaagctcctgcaaggaaatggtctgcaaaagggagcccttaggaattcgctttttctttcctctgaaacttgagcttgatacatccctcaagctcaagtttaaaattgtaaagaagaaaaacacaatttaaatttttactcttatttactcacgatga

SEQ ID NO: 699799 - DNA, 880 bp, Homo sapiens
gaatggtattccctaaaacatctctttttctggccttgtttctgactggggtaaaattatttggtcttggcaggctctaaaatgagtacttgaaccctcactttattcaatgcattatatcactatgttctttggttttgaaactacactttctccagtgcagttctaaattttccactggacatcccctagctgtttgctgatagctgtttcctttaaaaaggaaaaatttgatacaaattgaaaatgttaacaagaagagcatagctgaaacgctaatcgtattactaaagtcacctggagacacattagtatcaaatgtgcctttgtaacatatgcttcacttttttcaatttataactacataaaatgaacccccttcctctggcgcaagtctcttttgttcctattcaatttctactccctcttaactaaaacagaaggagtcagaacactctgtagagaggacactatcttaatcctctggacaaaggacactgttgattaaatgcaaggtcttgactgaaggagatccttgggagggtcccatcggagatgatctttctgattaggaattgtgtcaggcattttggagttctgccatcaaatgctgcgtggtgagcttctacacatctcctgccaccacctattgtagcagagaagccacagcaaaggtcaatttcccagayacaaaaacaggtcccactcctgtgaagggcaatcaagctcctgcaaggaaatggtctgcaaaagggagcccttaggaattcgctttttctttcctctgaaacttgagcttgatacatccctcaagctcaagtttaaaattgtaaagaagaaaaacacaatttaaatttttactcttatttactcacgatga

SEQ ID NO: 699800 - DNA, 1370 bp, Homo sapiens
  misc_feature 1270, 1271, 1272, 1273, 1274, 1275, 1276, 1277, 1278, 1279,1280, 1281, 1282, 1283, 1284, 1285, 1286, 1287, 1288, 1289,1290, 1291, 1292, 1293, 1294, 1295, 1296, 1297, 1298, 1299,1300, 1301, 1302, 1303, 1304, 1305, 1306, 1307, 1308: n = A,T,C or G
  misc_feature 1309, 1310, 1311, 1312, 1313, 1314, 1315, 1316, 1317, 1318,1319, 1320, 1321, 1322, 1323, 1324, 1325, 1326, 1327, 1328,1329, 1330, 1331, 1332, 1333, 1334, 1335, 1336, 1337, 1338,1339, 1340, 1341, 1342, 1343, 1344, 1345, 1346, 1347: n = A,T,C or G
  misc_feature 1348, 1349, 1350, 1351, 1352, 1353, 1354, 1355, 1356, 1357,1358, 1359, 1360, 1361, 1362, 1363, 1364, 1365, 1366, 1367,1368, 1369: n = A,T,C or G
tttaaaaaattgtgtcttccagttttttatggtgtcaggatagtagcccctgatgtagccacttttaatttccgttgaaaaatctatcacatttcctaaattggtagcccatggggcactgtaggatggtaataagcattacagagttttctctaaaacatctgcacatctttagtacaccaagaggaatagagaagattctaagaagaggctatagggcaaggtttcctacgcttgtttaaccacagcttttctttgttgttagctatccatgtctccagaaacaagttctaaaataacattaaagacagactgaacaacaaaaatacaggaaaaactaactaacaccaaaaatgaatgtaacacaaatatttctggatcttctttctcctcccttaaggctcatctcagtgttaaatgcctttcaaaatagtgtattttttttctaaagttcttttatggaaatttaagagagggtcagggaggatggagcacagcaaaactttctaaaaatccaacttacaatttcccctttcccaaaatttctatgcctcaktgcatcaacacaaatctctctctaacttgttccctgtaccccactcccatgatccctcccagatatttttcccatccatttgcaagctctacacatgactagaggtctatgtcatttgcatcctcagctactgtacctttcagccaatccaaaggaaacttctttggattcatcgtcttttaaaaaccagaggacaataaatattaatccaatagggagattccttggaggagaggatatgtggatattaactatgggtgtttaataaaaggggtccttttatttgtttcttattctatacttacctaggaaaaatggcaaataaaattctttctttcgttagttcccctgcctctttcttcccagaaagtggcagccagattttcaggtcagaataataatagtatttcaggaccaggtagaagtagagattctcttggaaaactaggttagtttgaagccttggagagataataaatgtgcttagtctaaatgcatgggtgggaatgggccagggctgtggagtgtcttggaggtagctggagatcacgggaagcctgtctgacaagtctaaacattgccgacataggctagggaaaattgaaaggggtaggggaactagttaaagaaatactttcatttttcatttttcctaggtaagtatagcataagaaaaaaaaaaggacccccatcttattaatcacttcttcttcnnnnnnnnnnnnnnnnnnnnnnnnnnnnnnnnnnnnnnnnnnnnnnnnnnnnnnnnnnnnnnnnnnnnnnnnnnnnnnnnnnnnnnnnnnnnnnnnnnnng

SEQ ID NO: 699801 - DNA, 1844 bp, Homo sapiens
ggggacacacacacgggatctcctccaggcccgctccagcacaaggagatagaaactgttctattgagctttctcacgccctaaatattccatgccactatgttttcttttttcttttttttttttttttcaagatggattctcactttgtcgctcagactggagagcagtggcacgatctcagctcacagcagcctctgcttcctggagtcaagcgattctcctgtctcagtctccagtgtagctgggattacaggtatgtaccatgatgcgtggctaatttttattttttattttcgatgtctggctaatttttttgggtatttttagtagagaccatgttggcccagctggtcttgaactcttgacctcaagtgatcacccgcctcggcctcccaaagtgctggggactataggcgtgagccaccatgcccggcctcatgttttctttattacaagcactacatacaggaataggaaatgctgtgacactacctcttcccagaattccaggtgggaagcaggcccaagtctcttctgttcttgaaatcctgatctggaactccatcgtggggattcccttgcctttgctaagttaaaaacttagagagaggcacccaggaacacattcagtcacaatctgggtttccctcctctttctcttcagcctccccatgacactgggaaggagtgagaagagtgtgctctgctttctggtttgagataaagactctttcttgatacttaaaggaagtgtttaagactcaggaaaacctttcactctcaagaaccaatctcttgcaaatagaaagatatttggtctatgctcacacacttgatgattgcataaaattgccttcacattttttattgcatccattctctcctgaagtgaggatctcataagcagagaactgcagaattctagcacaccctgtctagcatgtggtctgggttatctgtgtctttcgttatctgaattatttcacaaccctgtgagctttagaaaacagatgcaatgcaaatgattcctgttaataaaaatgcaaatacattttttctggtggcgatgtccattgactagttttgcatctattagcaaattccttttagcatttgtgatggcacatatgtatgcatgcttttgaattctctttttttgtgccagttataacagctgttttcctcattcattaatgggttaagtagaatttttgacatatattcattttatatttgtatgagaatcatgattttaccttttatactaattattctttaacaattttttatccctacttaaatggtgagagaattaaggttcaaagaaatctatcaaattgcccaggtttagaaaagtaatagatagaagcaacatttgagcctatatatttgaccttaagcccaagttcttaaattctatactacttcaagattaaacataaagaaatctgaaaaatatattataggtccacaggcaagcattctaaaaattccagaactgtcctataattgtttttctttaaaatrtataacaaccccagctttgtgcctttgttgagagaaaagttaagtccttcacattgtagttttaaagcaaaaagctgtagaactcactgtcatacctataattttataggtagccactcctgtcccatgcccacgttaaatggttgtctgagaaaaaatcctcatggcatttctggatatatactagggcaatttttcaaagtacatttttacactatactttatggaaaaaactatgagtcacaactaggaaaaaaatgtctccagcttttataccacataattaaacactccacataattaaataccctatg

SEQ ID NO: 699802 - DNA, 1560 bp, Homo sapiens
gagagagtgagagcaygaatgtggccacacattagctatcgatgaatctgggtgaaggacacatggcagtattcggtacttcttttgtattgttcaggtaaagattaaaatcacttcaaaataaaaagctaacattgattaggagtacctcttatgataatattgcaaagaaaaaaatggaatttaagaaaagtatctttattgaagctctaatacggttaatctatctaactgaaatgttttactataataataaaaattccttttattagcatctcagatgtgcagaataatacaatacttattctcagtgggggtttccctcctccttaatatcatgacataagccatgtgagacctggaagcaggtttctggtacaggaaatgccctttgtccaatgacagacaaattcccagagcaccatccccacagcagatacaaagcctggtctctttatgaattcggaagtgatccttccaaaaaaaccttgcatttttgtcactcccccaaagaaaaccgtggaatggttctccccagccttgaggaggaagcccaggccccttggccaggctcgcaggactctccctaacccgccgtggcctgactgggcttttggtctgcagggaaggtgccacccaccctgaagcactgtcctctctatgtccacctgccctctaagcccgtcccattcaaggaagattcagctcagtgtgacgccagctgcatgggtgtccccaggtggccccaagaacttccttaaatgtagccttacacacctgtatttcttaagcctgtatccctgccagaggtagaaaagtgctgttccttattcatcttggtgtccacaagatggataatatgtgtactgaataattactgaagcaagggcagtccacgtgacctcttccatgtcacccgcttcccctccacagtgctggcagaagagcttcgggacctccatgtggccccactgaaaactgttgcttatggactactctgtgatgtcaacctttcacgggaaagacaggcagctcaggaagccacgttccatcttcgccaactactgggaagctccatggacagctggcaaatgaaatcaacttccatgttgcctctccctctccacctcctgtgcctccctgtcctcagctggggctgtcaggccaaatggtccctgaggcctcacgcaccatctattttcaacacacatcactgttttcctctgcaaagtgggacttctgttaggccctatagaatcaatacggcagccctgagcctaagacacaggcgttcactgcttccagcaaccaggtgtgcaaattagaacaagaaagattattgtgcattttaaaaaaaggtctttcctaggacttttttaaaaaccagagaacatgccttaggacatctaactatttgtgaagtatttattttagcatgatctccctgtgaggggtgcagtcagggtgcatttcacctttctaccactagacagcacgaagcaaaggtgcactgcggtgagcacaaaagaatgaggctgcagcttattggaacttgcagca

SEQ ID NO: 699803 - DNA, 1560 bp, Homo sapiens
gagagagtgagagcatgaatgtggccacacattagctatcgatgaatctgggtgaaggacacatggcagtattcggtacttcttttgtattgttcaggtaaagattaaaatcacttcaaaataaaaagctaacattgattaggagtacctcttatgataatattgcaaagaaaaaaatggaatttaagaaaagtatctttattgaagctctaatacggttaatstatctaactgaaatgttttactataataataaaaattccttttattagcatctcagatgtgcagaataatacaatacttattctcagtgggggtttccctcctccttaatatcatgacataagccatgtgagacctggaagcaggtttctggtacaggaaatgccctttgtccaatgacagacaaattcccagagcaccatccccacagcagatacaaagcctggtctctttatgaattcggaagtgatccttccaaaaaaaccttgcatttttgtcactcccccaaagaaaaccgtggaatggttctccccagccttgaggaggaagcccaggccccttggccaggctcgcaggactctccctaacccgccgtggcctgactgggcttttggtctgcagggaaggtgccacccaccctgaagcactgtcctctctatgtccacctgccctctaagcccgtcccattcaaggaagattcagctcagtgtgacgccagctgcatgggtgtccccaggtggccccaagaacttccttaaatgtagccttacacacctgtatttcttaagcctgtatccctgccagaggtagaaaagtgctgttccttattcatcttggtgtccacaagatggataatatgtgtactgaataattactgaagcaagggcagtccacgtgacctcttccatgtcacccgcttcccctccacagtgctggcagaagagcttcgggacctccatgtggccccactgaaaactgttgcttatggactactctgtgatgtcaacctttcacgggaaagacaggcagctcaggaagccacgttccatcttcgccaactactgggaagctccatggacagctggcaaatgaaatcaacttccatgttgcctctccctctccacctcctgtgcctccctgtcctcagctggggctgtcaggccaaatggtccctgaggcctcacgcaccatctattttcaacacacatcactgttttcctctgcaaagtgggacttctgttaggccctatagaatcaatacggcagccctgagcctaagacacaggcgttcactgcttccagcaaccaggtgtgcaaattagaacaagaaagattattgtgcattttaaaaaaaggtctttcctaggacttttttaaaaaccagagaacatgccttaggacatctaactatttgtgaagtatttattttagcatgatctccctgtgaggggtgcagtcagggtgcatttcacctttctaccactagacagcacgaagcaaaggtgcactgcggtgagcacaaaagaatgaggctgcagcttattggaacttgcagca

SEQ ID NO: 699804 - DNA, 946 bp, Homo sapiens
tttattcctttcctctttatctttttacttcttttttctttatttttatttttttctgatacatagtcttattctgtcacccaggctggagtgcagtggtgcaatcttggcacactgcaacctccacctcccaggttcaagtgattctcccacatcagcctcctgaatagctgggattacaggtgtgcaccaccacgcccagctaatttttgtatttttagaagaaatggggtttcaccattttggcaggctggttttgaactcctgacctcaaactgttgttttccttaacctgcctcggtctcccaaagtgctgagattacaggtgtgagccaccgtgcccagccctttactttctttgaaaatcttattctgtacacaaaatacgtttcaataaattgttgtcattattattattagtgtttagttattttttggtagtttgtggtttggtctttaataggtttctcaaaagagttaacgaaaacrtaatctatgaaccttgcatgttcatatatatttgtctgagtcattgtaactgatggtcagttttgttgtgtacaaaattcttggctcccgattctttcctagaatctcttaaaattgtactatgtcatcttctgctataaagcattgctgtgaaaaaactatgccaatttgactttcgttctaagtgactcagctttttgttcaaatgcccaaatatatcttatcttaaaaacgaatagtttttctaagatatatctcaaaatggacaaggctgagttaaacatcataggtaaacaattttttcattcaatctttagacctacgtacatatccttttatgttttagaaaactttctggcttaaagttttaagaatttgttggtttatatttagggactcttcccagtgactttaaatctgtgtatgttttaactcctttgctttttctgtatgtcca

SEQ ID NO: 699805 - DNA, 1899 bp, Homo sapiens
tagcttaatatgaccattcatttcaacacagtgagaatgagtgaaataagatgccagatggataaataggcagtagtaacaaattaaatttgcaataatttgaaaatagcctgaagcaagaggaaagaaaaatacattttcttttttatgtttttgagatggagtctccactctgttgtccaggctggagtacagagctgcgatttcggctcactgcaacctctgcctcccaggttgaagtgatctccgtgcctgaagcctcccaagcagctgggattacaggcatgcgccaccacgccggctaatttttgtatgtttagtagagatggggtttcaccatattggccaggctggtctcgaactcctgacctcaagtaatccgcctgcctcggcctcccaaagtgctgggattacaggcatgagccaccacgcctggctgaaaaatgtattttcaatatatgataatgatagcctaaaaagttattttgtttctatggtacgttaaaccagggatcacaatcagtaaaatttaaatttttcctatgtgacgaaatccatttgtcatgaagtgaaaacttttaccaaggtaaagcactgcaagaaaaatgaagaataatgctaaaattaatatctaaatttgactgattatttaatttgtgccagccacaatgctaaatgatttacctgcattatctcatttaattttaggaacaactttgagtagtaatgcaattttcattttaaagatgagaaccctaaggcctggtgaagttgattaacttgcccaaagaccgacagctgttacgtggttatgatcagggttcaaagcccatctgcgtaactcccaagccccagccccctaatctctatttgcaaaaatctatggaaaattattctttctttctttttaagattatttcttaaatgcaaaacagacggaagctttaaaagagaagaacattatagtttatataaactaggactagactgaaaaaatattgaagaccacaaatctttcgttgattgacacctgactctgtgggtgggagaggtgatatgtgaacctcaataaatatttcactctattgatgtgcatttatttgtttgctcataagtcattcaccatatatttattcagggtttgctatgaagcaactatttgtccttaaggaactcattaaaattgcctttgaataacactagaaaattcagaagaatcccttgatagatctaaacgctgataatttgcttttattatcacaagaaaaatatggccttaatagacaattaggcttggtatttaattattgyctcaaaatggcttcatatgaactattctaaaactaaaactattatatttggcagaaaattaatagaatttaattgggttctatcaaataattccatacagcatgataatttgtttaggatctataggattctctttgttcctgatgcaccctggcaggttcaccggaaaaaccatgtggatctacattcgatgcttcatgagaacatcgctgaagaattttacatcggctgtgataattccccaggctcaaggctattcggcattcctctatggtagaaagtttaggcattcaagaagcagctgttgtcatattggaagacactcagatttatttcccagcaaaattcccgttttgtcctcaagcaaaatgtatgctatttgttgtgagtttttctgccttgtgtcatccacgaggaaaaaaatctaaaaccaaataaaactgacgcatcaccattatctacttttggtttcaatttcctttatggtttactttacataaaagtatcaagctagttgaaagaaatgtacttctacctatggtggtacatagaggaaaggagtgtggaatgattatatcatgaattttc

SEQ ID NO: 699806 - DNA, 1899 bp, Homo sapiens
tagcttaatatgaccattcatttcaacacagtgagaatgagtgaaataagatgccagatggataaataggcagtagtaacaaattaaatttgcaataatttgaaaatagcctgaagcaagaggaaagaaaaatacattttcttttttatgtttttgagatggagtctccactctgttgtccaggctggagtacagagctgcgatttcggctcactgcaacctctgcctcccaggttgaagtgatctccgtgcctgaagcctcccaagcagctgggattacaggcatgcgccaccacgccggctaatttttgtatgtttagtagagatggggtttcaccatattggccaggctggtctcgaactcctgacctcaagtaatccgcctgcctcggcctcccaaagtgctgggattacaggcatgagccaccacgcctggctgaaaaatgtattttcaatatatgataatgatagcctaaaaagttattttgtttctatggtacgttaaaccagggatcacaatcagtaaaatttaaatttttcctatgtgacgaaatccatttgtcatgaagtgaaaacttttaccaaggtaaagcactgcaagaaaaatgaagaataatgctaaaattaatatctaaatttgactgattatttaatttgtgccagccacaatgctaaatgatttacctgcattatctcatttaattttaggaacaactttgagtagtaatgcaattttcattttaaagatgagaaccctaaggcctggtgaagttgattaacttgcccaaagaccgacagctgttacgtggttatgatcagggttcaaagcccatctgcgtaactcccaagccccagccccctaatctctatttgcaaaaatctatggaaaattattctttctttctttttaagattatttcttaaatgcaaaacagacggaagctttaaaagagaagaacattatagtttatataaactaggactagactgaaaaaatattgaagaccacaaatctttcgttgattgacacctgactctgtgggtgggagaggtgatatgtgaacctcaataaatatttcactctattgatgtgcatttatttgtttgctcataagtcattcaccatatatttattcagggtttgctatgaagcaactatttgtccttaaggaactcattaaaattgcctttgaataacactagaaaattcagaagaatcccttgatagatctaaacgctgataatttgcttttattatcacaagaaaaatatggccttaatagacaattaggcttggtatttaattattgtctcaaaatrgcttcatatgaactattctaaaactaaaactattatatttggcagaaaattaatagaatttaattgggttctatcaaataattccatacagcatgataatttgtttaggatctataggattctctttgttcctgatgcaccctggcaggttcaccggaaaaaccatgtggatctacattcgatgcttcatgagaacatcgctgaagaattttacatcggctgtgataattccccaggctcaaggctattcggcattcctctatggtagaaagtttaggcattcaagaagcagctgttgtcatattggaagacactcagatttatttcccagcaaaattcccgttttgtcctcaagcaaaatgtatgctatttgttgtgagtttttctgccttgtgtcatccacgaggaaaaaaatctaaaaccaaataaaactgacgcatcaccattatctacttttggtttcaatttcctttatggtttactttacataaaagtatcaagctagttgaaagaaatgtacttctacctatggtggtacatagaggaaaggagtgtggaatgattatatcatgaattttc

SEQ ID NO: 699807 - DNA, 1899 bp, Homo sapiens
tagcttaatatgaccattcatttcaacacagtgagaatgagtgaaataagatgccagatggataaataggcagtagtaacaaattaaatttgcaataatttgaaaatagcctgaagcaagaggaaagaaaaatacattttcttttttatgtttttgagatggagtctccactctgttgtccaggctggagtacagagctgcgatttcggctcactgcaacctctgcctcccaggttgaagtgatctccgtgcctgaagcctcccaagcagctgggattacaggcatgcgccaccacgccggctaatttttgtatgtttagtagagatggggtttcaccatattggccaggctggtctcgaactcctgacctcaagtaatccgcctgcctcggcctcccaaagtgctgggattacaggcatgagccaccacgcctggctgaaaaatgtattttcaatatatgataatgatagcctaaaaagttattttgtttctatggtacgttaaaccagggatcacaatcagtaaaatttaaatttttcctatgtgacgaaatccatttgtcatgaagtgaaaacttttaccaaggtaaagcactgcaagaaaaatgaagaataatgctaaaattaatatctaaatttgactgattatttaatttgtgccagccacaatgctaaatgatttacctgcattatctcatttaattttaggaacaactttgagtagtaatgcaattttcattttaaagatgagaaccctaaggcctggtgaagttgattaacttgcccaaagaccgacagctgttacgtggttatgatcagggttcaaagcccatctgcgtaactcccaagccccagccccctaatctctatttgcaaaaatctatggaaaattattctttctttctttttaagattatttcttaaatgcaaaacagacggaagctttaaaagagaagaacattatagtttatataaactaggactagactgaaaaaatattgaagaccacaaatctttcgttgattgacacctgactctgtgggtgggagaggtgatatgtgaacctcaataaatatttcactctattgatgtgcatttatttgtttgctcataagtcattcaccatatatttattcagggtttgctatgaagcaactatttgtccttaaggaactcattaaaattgcctttgaataacactagaaaattcagaagaatcccttgatagatctaaacgctgataatttgcttttattatcacaagaaaaatatggccttaatagacaattaggcttggtatttaattattgtctcaaaatggcttcatatgaactattctaaaactaaaactattatatttggcagaaaattaatagaatttaattgggttctatcaaataattccatacagcatgataatttgtttaggatctataggattctctttgttcctgatgcaccctggcaggttcaccggaaaaaccatgtggatctacattcgatgcttcatgagaacatcgctgaagaattttacatcggctgtgataattccccrggctcaaggctattcggcattcctctatggtagaaagtttaggcattcaagaagcagctgttgtcatattggaagacactcagatttatttcccagcaaaattcccgttttgtcctcaagcaaaatgtatgctatttgttgtgagtttttctgccttgtgtcatccacgaggaaaaaaatctaaaaccaaataaaactgacgcatcaccattatctacttttggtttcaatttcctttatggtttactttacataaaagtatcaagctagttgaaagaaatgtacttctacctatggtggtacatagaggaaaggagtgtggaatgattatatcatgaattttc

SEQ ID NO: 699808 - DNA, 1514 bp, Homo sapiens
caccgtctgctcatttagtggctctctttgttcgcttgaataacttcatttagccctccagatccacctttcacctttcccttcctgctctgtgcctgggaggttggaccatgtaaaacaacgaccattagaagccaagatatgcaaattgagttgattaacttgccagacaaaggaatacacaccagtgaataaatccactgagttgttctcagaggttgaagagtcaagtgtttttttttttttgacttcggaagagggtttcagggtggttatctcaattaaggatggaaaactaccactcttgttaggtgtgggcccgattggttaaaacaagtcccattgttcattggtgaagaaggaacctgtagaagggtccaggaagggcctggcttacctgagtcattcaaaattcacagtcgattctccgtttcagctcatcagaaccagttgcaatacaactcaagcccagttttgctatctcctctgcaaagtgccactataaggaggacgcacttgaatggattgtccactggctctggtttggtttgaccaatagaggcagggcaggagaaaaggaggcaggaggagggtaaggttgaggtggcattcccccagctcctttcctgcggggttgctgtgggtaagctgcagccctctgcctaaggcagctctctgagttcagctcctctctcatggttctgatactcttccctgcctggcccctcaggcccaggggtggtaacagaccttgctgtgactagctctcaagtactgcatcctcctttattagttcccctaaaccctgccccttgctctgaacatgagctcttcatctaacctttctcaattacttggtttgagtgtgcagtcctttgcctgccaggaccttgacaggtaggttgacaggtacaacctacagtggttaatttttttctgccttcttattaatactttttatatcctccaaaatttagcttgcacatggtctgtcatggtcctgtcttctgcattatgacttttcagctttagctactactactaaggacctccattcctttgcatttccrgttaaattttttgagcaagtatcagatgggccctgcattagtcggggttctctagagggacagaactaataggagatatatgtgtatacatatgtatatataaagaggagtttattaagtagtattaactcacacaatcacaagattccacaataggctgtttgcaagctgaggggcaaggaagccagtctgagtcccaaagctgaaaaacttgggagtccaacgttcgaggacaggaagaattcagcatgggagaaagatgtgggttccgaggctaagccagtctagctttttcacattttctctgcctgctttatatttgctggcagctgattagatggtgtccacccagattaagggtgggtctgccttcctcagcccactgactcaaatgttattctcctttggcaacaccctcacagacatacccaggatcaatacttt

SEQ ID NO: 699809 - DNA, 1941 bp, Homo sapiens
tgcgtattctcactcataactgggaattgaacaatgtgaacatattggcacagggaggagaacatcaaccactggggcctgtcgagggctgggggtcaaggggagggatagcattaggagaagtacctaatgtagatgacaggttgatgggtgcagcaaaccaccatggcacatgtatacctatgtaacaaacctgcatgttctgaacatgtatcccagaacttaagtataataaaaaataaaataaaatttgtgttctaacgggaataggtcagagactttttctcgggcgtgggatgtctgcaggaatctggagccctgatacagaattaccacaccaggttgtccttaggaagggctggctctggacacaacctgtgagcaaggtttgagcccctcctgaccctaacacccttgtaagatcagccaagcccattccttctcagggcctttacactcgcacttccgggcataagcctcaaatgttcacacccacattgctgcatgactgattcctttttgttatctcagcccaaagaccaccttctcagagagctttttcagactactcaatctaatttctttcctgctggtaggccgtctttaagagtccatctgactttacttcttcaaggctgcattactctgtgaacttatttagtctatttttttgtttctttgtctacctcaccccattaaaacataaggaacatgagagtaagggacctcactttccttttctctgctgtatcctcagcatttacagcagaacctgatgcacagcaggtgctcaaaaatgttaactggctgaacgaatgaatgagtgagtgatgaatacagattctgttgtgaaataaaaaaaaaaaaaaaacgctgaagactaacattatagaccaagcaggctgtgtgttcttaggcatatctgggaaagagaagcacagctaatctgggcaggtagagcctcggcgtcattacaacttgaatatcaaaggaatgtgactttcttggtatcccagtttattgaagcaggtcatacctgctttacatgggttttctgtatgtatattaggaaccccagcctcatgagtctcccagttcattgggcaaacatctgccgctgatggtgagactttgttaatccatatccaacatgagctgcacctctctgtcttctctcctttgatcccacccatgtttttctcccttgaccatcttccccttagctcatatgcagctcatgagccccattgccccactcctgtcccttctaactgccttatatatttttccacttttggagttttttgttacacataattaaaaatccaaaggtgatgaaaaatggcaaatgattcaaacctgggtaaatctattcatgtcagaagtctgtagttactggtatttatttcttttgtgttccagtggtattttcattgttgctggccccatcsctcctctttttctctagggagaaatcttggctgctggcttctttaaagtgtttcacagatgaagggaatatcaaggacagacttaaaagagggaagaagactattgtttgaagccaggtgaggccacttaggaaatgtgggtacaatcctttccaagtccacctgtgttgaaagcatacagaagcctctgtactttgctagcctgagctgtttggcaaatgatgtcccttttatttactctctgtccctttcttcatcctgttcccagccttcggaaggcctccctgtgtgggctggtagaagtgggctcctgtgtgctctgttgctagttggatttggccagtgggaggcaccagcagtgaatcagaggatgagagaagagtggggtcagggtatctactcccgtgccctggcttgctccagtggatgctatacaggcagtttcctagatgtagggaacgctccagttttcagtaacttctacctccct

SEQ ID NO: 699810 - DNA, 589 bp, Homo sapiens
tgaaaaggtttatgtcttgtatcttctaaacagtgaaatctctgctcctttaggtatcttgactcaatgctttttcaattcttcatccacttctctggccttcctcagcattcttcttgccctgtcctcagccttcatagtctggtgtgcttctgggtctggtcttggcagccttttcagcccacgtaatttatctgatgacacccatatttatagattgagcccgtccttttctgcttttctatcaaaatgtctaatggacctctctacttgattgtcattaaagaatttccaataaaaatgcccaaacctatattcatcaacttctccctcctaaatcttgttacctgcctatatccccactctcaaatcaaacccatctctcccttcccaccttcacctgataygggctcctactgggttccttggcttcaatttgttcctcttttcctcttatgcttacttatgcttagagtgatcatcccaaaacaccaacagattaattcatttgttcaattcatactgttgagcacctgctgtgcagaaggcacaaaataacacagtggtgaattaagcagacttgatccct

SEQ ID NO: 699811 - DNA, 589 bp, Homo sapiens
tgaaaaggtttatgtcttgtatcttctaaacagtgaaatctctgctcctttaggtatcttgactcaatgctttttcaattcttcatccacttctctggccttcctcagcattcttcttgccctgtcctcagccttcatagtctggtgtgcttctgggtctggtcttggcagccttttcagcccacgtaatttatctgatgacacccatatttatagattgagcccgtccttttctgcttttctatcaaaatgtctaatggacctctctacttgattgtcattaaagaatttccaataaaaatgcccaaacctatattcatcaacttctccctcctaaatcttgttacctgcctatatccccactctcaaatcaaacccatctctcccttcccaccttcacctgatatggkctcctactgggttccttggcttcaatttgttcctcttttcctcttatgcttacttatgcttagagtgatcatcccaaaacaccaacagattaattcatttgttcaattcatactgttgagcacctgctgtgcagaaggcacaaaataacacagtggtgaattaagcagacttgatccct

SEQ ID NO: 699812 - DNA, 1362 bp, Homo sapiens
gcagcccttttgctgggaatttcccacttcaactgtctaggcaatgggatttctgataacttacagggcaatatgaagaacatgactttgagaaatatcacagataaatagctgtgatatagatgtatagaatgggctgtgttggagaaagactggagcctctgtgtgactatgtgattatgagtgtatgtggttgtgggtacaagcagaaaggttattttcaccttgattcctgtaacacataattttcatatttctaaagcccgattttctctattgctgataagtttctaaagaatgggcacattagttctgaacactttttgaataaaagttttgttgtgttgttcgcttctcatagaaccttagcaggtgactttaggatcaatcgatcaggtggactggcctgaagtggattctcccaagaaccttctaaagctgggagtcctccagaactggcagaaagtgaatgtttgtcakcaggtataaacaacagccatgagtgtgttattcagaagttatccatgcattactgaggccagaagttgtgctgtggcagaaggaacctacactctgacatattaggaagtatgcactttacagattcttaccgtatgcagaaagtcatagcacatttcatttacagggtagtcctgccaaagtgtatgagctgtgtataggcatagtcataaaatgttgctcaaacagaagagaaattaaacacaaagacttacttgttttttttctctttctctctatagctttgactttggaaacaatttctttccttcctaaatggaattgctgccaattacacagcaccatggaaattatctagttaatattagagaaaattagcagcccatgtgattgaacatagagaagagagaaaggctgctgttcctagggacttgggtaactctcatctctaagatttagagaactttgcacatttaatatttagacaagaaaatctactgaggaatgacagcagttgcaggttgcaggactgggttatattgctggttgaaggtaaaatattgtgaaactaagaacagtcatctgagcatgataagggagtatactggtgacttgaggatgtctgactacagaatatgcatgtctgatttgagaaggtggtgagtttatgcttgggccatattactgcgtaggagcagaaggctagatagcactgaagctgctcactgtggatgaatacaatcctacacatcagcgtaattctaaggtgactataattgcagcagaagttaggagatccaaattctaactcagagagtgccctgctactaatctgtttaggacaagtcacttaacctcttaatgcctctgtttccttatctg

SEQ ID NO: 699813 - DNA, 635 bp, Homo sapiens
gaacttctcccttttacgctgttcatttttgttccttatttctgtttttttttttaaaaaagatggttgtcatatcagtttgtttttctttactgtcctaaggtttttgcatttcaccccttgccatagattttagtataaaaaagtctgactcttttctttttaaaacaatttttatatttttatgcacatatctatgaggtacatgagattgactttttttctttgcaaactttctgaaatgtttctgattgtaatgtaatagacaagtaattaaatatggatttaaagagtgattttcttttgtctcatttcatcatcaggggaagaaaacagtcatggccatcagtctgtggggccctgtggtgttaatataaggttttgactagaaactttttatcctccattctcaaaccattttatcagtccttggaattttctctaattttrccaagggttcccaggggaatccccaccaggttttaatggcttggagacagacaggataatgctacactactccgtttcctaatatcctcctcacatgttcactctttgcatagcctctgggtccaggtaaagtgctggctcggtggctggtttgaaacacgagcctcccacacatctgctgagga

SEQ ID NO: 699814 - DNA, 610 bp, Homo sapiens
gagcgagattccatctcaaaaaaaaaaaaaattgtcagttagtcatgatctctgataatctgttatccttggagatttggaaagtcttcatcgttaccattagtgacctagtctttcaggatttggtttgatcttcccagacttgactgggcagggggacttctatggaaaagactggtccaagatccagggatgtctcctttagtcaaggggagcccgggcaatggagtagcctggccttcttgaggtctcatgcttccaagttgagtgakcccctgccctctctcacaggaaagacataggagaaattcagcctcactgtctccagtttttttgtgtgatttatggtgttgccaggtgaaatctcaaccccgtaattcatccatacatgttagccaagaacaattttacacggaaagggtccagataactgaattaacaaacattatctgacccacatggtatactgtagagttatttctgcaatttgagtttgcttttgctttttagtaacatggcaaggaacaaaaggaacatcttcaaaggaccagcaaaaaggctttttagctttgtaaataatttgtcaatggaactacaggtgggaaagatg

SEQ ID NO: 699815 - DNA, 2192 bp, Homo sapiens
tgtaggcatgaagcgaaggcccaacaatgagggttaaatgaggcacagaggagctgactaaagtttggtgaaggagagaatctttgtcaccttcttctttctcaatcaagttcatcactgccaacaaagtcatagggagttttctccccaactccagcccccaaaaggaatatgtattctggcaacaaagctgctgatttttgcaaccatcacaacaatggtcaaactaccacttttgctaacaaagctatggacaagggggtagggaagcagccccaggcaacaaggccacagactcttacacaagctctagcacttttattaagaatgtgtcttcaggcctggtggagtggctcattcctgtaatcccagcactttgggagggcaaggtgggtggatcatctgaagtcaggattttgagaccagcctggccaacatgggtgaaaccccatttctattaaaatacagaaaattagctgggcataggcatgtgcctgtaatcccaactactcaggaggctgaggcaggagaattgcttgaacccaggaggcagaggttgcagtgagccgaggctgtgccattgccctctagcctgggggacagagtgagactctgtctaaaacaaacaaacaaaaaagaatgagtctttactcgttgtccatctttgtttgacttttagtaccctaagggtgttatttcagacaatcctgtgcagtattatatgcattcttacagacaaggattgctgacctcttcacgctgccatgattggaagaccctctaaaggctcttggtcagagtcttttacatatcaaagcatgttgtgaataaccaagtgggcaacacagaattcagtgttttgaaaccgctgtggcagtggaactttgcccctagttttttttttccaggagcatctgatttatttctcaaagtttaatgcagaagacttacacrgagaggttagtaagacgcagattcctgggctcccactccagaggtacaggttgtatagatctggggtgcatacatatgactttagacagttgtctgaagaccacaccttgccctttgttccatagagtgcatccgttcataagctcccacacctctcaataaaaaggcatttacttcttttcacttggtgtttaaaaagactgatagagaaaagacgatgctatatgttcaccaagtctgttttatattttttcttgatggtaacatgtaaaactacacttaccagtcctttttagctggctgggaccacatgactacatctggccaaatatatgtgaatgagatagccaagtgtaaagacgttcccggaataactcaaaccagcctgcacactggtaatgtgcactgaggtggagccacagaagttctgccatttgcagtggggaggagcctggctcctcctcttcctgggtggaacctggaattcaatctgccaggcaggaagcatgtactagcaggactctcgctcagctgagagttcctgtttcccttttttcccaataaatcccatttttctcacccttcaaattgtccacgagcctaatttttcatggtcatgtgacaaggaccccatctttagctgaactaaggaaaagtcctacaacataagcaggaggaataagtggatcactttccagccatggcagtggggagcccgtgtgcagttcttcaatctcttgccttccctttggtgtgaagggtggtggcctcgtcatataaagatggcagagctctggctttgacaaaagtctgtattctgaagactcacatagtcaacagctgcctgtggaggataaagggctttgggggagcaagaaataagcttttagtgctaagccattgagatttggagttttgtgttaccacatcataaatctagcctattttgagttaggggtaatagaaagggcaacagtgaaattaccttctgaagtagctcaaaggattgaggaaagaaaatataattaacaggaaacctacagtctcaaaaatgaaagcttggcataagccagcgtcatttgatcccactctttccatggtgaggtaatagtcgcaatccacaggcctttcctgcagttgttaaggtctgaccttttaagtggaaaacaataccttaggcctaatctaaaggacagatgcaaaaaaaaaaaaaatgtcaattaactcagcccatctat

SEQ ID NO: 699816 - DNA, 977 bp, Homo sapiens
aatgccttttgaaagtttgtaaatgtgcatatttatattattctgtttcgtagaggcaaatacattacttctctgtcactctctctaaactggtcacatatctctaccttcaagtttttagtaacaccagctctatataattgaatattaattatgtgaaagagaaagtctctggatgtttatagtgtctctttgccttcactaggatagcaaatgaattattatgggcagcattagggattcctctactatgctttaattagaactataaaatgaattgctttgccagactcagaaatgtgattcccttgtgaattgaaaagtgaaacttccattctttattttaattagaaggattagatataaatagtacgtgagtatttttaaagttcctagtacatgcagaggatgcagcactagtccatggaaaacactgctttattttcgaatattgacatcacaaggctagtcctaagtgcttttccagctcttctaacatgtgcagaacagttagaattattggcaggacagttaatcacccctgcttttaaaagaactaaatgttgtcatttagtgaagcacataagtgactgcctgattccagattttcttttattgccaggattcaacccacacgcaattttagtttctttccaagatgttttacttagaaacagtggcactggagccacttattattaattgttattactgttatttttagaacttcaagtctgcagaagtccagcagcctgggcaatctgaagaaagagacatctgatggggtgggttctgtgttttttgkttttttttgtctgttatcctgagaaaaaactatttagggatcttcatcttttccctttttgcaaataaaactcttatgaagagcttgtggtttttagtggaaaattattagatgttaggtttaacagtaaatattaagaagtatgaatatgaaggattgaaaatagtatgta

SEQ ID NO: 699817 - DNA, 1371 bp, Homo sapiens
aagatgaggataagctaggcagcattttcaggggcacctgtagccatcgtggttgaaggatttgaattgggaaagttcctttgggtttttccaaaaggtgctgttaccttgtatagatatccacctatctattcacatggaccagcaaacgggacttctctctctatcgatataaatgtctagaatgaacactggatgcataaaataaactgatctgttcagacaactattttcaaatagtttttttttgcatctttcttagaagaactgttttgttaatgctaagaggtaaatgctgcttattataacctataatcacagctctgctttgtagaaaaatcaactttctgcaactcatagatcttgctgaaacactgttcttgtgattttagtacaacttttactttcttttataaagtataaaatctcacactgaagacaacagtagcccttgtgtttgctagtatgggattgtccactaagggacagctaaaagaactgaaatagttaatgcttggagatctgagagtggcaactgtggatgtgattcttttaaggtaaaatcaacaggcacttactttatgtcaaaagaaaaattaggcatatccagttcattcttctctcagtgcctaggatttaatagattggaatacatttcaaaaataaagaattgcttgaactgggtaactgatttgatgtaaatgccaaaggagaaggagtaaaaggaaaatgacatagagtctgagctagagtaacagggacagtattaattaatattaaccaaatatcaaataagaacatttaagagacgaggccaggcgtggtggctcacgcctgtaatctcagcactttgggaggccgaggtrggtggatcacgaggtcaggagttcaagaccagcctggccaagatggtgaaaccctgtctctactaaaaatacaaaaattagccaggtgtggtggcgggtgcctgtaatcccagctacctgggacactgaggcagagaattgcttgaacccagtaggcggaggttgcagtaagccgagatcatgtcactgcactccagcctgggaaacagagtgagactctgtctcaaaaaaaaaaaaaaaaaaaaaaaaacatttaagagagaaaaagactctcggggaaattggatgagtttgtgaagtcccagatgtcccgacacactgaattgggaatatcacaggcatttagatacagagcctagagagagagattaggcccagagattctgatcctctagagggcatttagaatataatcttaaagtggcatgggggaagaaaaaaaagcaggggtgctacagcaaagacactatcagatgacagatgtaggagagtggtcatgtcaaga

SEQ ID NO: 699818 - DNA, 1121 bp, Homo sapiens
tcacgattatgactagaacacattcagtaaatatttgcctccctctctaagtgtgagtatgttccccctgagaatgtgaacaaattcaagcttaaaatcacaagaagcatctgtgaaatggctataaaagagtaaatgaccctggaaaatttgaccccagaaatcctaagtcacaaaatatgtgttttaatgtggattagatcctggaacagaagaaggaccttactggacaaactggtgaaatgtgaataaagtctgcaatttagtcaattgtacattaatttcttagtcttgatgaatgtaatcatgattatgtcagatgttaacattagaggaggctgagtgaaaggtatacagaattctattctatctttggcaactcctccacaaatttaaaattattttaaaataaaaagttttaaaaaaattgggaagaaaatcactcagaaagtctgttttgatataaaataaaactttctttttaaaatccttcgaagtataaagaatttcaaaaataattaacattttaatcacactgtaaacattgtgcattcagatatttttttaagctgacagactagttagatgaaaagagtccagactgaaatgtttggaatgggtgtctcaatcctagattaaaataagtactctttctaacatgtcttaagacactacttttaaggaattactccagaaaaacttcaggaaataatttttgcctggttagtagcctcaaggatttaaactgattaatatttttattaaatatttctgtagtagattacatttttttctttctttcatgagaagtgttttatcagaaaggtgtgtctaaaatggatgctttccttgtttattttctgggtgtgtttggaagtagactgttgcttatcttcatactgctcccaatatcaccttcttctgaaataatttgttttggtgtgtttggtatatttgaaaatattcccaagagccacagactggtgaaaattcttccttgaaggggttgattggtaatatatatatgtgatacttataacttcatttttcttctctccttgactctgaccaaaacctttgcactgattgattatagttgygccaaaattgttcacaatgtc

SEQ ID NO: 699819 - DNA, 839 bp, Homo sapiens
gcatctccctcaaggacccgagagccattcctatggaatgtaatcatcaggaaggacagagcctctgcctcccaatctctggaagcacagaactttaactttgagaactgtcagccagtgggcacagtcggcctaattgcatctacagggaccaatgctctgtaagtcttcacctctctgacactactgaaaacccccactccacccactccctcaccctccctttgaaaggcccagtcacytctgcacaaatcagaatgaagctctgctccttcccctactgtcagtagtgatggagtgaaatcggtgttcactgcttcagctcatatctgattgtgtttgtcaacttatttgggatcaaacagaagaattagatgaattcattgtcctcaaggaatgtataatccaatagtgaaaataggacatactgaattaaaaaggcagaaggaaacagatgaacaccataagagcacagactgtgaagaaagtttctccctcatttgtcaggttcttttagagggaatcttggattggcaaagacattagatgagataatttccaagttactttccagtgtgaagcgtcagttcaccctgaattcctgtcaacaaatagctactggtttagaacaccttctcagttctctcctcccctcctctgttactctttgaaggtcagtggtagaaaggaaaatcatccacagccatcaggctgcagggcaggagggagattatttaccgctcagactctcaaaccccaacaaagacatgggttgaaagaggcatggctatttaaatgatgttcaactctttcccctctgttgtaatttttaactaaaa

SEQ ID NO: 699820 - DNA, 655 bp, Homo sapiens
agatggcatgcatgtggggttctttatgccactttctctactttttaactagggaaaaaaggcaatagaattgcaatagtaacactttcttatcttatttccacctacggcttgactatggaacatctggaactgctatgcagaatgtattatttaattttgagtttacgttttggccttgctctgcaagttgacctcagttctttatgtcttctagatgtgcaatactgtattgacaaaaaacaaatataacaaaaattttttaaagttacaatctcaacatagttatttacatgttaccaaaagaaaaatgctttcacggtggctcatgcctgtaatcccagcactttgggaggccgaggcgggcggatcacaaggtcaagagatcgagaccatcctgtccaacatggtgaaaccctgtctctactaaaaatacaaaaattagccgggtgtggtggtgcgtgcctgtattcccagctatttgggaggctgaggcaggggaatctcttgaacctgggaggtggaggttgcagtragctgggcatggtacctcatgcctgtaatctgagcaccttgggaggcctagctgagaggactgcttgagccccagagtttgagataagcctaggcaacacagcaagacctcatctctaca

SEQ ID NO: 699821 - DNA, 636 bp, Homo sapiens
aataaagcaaataagtaattacgctggtgtcgttaggaaccagagttttcagtggcagcaagggagacagaaatgtaccatcaatgagattaagcaaaatccctatagctctgaatttgaatagaaaacatcagactgagctcgttatctattttcatattttaaaagataattgattttgacagaagtctccactgaaaaagcctagaaacagtgagctatccagtaggaatgagcaccacaatgccctgatttgggtcctaaaattatttccaaagaaaaagaaccaaaagctcttgaacaaatggctgtttccaggtcrgaggtagaaaataaataagatgaggctgggtgtggtggctcagagggagagttagaaaagaattaataaagccctttccttttatacataagaatgtgacttttagttaattttctctctgttccactagaaatcagatgaagatagaatgccaactacgttacagtcaatattgcctatggtaatattatccctgattgataaactgcaactaaacaaggaggaattataaatgtcccataaatacctgatgagagtggtgtaatttgggcttccctgaatgtgttaattcttgtaattgggtatgtctctta

SEQ ID NO: 699822 - DNA, 636 bp, Homo sapiens
aataaagcaaataagtaattacgctggtgtcgttaggaaccagagttttcagtggcagcaagggagacagaaatgtaccatcaatgagattaagcaaaatccctatagctctgaatttgaatagaaaacatcagactgagctcgttatctattttcatattttaaaagataattgattttgacagaagtctccactgaaaaagcctagaaacagtgagctatccagtaggaatgagcaccacaatgccctgatttgggtcctaaaattatttccaaagaaaaagaaccaaaagctcttgaacaaatggctgtttccaggtcggargtagaaaataaataagatgaggctgggtgtggtggctcagagggagagttagaaaagaattaataaagccctttccttttatacataagaatgtgacttttagttaattttctctctgttccactagaaatcagatgaagatagaatgccaactacgttacagtcaatattgcctatggtaatattatccctgattgataaactgcaactaaacaaggaggaattataaatgtcccataaatacctgatgagagtggtgtaatttgggcttccctgaatgtgttaattcttgtaattgggtatgtctctta

SEQ ID NO: 699823 - DNA, 614 bp, Homo sapiens
cctctttaccgaatttggcaaatgaagcaaaaccgaggttggttccgggaggcaggcacttgctgttggtaatattgatgctttcttttcagtacttttattttaacccaaatcagcctattcctagaggaaaaagggcattttattcctaggaaaaaataaactggagtcatagaaaggtttatttaagatatggcagcmtgggaaaagccggagctggcatgattctgggggttggaggatatacctgcccgggcaagatgaacctcttacaataagataccccacaaagggttggcgacaatactatgagcttccgtaacatttacctaaggtctctttcagaagaatcaaatttaaatgtctagttaaaaattccagcccttcactctgcctttatttcctcacaaattattctcctgtatctaaactagatgacactttgctgagcttacaaatctttgtcacccagaacccccagctcctgaagaactagatattagggctcttagaagcttgatcaccacatgagttgagccgaaagtccattactatgtgtagattttcttcttattttgtaattgagaagaatactaagatgttcctatcaggga

SEQ ID NO: 699824 - DNA, 614 bp, Homo sapiens
cctctttaccgaatttggcaaatgaagcaaaaccgaggttggttccgggaggcaggcacttgctgttggtaatattgatgctttcttttcagtacttttattttaacccaaatcagcctattcctagaggaaaaagggcattttattcctaggaaaaaataaactggagtcatagaaaggtttatttaagatatggcagcatgggaaaagccggagctggcatgattctgggggttggaggatatacctgcccgggcaagakgaacctcttacaataagataccccacaaagggttggcgacaatactatgagcttccgtaacatttacctaaggtctctttcagaagaatcaaatttaaatgtctagttaaaaattccagcccttcactctgcctttatttcctcacaaattattctcctgtatctaaactagatgacactttgctgagcttacaaatctttgtcacccagaacccccagctcctgaagaactagatattagggctcttagaagcttgatcaccacatgagttgagccgaaagtccattactatgtgtagattttcttcttattttgtaattgagaagaatactaagatgttcctatcaggga

SEQ ID NO: 699825 - DNA, 570 bp, Homo sapiens
atcatgctaagaaggaaacacagagagtaaagtgagagcataatttgtcaaggccacataatttaaagtgaattgaaagagtgatggatgaagaagacttgaaccaagtgcaaaggcagagaaaaagcattatgggcaggagcacatgctggaaactccaaggaaaggaaagacttcaggtgttctagaaatgtaaaagcaggctagcatggccagagcagagtgactgagaagaattatgcaagttgagaggaacagacaggcatccaataatttgtggtcttgaaggctgggataaggaactttgaattattttaagataaatagaatatcaatgaagggttttacagtggatcttagccaaaaggccaagaagtgatcactgragggttttaaaagggctgtgccatgatctgaattaggtttttgaatatttattctggctgctacatgaagaaaatattagagacagtcatgatcagggaggtcgtgggaggccaggcaagagaggtgattatcacttaggctagggtgatggcaacagaaatgaagaaaagaggggtggcatcg

SEQ ID NO: 699826 - DNA, 1293 bp, Homo sapiens
attttcaattatggatagttactcaaactggtatttctgtatgaggacaagtgcaggaaaatcctgtatcaccacttgctgatgtcactcctagtgatgccttttcaaacagtttatttataaaatgtggaattaagagctttgaagtatctgagatggagatgataatcacatagttaaattatgatttggaggtcagcaaagttttaattggagttgtagatttgggagtcaatactgtacagatgatattttaaactatgattctaggtgatctaactgaacgaatgatgtatatagggaagacaaaataagctaggactgatatctgagtcattttctgtagaaacccatcttgtgaaaagtctgggacacataaggaggtaaatcaattagggtctagtcagagacagaaaccatgcaagttatctggacaaagaaaatgtaatataaagtagagttagttagctactaaaagggttaaccatgaattttaagatatccaaaagtagcatttacaaactaccatgtctagagcaaaacaaaaaataatttaagactagaaagaggttctttccctcaactcttagatttgggcctctttggagaagctatggctactgtagaaaaatgcaggctaaaagtagcaaataagtgggcgggggaggagactgtacgttgttgtggctctatggaagggggttgcaggctggagctgctgcagtgaagcccaggctgggcagcatgtggcctgaaggtccaactagaactaccacagaagctgcctgctgtcataacttagaaatgcctaccactggggagaatgtggtctgaagctacagttgaagctaatccacatgggccaccaagcaccaatactgaatgataatggagaattataacccagaagagaaatttcttcctgttgctatcaccttgcagtgtcaccccagtgccttctattaaaaagcctctcatttcacaagctgatggggtccagctgcaatatcacaaaactgggcagagaagggtagatttggagctgagaggcaacaaactggtagctggtaygagaggccatgtatacacacttcagtagatagccccagctgaattcccaactgatagcttaaactgtcaactatgtaaatgattcattttgcttgtttatctcagttaagccttcagatgagtgcagccccagtagatatctggctgcaacagcacatgacactgtaagcaaaaaacatctgggcccagttaatccaggtccatggaagaaaataataggtt

SEQ ID NO: 699827 - DNA, 585 bp, Homo sapiens
tttgttttcaaaagaacctgcaattacccctctttccgctaggtggtatactcaaggccaagaaagctaccaaagggataaatatgttctttttcaacaaggtcaaaaaaaaaaaggataatttttttaatgtaatttttttaaatttctttttcatttcaataggtgttaggggaacaggtggtgttcggttacataagttccttagtggtgatttctgagattttggttcacccatcacctaagcagtcttcactggacctaatgtgtagtcttttttccctcacccctcacctcctctcccaccctttccccgagcccccaaagtccattgtatcattcttatgcctttgtgtcctcgtaacttagctcccactcataagtgagaatatacgatgtttggttttccattcctgagttacttcacttagaataataacctccaatggagaggataaattttaagcttgaagaggcgactatcttacatctgaattccaaagtgtttgatgaaaaaaacagacgttaagagagagaaggaaagacctrctcaaatagccagggcccctcaaagagtgagtcacc

SEQ ID NO: 699828 - DNA, 2857 bp, Homo sapiens
cgcctttccatgcataacagctgcctctggtccagtctttctatcccctcttcagtggtgtgtccaccagcaaaacttctgtgcctcagtttccttggctgtaaaacggtgccctcttctaggatcgttgagagaattaaatgaaatcatgcttggcagagtatcacgctcatagaaagtgctcagtaggggtttagcttttacagctagttgcttgcagtcatttgatttcataagctaggtttgtggagaaactgaggaagtgaatgagccaaacacaaaagtaaacactgttgataggacaggtggttaactctttcagtgccacaaaacacattctgactcacctgcacacaaattttgcttacaagattgttgtcagcactaattttgctccaagtatttgcttgattaaaatctcttatgctactctttgcagctgacctataacagaaataaatgaactaactagagatactttcttcgttgggcttccatctagagctaagctttacttaggctttcaaattgtaagcaaatgcaaaataactctcttgggaaaattccagagaatctaggccttgagctgttgtaagcaaatgtggccctccttttagggcgggaatctaagaaatggagattatgcattatccagttccaggggcatcattcatactgtggtctgtgcgtgtgcatggacaagcctgctcctctgggtgaggtggccataggtcctttctggggttcagtaagttctgatagtggcattgtcatggtgtgaaacctctcattctcccagtttaattattcagtgagaatgggattcctgagattctaaaccatattccataactttggaaaatatatgtgtatataaaattttccatacggttaaaacctgagagtggactgcaagtcaaattgctattttcttccctgcttcgtctttgtgaacttcgtattgtcagttttcctgacagttgacaaaagtgggcagttttggtggcatatctgatttaggaagtaagtgcaacaatttgaaagcctaagtaaagcttagctttagatggaagcccaataaaggagttatctctagttagttcatttatttctgttgtaggtcagccgcaaatctgaaaacacaggtttgaatttgtatgctcatttaatgttactgataatctgaaatgctggtttttaggactgtagatttcattatggaatatgtttttaacttaatttgtacatgggtctcttgttgttttgggaattttgttctaagacatgttgaagctgtgctgtagttattgggtttatgagttgttggggtattatttatttttaatgtactctgttccttcctcttcccaaagcaaataatcaagaattaatgtttaactttaagttggatccactcactttatattgagagttattattactttaattcacgtttcttttccctgaagccctgatatatctttgggaagatacattttttcatgcattaattattttcttttccagtatcaattgcagatattacaatcacagcaagaaacatctgttgtacctttattatgtgccaggtactgtgctgcctgctttatatgaattattattacgatcattaaatttttatatccacgctagactttacatactgtctatcataactcacattttataataaggacttgagactggggaaataaacttgccaagtcgacacaatttaaaagtggtagagccaagagttgaactcacgtagtctctgactctggaactatgctcttaaaccctacactcttgatgttgaagatgtagggacatctttgcatttgaagacagaaatgcacatacagcccagaacttttcagtgattccaaagacctctgtattttcacgtaacataactttggaagccacagattcgctttgctcaatctattttgttcaggagtacatgcatgctaatttgctcaggcagtagctgaaagcagtgagagatattccaacaaggctccagattgcaagagaaatgagtgtggatttaaaaattaacaggctttgtatgcatataactaagaatcagcttacttgccatgaagatgagtaccaaggccccaaagtatgtatgtcagaaggtaggatattacttggttttgtgtaattggtaataccaaggtcaaatcaacttagataactggtttaaaccattaaatagcttttttggctttagatatttctcaagatttttactgcaagctacgtgcattgcagtctgmaggaagaaaaaaaaggattattagtgtttttgcaatgttcctgcccagcgtttacttctttatttgctcttgttttattcccacagggaaaggttcattgtaacatacccagggatgtgtggtagatttttccaatgcagcaggtagaatgactttgatggtaagaaacagaaaattgaatgccgactggcttaaacaataaaagcttatatcattgaaaagattagaggtatggtgagttacagaattagattgattcagccactctctgggtcatttagggtttctttttttctgtctctgccaaacaggattggactttggagttggccacagggcagattcccccaacacaccagcagggtggcgatcagagaatgccagaacaaacattaggtaatttttaagaagagtgacttggtgtatgtgtgccccaacaagtatccaccatagccagtgacctggatatgcttaatttagattaatgaatttatccgtcctctctcttctccaccttgtaggtgttaatattctacatgtaatgtacaggggttttccccctcggatat

SEQ ID NO: 699829 - DNA, 2857 bp, Homo sapiens
cgcctttccatgcataacagctgcctctggtccagtctttctatcccctcttcagtggtgtgtccaccagcaaaacttctgtgcctcagtttccttggctgtaaaacggtgccctcttctaggatcgttgagagaattaaatgaaatcatgcttggcagagtatcacgctcatagaaagtgctcagtaggggtttagcttttacagctagttgcttgcagtcatttgatttcataagctaggtttgtggagaaactgaggaagtgaatgagccaaacacaaaagtaaacactgttgataggacaggtggttaactctttcagtgccacaaaacacattctgactcacctgcacacaaattttgcttacaagattgttgtcagcactaattttgctccaagtatttgcttgattaaaatctcttatgctactctttgcagctgacctataacagaaataaatgaactaactagagatactttcttcgttgggcttccatctagagctaagctttacttaggctttcaaattgtaagcaaatgcaaaataactctcttgggaaaattccagagaatctaggccttgagctgttgtaagcaaatgtggccctccttttagggcgggaatctaagaaatggagattatgcattatccagttccaggggcatcattcatactgtggtctgtgcgtgtgcatggacaagcctgctcctctgggtgaggtggccataggtcctttctggggttcagtaagttctgatagtggcattgtcatggtgtgaaacctctcattctcccagtttaattattcagtgagaatgggattcctgagattctaaaccatattccataactttggaaaatatatgtgtatataaaattttccatacggttaaaacctgagagtggactgcaagtcaaattgctattttcttccctgcttcgtctttgtgaacttcgtattgtcagttttcctgacagttgacaaaagtgggcagttttggtggcatatctgatttaggaagtaagtgcaacaatttgaaagcctaagtaaagcttagctttagatggaagcccaataaaggagttatctctagttagttcatttatttctgttgtaggtcagccgcaaatctgaaaacacaggtttgaatttgtatgctcatttaatgttactgataatctgaaatgctggtttttaggactgtagatttcattatggaatatgtttttaacttaatttgtacatgggtctcttgttgttttgggaattttgttctaagacatgttgaagctgtgctgtagttattgggtttatgagttgttggggtattatttatttttaatgtactctgttccttcctcttcccaaagcaaataatcaagaattaatgtttaactttaagttggatccactcactttatattgagagttattattactttaattcacgtttcttttccctgaagccctgatatatctttgggaagatacattttttcatgcattaattattttcttttccagtatcaattgcagatattacaatcacagcaagaaacatctgttgtacctttattatgtgccaggtactgtgctgcctgctttatatgaattattattacgatcattaaatttttatatccacgctagactttacatactgtctatcataactcacattttataataaggacttgagactggggaaataaacttgccaagtcgacacaatttaaaagtggtagagccaagagttgaactcacgtagtctctgactctggaactatgctcttaaaccctacactcttgatgttgaagatgtagggacatctttgcatttgaagacagaaatgcacatacagcccagaacttttcagtgattccaaagacctctgtattttcacgtaacataactttggaagccacagattcgctttgctcaatctattttgttcaggagtacatgcatgctaatttgctcaggcagtagctgaaagcagtgagagatattccaacaaggctccagattgcaagagaaatgagtgtggatttaaaaattaacaggctttgtatgcatataactaagaatcagcttacttgccatgaagatgagtaccaaggccccaaagtatgtatgtcagaaggtaggatattacttggttttgtgtaattggtaataccaaggtcaaatcaacttagataactggtttaaaccattaaatagcttttttggctttagatatttctcaagatttttactgcaagctacgtgcattgcagtctgcaggaagaaaaaaaaggattattagtgtttttgcaatgttcctgcccagcgtttacttctttatttgctcttgttttattcccacagggaaaggttcattgtaacatacccagggatgtgtggtagatttttccaatgcagcaggtagaatgactttgatggtaagaaacagaaaattgaatgccgactggcttaaacaataaaagcttrtatcattgaaaagattagaggtatggtgagttacagaattagattgattcagccactctctgggtcatttagggtttctttttttctgtctctgccaaacaggattggactttggagttggccacagggcagattcccccaacacaccagcagggtggcgatcagagaatgccagaacaaacattaggtaatttttaagaagagtgacttggtgtatgtgtgccccaacaagtatccaccatagccagtgacctggatatgcttaatttagattaatgaatttatccgtcctctctcttctccaccttgtaggtgttaatattctacatgtaatgtacaggggttttccccctcggatat

SEQ ID NO: 699830 - DNA, 2857 bp, Homo sapiens
cgcctttccatgcataacagctgcctctggtccagtctttctatcccctcttcagtggtgtgtccaccagcaaaacttctgtgcctcagtttccttggctgtaaaacggtgccctcttctaggatcgttgagagaattaaatgaaatcatgcttggcagagtatcacgctcatagaaagtgctcagtaggggtttagcttttacagctagttgcttgcagtcatttgatttcataagctaggtttgtggagaaactgaggaagtgaatgagccaaacacaaaagtaaacactgttgataggacaggtggttaactctttcagtgccacaaaacacattctgactcacctgcacacaaattttgcttacaagattgttgtcagcactaattttgctccaagtatttgcttgattaaaatctcttatgctactctttgcagctgacctataacagaaataaatgaactaactagagatactttcttcgttgggcttccatctagagctaagctttacttaggctttcaaattgtaagcaaatgcaaaataactctcttgggaaaattccagagaatctaggccttgagctgttgtaagcaaatgtggccctccttttagggcgggaatctaagaaatggagattatgcattatccagttccaggggcatcattcatactgtggtctgtgcgtgtgcatggacaagcctgctcctctgggtgaggtggccataggtcctttctggggttcagtaagttctgatagtggcattgtcatggtgtgaaacctctcattctcccagtttaattattcagtgagaatgggattcctgagattctaaaccatattccataactttggaaaatatatgtgtatataaaattttccatacggttaaaacctgagagtggactgcaagtcaaattgctattttcttccctgcttcgtctttgtgaacttcgtattgtcagttttcctgacagttgacaaaagtgggcagttttggtggcatatctgatttaggaagtaagtgcaacaatttgaaagcctaagtaaagcttagctttagatggaagcccaataaaggagttatctctagttagttcatttatttctgttgtaggtcagccgcaaatctgaaaacacaggtttgaatttgtatgctcatttaatgttactgataatctgaaatgctggtttttaggactgtagatttcattatggaatatgtttttaacttaatttgtacatgggtctcttgttgttttgggaattttgttctaagacatgttgaagctgtgctgtagttattgggtttatgagttgttggggtattatttatttttaatgtactctgttccttcctcttcccaaagcaaataatcaagaattaatgtttaactttaagttggatccactcactttatattgagagttattattactttaattcacgtttcttttccctgaagccctgatatatctttgggaagatacattttttcatgcattaattattttcttttccagtatcaattgcagatattacaatcacagcaagaaacatctgttgtacctttattatgtgccaggtactgtgctgcctgctttatatgaattattattacgatcattaaatttttatatccacgctagactttacatactgtctatcataactcacattttataataaggacttgagactggggaaataaacttgccaagtcgacacaatttaaaagtggtagagccaagagttgaactcacgtagtctctgactctggaactatgctcttaaaccctacactcttgatgttgaagatgtagggacatctttgcatttgaagacagaaatgcacatacagcccagaacttttcagtgattccaaagacctctgtattttcacgtaacataactttggaagccacagattcgctttgctcaatctattttgttcaggagtacatgcatgctaatttgctcaggcagtagctgaaagcagtgagagatattccaacaaggctccagattgcaagagaaatgagtgtggatttaaaaattaacaggctttgtatgcatataactaagaatcagcttacttgccatgaagatgagtaccaaggccccaaagtatgtatgtcagaaggtaggatattacttggttttgtgtaattggtaataccaaggtcaaatcaacttagataactggtttaaaccattaaatagcttttttggctttagatatttctcaagatttttactgcaagctacgtgcattgcagtctgcaggaagaaaaaaaaggattattagtgtttttgcaatgttcctgcccagcgtttacttctttatttgctcttgttttattcccacagggaaaggttcattgtaacatacccagggatgtgtggtagatttttccaatgcagcaggtagaatgactttgatggtaagaaacagaaaattgaatgccgactggcttaaacaataaaagcttatatcattgaaaagattagaggtatggtgagttacagaattagattgattcagccactctctgggtcatttagggtttctttttttctgtctctgmcaaacaggattggactttggagttggccacagggcagattcccccaacacaccagcagggtggcgatcagagaatgccagaacaaacattaggtaatttttaagaagagtgacttggtgtatgtgtgccccaacaagtatccaccatagccagtgacctggatatgcttaatttagattaatgaatttatccgtcctctctcttctccaccttgtaggtgttaatattctacatgtaatgtacaggggttttccccctcggatat

SEQ ID NO: 699831 - DNA, 2857 bp, Homo sapiens
cgcctttccatgcataacagctgcctctggtccagtctttctatcccctcttcagtggtgtgtccaccagcaaaacttctgtgcctcagtttccttggctgtaaaacggtgccctcttctaggatcgttgagagaattaaatgaaatcatgcttggcagagtatcacgctcatagaaagtgctcagtaggggtttagcttttacagctagttgcttgcagtcatttgatttcataagctaggtttgtggagaaactgaggaagtgaatgagccaaacacaaaagtaaacactgttgataggacaggtggttaactctttcagtgccacaaaacacattctgactcacctgcacacaaattttgcttacaagattgttgtcagcactaattttgctccaagtatttgcttgattaaaatctcttatgctactctttgcagctgacctataacagaaataaatgaactaactagagatactttcttcgttgggcttccatctagagctaagctttacttaggctttcaaattgtaagcaaatgcaaaataactctcttgggaaaattccagagaatctaggccttgagctgttgtaagcaaatgtggccctccttttagggcgggaatctaagaaatggagattatgcattatccagttccaggggcatcattcatactgtggtctgtgcgtgtgcatggacaagcctgctcctctgggtgaggtggccataggtcctttctggggttcagtaagttctgatagtggcattgtcatggtgtgaaacctctcattctcccagtttaattattcagtgagaatgggattcctgagattctaaaccatattccataactttggaaaatatatgtgtatataaaattttccatacggttaaaacctgagagtggactgcaagtcaaattgctattttcttccctgcttcgtctttgtgaacttcgtattgtcagttttcctgacagttgacaaaagtgggcagttttggtggcatatctgatttaggaagtaagtgcaacaatttgaaagcctaagtaaagcttagctttagatggaagcccaataaaggagttatctctagttagttcatttatttctgttgtaggtcagccgcaaatctgaaaacacaggtttgaatttgtatgctcatttaatgttactgataatctgaaatgctggtttttaggactgtagatttcattatggaatatgtttttaacttaatttgtacatgggtctcttgttgttttgggaattttgttctaagacatgttgaagctgtgctgtagttattgggtttatgagttgttggggtattatttatttttaatgtactctgttccttcctcttcccaaagcaaataatcaagaattaatgtttaactttaagttggatccactcactttatattgagagttattattactttaattcacgtttcttttccctgaagccctgatatatctttgggaagatacattttttcatgcattaattattttcttttccagtatcaattgcagatattacaatcacagcaagaaacatctgttgtacctttattatgtgccaggtactgtgctgcctgctttatatgaattattattacgatcattaaatttttatatccacgctagactttacatactgtctatcataactcacattttataataaggacttgagactggggaaataaacttgccaagtcgacacaatttaaaagtggtagagccaagagttgaactcacgtagtctctgactctggaactatgctcttaaaccctacactcttgatgttgaagatgtagggacatctttgcatttgaagacagaaatgcacatacagcccagaacttttcagtgattccaaagacctctgtattttcacgtaacataactttggaagccacagattcgctttgctcaatctattttgttcaggagtacatgcatgctaatttgctcaggcagtagctgaaagcagtgagagatattccaacaaggctccagattgcaagagaaatgagtgtggatttaaaaattaacaggctttgtatgcatataactaagaatcagcttacttgccatgaagatgagtaccaaggccccaaagtatgtatgtcagaaggtaggatattacttggttttgtgtaattggtaataccaaggtcaaatcaacttagataactggtttaaaccattaaatagcttttttggctttagatatttctcaagatttttactgcaagctacgtgcattgcagtctgcaggaagaaaaaaaaggattattagtgtttttgcaatgttcctgcccagcgtttacttctttatttgctcttgttttattcccacagggaaaggttcattgtaacatacccagggatgtgtggtagatttttccaatgcagcaggtagaatgactttgatggtaagaaacagaaaattgaatgccgactggcttaaacaataaaagcttatatcattgaaaagattagaggtatggtgagttacagaattagattgattcagccactctctgggtcatttagggtttctttttttctgtctctgccaaacaggattggactttggagttggccacagggcagattcccccaacacaccagcagggtggcgatcagagaatgccagaacaaacattagrtaatttttaagaagagtgacttggtgtatgtgtgccccaacaagtatccaccatagccagtgacctggatatgcttaatttagattaatgaatttatccgtcctctctcttctccaccttgtaggtgttaatattctacatgtaatgtacaggggttttccccctcggatat

SEQ ID NO: 699832 - DNA, 636 bp, Homo sapiens
tttgggcggcggaggcacaagaattgcttgaacccaggaggcagaggttgcagtgagctgagatcacgccactgcactgtagcctgagtgacagagcaagactctgtctcccccacaactgcccccaaaaaaggaaagtgctgaagggtgttttcctgagtgacakgctggaactttagatggcaagaaaaagagagctaagggcatactttgcatgttacctggatgctcatttttggccaaggggatttcttctgagaagtgaaaaatatcttcagacagtttggttcatttggtgattgtcctgcttgccaggttgtaccaactggtattttcttcttttgttcagtaaatcaaccaaaagcccactatgtgtaaggtattttctgtggattcaaagttgaacaagacttccttagccttcctggtctttcagtctggtcagggagatgagacagacacacaaataaccacaatacaaaggacgaagaggaaagctaggcttggaaaaagggctgttgggcttggaggaggcaaggaaagattcctggagagatgaggaaagtcttgtgtgcaaggggaagggagaagagggaggatttcagacagagcaagtattaagaatcttgagcctaa

SEQ ID NO: 699833 - DNA, 636 bp, Homo sapiens
tttgggcggcggaggcacaagaattgcttgaacccaggaggcagaggttgcagtgagctgagatcacgccactgcactgtagcctgagtgacagagcaagactctgtctcccccacaactgcccccaaaaaaggaaagtgctgaagggtgttttcctgagtgacatgctggaactttagatggcaagaaaaagagagctaagggcatactttgcatgttacctggatgctcatttttggccaaggggatttcttctgagaagtgaaaaatatcttcagacagtttggttcatttggtgattgtcctgcttgccaggttgyaccaactggtattttcttcttttgttcagtaaatcaaccaaaagcccactatgtgtaaggtattttctgtggattcaaagttgaacaagacttccttagccttcctggtctttcagtctggtcagggagatgagacagacacacaaataaccacaatacaaaggacgaagaggaaagctaggcttggaaaaagggctgttgggcttggaggaggcaaggaaagattcctggagagatgaggaaagtcttgtgtgcaaggggaagggagaagagggaggatttcagacagagcaagtattaagaatcttgagcctaa

SEQ ID NO: 699834 - DNA, 636 bp, Homo sapiens
tttgggcggcggaggcacaagaattgcttgaacccaggaggcagaggttgcagtgagctgagatcacgccactgcactgtagcctgagtgacagagcaagactctgtctcccccacaactgcccccaaaaaaggaaagtgctgaagggtgttttcctgagtgacatgctggaactttagatggcaagaaaaagagagctaagggcatactttgcatgttacctggatgctcatttttggccaaggggatttcttctgagaagtgaaaaatatcttcagacagtttggttcatttggtgattgtcctgcttgccaggttgtaccaactgrtattttcttcttttgttcagtaaatcaaccaaaagcccactatgtgtaaggtattttctgtggattcaaagttgaacaagacttccttagccttcctggtctttcagtctggtcagggagatgagacagacacacaaataaccacaatacaaaggacgaagaggaaagctaggcttggaaaaagggctgttgggcttggaggaggcaaggaaagattcctggagagatgaggaaagtcttgtgtgcaaggggaagggagaagagggaggatttcagacagagcaagtattaagaatcttgagcctaa

SEQ ID NO: 699835 - DNA, 636 bp, Homo sapiens
tttgggcggcggaggcacaagaattgcttgaacccaggaggcagaggttgcagtgagctgagatcacgccactgcactgtagcctgagtgacagagcaagactctgtctcccccacaactgcccccaaaaaaggaaagtgctgaagggtgttttcctgagtgacatgctggaactttagatggcaagaaaaagagagctaagggcatactttgcatgttacctggatgctcatttttggccaaggggatttcttctgagaagtgaaaaatatcttcagacagtttggttcatttggtgattgtcctgcttgccaggttgtaccaactggtattttcttcttttgttcagtaaatcaaccaaargcccactatgtgtaaggtattttctgtggattcaaagttgaacaagacttccttagccttcctggtctttcagtctggtcagggagatgagacagacacacaaataaccacaatacaaaggacgaagaggaaagctaggcttggaaaaagggctgttgggcttggaggaggcaaggaaagattcctggagagatgaggaaagtcttgtgtgcaaggggaagggagaagagggaggatttcagacagagcaagtattaagaatcttgagcctaa

SEQ ID NO: 699836 - DNA, 636 bp, Homo sapiens
tttgggcggcggaggcacaagaattgcttgaacccaggaggcagaggttgcagtgagctgagatcacgccactgcactgtagcctgagtgacagagcaagactctgtctcccccacaactgcccccaaaaaaggaaagtgctgaagggtgttttcctgagtgacatgctggaactttagatggcaagaaaaagagagctaagggcatactttgcatgttacctggatgctcatttttggccaaggggatttcttctgagaagtgaaaaatatcttcagacagtttggttcatttggtgattgtcctgcttgccaggttgtaccaactggtattttcttcttttgttcagtaaatcaaccaaaagcccactatgtgtaaggtattttctgtggattcaaagttgaacaagacttccttagccttcctggtctttcagtctggtcagggagatgagacagacacacaaataaccacaatacaaaggacraagaggaaagctaggcttggaaaaagggctgttgggcttggaggaggcaaggaaagattcctggagagatgaggaaagtcttgtgtgcaaggggaagggagaagagggaggatttcagacagagcaagtattaagaatcttgagcctaa

SEQ ID NO: 699837 - DNA, 638 bp, Homo sapiens
ttcagagtcctagcttaggatgctgcaaagacctctgagaatgcyagtctttcccctctctccctcccccagaagaagtttcaggggattctacaggctaacattaaagttcacaggctggagggtcccagctactgctattatatcaacacatgggggcaggtagtgatggctgctcctccagagagattacatagcaatgccaaagttccctggcctggtacagaatgacggcccaataaagagttgctgaacaaatgaccaaaaaataacaataaatcccagctcagcgacttattggctaatacccctgggtaagtccataccatttctttaccttaactccctcctgcataaaatggagataatcataactacccacaggtgtgcttggggactagttgttaaaccaaaccagagactcgatgcacaatagtggctttcctctcagaagtggcggggaccccagggaagtgcaaacaagggactttctctttaggatgagcatctgtggactttgcactttgccatggagccaggaagaatgatgcctgagcaaaagtctgtgatgaggacactcccagtcaggaaaagccattccatccttggcccactgtgggggtggggggggcacagtg

SEQ ID NO: 699838 - DNA, 1521 bp, Homo sapiens
ctcccaaactcatagaattgtgaagaggaaacgagaagatgaaagtgaaggccatgagcatggggtagaagattgatatctttcttttttctcttctgcttttctattttgatctccactttatcaatgcaaaaactgacttgtccagggctgtgccgcttgtaaataggggaagtgactgaacacaggctgtgtccttcccacgacaccacgctactcttaaagctgcatccccagtttttggtctcacctcccctggttcctggtgccctgctggcctctgacactcttattcttccaagctgcactctccttcacagaaggtacctcttcctccaggaagccctcaaaccagcacaaggctgaacacacagctggagaaaaggacagcatgggcagaggatgcccttggctcactgcccttctcactcctccatgggcccagcctccctgggggtccatttcccttccctggaatcagccaagcactgagggctgggtcatctcccagcaagctcaccctctaataagccagcaggccacattttgttctccttaaataaatcttatagaaacatttaaatgtttatttcactcatagattctcaggaatgcacaatagttttcctaaccgcctgggcacagggataaatataggccagtgtcatagatgggaatattagcttcctttccccagagtcacatggctaggcccaggctaggaaactgtaaggaacacccccagccccagctccagcccactccagctcaggcaggcatkgggggtttagatcctgtagatgggcgctggcagacagcccaggagaggaggaccctgctggaaggcaatgtgggctagtgaagaagtcgggtaggcctagaccagaatcccacctgggtgaccttgggcaagttactagttactaaacttctctttcatggtctaaaacattacatagagctaataatcactattctctaggcttgttttaagtattaaatgagagaaagcaataataatgacggtgaaagtggtggtggtgggtgcgtgctgtgagactgtatccccagatccctgtcttgtagcctggagggcaaacagggactgccttggtagagaggagatccagcagcaaaagcagccagtgctcttacaacaggataaaaggactctctgggccgggcacggtggctcacgcctgtaatcccagcactttgggaggccgaggcatggcctcggtggatcacaaggtcaggagatcgagaccatcttggctaacacagtgaaaccccgtctctactaaaaatacaaaagcaaaattagccgggcatggtggcgggcacctgtagtcccagctactcgggaagctgaggcgggagaatggcgtgaacccaggaggcggagcttacagtgagcctgatcgtgccactgcactcctccagcctgggcgacagagtgagactccgtctcaaaaaaaaaaaaaaaaaaaaaaaggactctctggggacttgaaagaaaat

SEQ ID NO: 699839 - DNA, 1521 bp, Homo sapiens
ctcccaaactcatagaattgtgaagaggaaacgagaagatgaaagtgaaggccatgagcatggggtagaagattgatatctttcttttttctcttctgcttttctattttgatctccactttatcaatgcaaaaactgacttgtccagggctgtgccgcttgtaaataggggaagtgactgaacacaggctgtgtccttcccacgacaccacgctactcttaaagctgcatccccagtttttggtctcacctcccctggttcctggtgccctgctggcctctgacactcttattcttccaagctgcactctccttcacagaaggtacctcttcctccaggaagccctcaaaccagcacaaggctgaacacacagctggagaaaaggacagcatgggcagaggatgcccttggctcactgcccttctcactcctccatgggcccagcctccctgggggtccatttcccttccctggaatcagccaagcactgagggctgggtcatctcccagcaagctcaccctctaataagccagcaggccacattttgttctccttaaataaatcttatagaaacatttaaatgtttatttcactcatagattctcaggaatgcacaatagttttcctaaccgcctgggcacagggataaatataggccagtgtcatagatgggaatattagcttcctttccccagagtcacatggctaggcccaggctaggaaactgtaaggaacacccccagccccagctccagcccactccagctcaggcaggcatggggggtttagatcctgtagatgggcgctggcagacagcccaggagaggaggaccctgctggaaggcaatgtgggctagtgaagaagtcgggtaggcctagaccagaatcccacctgggtgaccttgggcaagttactagttactaaacttctctttcatggtctaaaacattacatagagctaataatcactattctctaggcttgttttaagtattaaatgagagaaagcaataataatgacggtgaaagtggtggtggtgggtgcgtgctgtgagactgtatccccagatccctgtcttgtagcctggagggcaaacagggactgccttggtagagaggagatccagcagcaaaagcagccagtgctcttacaacaggataaaagractctctgggccgggcacggtggctcacgcctgtaatcccagcactttgggaggccgaggcatggcctcggtggatcacaaggtcaggagatcgagaccatcttggctaacacagtgaaaccccgtctctactaaaaatacaaaagcaaaattagccgggcatggtggcgggcacctgtagtcccagctactcgggaagctgaggcgggagaatggcgtgaacccaggaggcggagcttacagtgagcctgatcgtgccactgcactcctccagcctgggcgacagagtgagactccgtctcaaaaaaaaaaaaaaaaaaaaaaaggactctctggggacttgaaagaaaat

SEQ ID NO: 699840 - DNA, 2803 bp, Homo sapiens
cgaccgcatgctggagcctatgcttatgggtggagatacacatgtgaaaggcacagtctgtggcccgcaagtagctcacacatagcctgatgtgtggagacagaaaaacaaagaacagcaatctgtttcattgctcacaataggaactaagggaaaacaatttttatatgcatttccgactgtctgtaaccgtcaacatttctaaaacactttctgccttgttttaggcacttccacgctaaattctcacagctcttaccctgtgaccagaaccactagaggccagcctggtggaactgtcctcttgagctcttttttataatgatggagcatcaagcacctgtttcccatgcatggggcctctggtgtcctagctagggccaggaaaggaaggaaaacctggtaggatgacatcagtgggaaacttgagtttgaatctctatttgaccacagcacagctaggtgatctttgacaattacataaactctcagagactccatttcttcatctaaaaaatagagataataatatctaccttggagggattagaccacataccaggtgcccagtagttgctaccattatcttgtataccagatactaatattttattgataatttattttaaattattttattgaaggccttaattgaggctgttcttgcaaaggatgtgatgagataagtagaaatgaactcagagaagatgaattcaaaatcctcgatgggagcatccaagtacttcctggtttctggtgagtatagtgcccttacctgcctgttttctcatctataaagtgggatagccatcatgcctgtgtcttggagttgtcgtgaggttgctatgtgtaaagtgcctagagcagtgcctggcacatgggaggtaccgtatgagggttctcactggggaagctggggggcagggggatccctactctacacagtccttaccaggttccaagtgttttacatgctttatctggttcctcttcatctcattcctgacagataattgatcctttgggtcacacaccttttctctagtcgggcagcacacggttcccaaggagtttccagggaggtacaggcagaacctctctgttggccagtgaggacagggcttgaacagccaaaaggagtcaaatggatagagaagctggcaatctgccttcagcagtaaagtatatggctaaactcgagatattcccatagacagcgcagaacaagtctcctccaggtcctgatgggagaaggccgtgggagaacacaagagcaaattggatctgacagaactggcatttggtagtaaatctaccaggaagtgagcttcctgagagcaggaccttagttagttaatgctcaataaacatttattgagcaaattcaataaacattgactgagtaaatgtacttcaattcctcgattccatatttattgagtgcctaccatgtgtatgtgaataatcatcccttgcctctgtgctcaaactctattgcatataatggggtatttttggaatagaaataggaaaacaattaattatagcccatttcctcagcttacaaccatgagacagtggaatccgggccttgctatttccctattatgtgattttcagcaactggcttaacctttccaagcctcagtatcctgatctgtgaaatgtgcatagtcatcactaccatgtacgactgcgttctgaaggttaaatgctagaaaacactaggaacctgtgtgttagtttctttcccttcatctggataagatacctaactgctctaaattcgcactttcatgggggtgactctctctgctctgtctacctcacagtggttttgcacttgcaatgtcattgcacttgcagtgacacatgtggaaactttttgcaaaccgttttgtgctatagggactgagcgcctattgtgagctaagtactttgctcatcactttatatatattattccagtaattaaagtcaagctgcctgggtttgaatttagcctcaaccacttccttagctatgtcacccactgcacattacttttctgtgcttaaattctttatctgttactggaaatactaatagttttcccaggagtattgcgagaattaaatgagataatgtaacatataaaacaagcctaatatggtacctggcacatagtaagttctccataaaggttagctgttgttagtggctattcctataactcttagtttctagatgaggaaactggggcaaggaataatgaggaatcacttatccaaggtagcagtcaaggatgtgaagcccaagttcttcctgctctgccatgctgcttataccttacrtttctatgagcctttcctgtaccttctggaactccctggctgcttggtcatcctcctcttcttaaaggacagacaggttggctctgagcccagcccactgactgagggtgtaagccaggataggcctcctacaacccttgtccactgtttttactctcatgccaacagactttgggagtgtggaaaaacacagtatgtgttagctttattccaaggagagtaactcagctagtcattcatccatcatatctactatcctcccttccttcctcccttcctaacattagccctccctccatttcttctgccctttagtgcagtcatttaatcatctagccagccaattatctacccaaccccagatttgttatggtggcacttacatcagtccctatttctgagccaaaacaggaggaaggccagcacctccatagccagaggttctaggtgctccacaagccgatcccttc

SEQ ID NO: 699841 - DNA, 610 bp, Homo sapiens
ctgaaacatttacctttattygccctaccctttatatccaatggcattatttagaaataggtagtcggtagtcaccgttggaaattaagggggtttgtggttattgaaaagttcctactataaatctactatgactaccacctgacaagatataaaatggctaaattttgagctgagattgtttttagatttactcattaacatttattgctttctctatgacagatacttctcaaattaggtttctgagacacacacacacataccccacacatacacacatccatagacacacacgataggcaaagacacagagcaggtgtatctcctccacaggaatttttgtatgacgccagaaaaataaatcccatgttccgactacaaaagcacatatttttattataatagatgtgaacttaaaatgaatccatgtgaaaacagagagacaatattcttagaggcaaagattaaagaaactggacatattgaattcagatttctaattaataacaacatacctagggtgcaaatattggcccattttctgaaatgcaagtctattttcagcttttttctgtactactgtctttcatatcatttgttcacaaat

SEQ ID NO: 699842 - DNA, 900 bp, Homo sapiens
ccctggtagcttttgtttcttcaggcagccatgactttgcatagatcatttccttttgcccaggacactcctgctcgttttctcccctcctcaccaaacccacagtgcattaacagcgacagacttctcctcatcctctcaggccacttggatgtcaccatttcttctctttacccctcaggcgtagtcagcctctctgtgcctgatgttttatggctttgtgtatgccccgatggagagcgtcttactgtgtcttcgggttatttatctcaacctcgcatctgtgctatcctgtacagtaaccaacagccacatatcactatttaaaattaaatacaaactaattatacttaaatgtaataaaaatgtagcccctcacattagcctcatttcaagagccacatgtggctaccgtattgtaagcagagctcaagaacattcagcaatattgtgagagtggctaccatattgagagcagagctctagaacattcccttatcccagaaagttctcttggacatgctgctcaaggtggtgaactctgagatctccagtccccccagctccgtcactcagaaccacaaatgtggcaccatcagccttcagggtggtgcttgtgttgtactgtctcctgactaaagaagtaaacttcaggcagtcaagwttttctacaacccacactgctcctaaaactagtgttactggatatgtaaaagctattgagcccagtgctttcaaggaatcctaaaagcaagtggggactgtcatgtatccaggttccttgttttgcagaagaagaaatagaggctttaggggaaaggggtccactcaaggtcatacaggcaaggtcatacagtcagtggtagaatggactggaatcttgattgttcatctcactcc

SEQ ID NO: 699843 - DNA, 733 bp, Homo sapiens
gttttgagcagtccttttgcgattgttttgagtcttgagtctggtgaccagtaagttgtatatatttgcctgtcaagtggacaaacatggcctttgtgcctttaagtaatggctaaaagtaccaaacagaacagggcctggcatagatgctgctcctcctgttcctaggccgtaatcacccctgattcatcagaccccaaacaagtcagctcctctccctcctgtgccccaccacccaatctcctgcaggaagatgtctagagacccctgtcagcgctaggcagagatcaccatccatgtccacctttcctctgatgcaggytcccactagcccctctggcttgtgccatgccagccatgaactcaccctcatgccccacccgagccctggcacaggctattccctctgcctggaatgctcttcgtcagtatccccatggctccctccctccccttcccttgtatcctgactctcccatagcagctctctccctgtaacacatgttcacaggttcatctttgtcacccatctccggcagctcctgcaggcttgatggctgctaaaggcaggcaagtcagtggctcagattcttgcaaacttagtgattagtgatttctcaactccctcctcatgcctcctctgtctctataggcacatattatttcttatctcttctcagaaccaagccgcctgaatttctgaataacattgtttaagtgttctgtgtatgca

SEQ ID NO: 699844 - DNA, 929 bp, Homo sapiens
catatattttatgtgttttgttaacacacagtcaaggaatttgactattttttaactaaattgtgttgttttgacatttgggagacattaacactttcaagtggctttgagatgggtccattggctttctttacttcatcatatcttggtattacagtaaagacacgtattttgttctcataaatttctcagtggtcccattattattctgtaattattccttcaagacagaaactaagttccattactcaatagggactattttatttcatctacaacaaagaagctacagcatatttactgtcaacggtgaactgaaaattctcaaatggttctcatcaacatctttattcattttttctcattttgttttttaartaggtctctttttttaaccaacagtggaactcaacattaattttgtgaattgaatcagtatgtccctctaaacaaatggataacagaattagataacttggattggcatcaaatatctctaattttcatgtaaaaaatatatttttcaaatgatgagataaatcactaaaagtcaaaatatacattttataggagattgagatttggtcataaattctaataatccttttaataatatcaatggtaatataataactttaattgaaccatgtttatgtgccagaaagtatgttataggatttatatgtccttaccacattactgtttacatttagtctttcaatattgcaaagttagtacttttttttttcttttttggtttttacttagcatagtgtcctcaaggttcattcatgtggtagcatgtgtcagaatttgcttcctttataaagctgcatatatttattagacttttaatgtatgttttatgttctgttcccttccttccaaccccatagttttgtttagatttttccaacttttattttaag

SEQ ID NO: 699845 - DNA, 600 bp, Homo sapiens
tcaataacctccacataatgttccagcatgttttttaaactagagaaataaaaaaattggttgtgggaggagaggaaggtgaagagaagagggcatggtagagtgttagacgaagcaaaacttagagaagggaccaagtcagggattaggctaggacagtggttgatgatttccctatcacctttgtccaaaggctgcacgcggggggccccataagtgtttgttggctgcctccaactctcaaccactggaagctaacattctttctggtttgttcggtttagcaagtgcgtgaagtacctcttgaagattgactctgcggtgctcactcactcacacactgacatgtaatcaaatgttttactgcagttccattatcttttcatcaacacattttgaaaaaaaatgactgacaccaccaagttgattcagttgtggacaaacaatcttcaaagcagagttatctcttcctgatctagctcaatagtttacaatattaacttcataaattaaattacttctgcttcagactgacttttcttgaaagcacatattmttctctttctttttacatactcaatcatgaattaaagtaggtaa

SEQ ID NO: 699846 - DNA, 600 bp, Homo sapiens
attggtacgatgaacaataaacatagaaacacacgaataaaataatttttggggacactgataagtataacattggaataactccaatagaagagtgttatctgttggaaatgagagcrccaatataatggcttacatatgtgctgagacaagacaaattaagttttgtgaggaattagaatttcaggacaaaattctgagtgaggaattgccctggcattcataagaaacaaaaaggggtcagagtgactggaacaatgtgagcaagtcgggacaaggaggagagtattaaaagagggcagagaagtagggaagggccagatgagacaggattggctagaccatgttaagagaggtttgcttccatcaaaaaaaggagaggttcgcttccatcaaaaaatcaacgaaaacaactttgctttttgaaaacttgaagtaggaaaaaaaagatgatatttcaagtgtcttataaaaagttcactgtggctcctggggagcttggtaggcaacaacgaaagcaaattaataatcagaaaactattatagatgtctagggtaagtcaatggtgtctttgcaaagatggtggcatttgagtttca

SEQ ID NO: 699847 - DNA, 600 bp, Homo sapiens
attggtacgatgaacaataaacatagaaacacacgaataaaataatttttggggacactgataagtataacattggaataactccaatagaagagtgttatctgttggaaatgagagcaccaatataatggcttacatatgtgctgagacaagacaaattaagttttgtgaggaattagaatttcaggacaaaattmtgagtgaggaattgccctggcattcataagaaacaaaaaggggtcagagtgactggaacaatgtgagcaagtcgggacaaggaggagagtattaaaagagggcagagaagtagggaagggccagatgagacaggattggctagaccatgttaagagaggtttgcttccatcaaaaaaaggagaggttcgcttccatcaaaaaatcaacgaaaacaactttgctttttgaaaacttgaagtaggaaaaaaaagatgatatttcaagtgtcttataaaaagttcactgtggctcctggggagcttggtaggcaacaacgaaagcaaattaataatcagaaaactattatagatgtctagggtaagtcaatggtgtctttgcaaagatggtggcatttgagtttca

SEQ ID NO: 699848 - DNA, 600 bp, Homo sapiens
attggtacgatgaacaataaacatagaaacacacgaataaaataatttttggggacactgataagtataacattggaataactccaatagaagagtgttatctgttggaaatgagagcaccaatataatggcttacatatgtgctgagacaagacaaattaagttttgtgaggaattagaatttcaggacaaaattctgagtgrggaattgccctggcattcataagaaacaaaaaggggtcagagtgactggaacaatgtgagcaagtcgggacaaggaggagagtattaaaagagggcagagaagtagggaagggccagatgagacaggattggctagaccatgttaagagaggtttgcttccatcaaaaaaaggagaggttcgcttccatcaaaaaatcaacgaaaacaactttgctttttgaaaacttgaagtaggaaaaaaaagatgatatttcaagtgtcttataaaaagttcactgtggctcctggggagcttggtaggcaacaacgaaagcaaattaataatcagaaaactattatagatgtctagggtaagtcaatggtgtctttgcaaagatggtggcatttgagtttca

SEQ ID NO: 699849 - DNA, 615 bp, Homo sapiens
aaattataaaagtattaatttggggaactaataaacgtccatgaaatcgtcacaatttatgttcttctgccatggcttcagccagtccctccattcaggggtccctgacttcctgcaagagaacagtaacaacaaaactgaaagaaaaaatcacccctcacacgtacacacaatgacacattatttgggcagtttcagtaataatactagttgtaattaactgagttctttcctacagcaccatgtctggtaatgtaygtatatatacacacacacacacacatattatataaatatatatatatataattttatcattacaagtatgagaatcatacttaatcctgaattaaaaaatgaggagcatgaggcttaaagctgtgaagtgccctgtttaatgtcacacagtaagtgacagagtgacagacttgggaatcaatctcaggtttaactaactcaagtctaaagccttccccacctttgtcaacaactttacaaaagagaagccgaatatgctgacatgaagaccagtcaccatgaaaggatgcaggaccataggtaataaatatcacacatggtaagaataaccagatggcaccagagtatgttttttca

SEQ ID NO: 699850 - DNA, 484 bp, Homo sapiens
ccccatctctactaaaaatacaaaaattagccaggcatggcaacaggtatctgtagtcccagctacctgggaggctgaagcaggagaatcacttggacctgggaggcggaggttgcagtgagccaagattgcaccactgcactctagcctcggcaacggagcgagactccatctcaaaagaaaaaaaaaaaaagaaagaaagaaagaaagaaaagaaaggaaaaaasagaaaaaaatatcctgaagaactcagaacagtctctaagtgcttagttgtgtatgttcatagccatgctgatgctgacaacaaatccaaaaggatcacaccaaacattttttcaattaaaaattataataaataacgtaaggtaatacataggctaattagcttgatttagccactccaaatttcaaaacattatgttgtatgccataaatatatacaatttttatttgtcaattaaaaaatagaagataaaataat

SEQ ID NO: 699851 - DNA, 1981 bp, Homo sapiens
gccacctgtcaaagtggcttgtcaggcatggataaaaatgccattgggggaaggaaaatgcaacataaagccttctagcagaggaaatatgaagaatagtattttctacacgactgcgctaaagggttcatttaaagaaaaaaacacttctaactattagggaaaattccaggttaactatacttaaaaaaaaaaaaaaagcccaaaaatctagtaaatattttgctgggaaattcacacttaaagaaatggtctttcaggcccctggggagarggcattaagctgacacatttttcaaatcaaaatggctgctctaaaaacataaaccttcaaaatgaacaccacagagagcccctttcttcctgtgctgagcacgctcactacccactcagagcgccctgtgccaaggcgaagtcaaaccccatagaaacctgatccccactgtggagaaaactgtgcagcgcccttgttttctgtcgtgctttgttttgtatttcagatgtgctggtcacatctgttctttatctcccctcttccactgtgattttgtttacaggatcccagaacaatggggactgcagaatctccacacagatgacaggagacaaggctctcagggggtagtcactgtctgcaaaacgtggagccaaaggcgtggttttcagagtagctgccaacactccaagttactcaggctcatggaccaggaatgactggaaaggagactgccttgtctggggaagatccagacccacagatgcaattttttgaaagtaatctctttacaatggcctgcccatctcctctctctgcttagaagtttttgtgttctgtaaggagccttctaatgggcttctgtctgcctgggcttctgtccctttggttctcccagtctgctctctgtctcttttgtttctttcatccctggattccaggaagtcaaggtcagggcagcttaccagtccctaaacaccattattttggcaggatgctttggcagtggaatgaatgcctgcagaaggcctcacctagtcacccacaaattcatgaacacagctgtgacttttcgaagcagaagccagactcttagtctttgttttttatcttttttttcttttttttttttttttgagacggagtctcactctgtcgcctaggctggagtgcggtgacaccatcttggctcactgcaacttctgcctcctgggttcaagcagttctcctgcctcagcctcccgagtaggtgggattacaggcacccaccactacacctggctaagttttgtatttttagtagagatggggtttcaccatcttggccaggctggtcttgaactcctgacctcatgatctgcccacctcggcctcccaaagtgctgggactagaggtgtgagccaccgcacctggcctgtttttcatcttatttttaaaagtcatatgtcgagcaagaaaaaatctagactacagtgttactcaaactgtgggttgctaacagacagtgctcctcatggctcttactactggtcagtggagaaacgaagaaattgagagaatgcatttagaaaatttcatagtgctttcacagaataatcttatgtctcttgaatctaataataaaaattggggagcctatattttacatgtctttggtttgctatttcacttttctatttattcatttttagtatatttataagaatgtcagtccataatggcatggaaataattcaagaagaaggaaaccctatcacacatagtatgaaaagcaaaccacagacgatacaaaaaaagaaagaaaaaaaacccaccaaacactcatttagccattacccagcctttgtcaaaacttaacattttatcatgtttgcctttgcttttttaatttttattgattggttgattgattgagacagactctcactttatcacccaggctagagtacagaggcccacatggctcattgcagcctcaacctcct

SEQ ID NO: 699852 - DNA, 1981 bp, Homo sapiens
gccacctgtcaaagtggcttgtcaggcatggataaaaatgccattgggggaaggaaaatgcaacataaagccttctagcagaggaaatatgaagaatagtattttctacacgactgcgctaaagggttcatttaaagaaaaaaacacttctaactattagggaaaattccaggttaactatacttaaaaaaaaaaaaaaagcccaaaaatctagtaaatattttgctgggaaattcacacttaaagaaatggtctttcaggcccctggggagaagrcattaagctgacacatttttcaaatcaaaatggctgctctaaaaacataaaccttcaaaatgaacaccacagagagcccctttcttcctgtgctgagcacgctcactacccactcagagcgccctgtgccaaggcgaagtcaaaccccatagaaacctgatccccactgtggagaaaactgtgcagcgcccttgttttctgtcgtgctttgttttgtatttcagatgtgctggtcacatctgttctttatctcccctcttccactgtgattttgtttacaggatcccagaacaatggggactgcagaatctccacacagatgacaggagacaaggctctcagggggtagtcactgtctgcaaaacgtggagccaaaggcgtggttttcagagtagctgccaacactccaagttactcaggctcatggaccaggaatgactggaaaggagactgccttgtctggggaagatccagacccacagatgcaattttttgaaagtaatctctttacaatggcctgcccatctcctctctctgcttagaagtttttgtgttctgtaaggagccttctaatgggcttctgtctgcctgggcttctgtccctttggttctcccagtctgctctctgtctcttttgtttctttcatccctggattccaggaagtcaaggtcagggcagcttaccagtccctaaacaccattattttggcaggatgctttggcagtggaatgaatgcctgcagaaggcctcacctagtcacccacaaattcatgaacacagctgtgacttttcgaagcagaagccagactcttagtctttgttttttatcttttttttcttttttttttttttttgagacggagtctcactctgtcgcctaggctggagtgcggtgacaccatcttggctcactgcaacttctgcctcctgggttcaagcagttctcctgcctcagcctcccgagtaggtgggattacaggcacccaccactacacctggctaagttttgtatttttagtagagatggggtttcaccatcttggccaggctggtcttgaactcctgacctcatgatctgcccacctcggcctcccaaagtgctgggactagaggtgtgagccaccgcacctggcctgtttttcatcttatttttaaaagtcatatgtcgagcaagaaaaaatctagactacagtgttactcaaactgtgggttgctaacagacagtgctcctcatggctcttactactggtcagtggagaaacgaagaaattgagagaatgcatttagaaaatttcatagtgctttcacagaataatcttatgtctcttgaatctaataataaaaattggggagcctatattttacatgtctttggtttgctatttcacttttctatttattcatttttagtatatttataagaatgtcagtccataatggcatggaaataattcaagaagaaggaaaccctatcacacatagtatgaaaagcaaaccacagacgatacaaaaaaagaaagaaaaaaaacccaccaaacactcatttagccattacccagcctttgtcaaaacttaacattttatcatgtttgcctttgcttttttaatttttattgattggttgattgattgagacagactctcactttatcacccaggctagagtacagaggcccacatggctcattgcagcctcaacctcct

SEQ ID NO: 699853 - DNA, 631 bp, Homo sapiens
  misc_feature 605, 628: n = A,T,C or G
cctacaacctagcaagttcactcctaaatgcataaccaacaaaaacaaatgtgcatgttcacccaaaaacgtggatattaatgatccaaaaagcatcatttataatagccccaaactagaaacaacccaaatrttcatcagtagtagaatgaataaaactttacacactactgacatgtacaataatatgaatcaatctcaaaaacattacactgagtgaaaaagtaagacaaaagagtacataccgtgttattctatttatataaatttatagaaaaggcaaatctaatctatgataagaaaaagtctgaataggggttacctcttgggaagagattaatggaatatagaatcagaaagggccagagggaactttctagggtgccagatgtgttctatatcttgatctatataggggttacacaggcttatatccatatatccaattttatttagctttacacttaagattactggtgctttatgcacttttatgtactttatatcttaattaaaaaaattttaagctcctgaggtaatttctataatacatttctcctaactcctttggtttgagcctgctttaaccatgaaaatcacacatnctcagattctagagaaactctcntct

SEQ ID NO: 699854 - DNA, 631 bp, Homo sapiens
  misc_feature 605, 628: n = A,T,C or G
cctacaacctagcaagttcactcctaaatgcataaccaacaaaaacaaatgtgcatgttcacccaaaaacgtggatattaatgatccaaaaagcatcatttataatagccccaaactagaaacaacccaaatgttcatcagtagtagaatgaataaaactttacacactactgacatgtacaataatatgaatcaatctcaaaaacattacactgagtgaaaaagtaagacaaaagagtacataccgtgttattctatttatataaatttatagaaaaggcaaatctaatctatgataagaaaaagkctgaataggggttacctcttgggaagagattaatggaatatagaatcagaaagggccagagggaactttctagggtgccagatgtgttctatatcttgatctatataggggttacacaggcttatatccatatatccaattttatttagctttacacttaagattactggtgctttatgcacttttatgtactttatatcttaattaaaaaaattttaagctcctgaggtaatttctataatacatttctcctaactcctttggtttgagcctgctttaaccatgaaaatcacacatnctcagattctagagaaactctcntct

SEQ ID NO: 699855 - DNA, 1944 bp, Homo sapiens
ctcagtgccaggggttcttcaatatttattgaatcaatgaaacaaaggtgaatacaacagtccaggggtctttatggttcttgaactctggccagcaagggctgcctgctctcgagtcccacattttgagggtcaaatacagcagcatcacttggaggaggtgcttttttaaatacaaagtcctagatcccatctcttgagattctaattaagatttactgagaattggtaatttaaaataagcttcccagataattatgaggtttgcaaaacatttttagatcacaatgggaccacaagaacaaaagtggagtgtgtgtgtgtcggagggggtgcttctgtggttaaaaataaatttgcaaaattctgcattctatatcccaaactggaagaccatgatgtgcattagtataataatcagtgaaataatgtggtgaaggaacacgtctagctttatttcacttcgtgttttccgcacctccaagttgatcgcagagccctttcttttctttcacaggactgtaaatggtatgtttcttaggttaatgtttgtggatactcctcccttaagaggcggagcttaactcttaatcctttaagggagggctgcatttagaaacttcttccagggagtagagtaaggaagggggtaagaaaggtaactcttcagtggagaaacaggacaaacactgctgcaagtgaacaagtcagcatcaacagagataagttacactgattgcatgtccccttgatacgacgtggtgagaatggcactttacctctgtggtcttccacatcccagtctgccaaaagaaaaatagcagaaaaaaaaaattaagggacattcaacacattatctgagcaggactttccaaaactgtcaaggtcatcaaaaccagggaaagtgacaaactctcagagcccagaggagcctagcagacgcaatgactaaacatatgtggtgacctggatgggatcctggaatagaaaaaggaaaaatccaaatgaagtgtagagttgagatcatagtaatgtaccagtgttggtacattaccatgttccttcattgtgacaaacataccacagtaataataatagaggaagctgactggagaccacatgagaaccctctgtcctaattttctgatttctctgcatatctaaaattattctaataatgtttatttgaattaaaaattgactaaaactgtatagacgtgggcaagagcatggatgtttctcatagtaagtgataggtgacagacaggaaagttgatatgtttgcacatacaggttgagtatgcctcatacagaatgcttgkaaccagaagtattttggattttggactttttgtacatttgggaaaatttgcatatacatgatgagacatcttgaggatgagaatcaaatctaaacaaaattcctttatgtttcatatacacacagcctaaaggtaactttacacaatattttagggaattttctgcacctgtggcatgaagtcaggtgtggaagtttccacttgtggcatcatgtagacactcaaaaagtttcaaacttggggcatttcagattttgaattttttatttagagatgctcaacctgtgtatataaaattcaagaaaaggcaagacaaatcaattattatagatgtaagaatagtgattaattccgagggtatatactgaaaaggacaaccaaggaaccttaaagggcgcgggaaatattctatatcttgatctgggtagcaattacaggtgtttatacaaaaaatcaaaatcaagttgtacactttataggctttgctgtatttatgttagagctcattttagaataacagttttaaaatgcatataaagagattcccaaggatatttcaccagattttattaataacttcttccttatggggggatatttctgaagaaatgtcttttctttt

SEQ ID NO: 699856 - DNA, 653 bp, Homo sapiens
ttgtaaagaaagcctgccaaggtggtcgtgtttggaaatgccaaagtgacattatggggagcagaatggagcaggagtgagaaatatcaacacctagagtgtgtcccttgtctctaccgcccctcccaccaacaattagcctgaccttggcctgagatattataccaactacaactttcactgtttctttgcttaatttgcttcactgctggggggaaaacaagacctgaagaggaataaaagcagctggtttctttcgaccatcaaaggcagaattggatactgctgcacggtgattttcaaggcaattcaaaattcaaattagccaaagctgactccctccctcctcgctctcctgcgctctctatctttgtctctctctctctctctctctgccttttgcacgactttgttcacaaagcagaactattcctagcctcctgtgctccactttgaagccagcccatgtttttccacttcaccccttcatccttctgggcagcggttttctgcctcatccaaaggaatcaatgaggaggctcaaatgccaatcktttactttttccaagaagggcttccaaggtgctaatgtgcttcccagccaagatacagcctctggtgtgtgtttgctggtgataataatacatcagcta

SEQ ID NO: 699857 - DNA, 550 bp, Homo sapiens
atggtggagcaggaaaggagtaggcgctgggggccctgtgtgggatgagaagtttccattccattcaaaaggtggtgaaagccactggagggttttaagcagggaagtggcatggcctgatttccactgtacaaagctgaccctggctgactcacggtgagtgcattgggagggcaagagtgaaggcargggcctggcctggggggtccaccctccttcagcctagaggcaccagtttccacagagatgcccattggcctggcccttatggtcccttcagagcccaaacattgctggaaactttgcccaggaatgtgatgcctggggccaccaagagcacaccacgccacctttgcctgtccattctgcagatgagcaatacagacccggaaaggcctaaggctgcttagctctaaaataatggctcactcacccagtgcttctaatgtggggcctaatcacttgtggttagagagggagccccacgttcggtcaggaaggggtgggggctgcaggtaggggagggcatcactgatgcccaggagacaga

SEQ ID NO: 699858 - DNA, 414 bp, Homo sapiens
tcattttctgagccccaacagaggttgacacacctgggcctaagtcccagctcccccattcattagcaaggagttgaacccctcagaacgtgagttctgtctgtgcagtgaaggcatggggtgcccacatggtgggtgtagtgaggctgagtgggataaggcccagcacagtgcctgccatgaaggaggcaccccatcattttcataatgatgatttcattgctcttttacacgcaattaaaacwcactaattcagacctatcagagagggcagtcaatggctggaaagtccacattaaaaaataattttaaaataatgtagttttattgctttaaaatatattactcggtccaggctaataaagtgttgcatagcaagcccttgggggacttgcattaatgaacaaataagaa

SEQ ID NO: 699859 - DNA, 2798 bp, Homo sapiens
gacaagtttcatgtgttcactgaagtattaagaaaaaaaattaaatggagacttgagccctcaaatatcaaatcatgtatatagatctctgaaaaatatagaaatgtctgaaaggcaaacttcagataattctttttttttttttttttgagacggagtttcgctcttgttgcccaggctggagtgcaatggcgcgatctcggctcaccgcaacctctaccacccaggttcaagcaattctcctgcctcagcctcccgagtagctgggattacaggcatgcaacaccacacctggctaattttgtactttttaaagtagagacggggtttctccatgttgaggctggtctcgaactcctgacctcaggtgatccgcctgcctcagcctcccaaagtgctgggattacaggcgtgagccactgcgcccagcccagataattctttagggtagaacatttcaacgaaaattttgaattgcagcagggtttggatgttactggcataccacttcagatgctataatgcatgttatagaaaagatctacaggacagagtgcagcaaacaaaaaaggtctagaaaatggaatatgcagttaactagtgtaaagatagtaatgtgagactcaaaggtaaatagaatattgcatgtataccatagaacctctttgctgttacagctgtgacacttcttagctggagagatggagagcaggtagaattatttcaatgaatagctgagactaagaaaacaatgagagagggaacgatgttatcaaaatcagaactcaaagatctgataaagccccatctacaaggtgaaaaagaactatatgcccaggagattctgtacaagtttcaagtcttgttctttgattatctcttttgagttagtacatatcaggctgctgagaccaatatgtcagaaaacatggtcttcaggcttttcaatctttatctattaggcagaggtcagagtatacagctgaaaaaaagttaagctgagcagaagaatgagaggttgctgccgctgtgtgcacaacagaggacaatggggcaacgggccatttctgacccctctttctcacctggtgctcacttgttaccttccagcaattcctcagctcatcctctagatggcaggcttataaattttgccctattaacaattctttggatctggtccaatttcttttttttttttttttttttttttttttttgagacggagtctcgctctgttgcccaggccggactgcggactgcagtggcgcaatctcggctcactgcaagctccgcttcccgggttcacgccattctcctgcctcagcctcccgagtagctgggactacaggcgcccgccaccgcgcccagctaattttttgtatttttagtagagacggggtttcaccttgttaccaaaacacactccactgatataagttgtcaatacgccaccattagttaattgcgaatgtcctaactaacttcattttctaactctaatagagcaataagagcagtttttgtttttgaagtatcttaatcatgtattcggtggcctctaatggctctctaatgccttctgcataaaatccaaataaatcaaagttctttaaccatgtaatttcagtgtattctaccaacactccctcttaaatttatttatatcactttttttttttttagacaaagtctcactctgtagcccaggctggagtacagtggtgcaatctcggctcactgcaacctccgccttctgggttcaaccaattctcatgcctcaccctcccgagtagctaggattacaggtacctgccaccacacctggctaatttttgtatttttagtttcaccatgttggccaggctggtctcaaactcctgacctcaggtgatccacccaccttggtctctcaaagtgcttggattacaggcgtgagccactgcacccggcctcaatctgctgataccactttttaaatgttagctttaaacaacaagtactcattgaaagtttattcaggagccagcatcatgatatgagtcagttcttaaaatccacaggctgccatcagcatataaataacttgcttgctctcaaatttgagcttttatctrtaattgccctatccaggaatgtgcttattgtcatttcatgcatgagacccacgtttgaaaatctagtttggatcagaatgaaacagtgtaactgggagtctagagagttcccggaacaaagctgcttgctttctctcgcttctgctttgggtcagaacacagcttcttcaacatggtcttctcttcctctatcacacaccactgtgcacggctattcaattgctcagagacaacataaagcagcctaggaagtggttttcatttgcaccccccacaccccatcttgcatttgcccaaatctccctcactctaacactggacatttcttttcttacagaaatgcaggcaaagtgtctaccaaaacagtcttcacaaaaaagcacaactgctgaagccttgcaaaggtcagcgcccctgccgtgacgtttatagacattcactgtacagctcctggagggacagctgctggaatcacctgcctcctggagggaggtaagtaacagagctggttggggcttgttaaggtagtttccaaggagaggaaaaatggaggatacttctggcttagtttatggctattcaggtaccagaaaattataactttgagagagttcaaattctaccacttatttattcacttaatccagttttcttaagtacctattgtgtgtcaggcatggt

SEQ ID NO: 699860 - DNA, 2798 bp, Homo sapiens
gacaagtttcatgtgttcactgaagtattaagaaaaaaaattaaatggagacttgagccctcaaatatcaaatcatgtatatagatctctgaaaaatatagaaatgtctgaaaggcaaacttcagataattctttttttttttttttttgagacggagtttcgctcttgttgcccaggctggagtgcaatggcgcgatctcggctcaccgcaacctctaccacccaggttcaagcaattctcctgcctcagcctcccgagtagctgggattacaggcatgcaacaccacacctggctaattttgtactttttaaagtagagacggggtttctccatgttgaggctggtctcgaactcctgacctcaggtgatccgcctgcctcagcctcccaaagtgctgggattacaggcgtgagccactgcgcccagcccagataattctttagggtagaacatttcaacgaaaattttgaattgcagcagggtttggatgttactggcataccacttcagatgctataatgcatgttatagaaaagatctacaggacagagtgcagcaaacaaaaaaggtctagaaaatggaatatgcagttaactagtgtaaagatagtaatgtgagactcaaaggtaaatagaatattgcatgtataccatagaacctctttgctgttacagctgtgacacttcttagctggagagatggagagcaggtagaattatttcaatgaatagctgagactaagaaaacaatgagagagggaacgatgttatcaaaatcagaactcaaagatctgataaagccccatctacaaggtgaaaaagaactatatgcccaggagattctgtacaagtttcaagtcttgttctttgattatctcttttgagttagtacatatcaggctgctgagaccaatatgtcagaaaacatggtcttcaggcttttcaatctttatctattaggcagaggtcagagtatacagctgaaaaaaagttaagctgagcagaagaatgagaggttgctgccgctgtgtgcacaacagaggacaatggggcaacgggccatttctgacccctctttctcacctggtgctcacttgttaccttccagcaattcctcagctcatcctctagatggcaggcttataaattttgccctattaacaattctttggatctggtccaatttcttttttttttttttttttttttttttttttgagacggagtctcgctctgttgcccaggccggactgcggactgcagtggcgcaatctcggctcactgcaagctccgcttcccgggttcacgccattctcctgcctcagcctcccgagtagctgggactacaggcgcccgccaccgcgcccagctaattttttgtatttttagtagagacggggtttcaccttgttaccaaaacacactccactgatataagttgtcaatacgccaccattagttaattgcgaatgtcctaactaacttcattttctaactctaatagagcaataagagcagtttttgtttttgaagtatcttaatcatgtattcggtggcctctaatggctctctaatgccttctgcataaaatccaaataaatcaaagttctttaaccatgtaatttcagtgtattctaccaacactccctcttaaatttatttatatcactttttttttttttagacaaagtctcactctgtagcccaggctggagtacagtggtgcaatctcggctcactgcaacctccgccttctgggttcaaccaattctcatgcctcaccctcccgagtagctaggattacaggtacctgccaccacacctggctaatttttgtatttttagtttcaccatgttggccaggctggtctcaaactcctgacctcaggtgatccacccaccttggtctctcaaagtgcttggattacaggcgtgagccactgcacccggcctcaatctgctgataccactttttaaatgttagctttaaacaacaagtactcattgaaagtttattcaggagccagcatcatgatatgagtcagttcttaaaatccacaggctgccatcagcatataaataacttgcttgctctcaaatttgagcttttatctataattgccctatccaggaatgtgcttattgtcatttcatgcatgagacccacgtttgaaaatctagtttggatcagaatgaaacagtgtaactgggagtctagagagttcccggaacaaagctgcttgctttctctcgcttctgctttgggtcagaacacagcttcttcaacatggtcttctcttcctctatcacacaccactgtgcacggctattcaattgctcagagacaacataaagcagcctaggaartggttttcatttgcaccccccacaccccatcttgcatttgcccaaatctccctcactctaacactggacatttcttttcttacagaaatgcaggcaaagtgtctaccaaaacagtcttcacaaaaaagcacaactgctgaagccttgcaaaggtcagcgcccctgccgtgacgtttatagacattcactgtacagctcctggagggacagctgctggaatcacctgcctcctggagggaggtaagtaacagagctggttggggcttgttaaggtagtttccaaggagaggaaaaatggaggatacttctggcttagtttatggctattcaggtaccagaaaattataactttgagagagttcaaattctaccacttatttattcacttaatccagttttcttaagtacctattgtgtgtcaggcatggt

SEQ ID NO: 699861 - DNA, 1069 bp, Homo sapiens
  misc_feature 2, 3, 12, 18: n = A,T,C or G
tnnagcacttanccaatntcagcctcccgagtagctggaattacaggcacatgccaccatgcccgggtaatttttgtatatttttagcagagatggggtttcactgtgttggccaggtaggtcttgaactcctgacctcaggtgatctgcctgcctcggcctcccaaagtgctgggattacaggtgtgagccctgcacccggcatatttgtgtatttatatgtggccaacctattgtatgagatggaagacaggartagtgacagattgttttgttttcaatctgaaaatttcaaacatacaccaatgtattaaaaacaatataatgaactctttcatgtgcccatgacccacttcaacagttgtcgagttaacaatcttttgtcatctacatattccccaccccagcttccccagactattctgaaacaaatttcaggtatgacatcatgtttaattcataaatatgatggagttattcaatcagcacactttatagctatttgtgaggaataaatagggaaaggggaaaaactggaagggggaatcattaggacccagctgcacagacatttgcagctaaaggagtggagatccagacgatctccgtgggactgggagcagctgtgtttaggattgacactgggggaacaggcagagggaagcatggtcttggcattggcagttttcacattgttggcttctgtctgttgccagcttcattctcattctttctatccttgtatgtcctgtttttactcttcattgtcattttagtgggtttccaggaggcagcagtgataaactgcatgcgtttagtatgccatgttttcctggagatcccactgactttactttcagtaacagtggttttcatttgccaactctggtgtttccccaccatgcaggtaagatagttaggctctaaacctattgaaatctggggttttcattttcatagggcacttatttatccttattcatatatgggaagtttatctctctgtgccaataggcagagtttttggctcatttttatggagtttttagctataagagagaacttgctt

SEQ ID NO: 699862 - DNA, 1374 bp, Homo sapiens
catgagccatgttcatgccactacactttagcctgggtaacaggctcaaaacaaaacaaaacaaaacaaaacaaaaaacaaatctagtttgaagcccaggaaatttggaaggattgaaactgaggaaaaataataccttttgttcactgcgtaacattcaacttgctctcagcatgatttcttttagacctggcctagtttattttaggttttatgtgttcttcaatgcttactaacttggtggattaagaaaattcttgcaagaggaaaaatgagtcatggtgatacttccctttgggggagagaaagaaaactctcagattaatctcaccattatgcacttggcatggattcagcattttgattgatggctgagcattgataaatctttccctgtaagccacttcatatcatatttggttttgttcacagtaggactggtagaagtctctttttcagttaaccagcagagataaagaactctgtaaccttattaccatcagagacttgttcgtatgatgtcatttcttttttttraagatattttgagtttgcaacaactgggaaaaaacatttcccagtctacccagtctattaaacaaacaaaccaaaaaattaaaaactgaaaaacatttggtgctgagaaactgggtatgctaagggtgtggctattttggcatccatctttggtatgcacagagtgggttcctctttgaccttgccctgtgtctctgatgctgcagctccactaagaagaagaaaaaggggaggtgggacagaactgggagctggtttgctactattcgtcagaaaaggaagtggggcacctacaagagagccacgaagtctctcagcagggtcttgttgaaagattgtttttgaagtggtatgaataacctgtcaagtattttcttgtaataatcacagaactaatctggctactttctactttaaggtagtcctccgtgatctgcttctaattacatctcttctttattctagccctaacaagtttttctgcactgccttcagatttcaaactattttctctgcaatctataaatttcattttttaaaatgcaagatggcattggtagcaatggcaggaaagacagggctacttaggttgattagtttccatgggacttttacacagaataatcaaccactattttttcaactactgtgtgcaaagcagctatctcactgagctgtgctaatatctgagtcaacaaaccgtagcatccccaaaacgccacaaaaattattaaaatactgtcttttaagcttcattatatagaagaatcagtgaaccaaacaaaaggataaatttagcatccagtatatttcctttaaaaaagtcttagacaggca

SEQ ID NO: 699863 - DNA, 1790 bp, Homo sapiens
gtctttctcatgttgagagaggacgtggatagctgaacatctgatgaataggtgactttcttagctatattgggaatttctggatataagaaggcacagaaggaactacccagaataagggtgatgccaaactttaggggctagactaatataaaataatataaaaatataattaatatgtaatataaaaacctttgatttaaagttttttcttattcaagcctatgacaagaagcatgagctatgctgatattctgattttaatagttgtctagtattgatggggtgaataatttcatacttctgttgctgaatatattatgcaaaaaagtcaataaaatagatacttttttctactaatgttggctaacagatcttgttttcctgtgttttatttgttttgttttgtcttccttttttttttttttttttttgagacgaagtctctaagattacaggcgtgagccagtaatccgcgcccagcctgttttgcttttttgtaggcatgaggtgaggttttagggagaagcttggaagagttgctgactgttttatccctaaagtggagtgtaaatttacttcccaaccaggggtggtggctcacgcctataatcccagcactttgggaggccaaggtgggcacatcacctaaggtcaggagtttgagaccagcttgactaacatggtgaaaccccgtctctactaaaaatacagaaattagccaggcttggtggcacgggcctgtaatcccagctactcaggaggctgaggcaggagaatggtttgaacccgggagatggaggttgcagcgagccgagatcatgccactgcactccagcctgggtgacagagtgaaaactccatatcaaaaaaaaaatttacttcccgtcaaacctgcatctgcctagtgcaggatgagtaaagctagcacatttctaatgtcttcaatctctcacattctgatacctttcttaggatgaacatggagtgcctcaggaccagcaggaggaagagccaatttctgaaaccataatagaagaagaaattcccagtatcaactctgatttaggaaatgaattgtattttgttaaactacccaagtttctcagtatagaacccaagtaagaggactgattaaaattttcaagatattaaaaaaaatgcgtagaataaatattttttcttatttgtcatgagttgactaatcacaaagatgggaaatttctcatataactttgaaaaatataaatctaggatgtgctgtggtagaaaaatgaatcactggtgagagagaattttaatgctaataatttttctagcattttggcactttcttttacataaacagatcacaatggatgaaggtgtttttcactrgtataaagctgacaaatcagaaaacaagagtgagaaagtctgctagagaaatcacaaatgttctggccaggtgcggtggctcatgcctgtaatcccaccactttgggaggctgaggcgggcagatcacttgaggtcagaagtttgagaccagcctgggcaaaatggtgaaaccctgtctctactaaaaatacaaaaattagccaggcatggtggcgcacgcctgtaatcccaactacttgggaggctgaggcgtaagaacctcttaaatccagcagatggaggttgcagtgagccgaggttctgccactgcactccagcctgggtaacagagtgagactctgtctaaaaaaaaaaaaaaatttcaaatgtttaatgcaaaatccattgcgaatctagaaaagacaattatttt

SEQ ID NO: 699864 - DNA, 847 bp, Homo sapiens
acatgtatttactgactgccatccatgcttataagcattacaggaaaggtggagtaaaatgtgacaaaaatgcagcgcaggagctatctattgtctgtacaaagagacagcaacaacactgcctgatgtttaaaggccactgccaaggattccagtgggtttttctttttaaatatattttagatgcttttatttaattaataaattcaggaaagagcattgtaaaaagtgcattgttaaaattcacggcacttaaaacaagaatgtgactagtataaaacaagaagggaaactcaaatggtgagaagtaatcatacagtggtctgttatggtactaattcaaagtaagacttgcataaatgatagctgcggcatgaaccacagtataacttcacacattcattaaaaaggcaaatttatagttaaaacttcaaagaaaaagtactgataaaaaagttttaccccaaaattgcaaacaaatacattaaaagattagaagataaaaagcaccagacattaaacaaaataaaaataataaaattcaactcaaaaggtcccctttcagcaaatagtctgtaaattatgacccttatgtaaacagtgctaaatcaaggactttttagctaaatcagtacttttatctaaggcttcaatttgtaaagagaagttaccaaacatcaagtaactcttaaaatggtacacaggttttcaagctattggtttttccttcctaactctctgaatgagtttttcttaagtagcaamaaccaatctaacaactttaaacttagaacacaggatggcatcaaatgatattaccattattcaaaaacaaaataatacctta

SEQ ID NO: 699865 - DNA, 1591 bp, Homo sapiens
aacgaagataatattgtctttgattgttgttctaaggctgcgttgggcaacatagtagatactaaccacatatggctatcacaatttaaatcagttaaaattaaataatgttaaatatcagttccctccttggactagccacatttgaagagctcaacagccacatgtgattggtagctgtcatattgaacagaacagatatagaagatctcccatgattactgaaagttctatttgacagcaatgttctaaggattaaataaaatctgcaaaaaaataaataaataaattcccaccatatattaggtattcacatatgatagttaactttttgttaactttaacagaattttaagaccatgtgccaaaatctgtgctaaatgtgttacaaatatttaatagaatgtatactgccattgtggatagaaatgggaatactcccattctatggatgaagaaacaaaggagtaagaaggttaaataattacccaaagttacaaagattaaaagctcttatgtttaggaaagttttaaaatcagagggagaaattatcagaaatttctttcaaacacttgttaatctgaccacaaatttatgtggatgcctggctgtgtgtttttatttatcctcagactaatggaaaaacttcagccctggtaaaaaggaaggcagagaattttgagtattttatacaggaaagagtagaacagggtagggaaagctcttatgtataaagaaaaatgagggctaaagtgatggcctctaagctctataatcttggatggtcggattctgaaaggactcatattacatgtctattctgtcagaaataattggaaggtatagttatttattgcaagaaataaatgtattttctctttgtgtctttgccaatcaatacctgcttcttcgaggagacctatgttctgaggaacatgtggagagtagcaattttattttgaaataggttgggaaatgggtccaagtagttgagtgtaggatctcatcaataggacaaattgcactctcaagaagtgctgtctttgtctgcctaaatcctatgtttcagacctttattcattgttttccaaaagcaatagacaagacattcaggaagaggcacaatagtatcttgtcaaacgcatgcctgattcaaaacaacacagaaacaacaactacaaggcaaaaacaaaatgaaacaaaacactttatgaatctaggaataaatgaatacaacattgtagtagtaattatattagtcaggaaggacaagctagtttatgtaacagtaacaaatataccaaaaaactcagtaacttaagtggcataaaaatccatttytcactcaaatcacagttaaactgagtaaaactgagtaatcatagctgcccttgggagtctcttccatatggtgactaaaggaccccaaatctgaaactagtgttttccaagggtggagagtcatgggagatacttgcagaagccaaacctggaagtattttacatcacttctgtgtatcttacattcaccagaacccagacacatggtgcacaccacactataagaggtcctggaatatgttggtttgc

SEQ ID NO: 699866 - DNA, 3670 bp, Homo sapiens
tattaatcactgtatacatatttcaaaggaaaacacctagcatattatataccctcaaatattaattggtactcagaggaatattgactcccttttaagtgctaatctggtatcaactgtatccaggtatcttcaaaagatcagtatgtcttccaatccctccactctagctactccttggcaagactccagctgaatttcccagttataggtggaaccagttatgcctggtggcttttgtagcaagagtcctgggccactactaacagttcacttcctctacccttcattccrttccaacattgttgaaatttggccacatttagtcttccaagataccttaggaccagataccctacaataatacctatgagctcacacactttaagatactcagtggccgctcacagccacacacccctttacaggtgctccacgtggcagccatctatactgaatagcgtaaaactattaatagatgtgggtggaaaaggttttggtttggagacagattttctatgaagacgcaattcagcatcctagttaagaacgcagctgtcaagtcagaagaactagggatgcaaacccaactctcctactgattagatgtatgaaatggtgaaatctcaactcactgaacctgaagttcctcatcaatgagaataggataataaaaatctatttttctttctttctttttttttttttggagacagggtctcactcttatcgcctaggatagagtgctgtggtgtgatcttggctcactgcagtctcaatctcctgggctcatgcaatcctcccacctcagcttctcaaatagctgggactacaggtagcacctgtagcacctgttaaagttgtgttgttaaaattgtgattgctactgtttgtgtgaggatttaggagcctatgggcaaatttatctgtataccaatcctccctcctccacaccaacataatacaaaggctggtggccccagagaacagcacttcttgggtttacaatataccaggacctgtagtcccagctaatttttttaattttttggtagagacgtggtttttccatgttgtccaggctggtctcaaactcttgcactcaagtgatccatccacctcaggcttccaaagggctaggattacaggtgtgagccaccatgccaggccgaaaatctatttcattcggttgccgtgaaaattaacttttctatgtttgcaaatcattcagtatatagtaaatgtttcagaactggttgttagaattgtgactactattgtttgtgtgaagattcaggatcctatgggcaggtggacccagagaatagtacttcttgggtttacaacataccagggtgaggacaggagaggtgccaagagggaaggggagctgatggcgccagaagatttggaagcccaggatctaaaagcagacgtccttttgttgttctgtgccacccactattgattcagagaaagaaacatgggtctcctgcctgacactgtaccacatgaggacgttcttccaatggctggaagaaaggaaggggcaaaaggttacctggagtttagttaccctcagtaattaattactaaggggtccccatgccacttttgagtccatacttgctagttctctatcagttcagccagccataatgcttctgatgctgatgtaaaaggaaaatctgttcactgatgaaaactgagtgtagagttcaaatcctggctccaacacctcttagctgcataaccttggatagcttacctggtcactccggtccttttttcctgcatttgtaaaaccaggtatgcacatataactcatatagttgctattaagaataaatatgacattcaaaagcaccagtctaataatgtgtgttccctttacctttactcaataattatcggcccctcttcctggaccacttcagacattttcttaggataccacttaggcaaacggtgacagcctgtgattgaccctctgagaggttccaggaatagcagcaaggactgctaccaccacccatgggccatattccatgtttagctgtctggtggatgccaacccccctcaaattcagaatcaaaactgaattttccttcttccctccaaaaccagatattctttcctctttgtgttcctcctggtctcttattaacactaccaccactttctccagttgcccaggcttaaaaccaattacaaacattttatttctttgacccacccactcactgagccagagaaacatgaatccttccctcagtttcctttggctccatttcttctttccattcctcccaccactggaccttaggtctagaccacacctgctcctcaattccaaatggagccctacagaaactatctcgatttcatcaagttcaagagtccaggaacttgatggtaccgctgatgctaaaaaaaaaaaaaaacagaaaagaaaagaaaaaaattgttggcacatttgagggaagctgggcaaggagggggaggatattcaaaacaccccaaggaagaataacagggtcactttttctttaaaggatgaagtttatattgtagcaagtcagaataagaagaagatacagaggactagaagtcacggttgaaattcagatcagaaatgtcatccaaatatagaaaataacaaataataaaaaccatttttccatatacagtattctgtagagtcagtgacatggcagacacggtgattctaatccacggccacagcttaggagcagtagttatttcatttatcaattaattttctttagtgcctggcatatctatttcaaaaccattaagtaattgtagctgttaactgaatgcttactatgtgccgggtactgtgctgcattatctacatattctctgccttggtccttacccaaccctatgaggggcactgcaatcattcaaagatcagaactgatagtatagagatgggggagagacatgtccctgggctcacctttacaagaggaaaatggtttgccccaataagaaaacattcatatagtacctaaagtttccaatgtcttaatgctcatcatctcatttgagtcacacaataattctctgaactaggcatgacattaattattatctctgacttacaattaagaaaagctccaagtcatgcaggccactgtcttcttgccttcaaacatctctgcatgtttctttctagagctggtggaaaaaggaccatatctgtgcccacttgtgaagggagtaaaggagtatccttggcattactaatgtctcctttctgatccgagagagagtgtgtcatgaagacactcaggcagctccaagtggaggtccacacagtaggaactgaggcctcctgccagcaactaggtgcaggagccgtgttgaaagtggatccgttagtccattcagcctccaaatgacgacagccccaactgtcaacttgaccacagtctcacgagaggccctgagccacaccatccagatgagctgctccaagactcctgacttgttcctgacataataaatatttgttgccttaagccccttaatgatgaggtaatttgttacacagcgatagataactaatgccaatccaaaccctgagatatatgaagcctgagggtttcaacatgaagaagctgacaagaactgggatcc

SEQ ID NO: 699867 - DNA, 1009 bp, Homo sapiens
ttacattcttttcttttctctttatctgtatgttcattgccagcagctaaacctagtttaagttattgtagcttcataaaatgtaaaaatgtctggaagggctagtttgctctgattactctatttttttttctgtcagtttttttctaggtattcttgccagactatttccaaacgaacattagaatcaacttatctaggtgaaaattcaacaaaaatcatgctggcagatctttttctccttctctctcctcccccctttcccctttctgtctgtytgtctctctctctctctctctctctctctctctgtctctctctcacagttagaatttggtctgtttctttattcaataccccaatatatgttcattagggttatactgtatacactacacataacagttttgttttttgttttggatattatttgataataagaattttaccacatcattaaaaaaagtttccccaagctataatttttgataattgcactcttccactattcaaatgtttatttaactctttctctcctggagtaggtttacattccattttagctatgatactgctttaagagaaattgttttaagataaatttccatagacaggtcaaaggaggtgaatatatgtaagcttttcgatgcctgttactgaatctcattctggaaaacataactgtcaatgccctctttttctcatggtaaaaaaatacataacaaaatttaccatcttaatcgtttttaaatgtacagtacgatagtgttaactgtatgtaccttgtgcaacagatctctgaaactttttcatttttcaaaatgaaaactctgtactcattgaacagcagcttcccaacttccccattcctccatcccctacccctggtaacagtcatagaaaccgtgattttatgagtttgaccactttagatacctcatataggtggaatcatgcagtatttgtcttcttgtgatgcttattttatttagcatgatatcggggctca

SEQ ID NO: 699868 - DNA, 670 bp, Homo sapiens
catcccggctaaaacgatgaaaccccgtctctactaaaaatacaaaaaattagccgggcgtagtggcgggcgcctgtagtcccagctacttgggaggctgaggcaggagaatggcgtgaacccgggaggcggagcttgcagtgagccgagatcccgccactgcactccagcctgggcgacagagcgagactccgtctcaaaaaaaaaaaaaaaaaaaaaaaaaaaagtaaataactaacttcaatagaaccgcatcgaaaatgtgtttatgaagtacttattgagcactatgtccaatatcacacttgtctctaaagaaataaaatgtttcgtttaaactgggaaccactgagttagcattttacagaagtatctaatattcagttycaaaaatcagtatctattgagcaccagtactagtaacagatttgtacctaattttcatgcatatgtgagatatcagccttagagaagtttagtgacttatccaatgtctcacaaccagaaaatgatgaagccaaattttgaacctcgatatgacttcaggttcagtattctgaactaatttacaatcaattctgatgcataagatcagacacactggccagactctggtatagatacactgcttggtgctcctttccatggctcctaccacagctgtactgtg

SEQ ID NO: 699869 - DNA, 917 bp, Homo sapiens
aaaaaaaaaaaaaaaaaaagccacaactaattaaaaaatgattggtccgggtcacctggttctctgtactgccttaagagcttaagtgtagactggcagagcccggtgcccagctaatgccgtctgtgcagcttcattcctggcccttatgtagcggggcacagccgcctctcctgggacttgattaatgatgacttaaagaaggttcttgaactcatttctcagttactgacttgagccaaaatgtatggatgttggtctcctgtctagcacaactgctttcattttaagcattgcattagaaataatgttgtattcatattttagcaaagagcatcattagctstttaagaaccgtacccccagtgacttagcaaatttggtggcggtgactctaaacagctagcactttatgggagttgcttctgtgccttgaatgttgtgacactgatgtggggtcacaggaaaaaccattttatttcctaaagctgtttatttcttaatattgaggcaatggaagaaatgaggaaacggccgtgggcaggaaggtagaagaaaatgcagcacttacattacaaactcactttacttgggttttagtttattttgcttcagttttttgttttttttttttttttttttttttttttttgagatagttttgctcttgttgcccagtctggagtgcaatggtgtgatctcggctcactgcaacctccacctcctgggttcaagcaattctcctgcctcagcctcccgaagtagctggaattacaggcacttgcaccacgcccagctaatatttttgtatttttagtagagatggggtttcaccatgttggccaggctggtcttgaactcctgacttaggtgatccaccggcctcggcctcccaaagtgccgggattacgggcgtg

SEQ ID NO: 699870 - DNA, 2325 bp, Homo sapiens
  misc_feature 1435, 1436, 1437, 1438, 1439, 1440, 1441, 1442, 1443, 1444,1445, 1446, 1447, 1448, 1449, 1450, 1451, 1452, 1453, 1454,1455, 1456, 1457, 1458, 1459, 1460, 1461, 1462, 1463, 1464,1465, 1466, 1467, 1468, 1469, 1470, 1471, 1472, 1473: n = A,T,C or G
  misc_feature 1474, 1475, 1476, 1477, 1478, 1479, 1480, 1481, 1482, 1483,1484, 1485, 1486, 1487, 1488, 1489, 1490, 1491, 1492, 1493,1494, 1495, 1496, 1497, 1498, 1499, 1500, 1501, 1502, 1503,1504, 1505, 1506, 1507, 1508, 1509, 1510, 1511, 1512: n = A,T,C or G
  misc_feature 1513, 1514, 1515, 1516, 1517, 1518, 1519, 1520, 1521, 1522,1523, 1524, 1525, 1526, 1527, 1528, 1529, 1530, 1531, 1532,1533, 1534: n = A,T,C or G
caggccccacacaattgcagagctttctgctcacacaaattggcccttcatgtttcttcctccaagatcttttgggcttcacctctcccaagtgcaggatggatctttctttggtatcctcagtgggccctttctctctcctattccaggttgttttcctgtccctaaataatgggttatactctctttatgggaagactggtttttgtttgttggttggtttttcgagacaggctcttgttctaacgcctagccgaagtgcaaaagcactatcattgctcactgcagcctccacctccaggactcaagcaatcttcctgttcaacctcctgagtaggtggaactacagatgtgtgccaacactcctggctaatttttaatttttttaaatttttttttcttttgtagagacaagttctcattatatttcccaggctggtctcaaagtcctggcctcaagtgatcctcccaaagtaccaggactataggtgtaagccaccatgcctgccctaggaataactcatttacaaggtgttactgctaagcaatgtgattggtattctaatgtggcttgcagaattagaagagaagtgattgatcatagctggaagataaagcaaatatcttaacctctattagatttaactttcaaggtcagcttgttcttctcctagcagtggaatagaacttaaatgtacgttagatatgtggtataacaaatgccagctatgaagataatgttatttatgtcaaattttatgtgaatttaaataaatctgaaagtgcaacacaaaatattttaaaataagtttttggggctaaaaataacatatgcatgaatttttcaatcaaaccaaaaacttagaggaaagatatcattacactgacagttttcccataacccgcaagatatacatttacacaaagaagtgggtattgtgaaagaaaacatatgtgagtaaagcatctattctcatcacataagcaggggtcccatctattctcctcacataagcaggaggggagcacctgtgcccaactctgaggtacagcatcagttgtttggccatgggctgtgacatttgatattaagggacagtatcctgcatgatcttgagaagaaactaaaatcaaagcgcagacagacaattaaactgcataaaacgaaaactagagaaaatatttgcaacaattatgaaagataaaggttaatggccttaatatagtaaaaggatacacaaagtattacaaagacacaaactcaaataaataagttctttttgaacagacaggcacaaaagaagaactataactatctaataaacataggaaaaattattttaacctcaatctttaaagaaaggtccctctcctggattacgagatgtaactttttaacccccctttttacagatttttaaatgataatgccacnnnnnnnnnnnnnnnnnnnnnnnnnnnnnnnnnnnnnnnnnnnnnnnnnnnnnnnnnnnnnnnnnnnnnnnnnnnnnnnnnnnnnnnnnnnnnnnnnnnnggaattcactcttggattgcatttcctgaggctttatttttagtccaaacttaataccaacttccaaatgccagagggcaacctctgtaaggcaattggccttacaggatagcattttctttactctcaacaggaaatacagaagccaagacaggtgcaaagtttgcctcttctgtaattcctcttatcaatgccattacgaaatcccatgatctatgggaaacctatggttaagtctgaaggttttaaaaaggcacaatcccaggctgagcatggtagctcattcctgtaatcccaacatttgagagaatcacttgagcccaggagtttgagaccagccaaggcaatatagtgagacctcatttcccccaaaaaaatttttaaattagccaggtgtggtggtgcatgcctgtattcccagctactcgggaggctgaggcaagaggatcacttgaacctgggaggtcaaggatccagttagccataatcataccactgcagtccagcctggatgacagagcaaaattttgttttataaaataaaaaaataaataagtcatggtacctcagggaaccccaagctcctcagaatgggttaattctaaatctggcaatggaggcaggaatggagccatcccaacagctgctacctggctcctgggcaaggcctctgtccataggtaaagccagctaataaagagcccagcayaaatacagtcctactaggctcctggggaagagtgctaactggtgttattttaatgtaccagaacccctgggaaggcacaggc

SEQ ID NO: 699871 - DNA, 3428 bp, Homo sapiens
ggctattagtagcattggtttagaaagagcctcaaaaccctctctagtggacttcttgtgagaacactaccttatatttgaatagaactattcaaggatttcacatgcaatattccatttgatactaaaatctattttaaaaaaagaagagagggcaggtattgtcttcattttgcagatgaggccaatgagattcggataggttaaatgattccttcgagttcacacagctagtaaacagcgaagcctgcttgggaacccagctgcgacttctaattggttgcttttcccgttacccctyatggagaccagaagatccagcttcttaggaggcagctgcctctgtctgtgtgtaaacaataaggcagcaaaagactgttgggtttgctctttttaaatttttaataaaccatcactgtgtttattatcaatttaataaacaagcaaccatcaagaagcaaagtaatgaacccagcagatagggacattgtgaaaatatgtttctatgagacttgtaagtgcacagttagtgagaacagaaatcaaatttttagcaaaagatgtagttcctgactggtgggggccacccagaactctctcctggagatccttctcatttacctcagctgtgagcctctgtgtgaatgatttccaaattcagttcaacaggtgttgaatcaatgacctacagaatgtcccacgcactcagaatataaacaagaatgaagctcacctcaggtttcagagctcccaggctgcattaggaaaacaaataattaaaatacaatgtgtgctgcttaagcacaggagtttgagatcaacctgggcaacatagggagaaaccgtctctacaaaaaataagaaattagccaggtgtggtagagaacgcctgcgggggctaacgtgggaggatggcttgagcccaggagaggtcgggagaggtcgagactgtagtgagccatattggtgccagtgcaccctagcctggctgagagagcaagaacccatctcaaaaacaaaacaaaacaaaacaccccccccaaaaaaacccaccacacacacaacaaaataaaaccaatgtgggcatggtggctcaagcctgtaatcctagcactttgggaggccaaggtgggtggattacttgagccctggtatttgagaccagcttgggcaacatggtgagaccctgtcttgacaaaaaataaaaaattagccaggcctggtggcgcatgcctgtactcccagatacttcggaggctgaagtgggaggatcacttgagcccatgaggttgaggctgcagtgagccatgatcatgtcactgcaccccagcctgggcaacagagtgagaccctgtctcaaacaaaacaaaacaaacaaaaaacaacgaatacatctcataatgggcaagtgctctaacgatgtagaagtttttctaaaaaataaggtgaggaagcacttacgtgtagtaaacattactttataattctacatctgaaatcgtaaatctttcaatctctaagctttccagtttccttaatgaaaataaataacatttttatttaatacttatgatgcagtggacattatgctaactgctttacaggtagtatatctcatttaatcttcataacaaccttatttttttttttttcattttacagatcaagaatctgaggctcagggaggttaaatgacttgttccaggtcccacagccaagaagtgggaagagccaatttggtctcctaagtgcatcctcttaattgtgatcctgtatggcctctttttctcctaatgcaatgttctctgatcttacctccaaactttggcctctgttttctccggtctctcagccgtcacctatccttctctgtctatcctcctaccatgccagaccactcacaggtaccccctggtgtgtggtgtggtatctctttgcctttgcacacatgttccctctacctggatgagccaatcacagagccaccaaactcatttgtaaatctggccaagtgaaagatgaaaatgagccacagtagtatacagtatatttgaaacaatggccgggcgcagtggctcatgcctgtaatcccagcactttgggaggccgaggtgggtggatcacctgaggtcaggagtttgagatcagccaggccaacatggcgaaaccctgtctctactaaaaatacaaaaaaattagccagctgttgtggcggttgcctataatcccggctactcataaggctgaggcaggagaatcacttgaacccaggggttggaggttgcagtgagccaagattgcgccactacactccagcctaggcgaaagagggaaactccatctaaaagaaaaaaaaaaaaaagaaaaagaaaggaaacgttaatgtcatttctataacactgaaaaaatttaagagattacggaagtggaaaacttatggtagcatttataagtgaaaagatcttattcatagaatgtaggaacacattctaagtgcagttgtaacattcacataatttcatcctgtattgtaggacaaagatatacacagttaatacttcaagttattatttctatatatggcattcttagactataacaaaacaaaaattttaatgtgtttcaatgcaatgtctttaaaaataagcatatgtatgtgtgtgtatgtgtggcacatatatatgtatatatacatatagtctcttaaaacctaaatcataaagcgaatctgggtcacatcatcagttttgtgaacaacaaaaattaaaatataagatataaatcaaatgctgttaaatcactatctagaggaaaatttctttgcacttagatgcttgtagtaataaattttgttaaagcataatgaattaagtatctttctaaatactgtaaaaagaaacaaagtatctccttattttacaatccagttttgccgtatcttaaaattttgccacattgtatgtaaaattagggacttgaaaaatcagttttgttaattttttgtttttaagagacatgcggtctcactatgttgcccaggctggtcgggaaatcctgggctctgcccgccttggcctcccaaagtgctgggattacaggcgtgagccactgtacatggccagttttgttaatttttaaagaactgcattggtttgcttatcaattctatttttggtttttatcttatataaccaatgaaattaacagctggcttgggaaaaaaatgataaatcactagcttagtaaaataaaaggaaaattcaaattaacaaaatcatggacagagaaaagccaacataactcaaacatattttaatgacaaaatgttattttaagctataagcttataaaatatattaaagaaatggaagaggataactgcttataatagtgtaaggatactacactcaaggcagctggagagaaac

SEQ ID NO: 699872 - DNA, 3428 bp, Homo sapiens
ggctattagtagcattggtttagaaagagcctcaaaaccctctctagtggacttcttgtgagaacactaccttatatttgaatagaactattcaaggatttcacatgcaatattccatttgatactaaaatctattttaaaaaaagaagagagggcaggtattgtcttcattttgcagatgaggccaatgagattcggataggttaaatgattccttcgagttcacacagctagtaaacagcgaagcctgcttgggaacccagctgcgacttctaattggttgcttttcccgttaccccttatggagaccagaagatccarcttcttaggaggcagctgcctctgtctgtgtgtaaacaataaggcagcaaaagactgttgggtttgctctttttaaatttttaataaaccatcactgtgtttattatcaatttaataaacaagcaaccatcaagaagcaaagtaatgaacccagcagatagggacattgtgaaaatatgtttctatgagacttgtaagtgcacagttagtgagaacagaaatcaaatttttagcaaaagatgtagttcctgactggtgggggccacccagaactctctcctggagatccttctcatttacctcagctgtgagcctctgtgtgaatgatttccaaattcagttcaacaggtgttgaatcaatgacctacagaatgtcccacgcactcagaatataaacaagaatgaagctcacctcaggtttcagagctcccaggctgcattaggaaaacaaataattaaaatacaatgtgtgctgcttaagcacaggagtttgagatcaacctgggcaacatagggagaaaccgtctctacaaaaaataagaaattagccaggtgtggtagagaacgcctgcgggggctaacgtgggaggatggcttgagcccaggagaggtcgggagaggtcgagactgtagtgagccatattggtgccagtgcaccctagcctggctgagagagcaagaacccatctcaaaaacaaaacaaaacaaaacaccccccccaaaaaaacccaccacacacacaacaaaataaaaccaatgtgggcatggtggctcaagcctgtaatcctagcactttgggaggccaaggtgggtggattacttgagccctggtatttgagaccagcttgggcaacatggtgagaccctgtcttgacaaaaaataaaaaattagccaggcctggtggcgcatgcctgtactcccagatacttcggaggctgaagtgggaggatcacttgagcccatgaggttgaggctgcagtgagccatgatcatgtcactgcaccccagcctgggcaacagagtgagaccctgtctcaaacaaaacaaaacaaacaaaaaacaacgaatacatctcataatgggcaagtgctctaacgatgtagaagtttttctaaaaaataaggtgaggaagcacttacgtgtagtaaacattactttataattctacatctgaaatcgtaaatctttcaatctctaagctttccagtttccttaatgaaaataaataacatttttatttaatacttatgatgcagtggacattatgctaactgctttacaggtagtatatctcatttaatcttcataacaaccttatttttttttttttcattttacagatcaagaatctgaggctcagggaggttaaatgacttgttccaggtcccacagccaagaagtgggaagagccaatttggtctcctaagtgcatcctcttaattgtgatcctgtatggcctctttttctcctaatgcaatgttctctgatcttacctccaaactttggcctctgttttctccggtctctcagccgtcacctatccttctctgtctatcctcctaccatgccagaccactcacaggtaccccctggtgtgtggtgtggtatctctttgcctttgcacacatgttccctctacctggatgagccaatcacagagccaccaaactcatttgtaaatctggccaagtgaaagatgaaaatgagccacagtagtatacagtatatttgaaacaatggccgggcgcagtggctcatgcctgtaatcccagcactttgggaggccgaggtgggtggatcacctgaggtcaggagtttgagatcagccaggccaacatggcgaaaccctgtctctactaaaaatacaaaaaaattagccagctgttgtggcggttgcctataatcccggctactcataaggctgaggcaggagaatcacttgaacccaggggttggaggttgcagtgagccaagattgcgccactacactccagcctaggcgaaagagggaaactccatctaaaagaaaaaaaaaaaaaagaaaaagaaaggaaacgttaatgtcatttctataacactgaaaaaatttaagagattacggaagtggaaaacttatggtagcatttataagtgaaaagatcttattcatagaatgtaggaacacattctaagtgcagttgtaacattcacataatttcatcctgtattgtaggacaaagatatacacagttaatacttcaagttattatttctatatatggcattcttagactataacaaaacaaaaattttaatgtgtttcaatgcaatgtctttaaaaataagcatatgtatgtgtgtgtatgtgtggcacatatatatgtatatatacatatagtctcttaaaacctaaatcataaagcgaatctgggtcacatcatcagttttgtgaacaacaaaaattaaaatataagatataaatcaaatgctgttaaatcactatctagaggaaaatttctttgcacttagatgcttgtagtaataaattttgttaaagcataatgaattaagtatctttctaaatactgtaaaaagaaacaaagtatctccttattttacaatccagttttgccgtatcttaaaattttgccacattgtatgtaaaattagggacttgaaaaatcagttttgttaattttttgtttttaagagacatgcggtctcactatgttgcccaggctggtcgggaaatcctgggctctgcccgccttggcctcccaaagtgctgggattacaggcgtgagccactgtacatggccagttttgttaatttttaaagaactgcattggtttgcttatcaattctatttttggtttttatcttatataaccaatgaaattaacagctggcttgggaaaaaaatgataaatcactagcttagtaaaataaaaggaaaattcaaattaacaaaatcatggacagagaaaagccaacataactcaaacatattttaatgacaaaatgttattttaagctataagcttataaaatatattaaagaaatggaagaggataactgcttataatagtgtaaggatactacactcaaggcagctggagagaaac

SEQ ID NO: 699873 - DNA, 3428 bp, Homo sapiens
ggctattagtagcattggtttagaaagagcctcaaaaccctctctagtggacttcttgtgagaacactaccttatatttgaatagaactattcaaggatttcacatgcaatattccatttgatactaaaatctattttaaaaaaagaagagagggcaggtattgtcttcattttgcagatgaggccaatgagattcggataggttaaatgattccttcgagttcacacagctagtaaacagcgaagcctgcttgggaacccagctgcgacttctaattggttgcttttcccgttaccccttatggagaccagaagatccagcttcttaggaggcagctgcctctgtctgtgtgtaaacaataaggcagcaaaagactgttgggtttgctctttttaaatttttaataaaccatcactgtgtttattatcaatttaataaacaagcaaccatcaagaagcaaagtaatgaacccagcagatagggacattgtgaaaatatgtttctatgagacttgtaagtgcacagttagtgagaacagaaatcaaatttttagcaaaagatgtagttcctgactggtgggggccacccagaactctctcctggagatccttctcatttacctcagctgtgagcctctgtgtgaatgatttccaaattcagttcaacaggtgttgaatcaatgacctacagaatgtcccacgcactcagaatataaacaagaatgaagctcacctcaggtttcagagctcccaggctgcattaggaaaacaaataattaaaatacaatgtgtgctgcttaagcacaggagtttgagatcaacctgggcaacatagggagaaaccgtctctacaaaaaataagaaattagccaggtgtggtagagaacgcctgcgggggctaacgtgggaggatggcttgagcccaggagaggtcgggagaggtcgagactgtagtgagccatattggtgccagtgcaccctagcctggctgagagagcaagaacccatctcaaaaacaaaacaaaacaaaacaccccccccaaaaaaacccaccacacacacaacaaaataaaaccaatgtgggcatggtggctcaagcctgtaatcctagcactttgggaggccaaggtgggtggattacttgagccctggtatttgagaccagcttgggcaacatggtgagaccctgtcttgacaaaaaataaaaaattagccaggcctggtggcgcaygcctgtactcccagatacttcggaggctgaagtgggaggatcacttgagcccatgaggttgaggctgcagtgagccatgatcatgtcactgcaccccagcctgggcaacagagtgagaccctgtctcaaacaaaacaaaacaaacaaaaaacaacgaatacatctcataatgggcaagtgctctaacgatgtagaagtttttctaaaaaataaggtgaggaagcacttacgtgtagtaaacattactttataattctacatctgaaatcgtaaatctttcaatctctaagctttccagtttccttaatgaaaataaataacatttttatttaatacttatgatgcagtggacattatgctaactgctttacaggtagtatatctcatttaatcttcataacaaccttatttttttttttttcattttacagatcaagaatctgaggctcagggaggttaaatgacttgttccaggtcccacagccaagaagtgggaagagccaatttggtctcctaagtgcatcctcttaattgtgatcctgtatggcctctttttctcctaatgcaatgttctctgatcttacctccaaactttggcctctgttttctccggtctctcagccgtcacctatccttctctgtctatcctcctaccatgccagaccactcacaggtaccccctggtgtgtggtgtggtatctctttgcctttgcacacatgttccctctacctggatgagccaatcacagagccaccaaactcatttgtaaatctggccaagtgaaagatgaaaatgagccacagtagtatacagtatatttgaaacaatggccgggcgcagtggctcatgcctgtaatcccagcactttgggaggccgaggtgggtggatcacctgaggtcaggagtttgagatcagccaggccaacatggcgaaaccctgtctctactaaaaatacaaaaaaattagccagctgttgtggcggttgcctataatcccggctactcataaggctgaggcaggagaatcacttgaacccaggggttggaggttgcagtgagccaagattgcgccactacactccagcctaggcgaaagagggaaactccatctaaaagaaaaaaaaaaaaaagaaaaagaaaggaaacgttaatgtcatttctataacactgaaaaaatttaagagattacggaagtggaaaacttatggtagcatttataagtgaaaagatcttattcatagaatgtaggaacacattctaagtgcagttgtaacattcacataatttcatcctgtattgtaggacaaagatatacacagttaatacttcaagttattatttctatatatggcattcttagactataacaaaacaaaaattttaatgtgtttcaatgcaatgtctttaaaaataagcatatgtatgtgtgtgtatgtgtggcacatatatatgtatatatacatatagtctcttaaaacctaaatcataaagcgaatctgggtcacatcatcagttttgtgaacaacaaaaattaaaatataagatataaatcaaatgctgttaaatcactatctagaggaaaatttctttgcacttagatgcttgtagtaataaattttgttaaagcataatgaattaagtatctttctaaatactgtaaaaagaaacaaagtatctccttattttacaatccagttttgccgtatcttaaaattttgccacattgtatgtaaaattagggacttgaaaaatcagttttgttaattttttgtttttaagagacatgcggtctcactatgttgcccaggctggtcgggaaatcctgggctctgcccgccttggcctcccaaagtgctgggattacaggcgtgagccactgtacatggccagttttgttaatttttaaagaactgcattggtttgcttatcaattctatttttggtttttatcttatataaccaatgaaattaacagctggcttgggaaaaaaatgataaatcactagcttagtaaaataaaaggaaaattcaaattaacaaaatcatggacagagaaaagccaacataactcaaacatattttaatgacaaaatgttattttaagctataagcttataaaatatattaaagaaatggaagaggataactgcttataatagtgtaaggatactacactcaaggcagctggagagaaac

SEQ ID NO: 699874 - DNA, 913 bp, Homo sapiens
tttttttttttttttgagagggagtcttgctctattgcccaggctggagtgcagtggcacaatctcagctcactgcagcctccacctcccaggttcaagtgattttcctgccttggcctcccaagtaactgggattataagcgtacaccaccatgcccggctaatttctgtaattttagtagagacggggttttaccatgttggccaggctggtcgcaaactcctgacctcgggtgatccacctacctcagcctcccaaagtgctgggattacagacataagccaccacgcctggccttcctcagctttgatagatagatggtttgctgagtgagctagctgtgttgggcctgcacaggcagccatgtttctataatgaaccacctaaacagtactttgagttgtacccacataatttttgaggttataaggaaaatcaagtagtattgctagtctgtctgaacaccaaataatacatcctgtgtaactaggcagttgtcttgcagggggtaataggtgtctgacttgctagcatttatcatgcaacctgaagttttgcttcatccacagcagcaagatggaacttattgatgataacaccgtagtcagggcacgaggtttaccatggcagtcttcagatcaagatattgcaagattcttcaaaggactcaatattgccaagttggttttcttaaatatctattttacttaacaatcccaaagggataatggattttctatcttttttttcctcactgtatttttttttctacctgcygtctgttttattattctcaaaggggaggtgcagcactttgtctgaatgctcagggtcgaaggaacggagaagctctggttaggtttgtaagtgaggagcaccgagacctagcactacagaggcacaaacatcaca

SEQ ID NO: 699875 - DNA, 617 bp, Homo sapiens
cactttatgaggctgagatgggcaaatcacttgaggttaggagtttgagaccagcctggccaacatggtgaaactccatctactaaaaaatacaaaaagtagctgggtgtggtggtcagtatctgtaatcccagctactagggaggctaaggcaagagagttgcttgaacccaggagacggaggctgtagtgagccaagattgtgccactgcactccagcctgggcgtcacagcgagactccgtctcaaaaaataaataataaaaatggctgggtgtggtggctcacccctgtaatcccagcacttcgggaggcygaggcaggcagatcacgaggtcaggggttcaagaccagcctggccaatatggtgaaaccccacctctactaataccaaaattgccagggcatggtggtgggcacctatagttccagctactccggaggccaaggcagaagaatcgcttgaacctgggaggcggtggttgcagtgagccaagatcatgccactgcactccagtctgggtgacagagcgagactcagtctcaaaaaataaaaataaatgatgctgtcacaacagcatctggaagagcaggtgaaatgaaagcatgtatgcctca

SEQ ID NO: 699876 - DNA, 617 bp, Homo sapiens
cactttatgaggctgagatgggcaaatcacttgaggttaggagtttgagaccagcctggccaacatggtgaaactccatctactaaaaaatacaaaaagtagctgggtgtggtggtcagtatctgtaatcccagctactagggaggctaaggcaagagagttgcttgaacccaggagacggaggctgtagtgagccaagattgtgccactgcactccagcctgggcgtcacagcgagactccgtctcaaaaaataaataataaaaatggctgggtgtggtggctcacccctgtaatcccagcacttcgggaggccgaggcaggcagatcacgaggtcaggggttcaagaccarcctggccaatatggtgaaaccccacctctactaataccaaaattgccagggcatggtggtgggcacctatagttccagctactccggaggccaaggcagaagaatcgcttgaacctgggaggcggtggttgcagtgagccaagatcatgccactgcactccagtctgggtgacagagcgagactcagtctcaaaaaataaaaataaatgatgctgtcacaacagcatctggaagagcaggtgaaatgaaagcatgtatgcctca

SEQ ID NO: 699877 - DNA, 617 bp, Homo sapiens
cactttatgaggctgagatgggcaaatcacttgaggttaggagtttgagaccagcctggccaacatggtgaaactccatctactaaaaaatacaaaaagtagctgggtgtggtggtcagtatctgtaatcccagctactagggaggctaaggcaagagagttgcttgaacccaggagacggaggctgtagtgagccaagattgtgccactgcactccagcctgggcgtcacagcgagactccgtctcaaaaaataaataataaaaatggctgggtgtggtggctcacccctgtaatcccagcacttcgggaggccgaggcaggcagatcacgaggtcaggggttcaagaccagcctggccaatatggtgaaaccccacctctactaataccaaaattgccagggcatggtggtgggcacctatagttccagctactccggaggccaaggcagaagaatcgcttgaacctgggaggcggtggttgcagtgagccaagatcatgccactgcactccagtctgkgtgacagagcgagactcagtctcaaaaaataaaaataaatgatgctgtcacaacagcatctggaagagcaggtgaaatgaaagcatgtatgcctca

SEQ ID NO: 699878 - DNA, 617 bp, Homo sapiens
cactttatgaggctgagatgggcaaatcacttgaggttaggagtttgagaccagcctggccaacatggtgaaactccatctactaaaaaatacaaaaagtagctgggtgtggtggtcagtatctgtaatcccagctactagggaggctaaggcaagagagttgcttgaacccaggagacggaggctgtagtgagccaagattgtgccactgcactccagcctgggcgtcacagcgagactccgtctcaaaaaataaataataaaaatggctgggtgtggtggctcacccctgtaatcccagcacttcgggaggccgaggcaggcagatcacgaggtcaggggttcaagaccagcctggccaatatggtgaaaccccacctctactaataccaaaattgccagggcatggtggtgggcacctatagttccagctactccggaggccaaggcagaagaatcgcttgaacctgggaggcggtggttgcagtgagccaagatcatgccactgcactccagtctgggtgacagagcgagactcagtctcaaaaaataaaaataaatgaygctgtcacaacagcatctggaagagcaggtgaaatgaaagcatgtatgcctca

SEQ ID NO: 699879 - DNA, 617 bp, Homo sapiens
cactttatgaggctgagatgggcaaatcacttgaggttaggagtttgagaccagcctggccaacatggtgaaactccatctactaaaaaatacaaaaagtagctgggtgtggtggtcagtatctgtaatcccagctactagggaggctaaggcaagagagttgcttgaacccaggagacggaggctgtagtgagccaagattgtgccactgcactccagcctgggcgtcacagcgagactccgtctcaaaaaataaataataaaaatggctgggtgtggtggctcacccctgtaatcccagcacttcgggaggccgaggcaggcagatcacgaggtcaggggttcaagaccagcctggccaatatggtgaaaccccacctctactaataccaaaattgccagggcatggtggtgggcacctatagttccagctactccggaggccaaggcagaagaatcgcttgaacctgggaggcggtggttgcagtgagccaagatcatgccactgcactccagtctgggtgacagagcgagactcagtctcaaaaaataaaaataaatgatgctgtcacaacagcatctggaagagcaggtgaaatgaaagcatrtatgcctca

SEQ ID NO: 699880 - DNA, 1182 bp, Homo sapiens
cttaaaagttattaaaacatgcaaacattattttcctacgttaattggagccttgccctcattttccagtacatagttggttaccctgcaagttaaataactctaattattaagattcaaaacattacatgtatcattgaaggcaattaagatgatttgaatattattaaatgaaaatgaactatttcttttttcaaaaaactaaataaatatgcttagggatttttacattgttaaaattgcctcaaaaataattgggcaattcaatataataaagtgaatgcaataaataattttaattcataataacattaagtaatatgcttatttgcatgactaggataaagaatggattgtgcaaatactaaacagagactaatagggaaaagcattggttattatacttttaaacctgtagttcataagttattacactttactatggttgaattggcctaastccactatagcatcccttacaagagttcttaatctcctcgcatttatcatgtgaggaaatccccataaaacagaccaaataaactacataggaccttccttaagcaaggtttcccactcagtggtatactgtattttttggctggaggtagagaaatggaaactacttaagcagctgtgctttggatgagagttttattgattgtatatacttcaaatgtttctcttcactagccatgttttctttgtaactcttggcgaatattcccaaatactccagtggaaatgttaacaaaagttcttaaaggtggctgcagggccagggcatttagagtggacccttgaccattgatactgaccctttggacacttggtgaagaaaacaatggttcatgtttgatgagatctggatgagactaaaggcaaatatggaatatattaaataagcctgccatgagaagaaataaaatggtttctgataaaaacagagtcattcccaactataaataagaagacttttgattaaagaaattgcaaatgtaataaaaaatgtttgtacaaattaaatgatttcatatttaattagaataataaatatagggtttaatttcagtaaatggggttatacgcagatactggaaaactgaaatgctactgtgtaactttttaaccatttcaaggatttgaatttcttagtgtatttgtgcttttaacagtttcttc

SEQ ID NO: 699881 - DNA, 626 bp, Homo sapiens
  misc_feature 117: n = A,T,C or G
taatagtatatgattgaacaacttttatatttatatatgtatcccacattttaataaatatttgtccagcactttggaaggctgagcttgagcttcaggagttcaagagaagcctgngcaacataacaaaaccccatctctacaacaaaaattacataacttagctagacatggtggtgtgctcctgtagtcctagctacttaggaggttgagatggaaggatggcttgagtcttgagtctgggaggtggaggttgcagtgagctgagatcacaccactggactccagcctgggcaacagagccagatcctgtctcatacacacacacacacacacacacacacacacacacacacacacacgtatatgtatatatatatggataactttatatagttaatatatattatatatataaatcatatatataacttaatatagttaataatagaggtgttaatgaattggttttatctagatacatggaaaaactttcttactcaaatggcaaaactttttacttacaggaaataaagtccagaatgaattcttcctagattttgttggaatggattttatggacagaaaccgtgagaaaayctgttttcataaataagtctatggga

SEQ ID NO: 699882 - DNA, 1106 bp, Homo sapiens
tgttcttacaatttgtagtataatactgtatatctctataaatatatatgtgactgtttttctgatagatgcaacatggtggaaatgtcatcataaatgtcggtctgcctttgtttatagttttcagatgtgtatatgcagttttttatacaacagaaaaattgccacatgagtcaaatagcataggttagaaaagttctcatttgccaaaaawatgtgactttcataatagtgagttgtttttgatttaaaatgtttctatctgtagaggcattttataagtttttatggggatactagcaatgggatgtgaaacctgagttcattagatcattgggtgataatggaacccttatgtgtatacaatatacatggttatatgttttttaaagcataggagctattatgtctgcatggttctaaatatatatacacacacgtaaacacatatctatatatctatctatatagatagatagataaatacatacatatgtagtgaaagcttttgtttcctccctcacataggcagattatttgtgtgtgtaaatgagcagctgaaggggaattttgttacatgtgtataagacagtcacaatatataattgttttgctttaattgtttagtctttgatttgtaggaattgccaacacgtatatttgtgtgtatgcaggtttatatataaatacatatcactgtataaacaacatttattgtcataggatagaaatattcttaagttgccagagatactgtatggctgctaaatgtatagtagaaaaatgttaccttttgctttttagcatctgcatacagattactaataggcgtatattgtgaccagtaaaccactagacaagggcataaacactttagtttgatcagtagaattgctatgccatgtttaaatgggatttatttggttgatgcagaatatataattgtatctagaagataaatattacaaaaatattttaatatacaatttctgtcatatttttggaaatatatttttattcaaaagtagaatcattgttgccaatagagttagcatctttgtgtgcttgtgaggtttgattttgagggttttcttggttttgttttg

SEQ ID NO: 699883 - DNA, 1431 bp, Homo sapiens
ttagtgtcacattcaaaaacttaytgacaaaaacaagaagggtttccatgtgttttcttctagttttacaatgtcaagatgtatctttaagtacttaatttattttgagttgatttttgtgtatgttgtaaggtaaggattcagtttactttttttttttaatttgcggatatccagtatgccaaatatgattagttagataaactgtgctctgagcacccatgtcaaagataaattgagtagagtacatggatttatttctgcattcttcattcttttccattagattatgtctgttttttgccagtattctagtattttgaattactatagctttgttatatacttggaaatcaagaagtgcctccacctttgtgtttcatgctgaatattgatttagctattttggttcttttgtggatccagataaattgtatgatttttttctctatttctggaaaaatgtgattgtgattttgataggaattatagtgaatcagtagataactttgggtagtatggatattttgacaatattaattagtcccagtggtggtgttgaggccgtgttgacctggaggcactggggtcagtgatagtgttgtcaagttggctgcaggatgggatggtgcctgggaggtcagtgcataaaaatcctatggatgtgatcaaggaaagggtgatggaaggtgatgtgtcctgtctgcttggtccttgtaggatcaggcaggacatcctgtaataaaaggagacattaccttcggatgtcctgagggcatggtgcaggcaccaggactgagtggaggggaggaagctcatgtcttgaggtcctttggctacatggggaagactgtctctgggcttgatgctgagttccagactgacgtgctggctgttgtgatggtgctctccagtgctggttgtggttggtttttggctaggtacacctcacctgggacagtggccaaagacagtgtcagttccagacatcagaagccccatgaggaagagcatgtgctcgcgccaggagtggtggctgttaggggagggacctcagacctatgtctgcatggcctgaggtcagagttcacatcctactgattgaagaccttgttcttgagctgtccggttgccacagggtcggacctggaggctgcagaccatcgtggccctttgcagtgttcggaaacatatgcgcaccccagggagggacacacacacacacacacacacacacacacacacacacacacacacgcaaactcacaaacacaacacacagacagaaaatgacaaataaacacacacactcacacacacacacacaggagcccacagaaaaaagcaaatagacgcagaaacgggcacgtgcagtagttctggccacacatgttccctaggtatccacagaatggcatgggtattgtatat

SEQ ID NO: 699884 - DNA, 1120 bp, Homo sapiens
tgttgtattaaagcactaggtctggcaaacttatagcccaacaaatgaaaactattatttattaatagtaggttaaaatcacagaacaacaatagtgtgtccaaagtctgagcctttggtgttgtgagaaatggagaaatggagctacttatataggtaaacaaacaggaattacctattggctattgggaccgattacccccatatgactctgagtttatcttcgtgacagctggggaacagcagagcagagagacagaagggctttctttgaaacattttcttaaggaatcaggaagagcaaaacaaataaaatacatagagtcttcaatcccaaatgaattcctttccacagggttaataaaaataggatgcyaggctctggactgaaatatcattaagcattaatcaagctgccctctgacccacttcaccggagctgcttactaaccaaaagtctcataggctgggacataggtcactaacttcctcgttgtgtttatagataacatcttgagtgtcagaagcctaagactttttatttgagatgttttttagattctggattccagcaaatggctgataccaaccagtctgaacaccctcaccaagaaaccaaatcagcaaaaaaaaatgcagttccttcatgtccccatcccacgacttcaccctgcatgctttgataaatcactgacctccacacctcttcccaccactcatttaaaccctttaaaatctctatccccaaatttcttggggggtagctttttggcttcctcctgtctcctgatttagctgccttgcagttatatctctttctctgctgcaacttggtgtctcagtgtatcgacttgccacacattgagtatatgaaccttgcacagttacacaaatgtcctgcaaacactggccccatcacgaactaaagtcaccaggacagtttggcctattcaacaaccacctctttattcagccacatcctctaagctcagttccacctgattctcactgtcaaacttaaaaaacactaacctttatcatagtgtcaataattagaactatcaatatttaatacctactctgtgccagggaccatactatctctctgacatattatttt

SEQ ID NO: 699885 - DNA, 1120 bp, Homo sapiens
tgttgtattaaagcactaggtctggcaaacttatagcccaacaaatgaaaactattatttattaatagtaggttaaaatcacagaacaacaatagtgtgtccaaagtctgagcctttggtgttgtgagaaatggagaaatggagctacttatataggtaaacaaacaggaattacctattggctattgggaccgattacccccatatgactctgagtttatcttcgtgacagctggggaacagcagagcagagagacagaagggctttctttgaaacattttcttaaggaatcaggaagagcaaaacaaataaaatacatagagtcttcaatcccaaatgaattcctttccacagggttaataaaaataggatgctaggctctggactgaaataycattaagcattaatcaagctgccctctgacccacttcaccggagctgcttactaaccaaaagtctcataggctgggacataggtcactaacttcctcgttgtgtttatagataacatcttgagtgtcagaagcctaagactttttatttgagatgttttttagattctggattccagcaaatggctgataccaaccagtctgaacaccctcaccaagaaaccaaatcagcaaaaaaaaatgcagttccttcatgtccccatcccacgacttcaccctgcatgctttgataaatcactgacctccacacctcttcccaccactcatttaaaccctttaaaatctctatccccaaatttcttggggggtagctttttggcttcctcctgtctcctgatttagctgccttgcagttatatctctttctctgctgcaacttggtgtctcagtgtatcgacttgccacacattgagtatatgaaccttgcacagttacacaaatgtcctgcaaacactggccccatcacgaactaaagtcaccaggacagtttggcctattcaacaaccacctctttattcagccacatcctctaagctcagttccacctgattctcactgtcaaacttaaaaaacactaacctttatcatagtgtcaataattagaactatcaatatttaatacctactctgtgccagggaccatactatctctctgacatattatttt

SEQ ID NO: 699886 - DNA, 1120 bp, Homo sapiens
tgttgtattaaagcactaggtctggcaaacttatagcccaacaaatgaaaactattatttattaatagtaggttaaaatcacagaacaacaatagtgtgtccaaagtctgagcctttggtgttgtgagaaatggagaaatggagctacttatataggtaaacaaacaggaattacctattggctattgggaccgattacccccatatgactctgagtttatcttcgtgacagctggggaacagcagagcagagagacagaagggctttctttgaaacattttcttaaggaatcaggaagagcaaaacaaataaaatacatagagtcttcaatcccaaatgaattcctttccacagggttaataaaaataggatgctaggctctggactgaaatatcattaagcattaatcaagctgccctctgacccacttcaccggagctgcttactaaccaaaagtctcataggctgggacataggtcactaacttcctcgttgtgtttatagataacatcttgagtgtcagaagcctaagactttttatttgagatgttttttagattctggattccagcraatggctgataccaaccagtctgaacaccctcaccaagaaaccaaatcagcaaaaaaaaatgcagttccttcatgtccccatcccacgacttcaccctgcatgctttgataaatcactgacctccacacctcttcccaccactcatttaaaccctttaaaatctctatccccaaatttcttggggggtagctttttggcttcctcctgtctcctgatttagctgccttgcagttatatctctttctctgctgcaacttggtgtctcagtgtatcgacttgccacacattgagtatatgaaccttgcacagttacacaaatgtcctgcaaacactggccccatcacgaactaaagtcaccaggacagtttggcctattcaacaaccacctctttattcagccacatcctctaagctcagttccacctgattctcactgtcaaacttaaaaaacactaacctttatcatagtgtcaataattagaactatcaatatttaatacctactctgtgccagggaccatactatctctctgacatattatttt

SEQ ID NO: 699887 - DNA, 1120 bp, Homo sapiens
tgttgtattaaagcactaggtctggcaaacttatagcccaacaaatgaaaactattatttattaatagtaggttaaaatcacagaacaacaatagtgtgtccaaagtctgagcctttggtgttgtgagaaatggagaaatggagctacttatataggtaaacaaacaggaattacctattggctattgggaccgattacccccatatgactctgagtttatcttcgtgacagctggggaacagcagagcagagagacagaagggctttctttgaaacattttcttaaggaatcaggaagagcaaaacaaataaaatacatagagtcttcaatcccaaatgaattcctttccacagggttaataaaaataggatgctaggctctggactgaaatatcattaagcattaatcaagctgccctctgacccacttcaccggagctgcttactaaccaaaagtctcataggctgggacataggtcactaacttcctcgttgtgtttatagataacatcttgagtgtcagaagcctaagactttttatttgagatgttttttagattctggattccagcaaatggctgataccaaccagtctgaacaccctcaccaagaaaccaaatcagcaaaaaaaaatgcagttccttcatgtccccatcccacgacttcaccctgcatgctttgataaatcactgacctccacacctcttcccaccactcatttaaaccctttaaaatctctatccccaaatttcttggggggtagctttttggcttcctcctgtctcctgatttagctgccttgcagttatayctctttctctgctgcaacttggtgtctcagtgtatcgacttgccacacattgagtatatgaaccttgcacagttacacaaatgtcctgcaaacactggccccatcacgaactaaagtcaccaggacagtttggcctattcaacaaccacctctttattcagccacatcctctaagctcagttccacctgattctcactgtcaaacttaaaaaacactaacctttatcatagtgtcaataattagaactatcaatatttaatacctactctgtgccagggaccatactatctctctgacatattatttt

SEQ ID NO: 699888 - DNA, 1120 bp, Homo sapiens
tgttgtattaaagcactaggtctggcaaacttatagcccaacaaatgaaaactattatttattaatagtaggttaaaatcacagaacaacaatagtgtgtccaaagtctgagcctttggtgttgtgagaaatggagaaatggagctacttatataggtaaacaaacaggaattacctattggctattgggaccgattacccccatatgactctgagtttatcttcgtgacagctggggaacagcagagcagagagacagaagggctttctttgaaacattttcttaaggaatcaggaagagcaaaacaaataaaatacatagagtcttcaatcccaaatgaattcctttccacagggttaataaaaataggatgctaggctctggactgaaatatcattaagcattaatcaagctgccctctgacccacttcaccggagctgcttactaaccaaaagtctcataggctgggacataggtcactaacttcctcgttgtgtttatagataacatcttgagtgtcagaagcctaagactttttatttgagatgttttttagattctggattccagcaaatggctgataccaaccagtctgaacaccctcaccaagaaaccaaatcagcaaaaaaaaatgcagttccttcatgtccccatcccacgacttcaccctgcatgctttgataaatcactgacctccacacctcttcccaccactcatttaaaccctttaaaatctctatccccaaatttcttggggggtagctttttggcttcctcctgtctcctgatttagctgccttgcagttatatctctttctctgctgcaacttggtgtctcagtgtatygacttgccacacattgagtatatgaaccttgcacagttacacaaatgtcctgcaaacactggccccatcacgaactaaagtcaccaggacagtttggcctattcaacaaccacctctttattcagccacatcctctaagctcagttccacctgattctcactgtcaaacttaaaaaacactaacctttatcatagtgtcaataattagaactatcaatatttaatacctactctgtgccagggaccatactatctctctgacatattatttt

SEQ ID NO: 699889 - DNA, 999 bp, Homo sapiens
ttggttctttaaccatggtccttgactcgtgaggatctctgcatatgtagcatatgtacttaaacaagacaaacacttgtacaaccaagaaccttccgggtctgatgaaaagtaataaccttagtttcaaaaatttgcagtgcaaaaatcacaaactactccagaaaatcatttattgaaagattgcagaaacacaaacaagattagaaaatccaagaagctgacctaatctatgaatccaaaaaatgctacaaaataaaataatgacatttaaaataaaatcagcatgttaaagatggaataaaaatataactaaggaagcatatactattaaaatagtgtgtagaaattttagagaaaaaattgccattaaaattaaaggtataatagtttaatagcagacactacttaaaagaaaatcgcattgataaagcatatccagtcatttgtagaataaatgtcataaatctacacctaaagaaagacctacatgtaagagctaacactaagaaaacaatggagtgatactacacggccttggattcagcagtgtactgattcccagatatgacactgaaagtgcaagtaacaaaagcattstatctacatggaaaaaataaaactagacgcttacttcctaccaatctaaaaattcgttccaggcttactaaaagtacaaatatgaaaaacaaaacttaaaagttctggaatacaatatttaatgtctctttcctttaaagtggtgaaagatatcttaaggtacaaaaaaatcataaaataaaggaaaagatggaaatttagctaattaaaatctctgagaaaaatgtagtaaattaaaaatacaaactacagactgggaaaatatatttccaactcatgtaattgacagtggactccgatcaaatatatattaaaaaatacttaaaacccaataatgaaagataaataacccaatagaaaagtggccaaaggtcatgaatggcaatttatagaagagga

SEQ ID NO: 699890 - DNA, 999 bp, Homo sapiens
ttggttctttaaccatggtccttgactcgtgaggatctctgcatatgtagcatatgtacttaaacaagacaaacacttgtacaaccaagaaccttccgggtctgatgaaaagtaataaccttagtttcaaaaatttgcagtgcaaaaatcacaaactactccagaaaatcatttattgaaagattgcagaaacacaaacaagattagaaaatccaagaagctgacctaatctatgaatccaaaaaatgctacaaaataaaataatgacatttaaaataaaatcagcatgttaaagatggaataaaaatataactaaggaagcatatactattaaaatagtgtgtagaaattttagagaaaaaattgccattaaaattaaaggtataatagtttaatagcagacactacttaaaagaaaatcgcattgataaagcatatccagtcatttgtagaataaatgtcataaatctacacctaaagaaagacctacatgtaagagctaacactaagaaaacaatggagtgatactacacggccttggattcagcagtgtactgattcccagatatgacactgaaagtgcaagtaacaaaagcattctatctacatggaaaaaataaaactagacgcttacttcctaccaatctaaaaattcgttccaggcttactaaaagtacaaatatgaaaaacaaaacttaaaagttctggaatacaatatttaatgtmtctttcctttaaagtggtgaaagatatcttaaggtacaaaaaaatcataaaataaaggaaaagatggaaatttagctaattaaaatctctgagaaaaatgtagtaaattaaaaatacaaactacagactgggaaaatatatttccaactcatgtaattgacagtggactccgatcaaatatatattaaaaaatacttaaaacccaataatgaaagataaataacccaatagaaaagtggccaaaggtcatgaatggcaatttatagaagagga

SEQ ID NO: 699891 - DNA, 1589 bp, Homo sapiens
gatccaacccccgatagtctccccacccctaatcctccactccatagagccccttcggcctctccctcaccaagcctgcaggcagcacccttcttacccaagtcctgggcccatgcccagagctgcgacccctcccaggctggcgtgggcctcctcagctctagcctgcagtgcccatgggcacccaggtggcaactctgtgggcagctcaatggctcctctgttccattcctggctccacacccagctccaggaagccccggccccacgccctgggctgggatgcccaaaggagccgcccacagggctgggagttgggagcagcagcagagatgccagttgggaaggatggcaggacaggcacccaccctgggcatagaagttcctgggcagaacccaggcctgctttcctgtggcttctaggtccccaggatagactgcttagtggaggaagctgctcctataggcttccgacccctttgacctaccctaatttgttattttgtttatggtccctttgccccactctgatgtgctcactactgtatcctgcatcaatctcagggctggcacacagtaggtactcaatgtatactaagggacgctcaacaggcgtcctctccagactccatcctctggagtgacatcacctttcagatccccattcaccttgacctctaatggctgcaggatcaggctctcagcagatctacatctgaatagaaatcaaagactctggcgcaaaggccaaagggaggaattgtccgcaaaggacctttggggaagacacctaaaaccacggcggaggggtgaaattaaagactttcaaaacttaaaaataaataaataaataaaaaataaaaccacggctggtatttaggcacattctctgatatagccacaatgctgctgaaatgctgaaagatttccaaactagtaaagtagctactacccagaggatcccatccctctccttcctgccacccagcagggtgcctccaggactctgctatattgtgtctgttccaattgggcattacccctcccagagcagctgtcatactttgaatctccttcctgctcaagcctctcctgtggtagctagcaggcctgccatctggttcctcttccactctgcaattgggccatgcaacacatccctgmcccccaccacggggctccagagggtgtggatccaggaggagcaagaggggcacacgttacaatgtgtgccttgctctggaaggtccccaaagtctcccactgcccctttcctctgtttctttagtttacattgagtgtctggaaacctctttttatgtgtagacctctgtctttttatctgtagaaaaaggatggtaatagtacccatatcatagggttgggaagaggaaaatgaatttgtaaaagttcttagcccagaggctggcatggagtcagtgctgaataaatgttagctctgaggataatcttttctattcaggtattaaggcctcagagtttagatgcttgtccagggtatgcagcttgtcagcagcagagacaagatagggaccctggcctcctgacttgtagtatgttatcataga

SEQ ID NO: 699892 - DNA, 558 bp, Homo sapiens
tgcaactgcactggaagcttgcacctggtttctcccggtatttgccctatgcaacttttccctttgctgattttaatgtgtaccttttcattgtaatgaagaataactatgagcataacagcttttctgagttctgtgagtccttctmgcaaatcattgaacctaagacagtcaaattgccttaatagaacatttgcaaatctggcttttaaaaaattcatttcaagtgcccatcaaaattaactttatattttcattgctcttgatttacagaaaatgtatggggaatactaagaatcttcacaaaccagctttttttcttcccttgcagataaggacttaaagtgccaggcctttattaaattctctaggtttatgtccatattaatgtatccaggcctcataaagaccctaaagcactgatataattattgtttacattctacaacaagaaactgtaaagcggaaaaatgagtaactattaacccctttgaaatgcagtgtgaacatataactgaattttaaatttttttcacttttcctaagctaattaacaca

SEQ ID NO: 699893 - DNA, 927 bp, Homo sapiens
ttgtttactatatactataagcttaaagaaaaagagctacacagagattctctactgtagttactaaatactttttacacaggtccaggttggcaactctgaactaatttgcatgtattctaggatagagctaattattgattctgagaagcaggtttctctctgttggaaaatgaagtaacaaggaaatggccaaatttgatgggagacaattctccatgggtcttgcatgtttctgcgtatcttgcaagaagaggtactaagtgtttttgttctgcactattttaccaagttgtttatacagtgaacagccttggaagacagagtcggtctccttctacagcaaagggtaggcattctaactatccattataaaaaattcaggtttcctaaggtcaagggaacacacagatacctgtgtattttgcataatcctgggtgtatgactgaatcagtaccatgagaatgtagatattctgaagattgccatgagcaacaaagcatcctttgtctcagactcagaagtctcatgttttctgaacgtatctgtgaaactgacaagccaacttactagcttacaactagggtaaaatctcagatasttcatatttcttgggaaaagaaaataccctgtggtactggaatagaattaaacatatgagtgtaaactggtgtgtttttaacatataaacaaataaatagacataaatgtgcatgtagacatttgtgtattttctcactctctccactgaccagaaccagagcaaagacacaccagtagcaataagcacaccaagtgcccagatcttggtttataaattcattctccaataaaagaaattaatgctgcttggagaaattgctgagcccagagatggaagagggaaaatacaagatgaacctggaacatcttatgtcccagaaagc

SEQ ID NO: 699894 - DNA, 927 bp, Homo sapiens
ttgtttactatatactataagcttaaagaaaaagagctacacagagattctctactgtagttactaaatactttttacacaggtccaggttggcaactctgaactaatttgcatgtattctaggatagagctaattattgattctgagaagcaggtttctctctgttggaaaatgaagtaacaaggaaatggccaaatttgatgggagacaattctccatgggtcttgcatgtttctgcgtatcttgcaagaagaggtactaagtgtttttgttctgcactattttaccaagttgtttatacagtgaacagccttggaagacagagtcggtctccttctacagcaaagggtaggcattctaactatccattataaaaaattcaggtttcctaaggtcaagggaacacacagatacctgtgtattttgcataatcctgggtgtatgactgaatcagtaccatgagaatgtagatattctgaagattgccatgagcaacaaagcatcctttgtctcagactcagaagtctcatgttttctgaacgtatctgtgaaactgacaagccaacttactagcttacaactagggtaaaatctcagatacttcatakttcttgggaaaagaaaataccctgtggtactggaatagaattaaacatatgagtgtaaactggtgtgtttttaacatataaacaaataaatagacataaatgtgcatgtagacatttgtgtattttctcactctctccactgaccagaaccagagcaaagacacaccagtagcaataagcacaccaagtgcccagatcttggtttataaattcattctccaataaaagaaattaatgctgcttggagaaattgctgagcccagagatggaagagggaaaatacaagatgaacctggaacatcttatgtcccagaaagc

SEQ ID NO: 699895 - DNA, 889 bp, Homo sapiens
aggcctcagagatttccatattatttaatttaataatcccacctctgggaatctatcctaaggaaataacttgacaytgggaaatagccctatgcataaagatattcttcaatgaataacagtgaaaattggttatagcattagtgatcaacaattagcactactgtccatctagtcaatggaagactacacagccatttcaaaataaaattattaataacatgggggagatgcccatgacatattcagtgaagacagttacaccaaattgtataatttcagaaggtgggtcataactatgttaaaacaaaatgcaaataaatttttgaaatcgcctttatcctagcaaactaatgcaggaagagaaaaccaaataccacatgttctctcttataagtgggagccaaacacagggtactcatggacataaagatggcaacaaagtggggtctactagacgagggaggaagggaggagagcaaaagttgaaaaactaactgctgggtactatgctcagtaccagggtgacaggatcattcatacccaaacctcagtatcatgcagtatacccaggtaacaaacttgcacatatatccctgaatctaaaaaattgaagaaaactcacctttgtaaagattatgacagagaaatctaatgtggctgactccgacttgcttctagcctcacaggatggctgtcttcattcattcctgggcataggtcaagctaaacatgggaggaatttagtttctagtttaacttggaagcaaggatgataatagtcctttcttaaaactaaccccctccttgctcagggtccaaaacctaaagaaaggccacaagattaggattatgggaggggcctgaattctgctaaaatgtgagtgtc

SEQ ID NO: 699896 - DNA, 2553 bp, Homo sapiens
  misc_feature 1418, 1419, 1420, 1421, 1422, 1423, 1424, 1425, 1426, 1427,1428, 1429, 1430, 1431, 1432, 1433, 1434, 1435, 1436, 1437,1438, 1439, 1440, 1441, 1442, 1443, 1444, 1445, 1446, 1447,1448, 1449, 1450, 1451, 1452, 1453, 1454, 1455, 1456: n = A,T,C or G
  misc_feature 1457, 1458, 1459, 1460, 1461, 1462, 1463, 1464, 1465, 1466,1467, 1468, 1469, 1470, 1471, 1472, 1473, 1474, 1475, 1476,1477, 1478, 1479, 1480, 1481, 1482, 1483, 1484, 1485, 1486,1487, 1488, 1489, 1490, 1491, 1492, 1493, 1494, 1495: n = A,T,C or G
  misc_feature 1496, 1497, 1498, 1499, 1500, 1501, 1502, 1503, 1504, 1505,1506, 1507, 1508, 1509, 1510, 1511, 1512, 1513, 1514, 1515,1516, 1517: n = A,T,C or G
caagagtaaaggttttacatagatttttccctcattaacagaagagacatatattacatacaaaagaaaatgcctcacacatttccacatttaaagctgtgacgaagaaatatttaaatttaaagccctgacaaatattctaggccctccactagaataaaagcttcatgagaacaggaactttatcttgttcacagccatatcctcagtgctagaagagtggctagcatacagtaagtagtcaaagatgaactatctgttgaataagtgaattaacaacctagtatcaagtcaacataaaactaaactgcaaagcattctgctgcaaatagctagccagaaatagaaatggttacaaaggaaaacggaaatcaagagtgaattcaaaatatctttctactcaaagcaaaggtaaagaaaattaattagttctaatgaatttactatgttaccaaatacatgtaaaaactatctccaacacactaacatgagaatactaaatataatagcagaagaactgaacaaacaactctactcttcttgtaagagcagaacagttcagtaagtctctatatgccttaaatagaattaacatcaaggacaaattttatttggatggatctctagaacaaacatgagacagtctgatgttcttggaaggaatatttccaaaacatttaacttgtctggtatataataacaaaggatgtagcagtagaaactcttatgaaatataaagcaaaatgctcttaagaaatataattaaataagtctgatagtcaatttttaaaggtttgtcccaaattggctttgtgcctcacacaaaaaagaaaaaagtacaaagttaaaaatgagaagggtaaaaggtaagaaaaacaaaagctttttctttggggggaaaaaaacttttagaaaataagaaagtttcgtaatgaaatacatttaaaacctctggaatttctaagcttgagggttcaaaataaaccctcaagcttagaaatgaacccacgggcttagaaaatgcctccttaactttttttttttttttttttttttgagacggagtcttgctgtgttgccaggctgcagtgcagtggcacaatctcggctcactgcaacctctgcctcccaggctcaagcgattcccctgcctcggcttccccagtagctgggacttacaggcatgcgccaccacgcccggctaatttttttgtgttttagtaaagacagggtttcaccattttggccatggtgatctggatctcctgacctcgggatccgcctggcttggcctcccaaagtgttgggattacagggagtgagccaccgggcccggcctttaacttttaataactacaaaataagtctgggggcaaggcctaaacaggatacatccggcggttttttgctaactacannnnnnnnnnnnnnnnnnnnnnnnnnnnnnnnnnnnnnnnnnnnnnnnnnnnnnnnnnnnnnnnnnnnnnnnnnnnnnnnnnnnnnnnnnnnnnnnnnnngcctttaacttttaataactacaaaataaagtctgtggtcaagccataagcaggattacatctgtcgttttttgctaagctacacagctacacagaagttctcaactctgaccacatattaaagtcatctgaagaccttctaaaatgcacagatgcccaggctatatctccagagtctgattttgggtagtattttttaaaaatctaacytacccaggtgatttcaatgtgcagccaaggctgagaaccactaataaagtgatctttattgtcagattatgcttttctcattcatgtaaagcttctttcttttatgaaattctgggctacaaacctatatagcaatattactatactgaataccacaggcaactgtaacacaatgctaagtatttgtgtatctaaacacgtctaaatgtagaaaaggtgatgcactgcactgtgaccgtacaaagactatgatgtcgctacgtgacaggaaattttcagctccattataatcttatgggcttatgggaccactgacatataggcgatcagtcattgaaatgctgttatgtggcacatgatggtatatatgtagaaaggagaatagtcactcaacacatattaagggaaaactgcaatgagccatgaagagtccagcaagatgctgaaattagaatggtatgatttagtggtatactccatctccctctgttactttaggataaaataacatgattattataattctactaaattaagaaaaatgtgcatgaaggacagccaaaggaatgttttaaagtggttctactttctgccattaataactataaaatagagcaagtattttaaaatatttttttgaagccacaaccaataaaacagagatgaaaagggaatataactaaaatatgagatttatacctattaaccaaagaaattaatcatccttctcactgaggagcattcacgaatcttctttgcatttttgtttattagtatactgtagcaaatcagtttaagatttcaaaagatttaattcatacctcca

SEQ ID NO: 699897 - DNA, 629 bp, Homo sapiens
tttgaaaaggatgggttatcacatgataacaggaaattattgctcattttcttaggtgtgatacagtattatggttatgcaaaagaatgtctttattcttagaatgtatgtgccaacatatttatgagtaaagtgtcatacttgtaataaatatatatacatgtagacatacatatacwtaaacacatgcacacataatacatatacgcacagataaatatacaaatgtacattatataaatatatacacaatatacacatacatatatacatacaaaaatacatgtatacacacatatgcccccaaatatataaacaagtatgtatatatacacgtatgcacaaatatacattaataaatatatagtgtgttatatattacaggcacataaaacaaatatggcaaaatattaattggtgaatctcggagtgggtgatgggcattcatgatactcttttttctcaacttttctgttagagtatttcagaaacttgtcaaaatataaagtaggcaggggaaatataaatgcctcctggagagatattccaggatcatcattcattaacaccttggtgaggtgaacttataacaggtttctcaaaaggcattcaagagacggttgtaagtg

SEQ ID NO: 699898 - DNA, 629 bp, Homo sapiens
tttgaaaaggatgggttatcacatgataacaggaaattattgctcattttcttaggtgtgatacagtattatggttatgcaaaagaatgtctttattcttagaatgtatgtgccaacatatttatgagtaaagtgtcatacttgtaataaatatatatacatgtagacatacatatacttaaacacatgcacacataatacatatacgcacagataaatatacaaatgtacattatataaatatatacacaatatacacatacatatatacatacaaaaatacatgtatacacacatatgcccccaaatatataaacaartatgtatatatacacgtatgcacaaatatacattaataaatatatagtgtgttatatattacaggcacataaaacaaatatggcaaaatattaattggtgaatctcggagtgggtgatgggcattcatgatactcttttttctcaacttttctgttagagtatttcagaaacttgtcaaaatataaagtaggcaggggaaatataaatgcctcctggagagatattccaggatcatcattcattaacaccttggtgaggtgaacttataacaggtttctcaaaaggcattcaagagacggttgtaagtg

SEQ ID NO: 699899 - DNA, 629 bp, Homo sapiens
tttgaaaaggatgggttatcacatgataacaggaaattattgctcattttcttaggtgtgatacagtattatggttatgcaaaagaatgtctttattcttagaatgtatgtgccaacatatttatgagtaaagtgtcatacttgtaataaatatatatacatgtagacatacatatacttaaacacatgcacacataatacatatacgcacagataaatatacaaatgtacattatataaatatatacacaatatacacatacatatatacatacaaaaatacatgtatacacacatatgcccccaaatatataaacaagtatgtatatatacacgtatgcacaaatatacattaataaatatatagtgtgttatatattacaggcacataaaacaaatatggcaaaatattaattggtgaatctcrgagtgggtgatgggcattcatgatactcttttttctcaacttttctgttagagtatttcagaaacttgtcaaaatataaagtaggcaggggaaatataaatgcctcctggagagatattccaggatcatcattcattaacaccttggtgaggtgaacttataacaggtttctcaaaaggcattcaagagacggttgtaagtg

SEQ ID NO: 699900 - DNA, 1236 bp, Homo sapiens
catcaatatatgattaagtggagatttagtaggaacccagtcaataaataaagatcagctaattggaaaaaaagcaattagttaattcttgaattagtatttcctttacctatcaactatcaatgctaattttgtgcaggggaagagtttagatttttctgacctaggataaagctattttatccaataagcaatgaaactgtgttaggatttccacaggcatttttgcattatatggaaagtaactagacacagactcaacaaaatgttaggacataaacttttgcaatcaacttgtaaattctcaataaacataggggagatcagagagaagaatgccaagaaaaaatctcattagctttcttcctagcctggacttaatagtagaatgtaatttggctaatggagtttgtgtttttcattaaattatatgaacattaaaaagatatctaaaacaataaaaatattccaggaggttaattattcttcgagttattcattcatcctcactctgtcaagctgaacctcatacattctgtctgagtaaggcaaaggtgaatattttttatcataataggggctatatcttggtcctttgaaacattcctggagctttaggttgagaaggctcttagaagatcttacttaacagttttattttagatatgggtctgtatcatagacagagtgcagttagattttatttccacctagaaggagcccgtatgatccaggaaggaggaaaacaaatcacaaaagttatcaggctctgtgccaagcactttgcaaacactgtctcatttatatatctggtgtgataataatatagttatctctattttacaagtaataacattaaggtttggggaggttcaagcctttgctcaaagtcatatagtgagtggaggagtcagtattcaaactcaggtctagcaaactcaagagtccacattcttacttaagctgtgaaaataaagctgaatggtggatgtctccaggaaggcagattctgattcgttataaggaagtcaaggttttccaacaatggaaagccygagtgcagagatgagaattgtgcaaggcttggcagtattcaagcagaggaaggtgatcatctgtccgggttgttgcattgggatctctatttcaggagggaggatgacttggattccttcatcctaagatcctctaatgtttgcggaaacaagatgaggtgggtttggtcatcagagatta

SEQ ID NO: 699901 - DNA, 553 bp, Homo sapiens
acagatcagattcttattactgaaggtagaataagaggaaatactctttaccacccagagttaaagaagagaaggtaatgttaaaaaaaaaaaccttggaaacatttgggccacgcaacatactttataggttagggtaagatttggtccacccatatattcatataatatgtacttactgagtgttagtgtgtaccaggcttgcagttgctggtgcagaatcatgaattagacacatgcacacacacacacacacacacacacacacacacacacacacacacacacgtatgctttccgcccacagtgagtatgaagcctggtggggaaaacagatgtggaattacaccaaacattataaccagagctttctcctatactacacccagtttactctaaaagacaggcccaaactgkctgctttttgacaaatccaagatattgtggagcctatggagtgatttggaaaacataaagaaagaatttttggcaacagtaaaaatcacccatatttctgatttatcttggaaacaaaaattgtgggtgtgacaat

SEQ ID NO: 699902 - DNA, 638 bp, Homo sapiens
gtctttttatttgggaatgacatttctcccaaggagtcattgctgagaactgggtcacatggccactcagagctacaaaaaagtacaaacaagtgtttcagagagctgcattgctatatgaaatgccaatagcattggaaagggaaaatgaattctgatcggtgaccagcagcatctgccatacccattaaaacttatgtaattggaaaacaactctaggtgtatgcaggcttcaggcatagctggatccaggggttcagtgttgctagatatagtggttactctgtgtggttccattcttggtggcaaaatggctcacaggctgggtatgaacccagcactataatyccagcactttgggaggccaaggctggaggatcacttgagcttacaagttcaaggccagcctgggcaacatagggaggccccatctctattttaaaataaaataaaatagaacaacaacaacaaacaataacaacaaatgggctaccagaagctgcaactgacattacattagtttagcaatcccaggaattgagaacactcaattttgttgttgttgttgttgctgatagttccagcaaaaagcctagactagagtctcattgtcctggcttggatcacatgtccatccc

SEQ ID NO: 699903 - DNA, 556 bp, Homo sapiens
cacaccagtttttttatgcactcattgattgatgggcatttgggctggttccatatttttgcaattactaattgtgatgctatgagtgtgtgtgcaagtatctttttcatgtaatgacttcttttcctctgggtagatacccagtagtgggattgctggatcaaatggtagatctacttytagttctttaaggaatctccacactgttttccatagtggttgtactagtttacattcccaccagcaatgtagacgtgttcccttttcaccacatctatgccagcatctattttttttaaattttttgatgatggccattcttgcgggagtaagacattgtgattttgatgtatatttccctgatcatttagtgatgttgagcatttttttaaatgtttgttgccaggcctgattttctatgagtccatgatttgtgcatttgctcccgggctcaacaattcagtgttgaaaatttcctcacactgtattttcttctgctccccaaatcccctcccaactccctatgcttgggacttttcccaaaaacctggttatt

SEQ ID NO: 699904 - DNA, 1525 bp, Homo sapiens
cccagtctcaaaaagcaaacaaaaaaaaaaggatatacaaaaaagcattttccatttccatcccaccctgaaataatcactatcccaaacttgatgtttatcagtaattacttcactcatttaaaaggtgatggcgaagcaactaacatgtgaacaaccacaaaacaaaaatcccactctcatggaacaatctagtaaaatgcatttccttatacttttgccaagaatgtacgtattcctaaacacacagtttgcttagcatgtttctgagctttatctaaatagcatgatccactgaagggtttctcagtctcagcttgattgacatgtggggctggatggttcttggtggtggaactgtcctgtgcactgcaggatgttgagaagcatccctggcttctgtccaccggacgccagtaggaccccgcaacctcccaattgtaacaaccaataatgtctccaggcattgtccagtgtccccggccagggtaggggacaaaattacccctggttgggaaggactgaccactgtctacgctataccgcccttctcatttcaggccaagtttgtgaaatccctcctggttgctgtgtggagccctagttcatccacatttccaacagctgagtcttccgcacaacgggaaaagcaccattaatttcactctcctatcttggagcatttagatcatttcctggtttygcttcttacaaacagagctgctatgaacatccctacctggaactcaggggccacttttctctagggacacattcatctgtctgctagatgcttttttctaaaactctactttcattttaaaaattatgacatggctatacttgctcaggcctctaagatggcatcctaggacctactgaatggagtcccagcatctcaaggaaggaatgccagaagccagaacatccaagtaacaatctccacctgcagctgatgctctctgggacccaggaccagccactcttctctgtgccccactttcctcctttgtaatctaattacccagtgatgaccaggatataagaggacttgtctgcattgtctcatggccacaaccacaagaagagcgtcctgctgtcacccccattttataaatagggaaactaggtcaggcatggtggctcacacctgtaatcctagagctttgagaggccaaggcgggaggaacagttgagacagcagtttgagaccagcctgggcaacatagcaagaactccgtcttgacaaaaaaaaaaaaaattttttttaaattaactgggcatggtggcacacacctgttgttccaactattcgagaggctgagatgggaggatcatttgagcccaggagatcgaggctgcagtgagctaggatcatgccactgcactccagcctggacaacagagtgagaccttatctctaaaaaataagaaaactgaggcacagagaagttaagtaacgtgctcaaggtcatgcaactagtaagtggcagagcctacgtgctttcccttcattaattcagtc

SEQ ID NO: 699905 - DNA, 624 bp, Homo sapiens
atagaagatgccctctccaatccattgcaggggatatttccagtcacaatgatggcagttgagctgttgaccaggaccagattgtcaccatctgctccttgcccatgatatgtgccctgctgaccgtagggaccaggactatgtgcaagtgcaaacccacagtctcctcaagcagccccgccttcaggaacctgggcggtggagtggaactaaacaacagccagygcacattcatttgaattgggggttgctctctcagtcatgtcaaggcacctggagaaagatataattagtctgtggacagagatccacctatgagtggagctcacttttgtaatgggcctattattccctaattgttgcataaaaatgtatttttttttctaactatattttaaatccctcagggcacctccctatgtaaaggagtcttgtaacacatctttatgtttttgtttgtttgtttgtttgtttggccatgcatggtggctcatgcctgtaatcccaaccactttgggaggctgagggtcgcttgagcccaggagttcaaggctgcagtgagccataatggtaacactgcacttcagcctgactgacagagcaagaccctgtctctaaaaaaaa

SEQ ID NO: 699906 - DNA, 571 bp, Homo sapiens
gagaggctgagcacttggtgtggtttgagggtccctaatagatgtaccgaagtgtttggctacaaactcctcacataataataattatgttgatgctgctacagatgattagcctgggttttggaaagcttcctccttggtgcattccattcaaaaggcctcctcttctcagcatgtgcctgcaaacacaatcccctgaaatgacaagagagcataagaaaagctgcaagcattgcctgtactggccttttgaactcatttggggtttccatggcagtgggagtcaggatggatggatttgttttcctctctacttgagcaatgaggttttcatcatttgcggcttgatttggatcctttagaataatgtcccccgacacatttccatcaggagcacaggagcagccaagacatacagggagacttgcacrtggctttgcgcaggagccttttctgccaaatcaaacagagcagagatacaaaacacaaaagcaagccatcagaaaagatctgtgtgactgggcacgatggatcatgtctgtaatcccagtgctttgggaggctgaggtgg

SEQ ID NO: 699907 - DNA, 591 bp, Homo sapiens
taggggttgggggagaataggcaagggcatacattggtcatgtatgaacatacttccaaactgactatctgttttggggtacatgtccaagttgctgttctcccaggcagttttcatcattcctaacccatgcccatcatggtttggtataccaaggcatggcagtggggatgtgcctattaagagaagtatgtctgaaaaacactgctatgggagacaagtgggcaaaagttcaaatgagaggaagctgaaggagaaaaaaagttctttgggggcagttttaaaccatagacctggacattctgggatctaaagagttttactgatgagtcactcatgagtgaatcaaagcaactcattgctctgcaaagttcttagaaataatgtgctctccccaaattgcatcttctccatacttttctccccaaaggaacatgttsctttaagttacaaatcaggagaaaatgccttccaataatgtgctggtgggagaaacagaatctgagtcagagtgaccctcagaggtaatgtttattgatacattttaagttgttgtagcccatgtcacttttcttttgctgtatcttagag

SEQ ID NO: 699908 - DNA, 658 bp, Homo sapiens
ctttcagggtatccttcaagtgttaactttgcagcaccatagtcctggctctctggacagagttgctctagccgggttactttggtcagagttagaaggaataaacactgtcagtgtgatgccacaaacattcactgagcacgttctatgtgccagggtttgtttgtggttcaatattctgtttgggatgagagaaaaatgagctctgctttcaggagctcacagtgaagaaatgaggaggaatatagaagcaaattaacacaaatcagcatgagacgtgctgcggaggagctactttaagggggcagaggaaggtgcggtcaacatttggggagctctgayggtcacccagagaagcagatgctcgagccgggttcctctggtcttatccttgtaggtctctccatctgcatgggatccctctatcagaaagtattgaccttggcttcagaatcacctggaaagctctgaaagacctcagtgcctagactgcagcccagaccaactaacactccctgggggtggtacccaggcatctgtatttttaaaaattctgcatgtgatattaatgggcagccgagtttgaaaaccactgtcataaatcgagaattcagtaattcaaaaataagagttaggaagatgactgtattatggtttg

SEQ ID NO: 699909 - DNA, 618 bp, Homo sapiens
tttaaaatcttttcccatactttcatcattactatcagtgttttcatttagattcaaaacacctctctcttagactacttcaataatctcttaactacttgatcttcaggctcataattttatcctctcaaatctattctacacaccactgccaaggtgttctatttcaaacacaaagcatctcttcaaactcttcaatgagtcttttctgtaggatgaagttcaaactgccctgtatgccacagctaatataacttgaccaggactctttctgtctctacaggtgtatctttcctcttctctgtttgaactttataatctaacaacactgagttgcttatagctttttataggcttggctgtctctccacccagatctcatcttgaaatgtagttcccataatccctacatgtcatgggaggtacccagtgggaggtaattgaatcaggggggaagttaccaccatgttgttctcatgayagtgagttctcatgagatctgatgattttataaggggcttttgtctttgttcagcacctctctctcctgctaccatgtgaaagaaggatatgtttgttttcctttatgccttgattataagtttcctgaggctctcc

SEQ ID NO: 699910 - DNA, 636 bp, Homo sapiens
atcatgttaactcatcttttaaaagaaattctgctatatctagttgtcttaatatatttttattaacattattaaattatagataaaatcatggaagaaaatcaatgtttttataaataagatgctattgtatagttttttgataacttataaatgacaattttaggtcatatcaagtatatgtgctcttacatattctcaagacaatgttgaaagtaatcacactttgcttttaaagggaattaaatttccacacccgtgccacagtcatcatttgttcatgttccaaggatagtttaaaaataactgtaactgagagctagacactagcagaggtaattaactgctatattcttttaatacactcgttaaagaaactattctattagagctattctattaagtaaataatcttttttgctagtaattacattctactttttatgcatgtagcttccacctaaaccagaaagttttctgttgttgattattgtaaatgtataatttcaagtgtctaattawcactttcagatagaagaataattttttctaaagtgtcatgtgatagtaatagctcaagatctacttgagcccaagaattactatggtgtctattactctattcatcctaaatgt

SEQ ID NO: 699911 - DNA, 729 bp, Homo sapiens
ttcctaatattttataagaaatgaaaagagaatcaaaacaaacctgttgcacttttaagtttataagatcgacttccatctatgctgatgtgttgctgtataagtatagagttaccatacacactggctttaaaggcatcatctcctctgttcctcaatgttattgagatatctgcagagctgaaagaatgaggttgagctaagttacatgaagatacagtgtaattacaatactaggttgccacagttttcaaatttttcaaaaccaccaaataatttggccaattcatttgcaaattagmtttacatcaacagctgacactgattgttcactacagcataacgttaacgatactgtgcctaacaaaaaaataaagttgagaataagtgaagcttcaaaaaaataattgactgactattctatccatcatagaaatagcacatctgcacaaaaaccattaagtttcggttgtttcaagacatgtagataagttatacattttcctataaaaatcatgtaatcaaaattatactgcctgactactgtaagttatataaagcatcatgcttgacagtaggcctttaaagaatgatgaagtaagaattatggtaaagtagttaacattttcaaaggggattagaattaaaaaaggtaattttaatttttcaattacttggcaataaaaaataaaaccatttgatatcaagaagtgtaactaggcagggtac

SEQ ID NO: 699912 - DNA, 615 bp, Homo sapiens
tgttttgtttttcttaattcttttaattgattcatttattttattaattaattaattaattaattaattatttttgtagaggcagagtctcactgtgttgcccaggctggtctggaactcttgagctcaagccatcctccctcccctgcctcccaaagtgctgagatcacaggcatgagccactgaacccagccattttgtttttttaatataaaaggaaaaaaagaaattgacaaagttacctgtgaggctgccatgagtgcgaagtcatgagtaatcccatgctacttaatgctgagtccccggcacacagctgttgctcactatgctacacatcctcttgttktcagagggtgaagagactagaatgattaaagactcagagtcagcagcatcactgattttactggagagtgtttagatttgatcaccaaaagtccagtccttatgtttctgaaactctagagctgctgttaaaacaaggtaggaaagccagcctcaagtaatcctaacatcgttatccaactccaataggtgccaggaactgtgaagatgttttcatccctacaacaacccaagaaggtgggtaggtgctcacattatccccatcttaca

SEQ ID NO: 699913 - DNA, 660 bp, Homo sapiens
tttgtaatggaagcttcagtacaagtaaaaatgtcattaggaggaaaaacactttattctgttaacaattgcttgcaatttaggatgaattaagtatttacggttttgatagccgggtgtggtggcccacgcctgtaatcccagcactttaggaggctgaggtgggtggatcatttgaggtcaggagtttgaggccagcctggccaatatggtgaaaccccgtctctactaaaaataaataaataawtaattaattagccaggtggtagtggtgcgtgcctgtaatcccagctactcaggaggctgaggcaggagaattgcttgagcctgggaggaggaggttgcggtgagctgagatcgggccactgtgctccagtctgggcaacagagtctcaaaaaaaagaaaacgaaaagttatgggaaaatatgtaataactgaggatcctaggtcactgaagaggagtatagtgcttccctggactctgtttttttagaggtcctacttttactttctctggccacaccatccctgtggggtgagacttgtgcaggggccaatagaacttttccacctagagcccacatttcccctttagaccatatttcagctaccagagagcccagagttgccctgcgaaagggccttgcccctgttcctca

SEQ ID NO: 699914 - DNA, 660 bp, Homo sapiens
tttgtaatggaagcttcagtacaagtaaaaatgtcattaggaggaaaaacactttattctgttaacaattgcttgcaatttaggatgaattaagtatttacggttttgatagccgggtgtggtggcccacgcctgtaatcccagcactttaggaggctgaggtgggtggatcatttgaggtcaggagtttgaggccagcctggccaatatggtgaaaccccgtctctactaaaaataaataaataattaattaattagccaggtggtagtggtgcgtgcctgtaatcccagctactcrggaggctgaggcaggagaattgcttgagcctgggaggaggaggttgcggtgagctgagatcgggccactgtgctccagtctgggcaacagagtctcaaaaaaaagaaaacgaaaagttatgggaaaatatgtaataactgaggatcctaggtcactgaagaggagtatagtgcttccctggactctgtttttttagaggtcctacttttactttctctggccacaccatccctgtggggtgagacttgtgcaggggccaatagaacttttccacctagagcccacatttcccctttagaccatatttcagctaccagagagcccagagttgccctgcgaaagggccttgcccctgttcctca

SEQ ID NO: 699915 - DNA, 1116 bp, Homo sapiens
ttttaggaaatgaccattaaaagaaaagacaagtaaatacagcttcattagatgatatcttgggctttagatttgcagttgtttaaagcccatataaatgagaatatgataaaatggttaaaactgagcaaaatgaatggacaacattctattcatataacaacacaatgcactgaaaaaggcatgtctttcatttcagtccaactatttttcaagcttgccatgaataggtattatttgtgtaccatgtgcagaatgtctttctaggagctattggtacaaacatgaattttaaaaaattaattttccttccccaaagtggcttatagtagagagaattaaaaatatagagataaataaatataatgttatctatgaccatttttcacgaacagtttgatactataaacaactaactgtcactggggtgcactcagcaaaattttttaattttaatacttgaatatgaaatctaattaatgtgtcacaaacaatggtaatagaaactggtaagatgaaaaagtgttagtcacacttatactgagatgcaggtttaatgaatctgctcttgctagatacaaaataattagctaacctacattgggaaggtcaggtattttgtaatgtctaataaatatagaggatatatctataattataaaataatactgtgattttgcacctacaaggttaattttgtattacaaaagtaaattgagacctggtatgtctcaaccttgtatgatttaatatgcaatcactgaatcgtatttttagcttggtcttcagctcatcctcaggagattgtaaagatggatgttggaggcatgttgatgtaatatctagacaggtgaaggtagactcttgtgtgtaaggaccatgaatgtgttataaaagcaaagtgaaggtactgcaattcgtagatcacaacaccatttgtgaaactccagacacccacatttaatcctcacctayccttctggggtaagattgtagtgtgcagttttattgtgttttacaggtgggataaataactagcttcacgttgtttttggagtagggaataaaacagagctctttttacttcttaccctgtaatttagctactgctttccc

SEQ ID NO: 699916 - DNA, 662 bp, Homo sapiens
tatattaatcttctgagttttttaacattagaaaatctaggaattatgttaataaattatatagtaagccttgagtaattaatattacatattaaaacataattccatgtcttaaaattaaacatkggacctctaataaattaatcttgcctagttaagtctaactttttttttcttgagttgagaacagaatagagtccaacagactctagttaggttgaatattgaatacatttcaatatgtttgaggttgaatatgtttccgtatatgacccttaatctcttgtatttctgaagaattccaagtaaaactgattgaggataaaagactgcaaaactactaattttctcaagagaaaataggagaatattagaatacacacaaagcaattcttttttgtaacatggcattgagccagcaatcagatataaaatcatcattgattcttatatattattcatggtattgtgagaatgtgatatacatgcaatgcagcaatgattgctatattctgaagtgttttaaacccactctaaagaaaatagaaaagtgtctcacaaaaaatcctttgaaaactgtggaattaaaaacattactaaaagtctaacaggattagaaaaatattaaagggtttagaaaacaaagtattgtgcatttattt

SEQ ID NO: 699917 - DNA, 662 bp, Homo sapiens
tatattaatcttctgagttttttaacattagaaaatctaggaattatgttaataaattatatagtaagccttgagtaattaatattacatattaaaacataattccatgtcttaaaattaaacattggacctctaataaattaatcttgcctagttaagtctaactttttttttcttgagttgagaacagaatagagtccaacagactctagttaggttgaatattgaatacatttcaatatgtttgaggttgaatatgtttccgtatatgacccttaatctcttgtatttctgaagaattccaagtaaaactgattgaggataaaagactgcaaaactactaattttctcaagagaaaataggagaatattagaatacacacaaagcaattcttttttgtaacatggcattgagccagcaatcagatataaaatcatcattgattcttatatattattcatggtrttgtgagaatgtgatatacatgcaatgcagcaatgattgctatattctgaagtgttttaaacccactctaaagaaaatagaaaagtgtctcacaaaaaatcctttgaaaactgtggaattaaaaacattactaaaagtctaacaggattagaaaaatattaaagggtttagaaaacaaagtattgtgcatttattt

SEQ ID NO: 699918 - DNA, 798 bp, Homo sapiens
aaaaattgtagtaaagttgaaatagtgatgtcttttttcttgttaccatagttctttaagagtcccttaatagctggaagaataactccatccctctctcagaagatctctgagcagataagcactttgggctcttagagaaaattgctgtagtgaataaaatacattttttttggagacagtgtctcactcggtcatccaggctggagtgcagtgatgcaatctcggctcatggcagcctcaacatcccgggctcaagtgatcctcccacctcagcttccccagtagctgagattatgagcaggcaccatcatgttcagctgattttttttttttttttttttgtagagacagtgtttcttcatgttgctcaggctggctggtctcaaattcctgggctcaagcgatctgcccaccttggccttccaaagtgctaggaatacaggcgtgagccaccrcacccagtcaataaaataactttaaataaacaaccctaacgattaatctctacttacagatagcaaaagagaggcttcagattatgaacatttccagaacagatcatggcttctttaggaccagaccaggccacgcattccctagattctgtgtctagtctgaggttagtctaaagatctttcttagcagctgccgaaaattcataataaaatatttcctccactgaagccgaatttttaactggaaagaaaagttttcttctactgacacctcatcaagatttgacagagtgctaaggcacctattctttctctatttctttcacattaacccataacc

SEQ ID NO: 699919 - DNA, 593 bp, Homo sapiens
cagataaaagataatttgacaaggcgcaaattctagaaagttacrtcagctcataaacaattcttctaaagagtcaactgagttagtggggtggaaagggaagaaagtaatcacagtgtcagagacatgtgaactagagcaactccatcttgaatagaagctgggtaaaatgaggctgagacctactgggctgcattcccagatggttaaggcattctgagtcataggataagataggaggtcagcacaagatacagatcataaagacctcgctgataaaacaggttgcagtaaagaagccagctaaagcccccaaaaccaagacggcgatgacctctggtcattctcactgctacactctgaccaacgccaggacagtttccaaatgccgtggcaatgtcaggaagttaccctatatggtctaaaaaggagaggcatacataatccaccccttgtttagcatatcatcaagaaataaccataaaaatgtgcaaccagcagccctgagggttgctctgtcaatggagtagccattcttttattcccttactttcttaataaacttgctttcagtttactctacagactcaccg

SEQ ID NO: 699920 - DNA, 593 bp, Homo sapiens
cagataaaagataatttgacaaggcgcaaattctagaaagttacatcagctcataaacaattcttctaaagagtcaactgagttagtggggtggaaagggaagaaagtaatcacagtgtcagagacatgtgaactagagcaactccatcttgaatagaagctgggtaaaatgaggctgagacctactgggctgcattcccagatggttaaggcattctgagtcataggataagataggaggtcagcacaagatacagatcataaagacctcgctgataaaacaggttgcagtaaagaagccagctaaagcccccaaaaccaagacggcgatgacctctgktcattctcactgctacactctgaccaacgccaggacagtttccaaatgccgtggcaatgtcaggaagttaccctatatggtctaaaaaggagaggcatacataatccaccccttgtttagcatatcatcaagaaataaccataaaaatgtgcaaccagcagccctgagggttgctctgtcaatggagtagccattcttttattcccttactttcttaataaacttgctttcagtttactctacagactcaccg

SEQ ID NO: 699921 - DNA, 635 bp, Homo sapiens
caagtgattctcctgcctcagcctcctgagtagcagggactacaggtgcacaccaccacgcctgactaattttttgtatttttagtagagaaggggtttcaccttgttagcaaggatggtcttgaaacactgacctcataatctgcccacctcagactcccaaagtgctgggattacaggtgtgagccactgcacccagccctctgtgggtttttttaaagctcatcagctattattagtgttaatgtattttatgtgtggtccaagacaagtcttcttcgtccagcgtggcccagggaagccaaaagattagacaccactggtgtagggagtgattgtgacaataaataagtaattatagtatcaggtggaaataagatttwtaaaggaaaaaaaacagtagtgttagggaataaagagtattgggtatgttttaaatcatatgtcagggaagggaccttgacagaggtggcatttcaacgaagcccttgaataagtaagggagcactgcaggtatttggtaggagacttgcctgggcagagggaagagtccttgcctgggcagcacttaacattatgtgttgaataaagttaatctaaaataaccccaactagatgcattagcattatctaca

SEQ ID NO: 699922 - DNA, 1542 bp, Homo sapiens
cctctaaaataactcaggtttaatatagccaaagacttcccttataaagtcacatcgggccaacttaattattctgaaaagtagagattagagatgagccatgtgaagatgcgttttctttgaaagaaagcagacagtgactgaggaacttttaggtctatgtataaaatggtagagttggatccatgccagagggagttaaatccacaataagcaaatagtaacacgcaaaagagaagctctttcccgggtgcaatggctcatgcttgtaatcctagcactttgggagaccggaggtgggtggatcacctgaggtcatgagttcaagaccagcctggccagcatggcgaaactccatctctactaaaaatacaaaaattagacgggtatggtggtatgtgcctgtaatcccagctactcaggaggctgaggcaggagaatcacttgaacccggtaggcggaggttccagtgagcccaggtcgtgctactgcactctagcgtggtgacaaagctagactccatctcaaaaaaaaaaaaaaaaaaagaaagtcttttgttgatgtttctagctgtctgtattctacttccttttcatttttttctttgttgagaaagcactgaaagaacatttccaattttgtgttaatcaagaaaatgattgttttctgatggatttcaccttcatatttcatcaatacaattaaattctctccagataaacccacctatttcttcatttagtaattctttccttaactttataatttaaccactaagtatttgcatttggtcagccaagtgtcagccaagtgttagaaactcagcagcagtaaagtcagtgcaacatttggtagatacaatttcataaatgactggaaattttcatttcacatatcagtcaatctagctagaccagtggtaccaatgcctgactttcatccatacctttattcaattaattaagtcataaaatgcaacctttaagtagaagtcagtaatactaaagtgcagagaaggaatctgtaatcagtttgaaagatttgaatttctgttaaacacttaagatgtcaggcttggttgtgccctagacagagaatttcctagaacaactggtagttactttagattgctctgtattttaaacagaagatcatacaattatttagcacttcagagatgaaaayagcttttgcatgcaaaaaatgacagaaaatgcagtaggttaccatgtgactttgtgctcatttccaccatacctcaacctaatttaattttaaaggacattttaagtaatgttttgactataaagctcttgcatctgattaaaacatgacaaatccttatgtgaactaaagttataggaacaaaaatatttttgaagctgtgcaaaggtgctaagaagttgacaattttgattgttgacaatcactgatggaatatggttgaaatctggtaccaaaataatagctattaaatgggcaatggctacgatttttgtgactgaataagggctgtgcctaaacaattatactctaaggcct

SEQ ID NO: 699923 - DNA, 406 bp, Homo sapiens
tattaatrtagcacaaatccagattagatagaatgatattgtacggaaataactcagattaaaaccaaaaccacaaccgtgaaaacaagtcccatgtacacaccattctaaaagaagtcaagtgtcatgcatgtcatcatccttcagcttctctatagagaagatgaggaatttagagaaaattttctcaactgtgtgatttcaatcatgggagagagtgctacaacattttattttctccctcttttaggaaggtatgtttcaatgtccaactctgtagagattgatggtgcctaccaaaaaaactccatctcattccccagttaaacatttgctgaggcatagttctagctgatctgattattggctagtttgggcaggaaaaaaggaattggagagaatctgt

SEQ ID NO: 699924 - DNA, 1456 bp, Homo sapiens
  misc_feature 341, 342, 343, 344, 345, 346, 347, 348, 349, 350, 351, 352,353, 354, 355, 356, 357, 358, 359, 360, 361, 362, 363, 364,365, 366, 367, 368, 369, 370, 371, 372, 373, 374, 375, 376,377, 378, 379, 380, 381, 382, 383, 384, 385, 386, 387: n = A,T,C or G
  misc_feature 388, 389, 390, 391, 392, 393, 394, 395, 396, 397, 398, 399,400, 401, 402, 403, 404, 405, 406, 407, 408, 409, 410, 411,412, 413, 414, 415, 416, 417, 418, 419, 420, 421, 422, 423,424, 425, 426, 427, 428, 429, 430, 431, 432, 433, 434: n = A,T,C or G
  misc_feature 435, 436, 437, 438, 439, 440: n = A,T,C or G
tttttaggatctaaaaagataggagaggaaaaataaaacaaaacaaaaacaaataaacaaataaaaaaaaacagaggtgaaaaaccatctaggccaaactttgtacatattataattttgatgaaattgaggctggcattattctgaagtaaagacttagagcttcttcacccaaaagcaaaacttatctaaatagaatatgagtatgaatgtgtgtgtgtgtgtgtgtgtgtgtgtttaaaacttaaaggggaaccatgagaaccaaatttccagcaaatgctatctactttcctctccatacaaggtagaatgtgaagggcaggtgttcatgggggtcnnnnnnnnnnnnnnnnnnnnnnnnnnnnnnnnnnnnnnnnnnnnnnnnnnnnnnnnnnnnnnnnnnnnnnnnnnnnnnnnnnnnnnnnnnnnnnnnnnnncagaatacctgagactgaataacttataaagaaaataaactcatttcatataattctggaagtcaggaagttcacaatcaaggggtccatatctggtgaggaccttcatgctgtcatctcatggtagaaggtggaactagagtgtttatgcaggagaaaaagtgagagagagagagagagagagagagagcggggggaagggggccaaactcatctttatttttgtcagaaaaccactcccgataaaggcattaattattcaggagggtgtggcctaatcccctctttcaggtcccacctctcaacaatgttgcattggtattaagcacataaactttggggaacacattcaaaccatagcactccctgatgatgatcaaaagtagtttatggagacaagtctattgtttgtaagaggataacagaatagtagggatctagtgatttctttacacctatgtggcataaccaagttctgcctttgattctgccagctgggatgctgtttcacttatgtcctgactgaagatagttcttgcacaggatagtttggatgactcgtagaagtagatgactcatctactacttctgttcayagtagatgaacagaaaaactgtgctgagattatcataaaactttttcatttttgtgggaagataaatggtggcatgtggcttgccatttcatactttagagacgccaggtgacattgttgaccaatcagagctcctctttcttctgagacttttccatcatacactcaaggcagccactttcaattattcatcattatggcagcttcttaagttgtagagctgttctctaaaggataaggtgaccacaaaaggcacagtatataaaggcttgcatctccctcacccattaagatattaacatcagggagcatatatgagtggatatagtacaaaagctggggctataggaaacatgcctggaagtgttcagatgcctgtcagtgcctagaggtgccaagtattatggtaagttcagggaa

SEQ ID NO: 699925 - DNA, 657 bp, Homo sapiens
ccggccaatctgccctgccacgtatttttgttggtgtagagagctaagaatgattttaatattttgtaatggttgggaaaaagcaaaggaagaataatattttacagcacataaaaattatacggaattcaaatttcagtgtccataagtaatgttttctgagaacacacctacatccatttgcttacatgttatttatggcagctttgcactataattgcagagttgagtacttgtgacggaagccataccatctgaaaagcctgaaatatatttacaatctgaccctttcctgaaagtttgttaacctcttttcttagcagtggttctcagaatcacctggaagctggttaaaacccagtttgctggacccaccctcagaatycctaactcagcagctttgaagtgggccaagaatttgcaccaagtctccaagggatgcctggtgcctttgatccagggaccacactgctcaagaggcactcatcacaggagtagtcaactcatctccatggagcatgtgttccccgcaagcccatactcttcctgagggtaggaacttcaattctgtttttttccacaatgggacaatgctggagacttcctaagtatttgttgaatgaattaacgaatctgttaattattttgactttttga

SEQ ID NO: 699926 - DNA, 667 bp, Homo sapiens
attaaaacaatttgtgtgtgggggtaaggggttggggttggtacaaatgaggtttcacttttctgcccaggctggtctcaaaatcctggactcaagtggtcttcccaatttggcctcccaaagtgatgggattacaggcatgagccactgcactcagccaattttttttgattgcctttgtgtaccaagttctattagttcaattattttatttaatccttcacttccacttgtttggttcaaggcaccatcatctcttgcttacaggatgtgtaagcctcagccttagctggctgataaataccacccattctcctccccactagtgtattttgctgtagcccgaacaatcttttcaaaacctgaatctaattttgccatccacctgtttaaagccttcaatagctccctattgcttcactcctcaacatgctttataaagctccagtgatccctctcccactgcatctccctcycagcactcctgagtgctctccattcaaccagaccttttttcagtcctgtgtactctttacactgcctcctgccatagacaatctaaacacgtcgctccctctgcttaaacacgcttctgtttttctcttatccacgctaagtctgggacatccctcagatctccatgtaaaaaactgtccacaggagcagc

SEQ ID NO: 699927 - DNA, 600 bp, Homo sapiens
gtaaattgacttaagcaatcacaggaagtttctccttatacaaagtgtgcctgcttcgggttcttgatctgagtcaattctgtgcttrtctgatgtcagcctggcaatagaaccaaggcttttattgtcacctaattctggtttttccttccatgcatgttcttttgaaaaagaactcttctttcttttctctataattcttcatgttaaataactgaaattgtaatgataggtgaagaaagtgggccttagaattctattgaccaggctttcagtgcccagcaagccttcagagcctcggtcttggtgtttgtcttgaggatcctctgcaattatgctgtttaagctccaggtcttgcaaataatagtattgactcaataaaggcagtgacacctgttcgcaattagagcaacggagtgagggtgagattgaggatcagtatataccacgccccctccacctgcaccttaccaccagagtccttactgaaatgagccactgttactcatgggaggatgtgtgggggataggaatgaaagctgtgctacttctgttctcatcccttcccatcttcctccaattcctggggctcttgctta

SEQ ID NO: 699928 - DNA, 459 bp, Homo sapiens
  misc_feature 351, 352, 353, 354, 355, 356, 357, 358, 359, 360, 361, 362,363, 364, 365, 366, 367, 368, 369, 370, 371, 372, 373, 374,375, 376, 377, 378, 379, 380, 381, 382, 383, 384, 385, 386,387, 388, 389, 390, 391, 392, 393, 394, 395, 396, 397: n = A,T,C or G
  misc_feature 398, 399, 400, 401, 402, 403, 404, 405, 406, 407, 408, 409,410, 411, 412, 413, 414, 415, 416, 417, 418, 419, 420, 421,422, 423, 424, 425, 426, 427, 428, 429, 430, 431, 432, 433,434, 435, 436, 437, 438, 439, 440, 441, 442, 443, 444: n = A,T,C or G
  misc_feature 445, 446, 447, 448, 449, 450: n = A,T,C or G
gaagaagaaacaaggatttagagagaagctcaaaagaggtaacaaggtcaaaggaagggatgattttagagtaaggaaggcttaggcatatgtgttggaagcagaaagagtaagcatagaacataagattgaagggaagaaagaaggtatgtaactgatgaacaagacaagagagaacaaggttaacaccccatgtgagaaagcacccttcaaaagagactagcacatcttactttgaaacatgagggaaagagataaagatgggttaaaatatagaattggttttttggttttgtttgttttttgtttgtttkttggggtttggtttggtttgttttgagacagggtgtnnnnnnnnnnnnnnnnnnnnnnnnnnnnnnnnnnnnnnnnnnnnnnnnnnnnnnnnnnnnnnnnnnnnnnnnnnnnnnnnnnnnnnnnnnnnnnnnnnnngagggactg

SEQ ID NO: 699929 - DNA, 1061 bp, Homo sapiens
tgtttcaataaagtaatgatggaactaattaagctctttgggagatggttccccttccacttgaggcagactcaagagtcaacctgcctgtctgtacacgtgactggaaatacagaccayaaatcagtcttgtctgattacacaatgagtctgactcaataaagcagttcttggcttctcacgtaagtaagtaaaagactagaaatactgaaacttcctttagtatactggtacagtaaaaccacaatactttgaaaggttcttcttgaggttaaagcaaactcattcatcctcttaaaaaaaaaaaagatatctctattactatcatctgttcttttcccccagcctacttctaaaacactagttctcaaacattatttttcatcagaatcaccagtatggcttgttaaagacagttgctgggccctatttgcagatatgatctgatacaggttggccttggggcctaagaatttgcatttctcacaatttcccaggtgatgctgatgctgctggtttggggcccatgttttgtgaaactctgttctaaataaaattgaggtaaccaattgaaattatcaatacacctaaataccaatacacctaaagaaaataataaataaccatcttagtttctcctcgggataaatacctcaatcagatttaatcttccaattaatattactttaatcaattctattgctcttccttaaattctctgggtaaaagaaatcaccctgaaaatataaaaattacagttggacaccatatgttaacaaaggcctaatagacagtgaattaagtggaagtagcattccccagctcttgcaagtaacccaataacttaaaaatatccaagtatatattagctttttaggttaaagcacaacattgatcaagaaaggccccatgaggctagtttatcaagcaaaaaatgtattgttcagatttcctgtttatttaatacatattcctgtttatttaaacatagactacctagagataggtagtctatttttcttttaatattttatatttggaacaattaatttttaaaatct

SEQ ID NO: 699930 - DNA, 1694 bp, Homo sapiens
taatagccccacgcctgcaatatctcctttaatattcccaacgtccgctaagcgcgtctcatcaccatttaaagaaaccgtggctcctagaggtaaagtacttcggtcacaacgcgaggaggtccagacttgaccccagacctccagactcgagctgggaagtggccgaggctcctggtgagccgcagggcagcctgcccagccccgggaggaccgcgtgggagggccgggagagcaggtggctgccccccacaagggggcgggctcagccggccagtcctgcccggaacccccggcaacgcgcatacgactacacctgctccggagcccgcggcggtacctgcagcggaggagctctgtcttccccttcatctcacgcgagcccggcgtcccgccgcgtgcgccccggcgcagcccgccagtccgcccggagcccgcccagtcgccgcgctgcacgcccggggtgaaccctctgccctcgctgggacagagggccccgcagccgtcatgctttccgccatctacacagtcctggcgggactgctgttcctgccgctcctggtgaacctctgctgcccatacttcttccaggacataggctacttcttgaaggtggccgccgtgggccggagggtgcgcagctacgggcagcggcggccggcgcgcaccatcctgcgggcgttcctggagaaagcgcgccagacgccacacaagccttttctgctcttccgcgacgagactctcacctacgcgcaggtggaccggcgcagcaatcaagtggcccgggcgctgcacgaccacctcggcctgcgccagggagactgcgtggcgctccttatgggtaacgagccggcctacgtgtggctgtggctggggctggtgaagctgggctgtgccatggcgtgcctcaattacaacatccgcgcgaagtccctgctgcactgcttccagtgctgcggggcgaaggtgctgctggtgtcgccaggtgagccccgaggatcgccctgccctggcaccagggcttctcggcgccttgactgacgagccacagcgtggcataaggggttcgcagagggaggttcagatcggaactgtaggtatagaaaaaggttggcagtgtttccttgaatcgcaaataatgatcttttaggaccacctgttgtggaagctgataatgtgctaggttctgtgttaagcactctacaggcagtgtggtttttaatcctcacaatgggtaggctttgttataggacttttatagatgagaccactgaggtcctgagaggtgaagcctcatgcccagcyatctatctccaaattccaagctcttaatcaatacttataacatctgcattaaaatgcagaggatcttgagtgcgaactctagtggatccagaggggctcttctcacctctgctgcttgactggctgtgtgatcatgggaaagtcacttctcctctctgtcccttggtttgctcctctctaatgaggcaggcttcaatgttgcttccagctctcaactgctgttagcatcctgtcccctccctgcagaacaaaggtgaccccacctgatccccagggagaagatattggggatctgctacaggaccgttgtgagcccccactgcatctatcacaatagtgaccctttcagttctgtggttagctcctgccacatttcagccagacttgaa

SEQ ID NO: 699931 - DNA, 636 bp, Homo sapiens
ttacaaagtctcaggaaagctgaagttggacaacaaccttttttttttttctttttaagagacggggtctcactctgtcaaccaggcaggagtgcagtggcacaatcacagctcactatcrcctcagcctccagagtatccaagactacaagcacacaccaccgtgcctacttatttttttgtagagatggggatctgactttgttgcctgggctggtcttaaactcctggctttaagtgatccttctgtcttggcctcccaaagtgctggaattataggcgtgagccaccatgcccagcctataccacaaccctcattcagctggtctcccccggggaggcttcatctaacagagccaagactgtcctctccatacacttaggtttgtgtttgctacttggtttttatattaatcacctttcacatccatttatatgcaaaattaatagaaataaaggatgcaatttgtcatcaatgatggttcataataatcatttaggcacttgtagaatgaaaactactaaggtttctaggactaagaagaaatactaaagtaatacacttattaccaccaaagccactacattttttgaggtgtatatttcacaaggtatgcataatttagatgacaaatt

SEQ ID NO: 699932 - DNA, 636 bp, Homo sapiens
ttacaaagtctcaggaaagctgaagttggacaacaaccttttttttttttctttttaagagacggggtctcactctgtcaaccaggcaggagtgcagtggcacaatcacagctcactatcacctcagcctccagagtatccaagactacaagcacacaccaccgtgcctacttatttttttgtagagatggggatctgactttgttgcctgggctggtcttaaactcctggctttaagtgatccttctgycttggcctcccaaagtgctggaattataggcgtgagccaccatgcccagcctataccacaaccctcattcagctggtctcccccggggaggcttcatctaacagagccaagactgtcctctccatacacttaggtttgtgtttgctacttggtttttatattaatcacctttcacatccatttatatgcaaaattaatagaaataaaggatgcaatttgtcatcaatgatggttcataataatcatttaggcacttgtagaatgaaaactactaaggtttctaggactaagaagaaatactaaagtaatacacttattaccaccaaagccactacattttttgaggtgtatatttcacaaggtatgcataatttagatgacaaatt

SEQ ID NO: 699933 - DNA, 1320 bp, Homo sapiens
aaaatgtttggctgcattggctcacctctcttctcacccgttcccccaaacctcttctctttctgccttctgccatctggatcaacatttcacttctagaagcaactgtttgccctttataacaatgtaacagcagtttttaaaaaattttctgtcatatgaaggaattaatactattaaaggttgacacacatttgagtcaaattcatgataaattcagaaaagtgcatgcagaaatttaagaagacatcagcaattatcaatgggttatttttgcctcaktttatattagtcaagtgatttagcctttctcactcctctctctcataaccttctaagtcattcataggccaaatatacagtaaatggaaatttcccaagataaatgtagagaactttcacaataaaatgtattaataaactggtggctcacgcctgtaatccgagcactttgggaggccaagggcggggtggatcacctgaggtcaggaattctagagcagcctggccaacatggtgaaaccctgtctctactaaaaatacaaaaattagccaggcgtggtggtgcaggcctgtaatcccagctactctggaggctgaggcaggagaatccctcgaacccaggaggcaaaggttgcagtgagccgagatcatgccactgccttccagcctgagtgacagaataagactccgtctcaaaaaaaaaaaaaaaaaaattaataaatctatgctgaaaaaaaatgttctgtcatggagataaatataagacaaatgacttgcaaactcacacagccaaacaggttgacacccctcaaccttgaactttgtatcttctgacttcagtgtgcctgcctcaagtgcctctgccattccgtgtgctgcaatggctctaacgccacattttacagcaatggtgttgttttgcatgaccattctctgagacagaaaataatcccaaaatattttagcatctgtatactaagtaaggcactgtctgtaaaataagttatccttctaaaatgctgatgatagacatgccatttatctagttccgacaaaagcagtgaaaaaaagttttaatgagacagcattaggcatgtagtatagggtatacttctcattcaatttaaatcttgttcaagtcatccagcagatgtgggactggatagaacaattaaggccaagagctctatggtaggcagagtaatgagcccccaaagatgcccatgtcctaacccctagaatctgggactgtgtcatttcacatggcaaatgggactttgcagatatgattaaattaaggatcttgagatcgggaga

SEQ ID NO: 699934 - DNA, 1320 bp, Homo sapiens
aaaatgtttggctgcattggctcacctctcttctcacccgttcccccaaacctcttctctttctgccttctgccatctggatcaacatttcacttctagaagcaactgtttgccctttataacaatgtaacagcagtttttaaaaaattttctgtcatatgaaggaattaatactattaaaggttgacacacatttgagtcaaattcatgataaattcagaaaagtgcatgcagaaatttaagaagacatcagcaattatcaatgggttatttttgcctcagtttatattagtcaagtgatttagcctttytcactcctctctctcataaccttctaagtcattcataggccaaatatacagtaaatggaaatttcccaagataaatgtagagaactttcacaataaaatgtattaataaactggtggctcacgcctgtaatccgagcactttgggaggccaagggcggggtggatcacctgaggtcaggaattctagagcagcctggccaacatggtgaaaccctgtctctactaaaaatacaaaaattagccaggcgtggtggtgcaggcctgtaatcccagctactctggaggctgaggcaggagaatccctcgaacccaggaggcaaaggttgcagtgagccgagatcatgccactgccttccagcctgagtgacagaataagactccgtctcaaaaaaaaaaaaaaaaaaattaataaatctatgctgaaaaaaaatgttctgtcatggagataaatataagacaaatgacttgcaaactcacacagccaaacaggttgacacccctcaaccttgaactttgtatcttctgacttcagtgtgcctgcctcaagtgcctctgccattccgtgtgctgcaatggctctaacgccacattttacagcaatggtgttgttttgcatgaccattctctgagacagaaaataatcccaaaatattttagcatctgtatactaagtaaggcactgtctgtaaaataagttatccttctaaaatgctgatgatagacatgccatttatctagttccgacaaaagcagtgaaaaaaagttttaatgagacagcattaggcatgtagtatagggtatacttctcattcaatttaaatcttgttcaagtcatccagcagatgtgggactggatagaacaattaaggccaagagctctatggtaggcagagtaatgagcccccaaagatgcccatgtcctaacccctagaatctgggactgtgtcatttcacatggcaaatgggactttgcagatatgattaaattaaggatcttgagatcgggaga

SEQ ID NO: 699935 - DNA, 1225 bp, Homo sapiens
tataattaaatatactgaaaactaaagtataaaacgatagcatctactattgttactattttcattttttgagtgaagagtttaaaattttttctgtttttctcatttactacctaaattaggaacttcatcttttctcaagcagtggctcactcattgatttatccatttatttattccacaaattggatgtctactatttgtcagacaccatgtcaggttctagcaataccaagatgaacaagacagacttggtcattaccacagactttatattgtggcaaagaaagaggcattaaaccaataataaagtgttttaagagttataaagtgcaccaggaaagggaggagtacaaggagttttgcaggcacataagagaagcatctaaaccagttctgaaggcctgagaaagcttccagtttattatataatttaatcaccataacactattatgtctcagcttttgaacaattttaggaataaagcaacgaagtggcagagggaaccaaaatattatcttttctttttaaggcttacagtatataacttagcatgaaagccaaaaatccctgctatctgcatcccagaattaagtgtggtcatgtatccagaccatgtggtactagaccatgttaagcaagaagcacagagctgaactaggcatgccagttattacttccaattttaccactcaagcaaatcactagtgagttaaaaagaaagaaaaaagcagaaagasgtatgaaatctcacatcagtagaatttcttcacttggaagaaaccactgtgagtgggtaagaagcaagtgatttatttatgcaagaaaaaaaccattacctttttctctagctagtttctttttgtcctgctgttctttttaacaaaagaaaaatcactctgaaagtcatctccaacatgctgatggtttctattaacagcaaatacctattgcacaaatggctcaaaatttaataaataactttgatgtataaaactattctcttgccgattcatcaataagagtgaaaatgcagtttgaccagattggacacttcaaatgctttctcttattattaccatatgcttttccaagtgcaaagctgagtgtctaagtcattccacttaaaatgcagtcgattcctgtaataaatgctcattgaaaagtttctgccaagagttttatgctaatttttctctgttctaccctttgaagaatatgata

SEQ ID NO: 699936 - DNA, 615 bp, Homo sapiens
ggttcatacttggtcacgcaggcacacctagctacaatgaaatgtgggcagtacaacctttactctggggcatccaggtgcccagctcaaaactggagtttctactgcaaaagagaaagaggagattgattctctccttcccacaggccaaagagatgattcgcttgggaaaaacgagtctagtgtctagaaaccatggcccttaggtgaaaacccacctgcataattgaaatcataaaagttaaccgtacccagaaaagaccttggaactgacatttaaaaactggtttttttgtctaacaaaaaaccagaggcaagagacactcaaagggcacacagtgaagaacatcccaaattagaagcacttgagggaaaaagtcaatcatacacctrtgcacagggactcactcacatggacccacgtggctctttttcataacaaaactgagccagaatttcagaacatcaccaaatacaaaagtgcttcttatttagcatttgtgattctctgactctgatctttttagatcctggggttctttttcttaaatactttcttaattaaaccttttgagacaactgtagttttatatgcagaggtaagaaatgataccc

SEQ ID NO: 699937 - DNA, 2404 bp, Homo sapiens
gttaaattttttccttttggattgtgcttttgatgtcatatctgagaagtctgcctaacccaaggtcttgaagattttttcttgttgtaaaatttttatagttttagctcttacrttaagatcttgaatccattttgatttaatttttgtataaggtgtgaggtaaggatctaagttaatctcttcgtatatgaatatccagttatcccagcactatttgtcaaaaaatactctccttttcctgttgccttggcacctttgttgagaatcacttgtctgttaaatataagggcttatttttggacactgcattctgttctgttgatttatatgtttatttttatgctagcactatactgaatgttttttaacacaggggagtcatacataatcttgcaaagaggtaatcccacgactcagaagtctttaagtatttgctacaatggcatattttttagatagtatatagtagcttatttacttcatttgtggtttgtagcatgttcagaaggatcctttgagctccttgaggttgcagtacttctttgctttgaagccttctgtcatgtttattccctgaatgtagaataccctctgtctagctgtttatcctccatctctgcatttttctgctctacctgccctgtaggttcaaaatgtggtactgattactgctcgatagtagccttgtgtccttggcaaggtcattttatttctccaggtcttaattttctcatctgtaaagtgaaagaatcagattttatctcactacttttctaaactctgtcgttaatattttccttgttgaacagttacaaggatgtgtaagttaatctcttttaactggtgaaaaagtatattctgttccatagagaattaaatgagcttgtatttcggggggtggtgtgtggtcatcaggggatagaggcaggtatttctggaaaggtgttcttggcaaacattttgttacatacactggtgtatatgacatacatgtccatcactgtatgctgggtgatcaagagatatgtataaggtcatacatgcttttatgattagaaaggagagaaagaatgaacaatttctgttacaaagaaatagccatttttatgaacttgccaagaagaggaatggtccttactgatgaaatccttaaagctttgcatgtggctctttacttgattgatatttaaaagtataggtcccactgggaggctcctttcaacattttccattccttgagtgtttttcccccctttggtattcgaatgcttttattttcttcacataaaatattcctagttaggggggatgggagcccctttccacagctgaagttattccaagttttgttccccctgaagaatcggctctctgttcctgaagctttcaatggccacatctgctgctttatttccactcaataagttggaatatattttcatttagttattgattaggggctatgtaaaaatctgaaggaaattagtaaatagtaatgtttatgaataacattttacctagaaatttctaagcgtaatgaaataagaggataaaaattgttagaggttggagttttggatgaaggtaccaggaagcagagatccaataaatcagtatcagaatctgcatgtctttcaataaacttaagaaattgttttaaacactaggaattattagtctgtcttctgaatttaggattaaatgacagtttcttttcctgaagtttttaatgtggttttcaggattggggtatttattattttcctttggattacacttataaaaatttttggctggacaaagccttgctgatacctagtatcccactttattaactataacacttgacgaataaacctgcaattgcttgacgaatatggtcactttttaaagtatgtgggaacaacattcttctctcgtcttcttgccttcttttccctcccaggaaagcagttgttactattaacaagtatattgtcatcttttgcaactgcacactagattattcagctattttttttcttttttttttcctttgccttccaccatgcgatcaaagtattttttaaatttcactttgcatgaaggtgtactttttcttttgactgattagggcatactggataaaatatttggatccaattttaagtcaagagcagactgaaaatattgtaagagaagatttttaaaattaaatttaattccaattttcaacccactgtgtgagtacctactaaacataaggcagtgtgtttaggtgctgtgggagacaaaaagatgaattagacagaattgatagaatgtagctagattaatatctcccaccattaaaggaaaggaacacagaattataaatgcaaggaagagatttttcagcagcaaccgaacaaggaaaaatgca

SEQ ID NO: 699938 - DNA, 626 bp, Homo sapiens
cagtttccaatatgctataaaataccatatattatttaatattttaatatttagtatactatgttatgtgtcttcactatgattattctgggtgcacatttctttttatttattatagtcgaaagttttttggcttctcgaacctgtggattaggaccctttgtcatttatagaaagtaatccttcattagactatatgctgctgataaagacatacccgaaactgggtaatttataaaggaaaagaggtttaatggactcacagttccacatggctggggaggcctcacaatcatggtggaaggcaaaggcacgtcttacatggcagcaggcaaaaagcgaatgagaagcaaacgaatgagaagcaagcgaatgagacgcaagcaaagggggtttccccttataaaaccatcagatctcgtgagacctattcactaccacaagaacagtakgagggaaaccacccccataattcaattatctcccaccaggtccctcccacagcatgtgggaattatgggagctataattcaagatgagatttgagtgaagacacagccaaaccatatcacagaccttctcagtctatcttccatgtctctttaagttctatttcatattttcca

SEQ ID NO: 699939 - DNA, 683 bp, Homo sapiens
ttcccggagagcggtacctgctgcctggctttcattcctccaaatgctacaatgggggcctcagatgaaaaggcagctggtccagtgaggcaggtggagagggggtgtcgttcagttcctgctgccaggttggagcctgggccctcagactccagctggatattagtggagactcaacactcttgcagttctctgcacttggtccactccgaaagagggaaagtcatcattctctcctttatacttcacaagggctttgttggcttgttttctgtagagctyggtatccttgagggaatctaagaggacgggactatccttggtattggccaatgctgaagagactagagaaagaaaatggcagtgtcgcagttaaggtttgaaaatggcaatgggggctcagtggaaggaaggacaataactttcattttacagatagacaaatggaaggttgggggatgtaagtgacttcttcaagatgaatcagccaaccagcaacagaactgaactgctgatccttccttcctttcctatgatgcccgagtctcagttgttacccctactcgtgatgcctccaccactgccactcatcaagtgctaatattttaaagaagtcctcctgtgtttgtcaaaagggagaaggtatcattaacataaaattttgcccagagacaggagaagat

SEQ ID NO: 699940 - DNA, 683 bp, Homo sapiens
ttcccggagagcggtacctgctgcctggctttcattcctccaaatgctacaatgggggcctcagatgaaaaggcagctggtccagtgaggcaggtggagagggggtgtcgttcagttcctgctgccaggttggagcctgggccctcagactccagctggatattagtggagactcaacactcttgcagttctctgcacttggtccactccgaaagagggaaagtcatcattctctcctttatacttcacaagggctttgttggcttgttttctgtagagcttggtatccttgagggaatctaaraggacgggactatccttggtattggccaatgctgaagagactagagaaagaaaatggcagtgtcgcagttaaggtttgaaaatggcaatgggggctcagtggaaggaaggacaataactttcattttacagatagacaaatggaaggttgggggatgtaagtgacttcttcaagatgaatcagccaaccagcaacagaactgaactgctgatccttccttcctttcctatgatgcccgagtctcagttgttacccctactcgtgatgcctccaccactgccactcatcaagtgctaatattttaaagaagtcctcctgtgtttgtcaaaagggagaaggtatcattaacataaaattttgcccagagacaggagaagat

SEQ ID NO: 699941 - DNA, 683 bp, Homo sapiens
ttcccggagagcggtacctgctgcctggctttcattcctccaaatgctacaatgggggcctcagatgaaaaggcagctggtccagtgaggcaggtggagagggggtgtcgttcagttcctgctgccaggttggagcctgggccctcagactccagctggatattagtggagactcaacactcttgcagttctctgcacttggtccactccgaaagagggaaagtcatcattctctcctttatacttcacaagggctttgttggcttgttttctgtagagcttggtatccttgagggaatctaagrggacgggactatccttggtattggccaatgctgaagagactagagaaagaaaatggcagtgtcgcagttaaggtttgaaaatggcaatgggggctcagtggaaggaaggacaataactttcattttacagatagacaaatggaaggttgggggatgtaagtgacttcttcaagatgaatcagccaaccagcaacagaactgaactgctgatccttccttcctttcctatgatgcccgagtctcagttgttacccctactcgtgatgcctccaccactgccactcatcaagtgctaatattttaaagaagtcctcctgtgtttgtcaaaagggagaaggtatcattaacataaaattttgcccagagacaggagaagat

SEQ ID NO: 699942 - DNA, 871 bp, Homo sapiens
tttttccttgcctttctgagacagaaattatttatgtgaaaaatcaagtaaaataatttatataatggcattcttccctttaatagggatttggttatcttttctgtcctgaggcactaagttgaaaatcccaaaaaggtggctattatacttgaatgtgcacaggtacaatgtgtttaaaatgcagattccaggagtcatgctacaaaattatgtttcagtatgactggtctagagtgtctgraaatttgccattttaagatggatctcaggtgacttggaacaggtcataattagataacaattttagaaacactgattacttcctgaaatctggaggagtgggctagtgctgctaagcttcatcttgcttcaaatacacagaaatgctgaatataatttaataaagacttatttaatatatagtttatttcaagaaaaagaaggaaaagtatccgttgtgccagaaagagagtcataaacactagaaaaattgtaagtactttccatgtaattgatttaatttaattctcatatttaatttaattttcaccacaattttttaaggtgcagccagtatgaacctacatgctagcatgataaaactgaaatacaattgggtgagataacttaaacctaatattatgccataagtttccatagctgaaaggaaacccaagaagttggctacaaattcaacactttgaacggttcctaaaatctcagataagaagccataaggtgtctgttgcttagatagataatacagacattaactgtatatgatatgattatctacgtagaaaattttaaaaatctgaaaatcaaattttagaagtaagaattctttcttttcttctttttttttttt

SEQ ID NO: 699943 - DNA, 595 bp, Homo sapiens
tgcctttttctcctgtgactgccttatattcaagttctcaaataactattaactgactgcatagttccaccaacaattggagttacttatcatgaatctcttttttaaatgaaacgggcttctggtttgcgtcctgcttctcttgtcctgtccccaagtgcctatgccttaggtgactaactcctaaccttgttcctgtgattgagtccctggccctcaccagccgtgaggcttggtccggagtctcagtcttccttgatctgacccatcctgttgccacctgagcttagcctctgatgttccatatgtaattaacttagtttcccaggtaaccatatcctatttgaaaggtgaggtcacaaggacctcacaatgccgaygtactggggttttatgttctatgttccaactttaaaagggaaagaaagcaacaagtctactatgcataaggctatatatagagagaaggaatttcctgacaatgcttaagatttcttctaattggcaaccttttgaaggttatgatgtactaagcatttatgtaacttacaaagtttggaggtttctggttccaaagctgaaaacagcttgaaga

SEQ ID NO: 699944 - DNA, 2300 bp, Homo sapiens
cattttagcaatactgattattcctatccatgagcatggaatgatttccatttgtttgtgtcatctctgctttcttcgagcagtgctttttaattctcattctagagatctttcacctccctggatagctgtatttctaggtattttattctttttgtggcagttgtgaatgggattgcattcttgatttggctctcagcttggatgttgttgttgtataggaatgctactgttttttgcacattgattttctattctaaaactttgctgtagttgtttatcagattaaagagacttttggaagagactgggattttctagatatagaatcatattgtttatgtgtgtgtgcagttttggtctgttttgttatttattatttcatatagaatacaaaattgtaaccaataccctatcactgctagaaaaattctagatgcgtaccaataaatctgcaatagaacaaagaaaagtgaaagttaattgttcaaaatatgaaattagtctgaattttttctttttctttctgctctgacggtgttattcatataatgaatatttttaatataaaactatcagtagaaacatacataatacgctatagtagatctccactttctatagcctgtgtattatgagattgaactaggctytgaggagataattaaatgctaagagcatttcatgtcatcagtaaataatttttgagcagttactcattggcctaggcacattagaaattataagttaataatgatatgttttccttaacagaagtcagctgcattagaaatagcagactcaattatttaaaagccattatgcagttcctttgcaaatatttatgattaatctactcttgcagtattttgctttaaaatcagaatacacagaaatataccaactttctagactttaacatagtctctcaaaaaacttgattttcaaatccatacattgaatagtaagttattaatttattggttttgtatataaaccagtctaccatagttcctgtcattggctgctgtttaaggcaatatctggaggtttttttaaacatataatttatgtagtctgatttttttgtacagtaatatgctatttcagcaagtttagttacaaatcttagaaaatattaaaagcaaataaagcaaggtaattatgttatcaataatgataaaaaactgtgatgtccagaaagatcacatttattttcttgtaacacccttgcaaacatagcatattgttactttatactcagtctgtaataaagagaatcattcactgattatttgttttttaacttgttaccataaaatatcatatgagtttagtatattactggcataacatttgactctattttatgtttcgtcatgctatgccatttttaaaataatatatctgccatgaaaaaaatgtcaaatagtataaagctataaaatgaaataaaaatcttaacccttgacctcaagctctacatagtacctccttttataaacttattattaataatcaaagcattatacaccttgccatttctacccatatagcagtatatcatagacatccatttctactagcacaaataggtctaagttattctttttggctgcttcatattatttcattgtattaatatacattattgaaccagttttataactaaggaaaattgtaattaatacattttacctacaatttgacacatttatcctgtattggtctgttttgcattgctgtgaagaaatacctgaggctgggtaatttataaagaaaagaagttcactttggcttatggttctgcagactgcacaagaagcaaggtgacagcatctgcttctgatgagggctcaggaagcttacagtcatggcagaaggcaaagggggagctagcatgtcacataatgagagaagaagcaagagaaggagacagcatgagtgaggtgaataggtgcccaggctctttaaacaatcagctctcaagcgaagtaatagaatgagaactcactaatttccaccgtgagcgtaccaagccattcatgaggtattcaccccctgacccagacacttcccactaggcccttcctttaacactggggtaatcacatttcaacatgagatttggagggggacaaatagccaaagtatatcatatctatagaatgagctcttagaaatggacttgataggttgagtttatgtgtgttatcaaattagatatatttacatgtactctaaaagataacaatattttgctgaatgtagtttaccaacctttcattgacacaagaata

SEQ ID NO: 699945 - DNA, 2300 bp, Homo sapiens
cattttagcaatactgattattcctatccatgagcatggaatgatttccatttgtttgtgtcatctctgctttcttcgagcagtgctttttaattctcattctagagatctttcacctccctggatagctgtatttctaggtattttattctttttgtggcagttgtgaatgggattgcattcttgatttggctctcagcttggatgttgttgttgtataggaatgctactgttttttgcacattgattttctattctaaaactttgctgtagttgtttatcagattaaagagacttttggaagagactgggattttctagatatagaatcatattgtttatgtgtgtgtgcagttttggtctgttttgttatttattatttcatatagaatacaaaattgtaaccaataccctatcactgctagaaaaattctagatgcgtaccaataaatctgcaatagaacaaagaaaagtgaaagttaattgttcaaaatatgaaattagtctgaattttttctttttctttctgctctgacggtgttattcatataatgaatatttttaatataaaactatcagtagaaacatacataatacgctatagtagatctccactttctatagcctgtgtattatgagattgaactaggctctgaggagataattaaatgctaagagcatttcatgtcatcagtaaataatttttgagcagttactcattggcctaggcacattagaaattataagttaataatgatatgttttccttaacagaagtcagctgcattagaaatagcagactcaattatwtaaaagccattatgcagttcctttgcaaatatttatgattaatctactcttgcagtattttgctttaaaatcagaatacacagaaatataccaactttctagactttaacatagtctctcaaaaaacttgattttcaaatccatacattgaatagtaagttattaatttattggttttgtatataaaccagtctaccatagttcctgtcattggctgctgtttaaggcaatatctggaggtttttttaaacatataatttatgtagtctgatttttttgtacagtaatatgctatttcagcaagtttagttacaaatcttagaaaatattaaaagcaaataaagcaaggtaattatgttatcaataatgataaaaaactgtgatgtccagaaagatcacatttattttcttgtaacacccttgcaaacatagcatattgttactttatactcagtctgtaataaagagaatcattcactgattatttgttttttaacttgttaccataaaatatcatatgagtttagtatattactggcataacatttgactctattttatgtttcgtcatgctatgccatttttaaaataatatatctgccatgaaaaaaatgtcaaatagtataaagctataaaatgaaataaaaatcttaacccttgacctcaagctctacatagtacctccttttataaacttattattaataatcaaagcattatacaccttgccatttctacccatatagcagtatatcatagacatccatttctactagcacaaataggtctaagttattctttttggctgcttcatattatttcattgtattaatatacattattgaaccagttttataactaaggaaaattgtaattaatacattttacctacaatttgacacatttatcctgtattggtctgttttgcattgctgtgaagaaatacctgaggctgggtaatttataaagaaaagaagttcactttggcttatggttctgcagactgcacaagaagcaaggtgacagcatctgcttctgatgagggctcaggaagcttacagtcatggcagaaggcaaagggggagctagcatgtcacataatgagagaagaagcaagagaaggagacagcatgagtgaggtgaataggtgcccaggctctttaaacaatcagctctcaagcgaagtaatagaatgagaactcactaatttccaccgtgagcgtaccaagccattcatgaggtattcaccccctgacccagacacttcccactaggcccttcctttaacactggggtaatcacatttcaacatgagatttggagggggacaaatagccaaagtatatcatatctatagaatgagctcttagaaatggacttgataggttgagtttatgtgtgttatcaaattagatatatttacatgtactctaaaagataacaatattttgctgaatgtagtttaccaacctttcattgacacaagaata

SEQ ID NO: 699946 - DNA, 2300 bp, Homo sapiens
cattttagcaatactgattattcctatccatgagcatggaatgatttccatttgtttgtgtcatctctgctttcttcgagcagtgctttttaattctcattctagagatctttcacctccctggatagctgtatttctaggtattttattctttttgtggcagttgtgaatgggattgcattcttgatttggctctcagcttggatgttgttgttgtataggaatgctactgttttttgcacattgattttctattctaaaactttgctgtagttgtttatcagattaaagagacttttggaagagactgggattttctagatatagaatcatattgtttatgtgtgtgtgcagttttggtctgttttgttatttattatttcatatagaatacaaaattgtaaccaataccctatcactgctagaaaaattctagatgcgtaccaataaatctgcaatagaacaaagaaaagtgaaagttaattgttcaaaatatgaaattagtctgaattttttctttttctttctgctctgacggtgttattcatataatgaatatttttaatataaaactatcagtagaaacatacataatacgctatagtagatctccactttctatagcctgtgtattatgagattgaactaggctctgaggagataattaaatgctaagagcatttcatgtcatcagtaaataatttttgagcagttactcattggcctaggcacattagaaattataagttaataatgatatgttttccttaacagaagtcagctgcattagaaatagcagactcaattatttaaaagccattatgcagttcctttgcaaatatttatgattaatctactcttgcagtattttgctttaaaatcagaatacacagaaatataccaactttctagactttaacatagtctctcaaaaaacttgattttcaaatccatacattgaatagtaagttattaatttattggttttgtatataaaccagtctaccatagttcctgtcattggctgctgtttaaggcaatatctggaggtttttttaaayatataatttatgtagtctgatttttttgtacagtaatatgctatttcagcaagtttagttacaaatcttagaaaatattaaaagcaaataaagcaaggtaattatgttatcaataatgataaaaaactgtgatgtccagaaagatcacatttattttcttgtaacacccttgcaaacatagcatattgttactttatactcagtctgtaataaagagaatcattcactgattatttgttttttaacttgttaccataaaatatcatatgagtttagtatattactggcataacatttgactctattttatgtttcgtcatgctatgccatttttaaaataatatatctgccatgaaaaaaatgtcaaatagtataaagctataaaatgaaataaaaatcttaacccttgacctcaagctctacatagtacctccttttataaacttattattaataatcaaagcattatacaccttgccatttctacccatatagcagtatatcatagacatccatttctactagcacaaataggtctaagttattctttttggctgcttcatattatttcattgtattaatatacattattgaaccagttttataactaaggaaaattgtaattaatacattttacctacaatttgacacatttatcctgtattggtctgttttgcattgctgtgaagaaatacctgaggctgggtaatttataaagaaaagaagttcactttggcttatggttctgcagactgcacaagaagcaaggtgacagcatctgcttctgatgagggctcaggaagcttacagtcatggcagaaggcaaagggggagctagcatgtcacataatgagagaagaagcaagagaaggagacagcatgagtgaggtgaataggtgcccaggctctttaaacaatcagctctcaagcgaagtaatagaatgagaactcactaatttccaccgtgagcgtaccaagccattcatgaggtattcaccccctgacccagacacttcccactaggcccttcctttaacactggggtaatcacatttcaacatgagatttggagggggacaaatagccaaagtatatcatatctatagaatgagctcttagaaatggacttgataggttgagtttatgtgtgttatcaaattagatatatttacatgtactctaaaagataacaatattttgctgaatgtagtttaccaacctttcattgacacaagaata

SEQ ID NO: 699947 - DNA, 2300 bp, Homo sapiens
cattttagcaatactgattattcctatccatgagcatggaatgatttccatttgtttgtgtcatctctgctttcttcgagcagtgctttttaattctcattctagagatctttcacctccctggatagctgtatttctaggtattttattctttttgtggcagttgtgaatgggattgcattcttgatttggctctcagcttggatgttgttgttgtataggaatgctactgttttttgcacattgattttctattctaaaactttgctgtagttgtttatcagattaaagagacttttggaagagactgggattttctagatatagaatcatattgtttatgtgtgtgtgcagttttggtctgttttgttatttattatttcatatagaatacaaaattgtaaccaataccctatcactgctagaaaaattctagatgcgtaccaataaatctgcaatagaacaaagaaaagtgaaagttaattgttcaaaatatgaaattagtctgaattttttctttttctttctgctctgacggtgttattcatataatgaatatttttaatataaaactatcagtagaaacatacataatacgctatagtagatctccactttctatagcctgtgtattatgagattgaactaggctctgaggagataattaaatgctaagagcatttcatgtcatcagtaaataatttttgagcagttactcattggcctaggcacattagaaattataagttaataatgatatgttttccttaacagaagtcagctgcattagaaatagcagactcaattatttaaaagccattatgcagttcctttgcaaatatttatgattaatctactcttgcagtattttgctttaaaatcagaatacacagaaatataccaactttctagactttaacatagtctctcaaaaaacttgattttcaaatccatacattgaatagtaagttattaatttattggttttgtatataaaccagtctaccatagttcctgtcattggctgctgtttaaggcaatatctggaggtttttttaaacatataatttatgtagtctgatttttttgtacagtaatatgctatttcagcaagtttagttacaaatcttagaaaatattaaaagcaaataaagcaaggtaattatgttatcaataatgataaaaaactgtgatktccagaaagatcacatttattttcttgtaacacccttgcaaacatagcatattgttactttatactcagtctgtaataaagagaatcattcactgattatttgttttttaacttgttaccataaaatatcatatgagtttagtatattactggcataacatttgactctattttatgtttcgtcatgctatgccatttttaaaataatatatctgccatgaaaaaaatgtcaaatagtataaagctataaaatgaaataaaaatcttaacccttgacctcaagctctacatagtacctccttttataaacttattattaataatcaaagcattatacaccttgccatttctacccatatagcagtatatcatagacatccatttctactagcacaaataggtctaagttattctttttggctgcttcatattatttcattgtattaatatacattattgaaccagttttataactaaggaaaattgtaattaatacattttacctacaatttgacacatttatcctgtattggtctgttttgcattgctgtgaagaaatacctgaggctgggtaatttataaagaaaagaagttcactttggcttatggttctgcagactgcacaagaagcaaggtgacagcatctgcttctgatgagggctcaggaagcttacagtcatggcagaaggcaaagggggagctagcatgtcacataatgagagaagaagcaagagaaggagacagcatgagtgaggtgaataggtgcccaggctctttaaacaatcagctctcaagcgaagtaatagaatgagaactcactaatttccaccgtgagcgtaccaagccattcatgaggtattcaccccctgacccagacacttcccactaggcccttcctttaacactggggtaatcacatttcaacatgagatttggagggggacaaatagccaaagtatatcatatctatagaatgagctcttagaaatggacttgataggttgagtttatgtgtgttatcaaattagatatatttacatgtactctaaaagataacaatattttgctgaatgtagtttaccaacctttcattgacacaagaata

SEQ ID NO: 699948 - DNA, 2300 bp, Homo sapiens
cattttagcaatactgattattcctatccatgagcatggaatgatttccatttgtttgtgtcatctctgctttcttcgagcagtgctttttaattctcattctagagatctttcacctccctggatagctgtatttctaggtattttattctttttgtggcagttgtgaatgggattgcattcttgatttggctctcagcttggatgttgttgttgtataggaatgctactgttttttgcacattgattttctattctaaaactttgctgtagttgtttatcagattaaagagacttttggaagagactgggattttctagatatagaatcatattgtttatgtgtgtgtgcagttttggtctgttttgttatttattatttcatatagaatacaaaattgtaaccaataccctatcactgctagaaaaattctagatgcgtaccaataaatctgcaatagaacaaagaaaagtgaaagttaattgttcaaaatatgaaattagtctgaattttttctttttctttctgctctgacggtgttattcatataatgaatatttttaatataaaactatcagtagaaacatacataatacgctatagtagatctccactttctatagcctgtgtattatgagattgaactaggctctgaggagataattaaatgctaagagcatttcatgtcatcagtaaataatttttgagcagttactcattggcctaggcacattagaaattataagttaataatgatatgttttccttaacagaagtcagctgcattagaaatagcagactcaattatttaaaagccattatgcagttcctttgcaaatatttatgattaatctactcttgcagtattttgctttaaaatcagaatacacagaaatataccaactttctagactttaacatagtctctcaaaaaacttgattttcaaatccatacattgaatagtaagttattaatttattggttttgtatataaaccagtctaccatagttcctgtcattggctgctgtttaaggcaatatctggaggtttttttaaacatataatttatgtagtctgatttttttgtacagtaatatgctatttcagcaagtttagttacaaatcttagaaaatattaaaagcaaataaagcaaggtaattatgttatcaataatgataaaaaactgtgatgtccagaaagatcacatttattttcttgtaacacccttgcaaacatagcatattgttactwtatactcagtctgtaataaagagaatcattcactgattatttgttttttaacttgttaccataaaatatcatatgagtttagtatattactggcataacatttgactctattttatgtttcgtcatgctatgccatttttaaaataatatatctgccatgaaaaaaatgtcaaatagtataaagctataaaatgaaataaaaatcttaacccttgacctcaagctctacatagtacctccttttataaacttattattaataatcaaagcattatacaccttgccatttctacccatatagcagtatatcatagacatccatttctactagcacaaataggtctaagttattctttttggctgcttcatattatttcattgtattaatatacattattgaaccagttttataactaaggaaaattgtaattaatacattttacctacaatttgacacatttatcctgtattggtctgttttgcattgctgtgaagaaatacctgaggctgggtaatttataaagaaaagaagttcactttggcttatggttctgcagactgcacaagaagcaaggtgacagcatctgcttctgatgagggctcaggaagcttacagtcatggcagaaggcaaagggggagctagcatgtcacataatgagagaagaagcaagagaaggagacagcatgagtgaggtgaataggtgcccaggctctttaaacaatcagctctcaagcgaagtaatagaatgagaactcactaatttccaccgtgagcgtaccaagccattcatgaggtattcaccccctgacccagacacttcccactaggcccttcctttaacactggggtaatcacatttcaacatgagatttggagggggacaaatagccaaagtatatcatatctatagaatgagctcttagaaatggacttgataggttgagtttatgtgtgttatcaaattagatatatttacatgtactctaaaagataacaatattttgctgaatgtagtttaccaacctttcattgacacaagaata

SEQ ID NO: 699949 - DNA, 2300 bp, Homo sapiens
cattttagcaatactgattattcctatccatgagcatggaatgatttccatttgtttgtgtcatctctgctttcttcgagcagtgctttttaattctcattctagagatctttcacctccctggatagctgtatttctaggtattttattctttttgtggcagttgtgaatgggattgcattcttgatttggctctcagcttggatgttgttgttgtataggaatgctactgttttttgcacattgattttctattctaaaactttgctgtagttgtttatcagattaaagagacttttggaagagactgggattttctagatatagaatcatattgtttatgtgtgtgtgcagttttggtctgttttgttatttattatttcatatagaatacaaaattgtaaccaataccctatcactgctagaaaaattctagatgcgtaccaataaatctgcaatagaacaaagaaaagtgaaagttaattgttcaaaatatgaaattagtctgaattttttctttttctttctgctctgacggtgttattcatataatgaatatttttaatataaaactatcagtagaaacatacataatacgctatagtagatctccactttctatagcctgtgtattatgagattgaactaggctctgaggagataattaaatgctaagagcatttcatgtcatcagtaaataatttttgagcagttactcattggcctaggcacattagaaattataagttaataatgatatgttttccttaacagaagtcagctgcattagaaatagcagactcaattatttaaaagccattatgcagttcctttgcaaatatttatgattaatctactcttgcagtattttgctttaaaatcagaatacacagaaatataccaactttctagactttaacatagtctctcaaaaaacttgattttcaaatccatacattgaatagtaagttattaatttattggttttgtatataaaccagtctaccatagttcctgtcattggctgctgtttaaggcaatatctggaggtttttttaaacatataatttatgtagtctgatttttttgtacagtaatatgctatttcagcaagtttagttacaaatcttagaaaatattaaaagcaaataaagcaaggtaattatgttatcaataatgataaaaaactgtgatgtccagaaagatcacatttattttcttgtaacacccttgcaaacatagcatattgttactttatactcagtctgtaataaagagaatcattcactgattatttgttttttaacttgttrccataaaatatcatatgagtttagtatattactggcataacatttgactctattttatgtttcgtcatgctatgccatttttaaaataatatatctgccatgaaaaaaatgtcaaatagtataaagctataaaatgaaataaaaatcttaacccttgacctcaagctctacatagtacctccttttataaacttattattaataatcaaagcattatacaccttgccatttctacccatatagcagtatatcatagacatccatttctactagcacaaataggtctaagttattctttttggctgcttcatattatttcattgtattaatatacattattgaaccagttttataactaaggaaaattgtaattaatacattttacctacaatttgacacatttatcctgtattggtctgttttgcattgctgtgaagaaatacctgaggctgggtaatttataaagaaaagaagttcactttggcttatggttctgcagactgcacaagaagcaaggtgacagcatctgcttctgatgagggctcaggaagcttacagtcatggcagaaggcaaagggggagctagcatgtcacataatgagagaagaagcaagagaaggagacagcatgagtgaggtgaataggtgcccaggctctttaaacaatcagctctcaagcgaagtaatagaatgagaactcactaatttccaccgtgagcgtaccaagccattcatgaggtattcaccccctgacccagacacttcccactaggcccttcctttaacactggggtaatcacatttcaacatgagatttggagggggacaaatagccaaagtatatcatatctatagaatgagctcttagaaatggacttgataggttgagtttatgtgtgttatcaaattagatatatttacatgtactctaaaagataacaatattttgctgaatgtagtttaccaacctttcattgacacaagaata

SEQ ID NO: 699950 - DNA, 2226 bp, Homo sapiens
cctgaggtcctcagcagaagcagatgctgacactgtgcttcttgtgcagcctgcagaacagtgagccaaataaacctcttttctttatgaattacccagcctctgatattcctttatagcaacacaaaacagattaacacagactctaatctaataaggatagtgcccttataaagagaggacaagacaccagactcactcgctctctgtcgctctttcttaaggcagtctgagccaacacacatattcaaaaataatctaaaagttgcacatttatttaactgagattaggatataaaagatgggaaagaaagtgctttttgtagcaatggaaacaggaaaaatagcaaaatagttacttaattatagtaataaatcaatagccattacttattggtgtaaaatcaagaagtaacaatacaatgtaattatttagagacatgaaattaaattgtaaaccaaaattcagagaagaaagctgaaaatgttgcatcgggagagatggaaataagtgagaaaatgggaatggagagaggtacaggactttaagttttaaaataaaacgtgttatttatttaaatacttcttaaaattatgtacgttatattttaaagataataaaaataatgaaatttgtgtgtactcatgagagagagagagaaatcagtttgtcctctcaaaagaaaactgtgtctgaatttcagttgcttattttgtaggtgtgtctaaaatggatcttagaaagtaaatagaaacacatttttcctgtaatttaatttatgaaaatatgaaattcataaagctgggtctagaatcgctgtgacctgccttcttaaagtctaaaatctagtgggaaaagtgaatctgcttctcaatggactccacttggcctctcatccctgtggcaagaggatggaaagtactaattccctcaaatgagccttcattttagagctgtgtatggcatcattctcactagaaactaatcactaagagtggggaagaaatatagaaatgtgttcctgaaagaaaaccatgtgaatagatattcacccagtgagtggccaaaacacacacacacacacacacacacacacacacacaaygtcaattagaaaggctaaaccctgtaggttcacaatcaaatgtcagttggctctttctcacaacatctttcactgtaataatgttatcactcgacatgaaggcctagcactaccaaagtgtcttcagcttatttctgcttttgactctccatatttaaacatttgctaagttcaataaagtctactgcttcagtgaccaatttatttcagcatgattatagttctgtatctcattgctgcttgcttagattattgaagtgcctcatcactggtttgagttttctgggtttttttttctttcaccccactctcacaatcacacagttctaatcattttctattttttcttaagtatttcaaatatttttccaaaactataatagcttaaaactaaaaacaagcttattatttatatttaataaactttagttctttaacaggatgtaatattatacaactcttagaattataattctcaagaatgtaggggttatatgcatattatggtgtaatattaaagaaataaaaaagcagattgtgacaacactagttatgcatggtgcaccatgagcacctgaatgaagaaagaaattaattcacaaacaccttggtgtggtattagaattaagtgttttctttatatttttctttaacatccgtgataagacatctgtggtaaagacttccagtgctcaaacattttgatggtctgtctgagcctatggacatttgagaggtttgtgcttctcagtccttttgcagccaggtgagatcatttgactggttttgtccaatggcctgtgatagaagcgacataggacattttcatgctgaagcatttgtttcctggggtgaacatttccagctctctttcttccctttgcacagtgatcagagagtaattttcatgtggagacaggggagccacaggatgtaagcatcttgggtcacatagttattttacagaggacgattgccctgctgagtcatccaggccactgtgcactagacatgcgtgataaataaacctttgttgtgttaacataatgatttatgtgtttatttgttaaagcaagataagttagcttatcctgattagcacatcttttaaatgataaaa

SEQ ID NO: 699951 - DNA, 648 bp, Homo sapiens
ctaaaagcattgaaaacataaaaatattactctgcagcaacccactggaatatactgaaagaacaaaaacagtaatttctatttccaaattttagaacaaattcattttatagaaggaagacaaacaaggccatagcaagttttgccaaatacatgctagtggcaatgacaaatcataacagttggtagagaaaaagacaagaaggtctcttttgcagttttctgatcacctctatatctctgagtgatggcatcctctttggtagcttaagtactatccccagaaattctaatcctgtgagtgttagggagcagacagacgatggttattcaggttattttttattttttatttttgagacgaagtttcgctcttgttgtccaagcacaagggcgcgatctcggctcaccacaacctctgccttatgcgttgaagcgattctcctgcctcagcctcccgagtagctgggattacaggcatgcgccaccacgcccggctcgktttttttttttttgttttttttttaaattagagacggggtttctccatgttggtcaggttggtctcgaactcccgacctcagatgatccatccccctcggcctcccgaagtgctgggattacaggcctgagccaccgcgcccggcc

SEQ ID NO: 699952 - DNA, 648 bp, Homo sapiens
ctaaaagcattgaaaacataaaaatattactctgcagcaacccactggaatatactgaaagaacaaaaacagtaatttctatttccaaattttagaacaaattcattttatagaaggaagacaaacaaggccatagcaagttttgccaaatacatgctagtggcaatgacaaatcataacagttggtagagaaaaagacaagaaggtctcttttgcagttttctgatcacctctatatctctgagtgatggcatcctctttggtagcttaagtactatccccagaaattctaatcctgtgagtgttagggagcagacagacgatggttattcaggttattttttattttttatttttgagacgaagtttcgctcttgttgtccaagcacaagggcgcgatctcggctcaccacaacctctgccttatgcgttgaagcgattctcctgcctcagcctcccgagtagctgggattacaggcatgcgccaccacgcccggctcgttttttttttttttgttttktttttaaattagagacggggtttctccatgttggtcaggttggtctcgaactcccgacctcagatgatccatccccctcggcctcccgaagtgctgggattacaggcctgagccaccgcgcccggcc

SEQ ID NO: 699953 - DNA, 648 bp, Homo sapiens
ctaaaagcattgaaaacataaaaatattactctgcagcaacccactggaatatactgaaagaacaaaaacagtaatttctatttccaaattttagaacaaattcattttatagaaggaagacaaacaaggccatagcaagttttgccaaatacatgctagtggcaatgacaaatcataacagttggtagagaaaaagacaagaaggtctcttttgcagttttctgatcacctctatatctctgagtgatggcatcctctttggtagcttaagtactatccccagaaattctaatcctgtgagtgttagggagcagacagacgatggttattcaggttattttttattttttatttttgagacgaagtttcgctcttgttgtccaagcacaagggcgcgatctcggctcaccacaacctctgccttatgcgttgaagcgattctcctgcctcagcctcccgagtagctgggattacaggcatgcgccaccacgcccggctcgttttttttttttttgttttttttttaaattaragacggggtttctccatgttggtcaggttggtctcgaactcccgacctcagatgatccatccccctcggcctcccgaagtgctgggattacaggcctgagccaccgcgcccggcc

SEQ ID NO: 699954 - DNA, 1018 bp, Homo sapiens
  misc_feature 918, 919, 920, 921, 922, 923, 924, 925, 926, 927, 928, 929,930, 931, 932, 933, 934, 935, 936, 937, 938, 939, 940, 941,942, 943, 944, 945, 946, 947, 948, 949, 950, 951, 952, 953,954, 955, 956, 957, 958, 959, 960, 961, 962, 963, 964: n = A,T,C or G
  misc_feature 965, 966, 967, 968, 969, 970, 971, 972, 973, 974, 975, 976,977, 978, 979, 980, 981, 982, 983, 984, 985, 986, 987, 988,989, 990, 991, 992, 993, 994, 995, 996, 997, 998, 999, 1000,1001, 1002, 1003, 1004, 1005, 1006, 1007, 1008, 1009: n = A,T,C or G
  misc_feature 1010, 1011, 1012, 1013, 1014, 1015, 1016, 1017: n = A,T,C or G
agaaaaggaatcacactggatccttcctcaaagtcagtcaagcaaggcttcctaaatagcctctaagtcccacctccgatggcagaaagaaaagaccagattaacagttgtatacatttgttttgttttctaatctttctgggtcagtggcgtttatctttggtcacttgcattcctcctcagagctctgcttttcctagacaaggactgactgaacgggtatctagctttcctgggctgccagcactttgggaagacctagacaccaccctgaccatcagatcctggtgttatataaagagttctagaaataggttgtgtgagggttagttcctggtctattaccactaactatgagacagacaccactgaggatgtcaatgaggtgctatsggatccccttcgtccctcacccccatcttccatacatttcagcctcaaagccttcatttttatggggtttatagacttctacattagaagtttattggaagaaagggtattattcttctagaaaaagtttttcaaaaccagttactgaacccctgtatacaactcattttttcctctatgcaaaataagctataccttttctgagctgcaaatgtatgggactttaaagagggaataaatcacctgaaaatcttgcttaaaaatgtagattctgggcttctgctctgggattctggttaagtatggcgtgagacccaagaatctgcatttttaaacagcatctcaagtgattctgaggctgatagcccatgcatctgcatgtaaacctctgtgctatacatagtgtatacagattcagtagggtaatgcagtctgataatgcaactggactactatacagggaccctgtccatccccatggcattcactcttatacataactcatgtaaatactccctactttgnnnnnnnnnnnnnnnnnnnnnnnnnnnnnnnnnnnnnnnnnnnnnnnnnnnnnnnnnnnnnnnnnnnnnnnnnnnnnnnnnnnnnnnnnnnnnnnnnnnnc

SEQ ID NO: 699955 - DNA, 895 bp, Homo sapiens
ggccccgtcctcaagttcacagtcaattggtgaggcagatttttgacacataattacagtatgatgtaaaaagcattataataatggtatgtataagctgctatgggatcatggtttaagaagccttaatttatctgatgagaaaggaaggaggtgataaatcaggttataatgatacaataataagtaataatggcaacaacaacaataataatagtggtcatacaccgggcaagtcctaaatacaacagttatagaggggtaggtaagggttgacagttggcataagccaatacaaattaccaggtagggaacaggcccaggatatggcaatacaaatcttgggtaaaaaatgctagcaagtctacctggctagaacatttttgccattgccacaaactcccttcgcacatatttctcatatgtcatctagctaatattgcctccacccgaaagaggccttgaggctcacaggaggtaggtatgcattttgcctctggaaaaacagctggtgtgtggcaacatagaatctaggttagaactcaggtgtctcagacacttgctccatttagtatgtaatgccacctgcccacagacctttgcttaggagagtctttaataaaagaggagtgggaagttcagcatcagggcttgtacctgtaattgcagctacttgagagacagaggcaggagggtcttttgagctcagaagtttgaggccaacctgggtagcatagcaagaccgtctcaaaaaaawaaaaaataaataaataaataaaggtggaattgggagtaggaatttcacaggtgaaccaaggagaaaagagaattgtagtcaggaggtgcatatgcaaagcattaaggaattagagagtttggcaaattctcctagacc

SEQ ID NO: 699956 - DNA, 620 bp, Homo sapiens
tcatttaaaaaagtacaagccattcttagctcacatgctatacacaaaaaggcagcaggccaaagcttgccaacccctgaggtagacatcagggcttagattcaaacctataaaattttgcaactgactaggaggccaaaaaaatctttgtagagtttggacgtctcttagattccgttgccttcattactgctgcctaatacccttctgtataaaacatcaagtaaatacccacctctcctcttttgtagaatggtatttgatgcagcatcctaaagtgctgacactttatttgcagttctctgggaattaactggattcactcagcacgggtatgagcgtkcatgtgtgagtgtgtgctgagacagacttcagtgaactcacggcacgccatgaaagattgcctatgtgaggtaggtatacagtgctattattgtctccacattgcagatgaggaaatggtggcttgaaggagttaagcagcttgttcaaactgactccataaggggagccgaaatccagacgcctgctctcccagctccagcaccagcacggtcagcaccaccccttcctgctctcagcaatcctgagaagacaattagctgtcccgtgaagccctt

SEQ ID NO: 699957 - DNA, 620 bp, Homo sapiens
tcatttaaaaaagtacaagccattcttagctcacatgctatacacaaaaaggcagcaggccaaagcttgccaacccctgaggtagacatcagggcttagattcaaacctataaaattttgcaactgactaggaggccaaaaaaatctttgtagagtttggacgtctcttagattccgttgccttcattactgctgcctaatacccttctgtataaaacatcaagtaaatacccacctctcctcttttgtagaatggtatttgatgcagcatcctaaagtgctgacactttatttgcagttctctgggaattaactggattcactcagcacgggtatgagcgtgcatgtgtgagtgygtgctgagacagacttcagtgaactcacggcacgccatgaaagattgcctatgtgaggtaggtatacagtgctattattgtctccacattgcagatgaggaaatggtggcttgaaggagttaagcagcttgttcaaactgactccataaggggagccgaaatccagacgcctgctctcccagctccagcaccagcacggtcagcaccaccccttcctgctctcagcaatcctgagaagacaattagctgtcccgtgaagccctt

SEQ ID NO: 699958 - DNA, 620 bp, Homo sapiens
tcatttaaaaaagtacaagccattcttagctcacatgctatacacaaaaaggcagcaggccaaagcttgccaacccctgaggtagacatcagggcttagattcaaacctataaaattttgcaactgactaggaggccaaaaaaatctttgtagagtttggacgtctcttagattccgttgccttcattactgctgcctaatacccttctgtataaaacatcaagtaaatacccacctctcctcttttgtagaatggtatttgatgcagcatcctaaagtgctgacactttatttgcagttctctgggaattaactggattcactcagcacgggtatgagcgtgcatgtgtgagtgtgtgctgagacagacttcagtgaactcacggcacgccatgaaagattgcctatgtgaggtaggtatacagtgctattattgyctccacattgcagatgaggaaatggtggcttgaaggagttaagcagcttgttcaaactgactccataaggggagccgaaatccagacgcctgctctcccagctccagcaccagcacggtcagcaccaccccttcctgctctcagcaatcctgagaagacaattagctgtcccgtgaagccctt

SEQ ID NO: 699959 - DNA, 620 bp, Homo sapiens
tcatttaaaaaagtacaagccattcttagctcacatgctatacacaaaaaggcagcaggccaaagcttgccaacccctgaggtagacatcagggcttagattcaaacctataaaattttgcaactgactaggaggccaaaaaaatctttgtagagtttggacgtctcttagattccgttgccttcattactgctgcctaatacccttctgtataaaacatcaagtaaatacccacctctcctcttttgtagaatggtatttgatgcagcatcctaaagtgctgacactttatttgcagttctctgggaattaactggattcactcagcacgggtatgagcgtgcatgtgtgagtgtgtgctgagacagacttcagtgaactcacggcacgccatgaaagattgcctatgtgaggtaggtatacagtgctattattgtctccacattgcrgatgaggaaatggtggcttgaaggagttaagcagcttgttcaaactgactccataaggggagccgaaatccagacgcctgctctcccagctccagcaccagcacggtcagcaccaccccttcctgctctcagcaatcctgagaagacaattagctgtcccgtgaagccctt

SEQ ID NO: 699960 - DNA, 473 bp, Homo sapiens
accctgtaagtagttataccatccccttttgcagatgaagaaatgcaagtatcatctggcagaatggcaaggctagctaataaaaagtcacttcccaaacacaggcctttctgtcctttggaacctacccctccaaggagctgtttccctggaagatgccctcacctaggacagctttgttctwgggggagtctcttacccctgtgagcccatgctccagacgtccacagtgggccttcataccttggctatagaggttaaatcaggtattgatggacacgtgtctgacagagttcgtgttcagagtgttggggaacattgctggagttgtaagctggttctaatcatcagaaaaagtgttggaaagtgggcctctttccttctgtcctctcagggagctggtagctcgtagagactgagaatcacatatcacacaccaccccaaagagatgccatcaagtacagagttgtaa

SEQ ID NO: 699961 - DNA, 2051 bp, Homo sapiens
tgattaacaggactcatttgaaatatttgaaattgaaacagagcattgtgccatcccatgattttaatcccatgccctctatgaacaggtcaaggtcatcagaaaagtgtgtccccactctctaagccagagcccaactgtctttccagacctgacacagataccacctcttccaygggctcttcttcacctgcctaaggcagctttggtgtatggaagtccttctaaatgatgttccatggcaaaagcaatgagacaggatttttggtaaaataaatgtcacaattctgcctgcacgttagaattaactatggagtttttattgttgttttctttaaagtccctgtctgggatcctctctagagctatcagaatccctggggggactggctgtgaggctgattaaggaaccagctttcctcacctgactaacctggtcatgggtcactggtcacttgggggaagacagcaccagagacgtgtgtggagaagtgcagcccccagctgcacaccagagcccccaggcccatggagaagacacttctctggcaggacctcaagcacagcagcccgctccagctcaggagtgagctgagccaggctggagggagccagccactgtgaacgttagtgctgtcttatctagacaaccgctgtctgcaattgcgtggaaaggccgtgagctgaagtcttggctccatgttatcccaggtcatccctccactgtgaaaacttcccaggaatcatcctcccagttaattttctgttcagggatcttggttggatgagactctggcacagtcaccttgtcacttttcttctgccttgcatgacagttttcatgtccatcaccattgatattttggattagatcatttgggggtggggggcaatgggtgggggtgctgtcctgtgtgttgtaggagacttagtagcatctctgacctctacctaatagatgccagtaatactcccctcttcccatctagttgtgacaacccaaaatgtctccacacattgccaaatgtcccctggttgaggacctctgctctataggaagaactaattgagggcagagttcaagtttagttcagctctttgttctcttctagtgctacgcagagtgcctggtgcattgtgggtgtccacccactgactgtgagagatgaactttctgtgtgatggctcgtgcacttctaaacgttggggaaagagagctttgtgagatggtaacctatgattgtcccctcccactcaaggacataggtagcaggctctgtgctgcttctctgcctctggggaggtttgtgacctgacttttatttccaaaaatccactgagatcaacaggatttaagaacaaaatgatttttctctgggttaagaagagatttccagagactggagtaagaattaagagagaggttggtgagtcccaggagtgttctgaggctgtggctggaaatgatgcatcaggaggtttggttctgggctgaggtctccaggtttagccaagacctggagtcccaagtgtagcaagaagctgcagggacctcctgggatgagctaatggacatctgagtggatggggggactgctaacaggtcggactctctggaaacctgggtattatgtaagatctcagatccctgacacaaactctggaggacccagggaagagaaattccaagaatgacggaggcagtatgaaggcttggagttgaaatcaagttgatttatagaaaatagagatgccagtatttctggcacacctgacttttggcttgggatttgtacaaagtacaaagtgccaaattaataatagctaataattattcagtgtgtattgtgtagtagacacctttttcagcttttagtgaattatctcttttaatctttgcaagattccttagtagtttccttgtaatccccaaactagaaataaagaactggaaacatattctagttagatgacttgctcaaggtctcacagcatctcagtggtggaggtggaatgataaaaatagcaaacacgtattctgcatcaagcac

SEQ ID NO: 699962 - DNA, 2051 bp, Homo sapiens
tgattaacaggactcatttgaaatatttgaaattgaaacagagcattgtgccatcccatgattttaatcccatgccctctatgaacaggtcaaggtcatcagaaaagtgtgtccccactctctaagccagagcccaactgtctttccagacctgacacagataccacctcttccacgggctcttcttcacctgcctaaggcagcyttggtgtatggaagtccttctaaatgatgttccatggcaaaagcaatgagacaggatttttggtaaaataaatgtcacaattctgcctgcacgttagaattaactatggagtttttattgttgttttctttaaagtccctgtctgggatcctctctagagctatcagaatccctggggggactggctgtgaggctgattaaggaaccagctttcctcacctgactaacctggtcatgggtcactggtcacttgggggaagacagcaccagagacgtgtgtggagaagtgcagcccccagctgcacaccagagcccccaggcccatggagaagacacttctctggcaggacctcaagcacagcagcccgctccagctcaggagtgagctgagccaggctggagggagccagccactgtgaacgttagtgctgtcttatctagacaaccgctgtctgcaattgcgtggaaaggccgtgagctgaagtcttggctccatgttatcccaggtcatccctccactgtgaaaacttcccaggaatcatcctcccagttaattttctgttcagggatcttggttggatgagactctggcacagtcaccttgtcacttttcttctgccttgcatgacagttttcatgtccatcaccattgatattttggattagatcatttgggggtggggggcaatgggtgggggtgctgtcctgtgtgttgtaggagacttagtagcatctctgacctctacctaatagatgccagtaatactcccctcttcccatctagttgtgacaacccaaaatgtctccacacattgccaaatgtcccctggttgaggacctctgctctataggaagaactaattgagggcagagttcaagtttagttcagctctttgttctcttctagtgctacgcagagtgcctggtgcattgtgggtgtccacccactgactgtgagagatgaactttctgtgtgatggctcgtgcacttctaaacgttggggaaagagagctttgtgagatggtaacctatgattgtcccctcccactcaaggacataggtagcaggctctgtgctgcttctctgcctctggggaggtttgtgacctgacttttatttccaaaaatccactgagatcaacaggatttaagaacaaaatgatttttctctgggttaagaagagatttccagagactggagtaagaattaagagagaggttggtgagtcccaggagtgttctgaggctgtggctggaaatgatgcatcaggaggtttggttctgggctgaggtctccaggtttagccaagacctggagtcccaagtgtagcaagaagctgcagggacctcctgggatgagctaatggacatctgagtggatggggggactgctaacaggtcggactctctggaaacctgggtattatgtaagatctcagatccctgacacaaactctggaggacccagggaagagaaattccaagaatgacggaggcagtatgaaggcttggagttgaaatcaagttgatttatagaaaatagagatgccagtatttctggcacacctgacttttggcttgggatttgtacaaagtacaaagtgccaaattaataatagctaataattattcagtgtgtattgtgtagtagacacctttttcagcttttagtgaattatctcttttaatctttgcaagattccttagtagtttccttgtaatccccaaactagaaataaagaactggaaacatattctagttagatgacttgctcaaggtctcacagcatctcagtggtggaggtggaatgataaaaatagcaaacacgtattctgcatcaagcac

SEQ ID NO: 699963 - DNA, 2051 bp, Homo sapiens
tgattaacaggactcatttgaaatatttgaaattgaaacagagcattgtgccatcccatgattttaatcccatgccctctatgaacaggtcaaggtcatcagaaaagtgtgtccccactctctaagccagagcccaactgtctttccagacctgacacagataccacctcttccacgggctcttcttcacctgcctaaggcagctttggtgtatggaagtccttctaaatgatgttccatggcaaaagcaatgagacaggatttttggtaaaataaatgtcacaattctgcctgcacgttagaattaactatggagtttttattgttgttttctttaaagtccctgtctgggatcctctctagagctatcagaatccctggggggactggctgtraggctgattaaggaaccagctttcctcacctgactaacctggtcatgggtcactggtcacttgggggaagacagcaccagagacgtgtgtggagaagtgcagcccccagctgcacaccagagcccccaggcccatggagaagacacttctctggcaggacctcaagcacagcagcccgctccagctcaggagtgagctgagccaggctggagggagccagccactgtgaacgttagtgctgtcttatctagacaaccgctgtctgcaattgcgtggaaaggccgtgagctgaagtcttggctccatgttatcccaggtcatccctccactgtgaaaacttcccaggaatcatcctcccagttaattttctgttcagggatcttggttggatgagactctggcacagtcaccttgtcacttttcttctgccttgcatgacagttttcatgtccatcaccattgatattttggattagatcatttgggggtggggggcaatgggtgggggtgctgtcctgtgtgttgtaggagacttagtagcatctctgacctctacctaatagatgccagtaatactcccctcttcccatctagttgtgacaacccaaaatgtctccacacattgccaaatgtcccctggttgaggacctctgctctataggaagaactaattgagggcagagttcaagtttagttcagctctttgttctcttctagtgctacgcagagtgcctggtgcattgtgggtgtccacccactgactgtgagagatgaactttctgtgtgatggctcgtgcacttctaaacgttggggaaagagagctttgtgagatggtaacctatgattgtcccctcccactcaaggacataggtagcaggctctgtgctgcttctctgcctctggggaggtttgtgacctgacttttatttccaaaaatccactgagatcaacaggatttaagaacaaaatgatttttctctgggttaagaagagatttccagagactggagtaagaattaagagagaggttggtgagtcccaggagtgttctgaggctgtggctggaaatgatgcatcaggaggtttggttctgggctgaggtctccaggtttagccaagacctggagtcccaagtgtagcaagaagctgcagggacctcctgggatgagctaatggacatctgagtggatggggggactgctaacaggtcggactctctggaaacctgggtattatgtaagatctcagatccctgacacaaactctggaggacccagggaagagaaattccaagaatgacggaggcagtatgaaggcttggagttgaaatcaagttgatttatagaaaatagagatgccagtatttctggcacacctgacttttggcttgggatttgtacaaagtacaaagtgccaaattaataatagctaataattattcagtgtgtattgtgtagtagacacctttttcagcttttagtgaattatctcttttaatctttgcaagattccttagtagtttccttgtaatccccaaactagaaataaagaactggaaacatattctagttagatgacttgctcaaggtctcacagcatctcagtggtggaggtggaatgataaaaatagcaaacacgtattctgcatcaagcac

SEQ ID NO: 699964 - DNA, 2051 bp, Homo sapiens
tgattaacaggactcatttgaaatatttgaaattgaaacagagcattgtgccatcccatgattttaatcccatgccctctatgaacaggtcaaggtcatcagaaaagtgtgtccccactctctaagccagagcccaactgtctttccagacctgacacagataccacctcttccacgggctcttcttcacctgcctaaggcagctttggtgtatggaagtccttctaaatgatgttccatggcaaaagcaatgagacaggatttttggtaaaataaatgtcacaattctgcctgcacgttagaattaactatggagtttttattgttgttttctttaaagtccctgtctgggatcctctctagagctatcagaatccctggggggactggctgtgaggctgattaaggaaccagctttcctcacctgactaacctggtcatgggtcactggtcacttgggggaagacagcaccagagacgtgtgtggagaagtgcagcccccagctgcacaccagagcccccaggcccatggagaagacacttctctggcaggacctcaagcacagcagcccgctccagctcaggagtgagctgagccaggcyggagggagccagccactgtgaacgttagtgctgtcttatctagacaaccgctgtctgcaattgcgtggaaaggccgtgagctgaagtcttggctccatgttatcccaggtcatccctccactgtgaaaacttcccaggaatcatcctcccagttaattttctgttcagggatcttggttggatgagactctggcacagtcaccttgtcacttttcttctgccttgcatgacagttttcatgtccatcaccattgatattttggattagatcatttgggggtggggggcaatgggtgggggtgctgtcctgtgtgttgtaggagacttagtagcatctctgacctctacctaatagatgccagtaatactcccctcttcccatctagttgtgacaacccaaaatgtctccacacattgccaaatgtcccctggttgaggacctctgctctataggaagaactaattgagggcagagttcaagtttagttcagctctttgttctcttctagtgctacgcagagtgcctggtgcattgtgggtgtccacccactgactgtgagagatgaactttctgtgtgatggctcgtgcacttctaaacgttggggaaagagagctttgtgagatggtaacctatgattgtcccctcccactcaaggacataggtagcaggctctgtgctgcttctctgcctctggggaggtttgtgacctgacttttatttccaaaaatccactgagatcaacaggatttaagaacaaaatgatttttctctgggttaagaagagatttccagagactggagtaagaattaagagagaggttggtgagtcccaggagtgttctgaggctgtggctggaaatgatgcatcaggaggtttggttctgggctgaggtctccaggtttagccaagacctggagtcccaagtgtagcaagaagctgcagggacctcctgggatgagctaatggacatctgagtggatggggggactgctaacaggtcggactctctggaaacctgggtattatgtaagatctcagatccctgacacaaactctggaggacccagggaagagaaattccaagaatgacggaggcagtatgaaggcttggagttgaaatcaagttgatttatagaaaatagagatgccagtatttctggcacacctgacttttggcttgggatttgtacaaagtacaaagtgccaaattaataatagctaataattattcagtgtgtattgtgtagtagacacctttttcagcttttagtgaattatctcttttaatctttgcaagattccttagtagtttccttgtaatccccaaactagaaataaagaactggaaacatattctagttagatgacttgctcaaggtctcacagcatctcagtggtggaggtggaatgataaaaatagcaaacacgtattctgcatcaagcac

SEQ ID NO: 699965 - DNA, 2051 bp, Homo sapiens
tgattaacaggactcatttgaaatatttgaaattgaaacagagcattgtgccatcccatgattttaatcccatgccctctatgaacaggtcaaggtcatcagaaaagtgtgtccccactctctaagccagagcccaactgtctttccagacctgacacagataccacctcttccacgggctcttcttcacctgcctaaggcagctttggtgtatggaagtccttctaaatgatgttccatggcaaaagcaatgagacaggatttttggtaaaataaatgtcacaattctgcctgcacgttagaattaactatggagtttttattgttgttttctttaaagtccctgtctgggatcctctctagagctatcagaatccctggggggactggctgtgaggctgattaaggaaccagctttcctcacctgactaacctggtcatgggtcactggtcacttgggggaagacagcaccagagacgtgtgtggagaagtgcagcccccagctgcacaccagagcccccaggcccatggagaagacacttctctggcaggacctcaagcacagcagcccgctccagctcaggagtgagctgagccaggctggagggagccrgccactgtgaacgttagtgctgtcttatctagacaaccgctgtctgcaattgcgtggaaaggccgtgagctgaagtcttggctccatgttatcccaggtcatccctccactgtgaaaacttcccaggaatcatcctcccagttaattttctgttcagggatcttggttggatgagactctggcacagtcaccttgtcacttttcttctgccttgcatgacagttttcatgtccatcaccattgatattttggattagatcatttgggggtggggggcaatgggtgggggtgctgtcctgtgtgttgtaggagacttagtagcatctctgacctctacctaatagatgccagtaatactcccctcttcccatctagttgtgacaacccaaaatgtctccacacattgccaaatgtcccctggttgaggacctctgctctataggaagaactaattgagggcagagttcaagtttagttcagctctttgttctcttctagtgctacgcagagtgcctggtgcattgtgggtgtccacccactgactgtgagagatgaactttctgtgtgatggctcgtgcacttctaaacgttggggaaagagagctttgtgagatggtaacctatgattgtcccctcccactcaaggacataggtagcaggctctgtgctgcttctctgcctctggggaggtttgtgacctgacttttatttccaaaaatccactgagatcaacaggatttaagaacaaaatgatttttctctgggttaagaagagatttccagagactggagtaagaattaagagagaggttggtgagtcccaggagtgttctgaggctgtggctggaaatgatgcatcaggaggtttggttctgggctgaggtctccaggtttagccaagacctggagtcccaagtgtagcaagaagctgcagggacctcctgggatgagctaatggacatctgagtggatggggggactgctaacaggtcggactctctggaaacctgggtattatgtaagatctcagatccctgacacaaactctggaggacccagggaagagaaattccaagaatgacggaggcagtatgaaggcttggagttgaaatcaagttgatttatagaaaatagagatgccagtatttctggcacacctgacttttggcttgggatttgtacaaagtacaaagtgccaaattaataatagctaataattattcagtgtgtattgtgtagtagacacctttttcagcttttagtgaattatctcttttaatctttgcaagattccttagtagtttccttgtaatccccaaactagaaataaagaactggaaacatattctagttagatgacttgctcaaggtctcacagcatctcagtggtggaggtggaatgataaaaatagcaaacacgtattctgcatcaagcac

SEQ ID NO: 699966 - DNA, 2051 bp, Homo sapiens
tgattaacaggactcatttgaaatatttgaaattgaaacagagcattgtgccatcccatgattttaatcccatgccctctatgaacaggtcaaggtcatcagaaaagtgtgtccccactctctaagccagagcccaactgtctttccagacctgacacagataccacctcttccacgggctcttcttcacctgcctaaggcagctttggtgtatggaagtccttctaaatgatgttccatggcaaaagcaatgagacaggatttttggtaaaataaatgtcacaattctgcctgcacgttagaattaactatggagtttttattgttgttttctttaaagtccctgtctgggatcctctctagagctatcagaatccctggggggactggctgtgaggctgattaaggaaccagctttcctcacctgactaacctggtcatgggtcactggtcacttgggggaagacagcaccagagacgtgtgtggagaagtgcagcccccagctgcacaccagagcccccaggcccatggagaagacacttctctggcaggacctcaagcacagcagcccgctccagctcaggagtgagctgagccaggctggagggagccagccactgtgaacgttagtgctgtcttatctagacaaccgctgtctgcaattgygtggaaaggccgtgagctgaagtcttggctccatgttatcccaggtcatccctccactgtgaaaacttcccaggaatcatcctcccagttaattttctgttcagggatcttggttggatgagactctggcacagtcaccttgtcacttttcttctgccttgcatgacagttttcatgtccatcaccattgatattttggattagatcatttgggggtggggggcaatgggtgggggtgctgtcctgtgtgttgtaggagacttagtagcatctctgacctctacctaatagatgccagtaatactcccctcttcccatctagttgtgacaacccaaaatgtctccacacattgccaaatgtcccctggttgaggacctctgctctataggaagaactaattgagggcagagttcaagtttagttcagctctttgttctcttctagtgctacgcagagtgcctggtgcattgtgggtgtccacccactgactgtgagagatgaactttctgtgtgatggctcgtgcacttctaaacgttggggaaagagagctttgtgagatggtaacctatgattgtcccctcccactcaaggacataggtagcaggctctgtgctgcttctctgcctctggggaggtttgtgacctgacttttatttccaaaaatccactgagatcaacaggatttaagaacaaaatgatttttctctgggttaagaagagatttccagagactggagtaagaattaagagagaggttggtgagtcccaggagtgttctgaggctgtggctggaaatgatgcatcaggaggtttggttctgggctgaggtctccaggtttagccaagacctggagtcccaagtgtagcaagaagctgcagggacctcctgggatgagctaatggacatctgagtggatggggggactgctaacaggtcggactctctggaaacctgggtattatgtaagatctcagatccctgacacaaactctggaggacccagggaagagaaattccaagaatgacggaggcagtatgaaggcttggagttgaaatcaagttgatttatagaaaatagagatgccagtatttctggcacacctgacttttggcttgggatttgtacaaagtacaaagtgccaaattaataatagctaataattattcagtgtgtattgtgtagtagacacctttttcagcttttagtgaattatctcttttaatctttgcaagattccttagtagtttccttgtaatccccaaactagaaataaagaactggaaacatattctagttagatgacttgctcaaggtctcacagcatctcagtggtggaggtggaatgataaaaatagcaaacacgtattctgcatcaagcac

SEQ ID NO: 699967 - DNA, 853 bp, Homo sapiens
tttcttttgttttcatttctttgtttaattttgcatattggttacacagttatgttatatattataattttacgggttttgtttttgtttgagacagagtctcactctgtaacccaggctggagtgcagtggcacagtctcagctcactgcagcctgaacctcccaggctcaagcagtcctcccacctcagctttccaagtagccaggactacaggtgtgcaccacaacacctggctaattttttgtatttttggtagagacggcgtttcaccatgttgcccagactggtctcgaactcctggcttcaagtgatcctcctgcctcaacctcccaaagtgctggtattacaggtatgagccactgaccccagccatatataatatatatatataatatttatatatattatatttatatatattatatataaatataatataatatataaataatatatatttatatataatatgtaatatatattatataataatatrtaaataatatatataatatatatatttcatatatattatataatatatattacataatactatatattttatatataatataatataatatattatatatattttatatatataatataatataatatatataaaatatatataatattatatattatataataatatattattatatataatatatatattttatatatggaagagtaaatattatatatatatatttaatgacagggatcttttttttttcttttcaatctagtacctacaaactcagtaaatgctcaataagttgttacaattaatttcagtaggagtagccattatggaaaatccaacccaaatgttagaa

SEQ ID NO: 699968 - DNA, 853 bp, Homo sapiens
tttcttttgttttcatttctttgtttaattttgcatattggttacacagttatgttatatattataattttacgggttttgtttttgtttgagacagagtctcactctgtaacccaggctggagtgcagtggcacagtctcagctcactgcagcctgaacctcccaggctcaagcagtcctcccacctcagctttccaagtagccaggactacaggtgtgcaccacaacacctggctaattttttgtatttttggtagagacggcgtttcaccatgttgcccagactggtctcgaactcctggcttcaagtgatcctcctgcctcaacctcccaaagtgctggtattacaggtatgagccactgaccccagccatatataatatatatatataatatttatatatattatatttatatatattatatataaatataatataatatataaataatatatatttatatataatatgtaatatatattatataataatatgtaaataatatatataatatatatatttcatatatattatataatatatattacataatactatatattttatatataatataatataatatattatatatawtttatatatataatataatataatatatataaaatatatataatattatatattatataataatatattattatatataatatatatattttatatatggaagagtaaatattatatatatatatttaatgacagggatcttttttttttcttttcaatctagtacctacaaactcagtaaatgctcaataagttgttacaattaatttcagtaggagtagccattatggaaaatccaacccaaatgttagaa

SEQ ID NO: 699969 - DNA, 853 bp, Homo sapiens
tttcttttgttttcatttctttgtttaattttgcatattggttacacagttatgttatatattataattttacgggttttgtttttgtttgagacagagtctcactctgtaacccaggctggagtgcagtggcacagtctcagctcactgcagcctgaacctcccaggctcaagcagtcctcccacctcagctttccaagtagccaggactacaggtgtgcaccacaacacctggctaattttttgtatttttggtagagacggcgtttcaccatgttgcccagactggtctcgaactcctggcttcaagtgatcctcctgcctcaacctcccaaagtgctggtattacaggtatgagccactgaccccagccatatataatatatatatataatatttatatatattatatttatatatattatatataaatataatataatatataaataatatatatttatatataatatgtaatatatattatataataatatgtaaataatatatataatatatatatttcatatatattatataatatatattacataatactatatattttatatataatataatataatatattatatatatwttatatatataatataatataatatatataaaatatatataatattatatattatataataatatattattatatataatatatatattttatatatggaagagtaaatattatatatatatatttaatgacagggatcttttttttttcttttcaatctagtacctacaaactcagtaaatgctcaataagttgttacaattaatttcagtaggagtagccattatggaaaatccaacccaaatgttagaa

SEQ ID NO: 699970 - DNA, 1522 bp, Homo sapiens
atttaattaccaaacttcagcctttattttgacaagttgatctctctttttaataaatgtaactggcatttaaagatatgtccatgatggcaaattatgtgactggggtttttaggaaatgttttccaatttggcaataaggaaatatgagagaatttaaatatcataaaaatactagtgagcactcattcaggtgctttttttttcagacacgaaattgggggtgaaggcctttattagaatcagagactgcaaacatttattataatgttaatcctatatcgcttttgattttgtgtgtgtgtgtgtgtgtgtgtgtgtgtgtgagaccttgcccaatttattcaacttatttggtgatttttataatattctatgatatcaccacatttttctgatatctttagaaactcagtgaaattttactagagtactagttatagagtgatttgagagctttcatttcaatgtaaaattttgttagaacgtttatttattcatttaggttttttgattgaataaaccctaaaacatgtttacctagaaaaaatgtaggactcccttaaacatgtttccctagaaaaaatgtagaactctaaggccttctgaattaactgaaagcaattttttccaagaacatttaatagtctccatttctttttgaggaattatactgccatgagcatttttgtgatgtttcatccactgaagtaaaaacttatggcagtttaattccccaaataaaaggggctgctgtaaacataactgagttatcaggaagcagatggttttaattatctacataaaaagctatttatattgggaatttgaaaaaacaatctagaaacaatactcactgtagaaacatacatttaattaatttgggctttaaaaaggaatgacgagtgattattatgtgttacttaaaagtcaaatcgacattaaaggctagttatggaaaacttgagtgcctctgagacaagccttaaagaactgcattgcatatgtaattgtacatttgatctcttacaaataaattcagaggaagaggattattttaaaatcagcacaagctcacttgcatgataaaataatagcctgtgcttgatccagsaagtaagctcatactatagactctacaaagcataccaaattttgtatctaggaacactcattgggacttcagaaccaagggcaattcatgctggataatttttatttttcctccccgaaagattcttttttattttttttttttaagctaggaaacagcgtagggtagtagttaagagcaaacaaccctcaggtacagggttgccaagtttagcaataaaaatacaggacattgagttagatttgaaattcagtataagttccatgcaatactgagacatacttatacttgaaaattatttgttgtttatctgaaattcaaatttaactgagtgttctatatttaatctggcaaccctgtctaggtgccaatcctgtctcagtcacttactagctacatgaatttggg

SEQ ID NO: 699971 - DNA, 668 bp, Homo sapiens
ttttttcagaagggaggacagatcttctcccttttactccatctttgtttaaaataatttatatttgaactcattaaaaaaagaacttttatttttgaactaggggtacctgtgaaggtttgttacattggtaaactcgtgtcatgagggtttgttttatagattatttcatcaaccagatattaagctcagtactcagtaaatatcttctttgtttctctcyctcctcctatcctccaccctcaagtagaccccaggatctgttgttcccttcttcatgttcatgagttctcatcatttaactcccacttataaatgagaacactcagtatttggttttctgtttctgtgttagtttcctaaggataagagcctccagctccatccatgttcccacaaaagacatgattccatcctttttatggctgcataatattccatggtgtatatgtacaacattttctttttccagtctgtcactgatgggcatttaggttgattccacatatttgctattgcgaatagtgatacaatgaacatttgtgttcatgtgtctttattgtagaatattcataattctttgggtatatacccagtaatgggattgctgagtcaaatggtaattctgcatttagctctttgtggagtcaccacactgctttctctaa

SEQ ID NO: 699972 - DNA, 668 bp, Homo sapiens
ttttttcagaagggaggacagatcttctcccttttactccatctttgtttaaaataatttatatttgaactcattaaaaaaagaacttttatttttgaactaggggtacctgtgaaggtttgttacattggtaaactcgtgtcatgagggtttgttttatagattatttcatcaaccagatattaagctcagtactcagtaaatatcttctttgtttctctctctcctyctatcctccaccctcaagtagaccccaggatctgttgttcccttcttcatgttcatgagttctcatcatttaactcccacttataaatgagaacactcagtatttggttttctgtttctgtgttagtttcctaaggataagagcctccagctccatccatgttcccacaaaagacatgattccatcctttttatggctgcataatattccatggtgtatatgtacaacattttctttttccagtctgtcactgatgggcatttaggttgattccacatatttgctattgcgaatagtgatacaatgaacatttgtgttcatgtgtctttattgtagaatattcataattctttgggtatatacccagtaatgggattgctgagtcaaatggtaattctgcatttagctctttgtggagtcaccacactgctttctctaa

SEQ ID NO: 699973 - DNA, 1126 bp, Homo sapiens
ttaagttttttcaataaatagaaaaattaattgatttctttttataatttggcccttcatttcatgaacttggagacctttgtttcaaccttgacattagcacttcttagctagaacacatcggtctttatgcttagagtacccagattcttaatctatcaagtagagttaacaatacctatctamcttctttgtaaaatgtttatgaggattaaatgtggcaacaaaaagaagcacatttattgaattataaaatgtcatatgaatttatgttattgatcaaatgggaatgtgataagatattatttgatagaagatgaaaaggctagatccaaatattctttgaacaattagtaaccagatatgcaaaaattgtctgcaatcttccatgtaaattgagttactaaaagtagaaaaccaattttaagcttttagaaaataggctttcattttgtgccagagtaaattcaactaataaattagtaggacttttgccctctttctagattccttttatgctggttcatgaagatatactcagtcatccaacacctctttagtttgtagctataataatctatgcctgcatattaattttaagataatgaaataagtgttaaacacaagaaacaaatatataccattatagaattttagttaattatttaaaataataatttaaataagaatttccttttatgttgcaaacaaataaaatgcttttacattttttaaactgtcttttattttaggaagaaatcttgtattacatacttatcactgtcatcttcccattgaggtcccattaatattaaaaggagttcagttcaatacattaacatctcagtgagaatctgtctcgttataattatcactgaccttgtcaatttaaaattttagcctgagtcaaaattaaatctcagctattagaaacaaagtaaaagcaaaatgaaaggcagattattcctaattaaaggcataagaagaaatcaatatgttaactgtggaacttgtatgtaaacattacatgtatgtagggatgcatatatatatatatatgtgtgtgtgtgtatatataccccttcagaatattgaaatggtgtataccactttcagttatcttata

SEQ ID NO: 699974 - DNA, 646 bp, Homo sapiens
ataaaagcctgaagctccttatcattgcttgagtatttagtaaattatcacagtcttctctaacaatgactatagacatccccaggaagtgttaacatgttccacaaacgtgtcctggctcacagttgcattcttagctggctctctgctgtctggctgtagatctctgtcctgcgtgccctcctctgcagcatgtcatctcaaccatcttgaatctagattttctcaagctgcaattgctctcttctacaatattttggttcaaatgtaggcatacattcttttctccattttatatgtagyaaaagaaaaaaacttttagtttaatctttttgttaacaagacagttaacaaaatctatccacaatctaaaatattttaaaattctgatgacactacagataaatttacagttatttactagaagtactgctgtcctattccaaaaatccaagctctttacagggccccactaataagtgcctgcatgtctggtttctaacttgtctttgtctgatcaaggtcaggtttttgcttgctctcagtttatgaccatcattcaaactcatgtacccgctaatggaagtgacttgtccacctgaaaatggaaattatttccagcatgactcttccactcagaatctag

SEQ ID NO: 699975 - DNA, 623 bp, Homo sapiens
taacttatgtcacaatttttttttaaatttctagaagtcatatactcataaccaaaataaaaattcaggcctatcttcctactatataagctggttaaaaaaaaactaaattaatagggtcatcaatatctattaattctactcaagtgctacaaaagattgcatttactaaattaatgcaaaataatcaaatttcatgtaccacatctcaaagttaaactaaaattrtaaaataaatcattttgaactaacatgcaaaaacctacatttttattaagatttaaataccatcatgtttgtttgaaggtgatggggttcaggaaacattatcataaaatatggcaccttggcatttgaataaacagtaaaaggaggaaagtcactctggatttcctcaacccttcttctctgaagaaggccgtcaaaccttggaaggattttgtgcccgatatggtttagctgtgtccccacccaaatctcatcttgaattgtaactcccatgattcccttgtgttgtgggaggggcccagtgggagatgaatgaatcatgggggtgatttcccccatactgttctagtggtagtgaataagtctcacaagatctgatggttttataaggggaa

SEQ ID NO: 699976 - DNA, 623 bp, Homo sapiens
taacttatgtcacaatttttttttaaatttctagaagtcatatactcataaccaaaataaaaattcaggcctatcttcctactatataagctggttaaaaaaaaactaaattaatagggtcatcaatatctattaattctactcaagtgctacaaaagattgcatttactaaattaatgcaaaataatcaaatttcatgtaccacatctcaaagttaaactaaaattataaaataaatcattttgaactaacatgcaaaaacctacatttttattaagatttaaataccatcatgtttgtttgaaggtgatggggttcaggaaacattatcataaaatatggcaccttggcatttgaataaacagtaaaaggaggaaagtcactctggatttcctcaacccttcttctctgaagaaggccgtcaaaccttggaaggattttgtgcccgatatggtttagctgtgtccccacccaaatctcatcttgaattgtaactcccatgattcccttgtgttgtgggagggrcccagtgggagatgaatgaatcatgggggtgatttcccccatactgttctagtggtagtgaataagtctcacaagatctgatggttttataaggggaa

SEQ ID NO: 699977 - DNA, 647 bp, Homo sapiens
aaagagacttcacaatttattctagggcttctccatgtttaccccagtcaccatcaaagtcaacatttgtcattttgtttattatatgtcacctgcaattaaactttatcactttccataaatccattgattctctcttctttttctccatcctttcttctctctccaaaacccttgaactctatgcagtcattgacttctgctttttgttttcccagcacatttgctttttccttaacactgtcagagcactcctatatagccttgacttaactaaccctcattacactctgcaaaaattgcttcactggccttttcaaggtaggtttgtgttttttctatcccaagtcaaacatataaggagagagaagttttccttttcaccttcattgccatttcttgacaatcacacctttttcctacaaaatatttgctccttatgaagctgctaacttcttcactgctggtctcatacctcacttaaggtgatacttcacttaaggtaacggatacattttggctctgtgtccccacccaaatctcatcttgcagttcccatgattcccrtgtgttatgggagggacccagtgggagatgactgaatcatgagggtgggtctttctagtgctgttcttttgatagtgaat

SEQ ID NO: 699978 - DNA, 1712 bp, Homo sapiens
gttgacgtttagggtagaaatgataccattactcaggtactgagcaaagaatcccaaaggtactttttcaacaattcctttttccctcccttacccctttagtagtcctcaatgtctattgttgccatctttattttcatgagtactaaatgtttagcatctactataaagtgagaacatacagtatttggttttctgttcctgcgcattaattcgcttaggataatggcctccagttgcatccatgttgctacaaaggacatgattttgttcttttttatggttgtgtagtacgccatgatgtatatgtataacatttccttatccaatccactgtagatgggtacctaggttgatttcatgtctttgatattataaaaatagtgctgtgatgaacatatgagtgcatgggtatttttggtagaatgatttgttttcttttggatatatacacagtaatggtattgctggcttgaatgctagttctgtttaaagttctcagagaaatctccaaactgtttttcatagtggctgaactaatttgcatttccaccaacagtgtataagtattctattttctcagcagccttgccagaatttgttgttacaatattttaatgtcaatttttttctttgtgtatattatttgtgtacgtacctatgcatgtgagggggtgtttttgtgtatatacaaawtcaatcttatatcctgtcacttttgtaacattttcttcatgatgattttctcatgccactaaaatagcataaatgttatatgttgttgtatatttttatttaatgtttatgattttatatcagatataatttttaatatattacttccaataatatatcttgtgtattatttgaattgtttaaattttttcattgtttaaatattatcactcatgctgttcatctatcatacgtaatagataaacaaatatcttttttcttcctcaatatttataactagaattcagaatcctcatgaaagagttaaagattatatattatagatgaaatcagttacattaatccaattcatactaaatttatatgaggaattttattataaagattcaaaggtgtcatatataaataaaatattaaaccaagtagatcttaagaatatatctttagggacattctccattcttgacctctctagaataatacattatagaaataatgcccatcagttcttcctgagcttcttagagttcaggtacaaaaaacattattggtcagccctaaaacttagcatgagcctcttgggcttgtttggtttaggagtattccatggataaattaattttggtaggcaattgggtgatctaacagacaaagctacatcgatagtggaatggaagtggaatttatgacacacagatacatatttccacatttatttttaggaatattatactaccaaatattgccatctgaattttgcaaggcacccatttcatgttaccaaataaacatataaaagtatttgttaaaactgccatgaggttacaggaagatggcatccatctgcaaaccaggaagaggactttcatcagaatctgaatgagctggcaccttgatcttggactttccagccctcagaaccataggaataaatttctattgcttaagacattcagtaatggtatatttattacagtattttaaaatgactaagacaaatatattttatgttaatg

SEQ ID NO: 699979 - DNA, 596 bp, Homo sapiens
taacctagttttgtcactcataagtgttgagaatactgaatgattgtttactaacattggtttcaacttccttctagtgtgctgctaaacttacatgccacagactctcttgcatgtattattctgaatggaatgtaagtttcacctttaagtgctcttaaacaaaaggaatctgaagtaaggagaaacaaggcatgagcttctgttttacatgcagaagtggtgaggttttaaacccatcaactctaaaattatttcctaattgaatgagttccatgtcagggaagaaacatgggaaaacactgtaacccagttttgggacatttcatatrgaattcatccttaaacttcaccgattgtctgcttctctgctaacaattctgtaagccatttacaatgccacagcaatgacttttaaattaatttcattagagctgattctagtttcttcaatcaagccctaacttacctttgtacactatgtaacttctgtaagtccgtgtttattcctctagcaaatgtgagaaaaataaaaatattttatcagattgttgtttgcgtattaggtaagagagtatatgagaaatacttagcaa

SEQ ID NO: 699980 - DNA, 596 bp, Homo sapiens
taacctagttttgtcactcataagtgttgagaatactgaatgattgtttactaacattggtttcaacttccttctagtgtgctgctaaacttacatgccacagactctcttgcatgtattattctgaatggaatgtaagtttcacctttaagtgctcttaaacaaaaggaatctgaagtaaggagaaacaaggcatgagcttctgttttacatgcagaagtggtgaggttttaaacccatcaactctaaaattatttcctaattgaatgagttccatgtcagggaagaaacatgggaaaacactgtaacccagttttgggacatttcatatggaattcatccttaaacttcaccgattgtctgcttctctgctaacaattctgtaagccatttacaatrccacagcaatgacttttaaattaatttcattagagctgattctagtttcttcaatcaagccctaacttacctttgtacactatgtaacttctgtaagtccgtgtttattcctctagcaaatgtgagaaaaataaaaatattttatcagattgttgtttgcgtattaggtaagagagtatatgagaaatacttagcaa

SEQ ID NO: 699981 - DNA, 596 bp, Homo sapiens
taacctagttttgtcactcataagtgttgagaatactgaatgattgtttactaacattggtttcaacttccttctagtgtgctgctaaacttacatgccacagactctcttgcatgtattattctgaatggaatgtaagtttcacctttaagtgctcttaaacaaaaggaatctgaagtaaggagaaacaaggcatgagcttctgttttacatgcagaagtggtgaggttttaaacccatcaactctaaaattatttcctaattgaatgagttccatgtcagggaagaaacatgggaaaacactgtaacccagttttgggacatttcatatggaattcatccttaaacttcaccgattgtctgcttctctgctaacaattctgtaagccatttacaatgccacagcaatgacttttaaattaatttcattagagctgattctartttcttcaatcaagccctaacttacctttgtacactatgtaacttctgtaagtccgtgtttattcctctagcaaatgtgagaaaaataaaaatattttatcagattgttgtttgcgtattaggtaagagagtatatgagaaatacttagcaa

SEQ ID NO: 699982 - DNA, 596 bp, Homo sapiens
taacctagttttgtcactcataagtgttgagaatactgaatgattgtttactaacattggtttcaacttccttctagtgtgctgctaaacttacatgccacagactctcttgcatgtattattctgaatggaatgtaagtttcacctttaagtgctcttaaacaaaaggaatctgaagtaaggagaaacaaggcatgagcttctgttttacatgcagaagtggtgaggttttaaacccatcaactctaaaattatttcctaattgaatgagttccatgtcagggaagaaacatgggaaaacactgtaacccagttttgggacatttcatatggaattcatccttaaacttcaccgattgtctgcttctctgctaacaattctgtaagccatttacaatgccacagcaatgacttttaaattaatttcattagagctgattctagtttcttcaatcaagccctaacttacctttgtacactatgtaacttytgtaagtccgtgtttattcctctagcaaatgtgagaaaaataaaaatattttatcagattgttgtttgcgtattaggtaagagagtatatgagaaatacttagcaa

SEQ ID NO: 699983 - DNA, 495 bp, Homo sapiens
tgaatttctacacaattttgaacacctttctctagatctstaatttattttctggatatgttgaaccccttgcctaaatgcaactgaggcaaacttttttttccttttactcagatataccaaagaagcaaatgcattgtgaactcttccccttttttactgagtttcattttctttgtctttctttttctttttcttttttttaagaccttgtagcagtttaatcatatgcctttggaagttctccagcacacttgtaaaaggaaatgacaagcatctagaataatttatccctttagaagagaaaaacgctatttctttagttccatcaactaagctttgactccacaaatttaggcattgtcaatagagagaaatttcatcatctcctcctaacctctctaccataaactatattttctcttttatacctgatagaaaattatctgactttatgtatatcagtgattatatatatatatatatatatatata

SEQ ID NO: 699984 - DNA, 1556 bp, Homo sapiens
tttaagtatcactgcttccataggaacctgctctttgtatgtatgaagatatctcatcccttaaggatgctcactgcaagtacaaccatcagaaatggctgagaaaagaattatctgtgtcttgcattcttgttatgcccagcaaaaatgggtatgaatattcaatatttgtgccagattaactctcccaatattctttaactgcaaattccataagaatctcttggagaatttgtttaaaatccacatttctgaataccacatggaaagattttttttccacagttctgagatattgttcaagaaactgtacatttcacataatcaacacgtgattctgaaacagattattctcctagcacagtatgttattgtccccaaattgtgtatgcacaggcatgccagttgtgaaacaaaaagaaaagagtaaaaagaaagaaacaaacaaaaacttaaacataccacacattccatagtcaaggattaacatgttcatggctctctattatcctggcatatatgaccaattctgaccacagaagagatattatactagattactatctttggcaagatattcatgtttgtggctctctgtaaagtgttttagcwaagacatgaacaaagaagaggtgtgagagagaaatgaatgactctgagtcaaatggagttggaatgttccctcctgagaatcagaggattgttagaataatagtttagaaagaaagtaagacaaagagcctacatacttgagatctgcttttgagcttattcttctataaacaatgtaactttaagaaaatcacagactctgttaattcaattgtaaaatagggatcctacctgccttgactgggagatgctgtgactcagatgagaaaatgagtatagagtatcttgtcagctggaaagtgatatgtggatgccagcaatggtgataattttactctaggtagtttctgccctttaagaaaaatgcagcctactctataaaacaaatacaggactttgaaatacgtcttttcagggtaacatattatctgattagcctgaatatctttcaaattgaaagattacactagtccagctctattaagggatctgttgttagaaagtcttttatttttattttttattttttaagtgcaatggcgtcatctcagctcactgcaaccaccatctttcaggttcaagtgattctcctacctcagcctcccaagtagctgtggttacaggtgcctgccaccacgaccggctagtttttgtatttttagtagagatggagttttgccatgttagccgggctagtcttgaactcctgacctcaggtgatctgcccgcctcggcctcccaaagtgctgggattacaggcgtgagacactgtgcctgaactagaaagtctccttttataatatttttctattgagaattgctactaattagcaatttctacatcattgccttttagtacttaggaaaattaaaaagcaaagagctactcacccagaaggcctcaatgttgtttctatataattatttttctttaactcttgctc

SEQ ID NO: 699985 - DNA, 3107 bp, Homo sapiens
aatatgtgcaagactgctagttgctgacgggtttataaaggtgaataagatatttaaacaattgagtattttgcaaggcagattgaatttagtactaagtaaaagaaaaatgtgctattgtacagagggaaaacttatattgttcttacatgaaagaccaatttacattctaaagaacaaaattacagccaatagaaaagcatatacttttatcaaataaccatattcaccacttacataatgtgaaacaaaattttcctacaatacatttaaaataaaatagattgaatattttcaaagtgtttttgaagcacaaattatcactcttctttactacttcataggactttctggaaagagagcagcacataattggtggcctgaaaataatgctgctctaaaatgcaatggcatttacctttatgaccaaatgaagcaaaaaaaagtaaaaatgaaaataaaatcaaatgataaaccaatagaaagtttaaaaagccaagcagaagagaacctataaaagtacactgaatatatatatacaaaacaataattttctaaatatgcgttattatttctctcagataaatttttctaaaccaatggtagctacctatataaataaacacatggaaaagacattgttttgtctagtaatgtacaaccactgtgatgtaaatgtccaaaatgaacttagaggtgctcagtgctaactttttgtagtgtatctacacatttagtagagtacattttgttttagtgatctaagttttttattcttttattataaatccacctgattttatcatctcctctctatatacattgtcttctacattaagtggaccaaaatggtcatgctctttattgaaattaattaaagaacttttcaaaattatttaatattattttatttttgttatatctatacatgatgctacagtaagcaaaattttcctgcagtattttcacccataatattcttctttggtcttttgacgaagcctcttaactgtcaactgactttgtcatgcctttgtcatggttgagaggactttggttcacaactgggcttctcaaaaaagttgtctatttgtgcacccctcagttattcgtgttgcatgtcattgatgttcccaaatacaaagaaaratatgatttatcgactctacatatttcttatcatcctttacactttttctaaaaaaaaaacacaaaacttaccttttgaaatattttctctcagattccataatattatcagcattttttcattaattcacctattgtttagtcaacaaaaattaattttaggattagtaaacatttccttctctcaagtggaatgtagaggaataaatgtattataaattggtatcattactcccatgatagagataagtatcccgtactaatagaacagtgagtcagacacaatacagttggtgattagagtaatggttatgggtgtaagtacagttttcctgaggaggactatacatgacataagcattaaaagtgagttggcattagccgaatgaaatgaaaataaaggaaaaagctaggtaaggtagaaaggacagtcttatcaaaagaatagcaataaacaatgtagtccagtgtcttactgttactggaaatcacaaagataatttgctggagcataaatatgaaataaaaaattaaagaaagaagttctcaacaatttttttcagaaggaaatatttctcattagtcatttcctgaatgtttaattttttataatgtcaatatctatatgtgccatccagtcttaacagtccattaacgagggtacacatggagcctgtgatgtgagttaaaacatattgatatatccatattgtatgttaccacattctgccaatgtatttctttttcaaagagtccacatagtgcaatgagattttaaagaaagaatatatactctatcatggtcaacagtgtgaaagaaaacaaaagaatatatactctaacaataggaatctaaaatagccttactatattaagtttccataagtatgttgagtatttatttttacctgtctctaataaaaataagtataattgaaaagacacttttcttcaccttaagtctattataaaatggatttctttccaaaaatggaagcctagttcacttagactaactagctggcagaaaacaatgaggacgtttaattaaatctttaaaacatcttactgaaatcatcagaaatctaactctttgcaaaacaaggacgaaatgctagattcaaatatatatattttgcttacaataaattgaggccataatttcgggaaacttttctcttagaaaaatctgcaatagttgatgggtgcaacaaaccaccatggcaggtgtatacctatgtaacaaacctgtacattgtgcacacattccccagaacttaaagtataatttaaaaaaaccaccaacacaaaataatctaatgaactatacacctatgtatatttgccaacacttaataaaaatttaaaatagcagaaaaagaagaaaattaaaacgtgcaatagtaaagtggtggctgagaatcttggcggctcttttaattctccttttggttgagggagacacattttttaatttcatagtccaccgaatgtgttgaaactaatgcttccctttacatatttttaaatggaaccgaaaaggatacaaccatggaatgaagtagagattgcctggttttaaggaaactaaactcaagcttcaattattttaacctccacgataaactagaatcatctggtgttgttattgcatttagactccagcaaacataaattatctctgtatgaagctattatccaacatctgcaataatctctactctttcctcatacactatccaaaactcagtttaagatagcgaggctttctaagatatgagtaaacaaagaaaagaactaaaatgaaaatagttacctagaggttcttgataatggaaatatgataaaaataatattaatacaactatccttaatatgtttcaatagactatagccaagaaaaatcatttctcagaaaactggaaactctaaaaaagaacaagccaaataaaacaaaa

SEQ ID NO: 699986 - DNA, 618 bp, Homo sapiens
tttagaaatataccaaatctctttcttcccaaaacacagcagaacgaaagcctagagctcataagtaaggtctagtgtgacaggtcccccactagattacttaaggatgtaggcctgctgcttgaaccttaaaggctagtcagtgagtcaaggccatgggctctcagggacaccagccattggattcttagggatgccaggcgagaagcaggtgtccctgagaaccaaaacatcccagcgagtagctgagagcctaccaaggaaaacagtcccatctcacacacgcacagtaggcaaaaagccagaaaattagcttgaaagcagcttaaagatgaaaagcggcaggactctttaaagctgccyggctgctgctcagaagtctcccatatgtaagtgttaatcaacttaccaaactggacttgtctgagtcatcttttggttgcctggcagccttccagtctgtgatagtggatgttacagtcccaagtttttctcataacacaaggttcgtagagctacagaatacactactaatgtgcataatcaattgaatttctatgtcctcagaataaacaacccataacttaataaactaattcaatttaaaacatcaatcat

SEQ ID NO: 699987 - DNA, 664 bp, Homo sapiens
tggctctttctccagggcccttcaaccacagtgaaggttacacatcagagggtcattactgtatggaccagagatgagggagttyctggagaagcctgattagagcttctatatgcaagagctgtaagcaggtccccttcagaggcttgtggggatacccggtatcttggctaggcatgaggaatgacagacccctagaggcttccatttgatggaaaagacaaatgggcccctactttctatgtgggcctctatgtctctgactcagatccagccacatgccagaagagaaagggggtgaagcagagacccgcacaggggagctagaggagtaaacagcccaggaagagctggtcaccttttcattttaagagttaaagagaacagagaagaagaagaaaagagtcaggcaatggaatagcaggtgcagccgaaagcgtgcctgcctcagagagagtccattaggggccaagacaccgagcagggacaatgcggctgagacaatggaagcagctgaaaagccgtggaaattgggtgtgcagactcctgccttctgggatgtcttaacagattaataaggcttttgaggatttctagaaacatttatatgagtcagagcccctaaaaggggcccatgggggggttctttgaaagcttctctttt

SEQ ID NO: 699988 - DNA, 664 bp, Homo sapiens
tggctctttctccagggcccttcaaccacagtgaaggttacacatcagagggtcattactgtatggaccagagatgagggagttcctggagaagcctgattagagcttctatatgcaagagctgtaagcargtccccttcagaggcttgtggggatacccggtatcttggctaggcatgaggaatgacagacccctagaggcttccatttgatggaaaagacaaatgggcccctactttctatgtgggcctctatgtctctgactcagatccagccacatgccagaagagaaagggggtgaagcagagacccgcacaggggagctagaggagtaaacagcccaggaagagctggtcaccttttcattttaagagttaaagagaacagagaagaagaagaaaagagtcaggcaatggaatagcaggtgcagccgaaagcgtgcctgcctcagagagagtccattaggggccaagacaccgagcagggacaatgcggctgagacaatggaagcagctgaaaagccgtggaaattgggtgtgcagactcctgccttctgggatgtcttaacagattaataaggcttttgaggatttctagaaacatttatatgagtcagagcccctaaaaggggcccatgggggggttctttgaaagcttctctttt

SEQ ID NO: 699989 - DNA, 1310 bp, Homo sapiens
tgaacagaatttatgaatcctgaactgagaaatgttgtttaatgtcctataagctacaaaatgtagttgctgctactaaaagtcactcttccaaaataaagcttcttggttgcctaccaacataatctgcctttccttcttttttttttttttttttttttaatttgagatggagtttcactcttgtcacccgggctggagtgcaatggcttgatcttagctcactgtaacctctgcctcctgggttcaagcgattctcctgcctcagcctcccgagtagctgggattacaggcgtccgccaccacgcctggctaatttttgtatttttagtagaaacggggtttcaccrtattggccaggctggtctcgaactcctgacctcaggtgatcctcccaccttggcctcctaaagtgttgggattacaggcttgagccactgtgccaggcctgccattccttctttttatgctcctctaaatccattaggatacaggatggggaaagtaagagggaaaaatgacaaagcgtagggaacatttgcttcttatagattacagatttccagacattgaaatgagatctggaagtccatgtttgatatgacttatattacagtttaacaaattaaatacctcccacattggatttaaatagacattgtgaactgtccagagaagagaggcaaactatgttactgctaattcctaagagtccttatgtggcagcacattccctttgggaagacaaaaagtaaaaataaaattaaaaaatgatgactgtgaaaattcatcaatggtaaactacacggatatagtttatgcaagatacttggaccatctataaagctcttggccagtcctgaggctgtactatgggctgaactaggtttctattctcagagcactctgattgtagtaggaattgtacatatttaaaattcaaactttcatttggaatgaattacctagtaatagcataccataaatagaattaaatgacattctaataaacattttaatgaaattcattttttacagaatgaagattggtctattagtgttgagctccgtccgtgcccaagtggtcagacaggaacgtgcttaaatagcgttacacttctcttgaattctgtaagtaataagcttcctaagccttattcagagtcaaatcatatcacttattttataaattcaggatttctgaggttgaagaagagaagttttactatgtataatcaaagcttaagtaaaattgcatagaaaattgatgaagtctctggaagtgccggctagttgcaaaggtcttgaag

SEQ ID NO: 699990 - DNA, 652 bp, Homo sapiens
tttcttggaaagataaaatcatcaatccattaactagacaaggaaaaaatatccaaataaaatcagaaacaaaaaaggagacgttataactgataccacaaaaatacaaagaatcattagaaaccattacaataaactatatgccaataaatgggaaaaccgaatgataattaataaatccctggacacatacaacttaccaagattgaaataagaatagaaaacctggacagatcaatcacaagtaacaagattgaatcagtaattaaaaaaaagtttcccaacaatacttcctgatcaccaggtaaaataagtaagaaaaaaagaactagaacaagacaagaatgtccactctcaccactgttatcaatatagtaatggaagtctgagccagagcaattaggcaagagaagaaaayaaaggacatccaaattggaaaggaggaagccaaactgttcctgtttgtagacagcataatcttatatatatagacaacccttaaagctccactgaaaactcttagaattgataaatgaattcagaatagttgcaggatacaaaattaacattaaaaaaccagttgtgtttctatatacaagaaaatagcagaaaatcaatctcatttataatagctgcaaaaaaaagagtaagt

SEQ ID NO: 699991 - DNA, 602 bp, Homo sapiens
attctgctgtcaaagtagagagggaatggggcttgatgcccttgtttcctgccttagacacaaggacagaagagaaaaaatactagatatcagcagagagmgccaggtgggacaggaccactcaaagctgcagtgggagccatggggacactatgcaagggcacaaggtttgcaggtataaactcttaatctacttcttccatgtgaaacacatcctcaggaacacatcacatcaggaacagcagcactgagttcctctgttgccacttcatcttcatcaatagctaacctagcttgatcatgtggtagatgcagctggataggtctgaggatcctcaagggagaagccagaagagagcagtgtggtttcaaacagcagcaccaccgggtcactgacagcctcgttgttcttgtctgcctcagccttctgctgtagtgtctccacaatggggtggttggggttgatctccaggtgctttttagccatcatataacccatcatagagttgtcccaaaatgcctgcgctttcatgatccacttcatattggctatctagctgtaggtgctggtcacaatgcggcagggtgaagacacaagccta

SEQ ID NO: 699992 - DNA, 602 bp, Homo sapiens
attctgctgtcaaagtagagagggaatggggcttgatgcccttgtttcctgccttagacacaaggacagaagagaaaaaatactagatatcagcagagagagccaggtgggacaggaccactcaaagctgcagtgggagccatggggacactatgcaagggcacaaggtttgcaggtataaactcttaatctacttcttccatgtgaaacacatcctcaggaacacatcacatcaggarcagcagcactgagttcctctgttgccacttcatcttcatcaatagctaacctagcttgatcatgtggtagatgcagctggataggtctgaggatcctcaagggagaagccagaagagagcagtgtggtttcaaacagcagcaccaccgggtcactgacagcctcgttgttcttgtctgcctcagccttctgctgtagtgtctccacaatggggtggttggggttgatctccaggtgctttttagccatcatataacccatcatagagttgtcccaaaatgcctgcgctttcatgatccacttcatattggctatctagctgtaggtgctggtcacaatgcggcagggtgaagacacaagccta

SEQ ID NO: 699993 - DNA, 1311 bp, Homo sapiens
tctggttcatttccactatcccaggaatgcctttcctgatacccagtatgaaaaagggggtgacaaggaaataaacaagatggggaaagctagtaaagagcagagtcaggggtgcaagagaaaaggatagaaacagagaaggggggcagaaacgcatggaaacaaagagaagcacctggagccactggcagcaggaaagcagggcagaggcctgagtctaatgtggaaagggggagggggagaaggagagagaattaggagtccaggcagcaagtgagctgatggatggttctcagccttggtggcagcaactggagtgtgtccacctacaggccaggtgaacccacagggcagaccaggaggacctgggtgggggacagccctacctgagagatacttcagctttccacatcttcactaagttttctcttcatgattttttgttggttgtatactgagacctctgagggatttccttcctttctgcagagggcagtgatgactgttcggaaatgtgtgatggagaagagcgccaggaagcctctagctccctagcaagacgtgggtcaggtaaggacggggggggggatttctggccctgggctgcagagtgtcaggaggttgaatttggagctcgtgtttcctgattgactttcctctgcatatacctcacagtgaaaggatctaattaatcctgagatttttcacattttctgtacatgaatcttttgtgaaatgcagggaggaatctttatacagaagtccatgtttaacagaatgggatttattgtttgaacatatgtgttcaggcagtctagtggtagtcaaaatatgccaaggcaaggcaatgtgttccctcctttatattctcatgcctttcaatactacagtattaaaatattttaccaaataagatctctcgataccctcacaaaaccttaagatgggggcaggcaaactgagtaatcctattttataggtgaagaaataaaggtcagaaatacggtaggaagaagcaatgctcttttgcctttattttttctagctatcaatactattatttgaattyatataaaatttctattctcaggaacaattttacactgttggtgggactgtaaactagttcaaccattgtggaagtcagtgtggtgattcctcagggatctagaactagaaataccatttgactcagccatcccattactgggtatatacccaaaggattataaatcatgctgctataaagacacatgcacacgtatgtttattgtggcactattcacaatagcaaagacttggaaccaaccc

SEQ ID NO: 699994 - DNA, 2148 bp, Homo sapiens
tgtaggactacttcatccagagaactacaggcatatgggaaatactgtgaattaccaaataagtccattgagtgaaacataaagtaaaaatgagtttaagagacagctagacatgtttatgtaggcaaaaggggttggaagatatgctgacaacacaaagaggtgtgttgcaataaacttgaaggggacaggccattgggccaaccatcccttttctatccaggaattccttatgttctcattagtgtctcacatatggacagctgtgttattaaaatttggccgtaaatttgagtcaacgaaagagtctgttgtctccatttttttcttcctttatatattcgatacacaaacacatatatgcaaaagtttcaacttttgttcagggaagtattttatgtccagatgttagatttttgtgactcatggccaaggatgagggaagggctttgtgaacaagcttgttctgatcatgtccacctcggacaagtacatgttcatggcacctcacttgcataaatacaacattctaaactgtcctttcaatggtcacctttagtactgagtcaggcctgaagtttctatggcagagtttcttcagagagaaaatgttttaagggttagagaaaaaggtcagttcttttcattcctttatcttttctcatattttgaaatataccatcagaaaatattttggagaggactggttagacgccaagagtttcactgacccttttagttgttgccattttacatttcttgcctcaggagctggttgagcttttgaacgcattcacatttaatttatatgatgtgggcataacctgcatctgaatataaatacccaacacctgcattagcactttacaactaacaagcacttggatccccactgtctcatttgctctaaatcacaaacctattaggttggcactattatcttttacttatagattagaaactgaggcccacagaagctaagtgacttagccacatttacttgctcaagtgataagtggccaagttaaaactgcctggctccatctttattaaaatacacctgagaacacagatatgagagtgaataaatttccatttttatatgactttttaaaataaagttgggcaaaaaggtaaacaatgakcttatgtctattaggtccatttcgaaacacccccaatccattacacagtaagaacataggcatgtatgctatttagttcttttaagaaaatagtaaagatgccaggcgcggtggctcaagcctgtaatcccagcactttgggaggccgaggggggggtggatcacaaggtcaggagttcaagaccagcctgaccaacatggtgaaaccccatctctactaaaaatacaaaaattagccgggcatggtggtgtgggcctgtaatcccagctactcaggaagctgaggcaggagaattgcttgaacccggggggcggaggttgcagtgagccgagattgcaccactacactccagcctaggcgacagagtgagactctgtctcggaaaaaaaaaaaaagaaaagaaaatagtaaagatgatgctgggcacagtggctcacgcctatagtcccagcacttcgggaggctgaggtgagtggattgcttgagcccaggtcttcgagaccagcttgggcatcatggggaaacttgatctctacaaaaaatacaaaaattagctgggtgtggtggcatttgcctgtagtcccagctactccagaggcgaagatgggaggatcgcttgagcccaggggccaaggctgcagtgaactgtgattgcaccactgcactacagcctgcacaacagagtaagaccctatctcaaaaaaaaaaaagaaaaagaaaaagaaaaagtagtaaagatgattaagaaaaaaattaatatagtcactagttaatgacttctttatagttctgttatcacttttgcattttggttacaaaaatgtacaaatactagagtcaataagtaaatcaaaatactgaagttatttgtttattttaattttaagcgtcataacctttcacagcagaaactcagaccccacctataatatattttaatgagctgacagttactgaaaataatattctcccaacaaaagtcaaattcacattcaaaagcta

SEQ ID NO: 699995 - DNA, 1869 bp, Homo sapiens
aagtgtgatcttcagaccaggagcatcagtattactggagaacttattagaaacggaaattttcaggtccttcctgagacctgattcagaagctctgggaatggttcccagtaatctgttgtaacaagccctataggttattctcttgccactgtactaatcagactcatcttttgatgttagaaggaagcctcttctctgagcatatggccacctacaaagtgaacagaattagtatcctattgctaaggaagaatggtgaggacagttgttgggtaggcaacttgtgtatgtcatttataagttcagtggagaaaatattttgttagttataagagatagaggaaaacccacatttaatttgttaattataagagatagaggaaaactcacatttatttttaagtgatagacactttatataccatattttagttatttttaacaaagtgaggtagattgtgttgcttctatttagaaataagaaagctgaactaaagttcttataacttagccaaagttaaccttagagtatggatttgaatgtatggatatggatacaaatttccctgtatgtactttccactacacacttaagtaacatttaacagtattatctcatggttaagtaggctttttttttttctcgtatcatactcagatatttaatattattagtcctatctgtatataatttatttagaacattaaaactatttctaagcttttcatattccccagtctagacctcttgcattttctacttatgtcataggctaactgtgatctcagacggcaaatagatgaacaacaaaaattacttgaaaaatacaaagaacgattaaataagtgcatatcaatgagcaagaaacttcttattgaaaaggtaggctaaaagttgagtaaattttcgctttcccttcattagccccttttgctttgtatgcttttataaattaatgaatacaattgagtgatgattttttttctccttttcagagtacacaagaaaagctgtcaagcagagagaagagtatgcaagatcgattacgcctcgggcactttacaacagttagacatggcgcttcatttactgaacaatggacagatggttttgcatttcagaatcttgtgaagttagtcattcttaacatttaaaagtttttagtattcgtttgggttttcattactttaaaagattatagatttgtaattatgctctccagttcctcgctactctgaaatcatagaatttagtacctttgaaagggatatgaaaccaagagtattacagttttagcttagtaatttcttgattaattagcagtcatctatagaatgtaatatattattctaattctgactttccgagatattaattgaacctttagctttacagatgatgttttgagagggaaattgttgaaaatttaattttcactggaagatttgtgtgtgtgtttatttcctaggattttcctacttagttttttcccattccccaatccttacatgttaatgttcagcacttgcctgctctctattcctaagggaaaaaacttctcttttgcctcagatataataactgatttatcagttaaactgaacatgtggctttagcgtttctgaggtaaactctatttattatttatttattttaatttcaacttttattttagtttcagggaatatatatgcaggttgttacaggrgtatattgcttgatactgaggttcggggtacaattgaacccaccactcaggtagtgagcatagtacccagtagtttttcaatccttgcccctgtctctgcctccttcatctttgtagcccccagtttctatcattctcatctttatgtccatgtgtc

SEQ ID NO: 699996 - DNA, 1869 bp, Homo sapiens
aagtgtgatcttcagaccaggagcatcagtattactggagaacttattagaaacggaaattttcaggtccttcctgagacctgattcagaagctctgggaatggttcccagtaatctgttgtaacaagccctataggttattctcttgccactgtactaatcagactcatcttttgatgttagaaggaagcctcttctctgagcatatggccacctacaaagtgaacagaattagtatcctattgctaaggaagaatggtgaggacagttgttgggtaggcaacttgtgtatgtcatttataagttcagtggagaaaatattttgttagttataagagatagaggaaaacccacatttaatttgttaattataagagatagaggaaaactcacatttatttttaagtgatagacactttatataccatattttagttatttttaacaaagtgaggtagattgtgttgcttctatttagaaataagaaagctgaactaaagttcttataacttagccaaagttaaccttagagtatggatttgaatgtatggatatggatacaaatttccctgtatgtactttccactacacacttaagtaacatttaacagtattatctcatggttaagtaggctttttttttttctcgtatcatactcagatatttaatattattagtcctatctgtatataatttatttagaacattaaaactatttctaagcttttcatattccccagtctagacctcttgcattttctacttatgtcataggctaactgtgatctcagacggcaaatagatgaacaacaaaaattacttgaaaaatacaaagaacgattaaataagtgcatatcaatgagcaagaaacttcttattgaaaaggtaggctaaaagttgagtaaattttcgctttcccttcattagccccttttgctttgtatgcttttataaattaatgaatacaattgagtgatgattttttttctccttttcagagtacacaagaaaagctgtcaagcagagagaagagtatgcaagatcgattacgcctcgggcactttacaacagttagacatggcgcttcatttactgaacaatggacagatggttttgcatttcagaatcttgtgaagttagtcattcttaacatttaaaagtttttagtattcgtttgggttttcattactttaaaagattatagatttgtaattatgctctccagttcctcgctactctgaaatcatagaatttagtacctttgaaagggatatgaaaccaagagtattacagttttagcttagtaatttcttgattaattagcagtcatctatagaatgtaatatattattctaattctgactttccgagatattaattgaacctttagctttacagatgatgttttgagagggaaattgttgaaaatttaattttcactggaagatttgtgtgtgtgtttatttcctaggattttcctacttagttttttcccattccccaatccttacatgttaatgttcagcacttgcctgctctctattcctaagggaaaaaacttctcttttgcctcagatataataactgatttatcagttaaactgaacatgtggctttagcgtttctgaggtaaactctatttattatttatttattttaatttcaacttttattttagtttcagggaatatatatgcaggttgttacaggggtatattgcwtgatactgaggttcggggtacaattgaacccaccactcaggtagtgagcatagtacccagtagtttttcaatccttgcccctgtctctgcctccttcatctttgtagcccccagtttctatcattctcatctttatgtccatgtgtc

SEQ ID NO: 699997 - DNA, 1759 bp, Homo sapiens
acactgctgaacttataagttcaaatactcttttagttggttccttaggattttttatatacaagatcatgtcatttgccaataaatatagttttacttcatcctttccaatccatatgactttttaaagttacctaattgccttaacaagaacatccagtatcatgttaagcagaagtacagacatccttatattgtttatgatcttagggtatatgcttccagtctttcaccattaagctattgttrgctgtgggttgttcacacatgccttgtatcaggttaaattcccttctattcagttttctgagtgttttttttttttaatcattaaagtgtgttggattttgtcaaatactttctttgcatctattgaaatgattgtgtaatttgttttgttttttattctattgatatatattccatcaattgattttcaggtgttgaaccaagcttgcacaattttgtcagcagcatcttatgttttattacttttaactgacacataataactgtacctatttatggaatacaagcatcttgtgttttgacaggagccaatcatagtttaagcttgacattgtatgtttaagtgttcagcaacaatccctctttctgaagctaactgtcctcattgtacacttctacctgtgaatgtccccttcacatagtttatacatgatattgaaacactacttttgggctcatgctgtaatcctagcactttgggaggttgagatgggaggatcgcttgaggccaggagtttgaaaccagcttggttaatatagtgagacccccatctctactaaataaaacagtaatttacaaattactttgtaataatttaaatcaataatttaaacatatgtaaattataaaaaaaacccacaactctgcttttgggggaaactcctgctcctgcctatgctgctccctcgtgccctgccgcacttctctgctaaatctctaagcatatgtctgtccgctagctcctctttttaccctcatctctttctcctttaccaacttagatgatgacatttttatattttgtgcaggactgcccttatttacctgagcctgttcttctttcacttcatatttctcaccttttatgttttattttatccctgcgctcctttcttcattctatatgcattatattcaaaaaaatatttgaggttaagcttaggaaatctcaccacttagcaatattcactgagcacttactatgtggtaggtactaagctggaaatcagagaaacagagtgacaagatcagaggccctgtcctctgggagctcaccaagaggcaaagaaatgactattgatgatgtacctgtgcaatgcaatgatggacccaagattcagtcctgataaaaagagaggaaactacagattgtataatctgaaacctggcagctctattgccaataaacattctttgtaaatctaatttcacataattctttatttccttctcacttgttttattatcttatgtttctgggttttgcactagctgtcactcttttctgcagctaatggaagtagagacaaggtagtgttgagagcatgaaagtggcaaggcgtcttccctgatatctagtggaaccaccaattcttcccattgccactgccttgagggtggctctcaggcagcaggccaagtgctatgctatccaacggaagcacaactaagtcaaaccaggatttgtgcttacctgactttattcacaacaggttaggcttggtgaaa

SEQ ID NO: 699998 - DNA, 1364 bp, Homo sapiens
ctagtattaatttactggccttatgtcaagccattttgctgtgtcagagtcaattcttggaatattgaatgtgcttcacaggataaacgtaaagaatgtttatataaaactccattttatgatgtacttgccctgactttattttcttgttgatgcagtttttctctgaactcacctgcagaatttgctattaaaaatccaatcagatggagattagaaatgagtgagaataaacatgatggctaactgtggctgtgtgttgatccagaatcaaacttgctaattttgaaaattgatcactcaccagatgatgtctgattgattgtcatcatccaatcagtaaattatgtactgaaaatagacaataattgattaggtagtaagtagtttttgttaattctttttgttttgctttgctttgccttaacctgctttacttacaaattttatccaagacaatgtatccattaaaaacatagaaattaggaaaaagtgcctttatctgtaaagcatttatgtatctaccacattcagtcactattaatgttgtgttgtagaatatttcatatatatatatgtacacacagattgagcatcacaaataaaaaaatctgaaattcaaaacaaccctggtcccaagcatttcagataagggatgctcaccctgtatgtctgtgtgtgtatgtgtgtgtgcacatatgtgtatatgtttgtgtgtctgtgtatatatatggtgctgcataaggtatacaactacattttatcctattatcatttttaccataataatttttatgcaccatcaaaatatttcactaatgtactattgatagccatttagaagtcttcataacaagatttgtggttataaataattgtgtacatctatcttgttttgtagtaatgctttagaatatattcccaaatgtgaatttaatgccgcacaggttattaacatatgaaaaaacgttgatacacaagaactaatggatttcaagaactaatatagaccgcctctgttacgactatttttatttaactttctgacttaattcttgcatgacstgatcatagtttcagagaagcataataatttcaacaagaaatcatcctgtcccactctttacttttttattcattaaattatgttgtgggatatcaggaatttgctgagaattcccttcgactgggtgaacgtttgcaaaaagccacaccatccttggactgtagcatggtgtgctggatagagccagggtaaggactcaaacagacccaagttttcataacagatctaatatttacgaacggtgtaagttctgcaaattacttaacctctgggaaaaccagattcctcctttgtaaaa

SEQ ID NO: 699999 - DNA, 1350 bp, Homo sapiens
tctagttggatacaacagcaatcagtgtcagctgaacaatgatcatttacactgaatagtgaaacagtaccactggaaaaatcatcaggtttatagaccagcaagctgagtgcgtaaaatgttactgtaatgatccatgccaaagtctctctataatccatgccaaagtctctcttctgtcagttatctgtttgtctatatcactctacaacatattatgccctgtgggacaatggctttgtgttcagatgacacatgctcagccaaacagtgttaaatacgtttctcaacactgaaattctctggcatccttaatagctatatatccacaatgtgaagcaattttctaaattttgtgagaagaacacctgtgaaatattgttagaggatgtgtattcattgctcagaaacagaaatcctccttcaatatttgacctaagtgatttaatatttaaatctttcatttatgttacaattgtattttgtttagattctttctttgagtatattctagtaacaagttttgaacttatcctggaggagttaccctggatcacttcatattatttcaagtcaaaagggaaagacaaatgtagccaagataactgagacgatcaaaactgcaaattcaagaggcattgacttgaagttaagagttgagaacatagggccaggcgcggtggctcacacctgtaatcccagcactttgggaggccaaggtgggcagatcatgaggtcaggagattgagaccatcctggctaacacggtgaaacatgctttctactaaaaataaaaaaaattagccgggtgcagtggcgggcgcctgtagtcccagctacttgggaggctgaggcaggagaatggcgtgaacctgggaggcggagcttgcagtgagccgagatcgcgccactgcactccagtctgagggacacagcgagactgtctcaaaaaaaaaaaaaaaaaaaagagttgagaacatagaggtcaaataagcacccaagctatagtcacaggaggtagaaaaacgatcaccaaayctttttgattgcatgttctataagaaaaacaagtacattcacctccaacatacaggtacttctgttcagatatattatgtatgcaattaaataaattaacaaggtttaaagttgagctaaagataaaataaacaatgtatattttaataacttgccattcatttttgctttctgttatcattagctagtaacttaagggcacaatatactcaaggcaatgtttattcttcataataatgatagaaaaaatatattttagtcttccaggtaattttaatacttagtggacaagtgacaatgatgagagtatat

SEQ ID NO: 700000 - DNA, 2177 bp, Homo sapiens
tgcgtcaagatttcttcaactcatggctttatgtggtctatagatgccagtattaattgtggaattgaaagcatgagcatataactccaaagttacttcaaggcaattttataaaacaattatgaatgttgtgaccaaaaagtcatgccataaataaatcaatcctatattctacatgtttctttgcaaataccctatgatctccttgtctcttatctctttttataagataatagtcatgttctgtcctttcttgatacaggatataaaattcttccactttgcttatttgttatttcaatttgtacttcaagctgggtgtctttggcatgacatttaaagtaaacttctgttctttccaacaggatgtataaaatgtttgctacaaattataggtttggaggcagggttttgctttcttcatatggctctatacctttttgcctttctaatgttggctttctaagtctctggtcagttacctgttccctataccaggatggttgataaacccttctctattaagagaaaagagtatatttctgacyggggtttgagcaaaaggtggattctccctcttgacagagctgtgaacaaaaaagctgcttcttttatggtatacccagtgatagtaacaatgaggggaattttgtctgcattagcattctgtgcctactgtcatatgggattcatgagtgtttcttttcttatcctatacctgggaggcacccagtgtaatgaaaaaacatatttgaatttatatgaacagaatgaattctaagttaaaatatggttccctcctctgagaaaactctaaggggatttaattccaggccagtttgtatatctgatgcatgtgttgaaagcatgaaaggtgctgcctgccccttttccagcttctcatcaaaaaataaacccagtaatgttgcagcttctccttattcttaatttttaacccaacagttttacttctatacacacataaatttagagagagagatttaaaatatagttcttctaagcttcgaaactttgaacaactggagatgctagaaagataatattttcttttatttaaaaaatcaactgttattgagatgagactttcatacaattttaatttttcaattttgaactttggttcctaaattcaacaaaagttaagacaagacatagaaggacattgcagctgtcaattttctcaattcataaaataccagtaagaatggtatctgatctcaaagaaataaatacacaagaaagatgtgaattaccttgtcaaaagagcctgagcaatagcgacatatatagatacagcttagctaaaataaggcttagctaaaagtaccgggaaagagatacaataggaagtgttagtcatgaagtaaacctggcttatggcgcttttatgtgaaattttatgactgtgttagttaggcttttttggcaataagtaacaaactcagctcacacaagttaaagcataactgaaactttattggctcaggtaactgtgagggttgtcggggaagctcacaggaaccaagatagttacagttgccaggtctcaagtgctagaaccaaaattcaacatggccaggactctttctttgatctgcccttattcatgctggactttattttgcagaggaagttagttcctccaataaaaatgatgcttgggaacatgttctaggtaagtagctccaatggaatgaagttttctatgtcaatgtctgtccactaaagtcctgtggagagctctgaataggctctgtttggtttcgagatgtctactctggcattagtgtagctggtggaatggaagactcattggccaaggtgagtcatgtgaccaatgaatggataaggagaagaaattttgttgttagaactgtaatgaagggaaaacattctggccatctaaaaatgataaatgcttaagtgttttgctttaactttggacaagataagcttgtatgagtctcagtttccttgtctgtaaattagttataaaatttgccaactaagtgtaccagaaaaattaaaagtaacgtgtaaaaattcctagtaaattgcagaatttaataattcctaatacaattgcagtagttacagacttcaataaatgtgagttccaaccactatctgtatgtcttagtctacttgggctgcaa

SEQ ID NO: 700001 - DNA, 2715 bp, Homo sapiens
aggcttttgttggggttttttgtccataccctgtggtgatttctggttgcccgctgctttcactccatgtctgagacttaagaagcaaacaggaagcccagggagtccctgctgtgtcgctggttctgtcctgagatctgtagctcatctgccttcttctttctaccttttagagtcttcttgcattgatttttatttttaaatatacagtcaaggattttttgttcttagcaggaggaacagagaaacatatgtctaatccatcttcctgaaagcaaaaaccctaccattttctctttaatcataaatgaggtacaaagatgttaaataatttgctaaagcttacacatctattcatccagtagacatgatgttgaagttaattccctctcctcacttttttttcaactctaatagttgtaatgatagtttagggccaaataattgaatgttttaaatgctagtttaaagaatgtagacttttttctaaaggtaacacagaagcgttgaaaacaatttagaagagccagaaagggcatgtgatcaagtcatttggaccaagtttttatttaaaatgggacttaagtctgcgtctatgtctaaaacattttctcttcaacatactcatataatttcttctgaacactggctatcttttggattgtatagctatttttggtttctgcttctaattctcacttgcatttctcgagcctcaaaatagatcaactgggggaacaaggctgcaccttgtcagtttaccaacaatctcaggcagaggatgggtaaggagagtgtcaagggatattctgacagaattgccaaattaaaacagctttaaacatatgtatttagccagcacaccttagcagagcagctgtgagtgcctcttgaaagagccaacatgcattcatctcacagaatccagcttttttgtgctaatttatttgaacagaataagtgtttgtgtatgagtatttatacagaaaacacaygtccatctcatacacaactagaactactgcatatcagatataccatgacaagcaggaaaaacatacgttttattttttcttggatgtattttttcaaaagttccaatgaaatgttttcatccaaacaaataagaatttattgaagtcctagtgtatgcttggtttataacaggatagagattctttatacgttttagctttgagacctgtttcatctttatcaacccctctattcaatctgacctcctgatgttcataagaaaaactcacttcctactcaatgagtaaatcttggccaaatgaacacaattattttaacttttcttttcttcatgtgcatgttcttctcccatttacttctgttcaagaagaaggtgtatcccccacccgccattccaaggctaacgtcttcatctgggaaattctcccccgttccattctcagcctagggcagatgcttctaagtgttcttgcttcacagtgctggcagggtctcagtaactcgttcattgactgctaggccaaaagaattacctaacagttccatttgttaagtcattaagtcccccaaaatggataaaaatgtgtgtcccaatagctttgtatcctctagaaaaaataatttacattaattgcaaaaactattctaagaaagcacaattacttactaataggacaggtatgcctgttgggcacttctcaatttctgaagccttggaatcagacaggatgccaacaccctcacaccctgtttcacagtgattttcacatggtatttgttttgtatcatggcaaatcctgacaacatggtttcaaatcaacaggagcatggtgcagtctaaagtaaaatatgtgtactattttgcaaaagaaattcatcacatggagcttctcaaatttaaaattaaaaatatcccatggtggccatgtgagtttactgtgcttctctcaggcacctgagcacccattgtgtcagccatgggcataatagctgtaagtatcaaccacagagacagacagtgtgagctccagccccacctccgccacatcataggtatgtgacttgggaataaatcacttctcctgtgtttgcagtgtgtactgtgtgtgtggtgtgtgtgtgcaggtgtgtgtgcacatgtcctcacttaaaatttttctggatgatagtatttatttcataggttttaaaaatgcaaattaagtaaactacatatatatacatatatatgatgtatatgtgtgtgtgtgtgtgtgtgtaaattattttcaacaatcccaggcacagagtatacattatataaataagtgttagctatttatgtatgtgttagctatgccctaattttcaaaactttaaaaaaattatctactagatctttcccataagactcaatatatgctaaaggcccctaccagtctaaaaataaaaattttaaagcaacataaaaaagaaagaaaaacatgactttcttaaatattctgaagtcatgtatcctttttttaaaaaaacaaaatcctgctaaaatgctctgaagaattgagctctgctcccaccaccttcccacacatgcatcattcttcactgcatagcatctggtcctccagtactctacttttttgggaaatcttgttctctactgtcttctcagacagtgagatgccttggtcttccttcctttctgactgttagtcaatatacaggtatacctcagagata

SEQ ID NO: 700002 - DNA, 2715 bp, Homo sapiens
aggcttttgttggggttttttgtccataccctgtggtgatttctggttgcccgctgctttcactccatgtctgagacttaagaagcaaacaggaagcccagggagtccctgctgtgtcgctggttctgtcctgagatctgtagctcatctgccttcttctttctaccttttagagtcttcttgcattgatttttatttttaaatatacagtcaaggattttttgttcttagcaggaggaacagagaaacatatgtctaatccatcttcctgaaagcaaaaaccctaccattttctctttaatcataaatgaggtacaaagatgttaaataatttgctaaagcttacacatctattcatccagtagacatgatgttgaagttaattccctctcctcacttttttttcaactctaatagttgtaatgatagtttagggccaaataattgaatgttttaaatgctagtttaaagaatgtagacttttttctaaaggtaacacagaagcgttgaaaacaatttagaagagccagaaagggcatgtgatcaagtcatttggaccaagtttttatttaaaatgggacttaagtctgcgtctatgtctaaaacattttctcttcaacatactcatataatttcttctgaacactggctatcttttggattgtatagctatttttggtttctgcttctaattctcacttgcatttctcgagcctcaaaatagatcaactgggggaacaaggctgcaccttgtcagtttaccaacaatctcaggcagaggatgggtaaggagagtgtcaagggatattctgacagaattgccaaattaaaacagctttaaacatatgtatttagccagcacaccttagcagagcagctgtgagtgcctcttgaaagagccaacatgcattcatctcacagaatccagcttttttgtgctaatttatttgaacagaataagtgtttgtgtatgagtatttatacagaaaacacacgtccatctcatacacaactagaactactgcatatcagatataccatgacaagcaggaaaaacatacgttttattttttcttggatgtattttttcaaaagttccaatgaaatgttttcatccaaacaaataagaatttattgaagtcctagtgtatgcttggtttataacaggatagagattctttatacgttttagctttgagacctgtttcatctttatcaacccctctattcaatctgacctcctgatgttcataagaaaaactcacttcctactcaatgagtaaatcttggccaaatgaacacaattattttaacttttcttttcttcatgtgcatgttcttctcccatttacttctgttcaagaagaaggtgtatcccccacccgccattccaaggctaacgtcttcatctgggaaattctcccccgttccattctcagcctagggcagatgcttctaagtgttcttgcttcacagtgctggcagggtctcagtaactcgttcattgactgctaggccaaaagaattacctaacagttccatttgttaagtcattaagtcccccaaaatggataaaaatgtgtgtcccaatagctttgtatcctctagaaaaaataatttacattaattgcaaaaactattctaagaaagcacaattacttactaataggacaggtatgcctgttgggcacttctcaatttctgaagccttggaatcagacaggatgccaacaccctcacaccctgtttcacagtgattttcacatggtatttgttttgtatcatggcaaatcctgacaacatggtttcaaatcaacaggagcatggtgcagtctaaagtaaaatatgtgtactattttgcaaaagaaattcatcacatggagcttctcaaatttaaaattaaaaatatcccatggtggccatgtgagtttactgtgcttctctcaggcacctgagcacccattgtgtcagccatgggcataatagctgtaagtatcaaccacagagacagacagtgtgagctccagccccacctccgccacatcataggtatgtgacttgggaataaatcacttctcctgtgtttgcagtgtgtactgtgtgtgtggtgtgtgtgtgcaggtgtgtgtgcacatgtcctcacttaaaatttttctggatgatagtatttatttcataggttttaaaaatgcaaattaagtaaactacatatatatacatatatatgatgtatatgtgtgtgtgtgtgtgtgtgtaaattattttcaacaatcccaggcacagagtatacattayataaataagtgttagctatttatgtatgtgttagctatgccctaattttcaaaactttaaaaaaattatctactagatctttcccataagactcaatatatgctaaaggcccctaccagtctaaaaataaaaattttaaagcaacataaaaaagaaagaaaaacatgactttcttaaatattctgaagtcatgtatcctttttttaaaaaaacaaaatcctgctaaaatgctctgaagaattgagctctgctcccaccaccttcccacacatgcatcattcttcactgcatagcatctggtcctccagtactctacttttttgggaaatcttgttctctactgtcttctcagacagtgagatgccttggtcttccttcctttctgactgttagtcaatatacaggtatacctcagagata

SEQ ID NO: 700003 - DNA, 2715 bp, Homo sapiens
aggcttttgttggggttttttgtccataccctgtggtgatttctggttgcccgctgctttcactccatgtctgagacttaagaagcaaacaggaagcccagggagtccctgctgtgtcgctggttctgtcctgagatctgtagctcatctgccttcttctttctaccttttagagtcttcttgcattgatttttatttttaaatatacagtcaaggattttttgttcttagcaggaggaacagagaaacatatgtctaatccatcttcctgaaagcaaaaaccctaccattttctctttaatcataaatgaggtacaaagatgttaaataatttgctaaagcttacacatctattcatccagtagacatgatgttgaagttaattccctctcctcacttttttttcaactctaatagttgtaatgatagtttagggccaaataattgaatgttttaaatgctagtttaaagaatgtagacttttttctaaaggtaacacagaagcgttgaaaacaatttagaagagccagaaagggcatgtgatcaagtcatttggaccaagtttttatttaaaatgggacttaagtctgcgtctatgtctaaaacattttctcttcaacatactcatataatttcttctgaacactggctatcttttggattgtatagctatttttggtttctgcttctaattctcacttgcatttctcgagcctcaaaatagatcaactgggggaacaaggctgcaccttgtcagtttaccaacaatctcaggcagaggatgggtaaggagagtgtcaagggatattctgacagaattgccaaattaaaacagctttaaacatatgtatttagccagcacaccttagcagagcagctgtgagtgcctcttgaaagagccaacatgcattcatctcacagaatccagcttttttgtgctaatttatttgaacagaataagtgtttgtgtatgagtatttatacagaaaacacacgtccatctcatacacaactagaactactgcatatcagatataccatgacaagcaggaaaaacatacgttttattttttcttggatgtattttttcaaaagttccaatgaaatgttttcatccaaacaaataagaatttattgaagtcctagtgtatgcttggtttataacaggatagagattctttatacgttttagctttgagacctgtttcatctttatcaacccctctattcaatctgacctcctgatgttcataagaaaaactcacttcctactcaatgagtaaatcttggccaaatgaacacaattattttaacttttcttttcttcatgtgcatgttcttctcccatttacttctgttcaagaagaaggtgtatcccccacccgccattccaaggctaacgtcttcatctgggaaattctcccccgttccattctcagcctagggcagatgcttctaagtgttcttgcttcacagtgctggcagggtctcagtaactcgttcattgactgctaggccaaaagaattacctaacagttccatttgttaagtcattaagtcccccaaaatggataaaaatgtgtgtcccaatagctttgtatcctctagaaaaaataatttacattaattgcaaaaactattctaagaaagcacaattacttactaataggacaggtatgcctgttgggcacttctcaatttctgaagccttggaatcagacaggatgccaacaccctcacaccctgtttcacagtgattttcacatggtatttgttttgtatcatggcaaatcctgacaacatggtttcaaatcaacaggagcatggtgcagtctaaagtaaaatatgtgtactattttgcaaaagaaattcatcacatggagcttctcaaatttaaaattaaaaatatcccatggtggccatgtgagtttactgtgcttctctcaggcacctgagcacccattgtgtcagccatgggcataatagctgtaagtatcaaccacagagacagacagtgtgagctccagccccacctccgccacatcataggtatgtgacttgggaataaatcacttctcctgtgtttgcagtgtgtactgtgtgtgtggtgtgtgtgtgcaggtgtgtgtgcacatgtcctcacttaaaatttttctggatgatagtatttatttcataggttttaaaaatgcaaattaagtaaactacatatatatacatatatatgatgtatatgtgtgtgtgtgtgtgtgtgtaaattattttcaacaatcccaggcacagagtatacattatataaataagtgttagctatttatgtatgtgttagctatgccctaattttcaaaactttaaaaaaattatctactagatctttcccataagactcaatatatgctaaaggcccctaccagtctaaaaataaaaattttaaagcaacataaaaaagaaagaaaaacatgactttcttaaatattctgaagtcatgtatcctttttttaaaaaaacaaaatcctgctaaaatgctctgaagaattgagctctgctcccaccaccttcccacacatgcatcattcttcactgcatagcatctggtcctccagtactctacttttttgggmaatcttgttctctactgtcttctcagacagtgagatgccttggtcttccttcctttctgactgttagtcaatatacaggtatacctcagagata

SEQ ID NO: 700004 - DNA, 2319 bp, Homo sapiens
tgtttcaacaacgcagccaataataaatagatacatgcatacatacatacagtatatgtacaactattgtcttcataaactttcttcttccaaatgatgtttccctgtccagtcccacccacaaccctgtaaccactgctccagtttgaggccttggattcctcaaatacaaatagacactaaaaatagggaagttattgatttttttgagagaataatagaggccccagagctacagagctttggttctagaggtcctaaatgttttttttagtcagaaaatcacagggctatccttcaggtaatgtaacatctagttaaaactctaccactaactagctgtggccaaaaattaattatttagactttattttcttyagtcataaaatgaatgagttctgtgatgtgtgagtttatttttctgaaatcctcacattttctttggtcttttattaaatgaaaatgagatgaaatgctaaatggtaaaataatatcaattgtaatatattttgaaaattatgttagtgtaatttttcacaaggcttgatatacaggttaaaagtttttattatgttacttttaaaaaagtactaatatactagtcaacaatttttgttgtgttacattaaaacacaatcctatcacaaaaacactgtttctcttctttccttaaaagttcttttttttttttctttttttttttttgagatggagtctcactctgttgccgagtctggagtgcagtggtgcaatcttggctcaccacaacctccacttcccaggttcaagtgattctcctgcctcagcctcctaagtagctgggattacaggaaaacaccaccatgcttggctaatttttgtatttttagcagagacagggtttcacaactcctggcctcaggtgatctgcctgccttggcctcccaaagtgctgagattacaggtgtgagacactgtgccggactaaaaatttttatcttcttgcatatcaaccaattttctgcattttcttgaaatatcaagtctcagttttttcttgacatacatcagctatccctaattttcttatggcctacttgagttcacagatcttattctgattgtagactacacagcccacgaaatgttagtagataggtaaaagtgatcagtaaggataaacaataaatgtcagatggagcacccctgttcatcatgagttaagcaaaaaaatcatccattccagaaatatttatttgttggtgccgctatctgctgaacagagttctaagcattgacgatagagacagacaagttatttgttcccacagagtgtacatttccgtgaaggatgcagaaaataaataagcatacaagcagaataattttggagggagcaaagggtcatgcagaattaaagcagagtgatttaatagagaatatagataattattttagatggtagatttaaaaagttttcacagtggagctgagctgacatctaaatgatgaaaaataaattctggtagaaatagatagaaaaccaccaggtctgtagggatttacaaccttgtaggacacagtgagacatgaaaatttcattttaagttaaaagggaggtcaagggtttatgtagtagggtaagacgatttgagcaatctcttaaaacattgcattccccctcatcccaacaatctatagaagtttattgtctcactccaaaatactcttgaattccagggttggttttcccatcctttccatatgttagaatccatatctccttagatgacatctcatagccacaattaaggtttctttagtaatttaccaaaaataatacatttaaacaaatgtatgaagatttttaaggaaaacaaaagaagaattcatattacagcaatccagaaaacatccaattaacttcctacctaaattcttaaaatatatttcagccatcccacaaccatgatattctttgattttaactagtgttacctgctgtccattctgctaaatttttctttatagtcacattttgagagatgaagccagctaggcttctgggtcaggtggggtcttggagaacttttctgtctagctgaaggattgtaaacacaccaatcagtgctctgtgtctagctaaaggtttgtaaacttagcaccaatcagcactctgcaaaaacgcaccaatcagcactctgtaaaatggaccagtcagcgctctgtaaaatggaccaatcagcaggatgtgggcagggccaaataagagaataaaagctggcaagccagtaggggcacccatctcagctccacttccacgctgtggaggcattgttc

SEQ ID NO: 700005 - DNA, 2319 bp, Homo sapiens
tgtttcaacaacgcagccaataataaatagatacatgcatacatacatacagtatatgtacaactattgtcttcataaactttcttcttccaaatgatgtttccctgtccagtcccacccacaaccctgtaaccactgctccagtttgaggccttggattcctcaaatacaaatagacactaaaaatagggaagttattgatttttttgagagaataatagaggccccagagctacagagctttggttctagaggtcctaaatgttttttttagtcagaaaatcacagggctatccttcaggtaatgtaacatctagttaaaactctaccactaactagctgtggccaaaaattaattatttagactttattttcttcagtcataaaatgaatgagttctgtgatgtgtgagtttatttttctgaaatcctcacattttctttggtcttttattaaatgaaaatgagatgaaatgctaaatggtaaaataatatcaattgtaatatattttgaaaattatgttagtgtaatttttcacaaggcttgatatacaggttaaaagtttttattatgttacttttaaaaaagtactaatatactagtcaacaatttttgttgtgttacattaaaacacaatcctatcacaaaaacactgtttctcttctttccttaaaagttcttttttttttttctttttttttttttgagatggagtctcactctgttgccgagtctggagtgcagtggtgcaatcttggctcaccacaacctccacttcccaggttcaagtgattctcctgcctcagcctcctaagtagctgggattacaggaaaacaccaccatgcttggctaatttttgtatttttagcagagacagggtttcacaactcctggcctcaggtgatctgcctgccttggcctcccaaagtgctgagattacaggtgtgagacactgtgccggactaaaaatttttatcttcttgcatatcaaccaattttctgcattttcttgaaatatcaagtctcagttttttcttgacatacatcagctatccctaattttcttatggcctacttgagttcacagatcttattctgattgtagactacacagcccacgaaatgttagtagataggtaaaagtgatcagtaaggataaacaataaatgtcagatggagcacccctgttcatcatgagttaagcaaaaaaatcatccattccagaaatatttatttgttggtgccgctatctgctgaacagagttctaagcattgacgatagagacagacaagttatttgttcccacagagtgtacatttccgtgaaggatgcagaaaataaataagcatacaagcagaataattttggagggagcaaagggtcatgcagaattaaagcagagtgatttaatagagaatatagataattattttagatggtagatttaaaaagttttcacagtggagctgagctgacatctaaatgatgaaaaataaattctggtagaaatagatagaaaaccaccaggtctgtagggatttacaaccttgtaggacacagtgagacatgaaaatttcattttaagttaaaagggaggtcaagggtttatgtagtagggtaagacgatttgagcaatctcttaaaacattgcattccccctcatcccaacaatctatagaagtttattgtctcactccaaaatactcttgaattccagggttggttttcccatcctttccatatgttagaatccatatctccttagatgacatctcatagccacaattaaggtttctttagtaatttaccaaaaataatacatttaaacaaatgtatgaagatttttaaggaaaacaaaagaagaattcatattacagcaatccagaaaacatccaattaacttcctacctaaattcttaaaatatatttcagccatcccacaaccatgatattctttgattttaactagtgttacctgctgtccattctgctaaatttttctttatagtcacattttgagagatgaagccagctaggcttctgggtcaggtggggtcttggagaacttttctgtctagctgaaggattgtaaacacaccaatcagtgctctgtgtctagctaaaggtttgtaaacttagcaccaatcagcactctgyaaaaacgcaccaatcagcactctgtaaaatggaccagtcagcgctctgtaaaatggaccaatcagcaggatgtgggcagggccaaataagagaataaaagctggcaagccagtaggggcacccatctcagctccacttccacgctgtggaggcattgttc

SEQ ID NO: 700006 - DNA, 1925 bp, Homo sapiens
ttgagaggttaagaaacttgcctgtggtcaaaataagcagaagagcaagggtctaaatgcaccccaacactctatcctcaaagctgtcacattcaactaccactgtaatattgagtcttcaatcaattgttatatatatagctgtatcaggcctgaaagtacttaccacatagtgggtcagcaagggcattacagttctatttctgttaaaacagaacgatgaaggatccaccaccaccactcccatttttaaaatattctaaatattcacacttattaactcaaaaataaggtgactaagaaggataatttctgtatttggagataaatttaaaatatctacattttaagggacataaaagttttaatagtgaactgctctcttgaatttatttgaaggaaccctaaacaatttaaaaaggaaataattataaatgtataaattattcctttgttacctttgtgggagtaacattagctgctggtctgagaagatactgggaattatatgctggtgactgactataatatactgaagggccagtagttgcaactaaaaaaaaaaaaagaaaagaaagaaaacactgttaaagtctatactacagttaagactatctagkcaagagctacaaatacaaaagcaatagaaattaaagaaagatttaactacataaattttaaatttctgtacatcaaaatacaccaatcaagattatcaaatgacaaactagaaaaaaactgctaaatatgacatgaagaataagagaatagcatcgctgtgatcaacaagaactacctcacaagcattaaaaaaggaataaagaagaaagtaactgttgccttttctaagaaagatcagtatgatgtggaattatggacattcagtcacagaaaggacgtaaggaaccaagatgccatctgatggtcaatgcatttgaagtgggcctagaaaatctgcagaaagactaggttgtattttgtaaactaaagctattactgagaatgttcagctcaaaaatcacctgacaaattcatggaaaggatgtcataaataacataaaatgtgttccctggcttaaaataaaaagcacatcaacactcatacagatgtacaaactgtctgctccctctgtttggtctgttttaccaggaaacaaaacaactagaaggcacccctgttaatgacaaaactaccaatagtcatttgcttcaactgttttatgatagttttaccagaaaacaaccaaaagatctttcatgcctgtacatggaagaagaaacagaaactgtgccaagaggttccaaacaattgcctctggaaagcactgaaaaatcaagacccagaaaaggctagccagaagcccaagtttgattttggaaaccttacagaggtgaggatagctattttgaaattactatggggaggaagcaggcacagaacacagaacaacctgacagaaatggcccaagaatcttaaagtcttgcaagatgtctgtctgcatgaaagcaaaaagaaaaaaataaaatattaaataaaaaaaaaatcttagtctgaagtttaagtagggactttaattgactactgactctaaactgtgcggctctaataaatctactaaaagtaatctaacttttaaaagcaccatatgaatagacaatttaggaaagaaatgttaataggcctcaaggaacatgtttttgaagtgagccttgaaaatctgcaaaatgacgaggttgcattgtgcaaattgaagctattatgagaatgttcaggtcaaaaaaattacctgacaaattcatgcacaggatctcacaaggaacacaaatgtgttcgttggctttaaaaaaatcacattaacattcatgttgatatacaaaaactcttctccatctgttttgtgtgagttttaccaagaaaccaaac

SEQ ID NO: 700007 - DNA, 1925 bp, Homo sapiens
ttgagaggttaagaaacttgcctgtggtcaaaataagcagaagagcaagggtctaaatgcaccccaacactctatcctcaaagctgtcacattcaactaccactgtaatattgagtcttcaatcaattgttatatatatagctgtatcaggcctgaaagtacttaccacatagtgggtcagcaagggcattacagttctatttctgttaaaacagaacgatgaaggatccaccaccaccactcccatttttaaaatattctaaatattcacacttattaactcaaaaataaggtgactaagaaggataatttctgtatttggagataaatttaaaatatctacattttaagggacataaaagttttaatagtgaactgctctcttgaatttatttgaaggaaccctaaacaatttaaaaaggaaataattataaatgtataaattattcctttgttacctttgtgggagtaacattagctgctggtctgagaagatactgggaattatatgctggtgactgactataatatactgaagggccagtagttgcaactaaaaaaaaaaaaagaaaagaaagaaaacactgttaaagtctatactacagttaagactatctagtcaagagctayaaatacaaaagcaatagaaattaaagaaagatttaactacataaattttaaatttctgtacatcaaaatacaccaatcaagattatcaaatgacaaactagaaaaaaactgctaaatatgacatgaagaataagagaatagcatcgctgtgatcaacaagaactacctcacaagcattaaaaaaggaataaagaagaaagtaactgttgccttttctaagaaagatcagtatgatgtggaattatggacattcagtcacagaaaggacgtaaggaaccaagatgccatctgatggtcaatgcatttgaagtgggcctagaaaatctgcagaaagactaggttgtattttgtaaactaaagctattactgagaatgttcagctcaaaaatcacctgacaaattcatggaaaggatgtcataaataacataaaatgtgttccctggcttaaaataaaaagcacatcaacactcatacagatgtacaaactgtctgctccctctgtttggtctgttttaccaggaaacaaaacaactagaaggcacccctgttaatgacaaaactaccaatagtcatttgcttcaactgttttatgatagttttaccagaaaacaaccaaaagatctttcatgcctgtacatggaagaagaaacagaaactgtgccaagaggttccaaacaattgcctctggaaagcactgaaaaatcaagacccagaaaaggctagccagaagcccaagtttgattttggaaaccttacagaggtgaggatagctattttgaaattactatggggaggaagcaggcacagaacacagaacaacctgacagaaatggcccaagaatcttaaagtcttgcaagatgtctgtctgcatgaaagcaaaaagaaaaaaataaaatattaaataaaaaaaaaatcttagtctgaagtttaagtagggactttaattgactactgactctaaactgtgcggctctaataaatctactaaaagtaatctaacttttaaaagcaccatatgaatagacaatttaggaaagaaatgttaataggcctcaaggaacatgtttttgaagtgagccttgaaaatctgcaaaatgacgaggttgcattgtgcaaattgaagctattatgagaatgttcaggtcaaaaaaattacctgacaaattcatgcacaggatctcacaaggaacacaaatgtgttcgttggctttaaaaaaatcacattaacattcatgttgatatacaaaaactcttctccatctgttttgtgtgagttttaccaagaaaccaaac

SEQ ID NO: 700008 - DNA, 1925 bp, Homo sapiens
ttgagaggttaagaaacttgcctgtggtcaaaataagcagaagagcaagggtctaaatgcaccccaacactctatcctcaaagctgtcacattcaactaccactgtaatattgagtcttcaatcaattgttatatatatagctgtatcaggcctgaaagtacttaccacatagtgggtcagcaagggcattacagttctatttctgttaaaacagaacgatgaaggatccaccaccaccactcccatttttaaaatattctaaatattcacacttattaactcaaaaataaggtgactaagaaggataatttctgtatttggagataaatttaaaatatctacattttaagggacataaaagttttaatagtgaactgctctcttgaatttatttgaaggaaccctaaacaatttaaaaaggaaataattataaatgtataaattattcctttgttacctttgtgggagtaacattagctgctggtctgagaagatactgggaattatatgctggtgactgactataatatactgaagggccagtagttgcaactaaaaaaaaaaaaagaaaagaaagaaaacactgttaaagtctatactacagttaagactatctagtcaagagctacaaatacaaaagcaatagaaattaaagaaagatttaactacataaattttaaatttctgtacatcaaaatayaccaatcaagattatcaaatgacaaactagaaaaaaactgctaaatatgacatgaagaataagagaatagcatcgctgtgatcaacaagaactacctcacaagcattaaaaaaggaataaagaagaaagtaactgttgccttttctaagaaagatcagtatgatgtggaattatggacattcagtcacagaaaggacgtaaggaaccaagatgccatctgatggtcaatgcatttgaagtgggcctagaaaatctgcagaaagactaggttgtattttgtaaactaaagctattactgagaatgttcagctcaaaaatcacctgacaaattcatggaaaggatgtcataaataacataaaatgtgttccctggcttaaaataaaaagcacatcaacactcatacagatgtacaaactgtctgctccctctgtttggtctgttttaccaggaaacaaaacaactagaaggcacccctgttaatgacaaaactaccaatagtcatttgcttcaactgttttatgatagttttaccagaaaacaaccaaaagatctttcatgcctgtacatggaagaagaaacagaaactgtgccaagaggttccaaacaattgcctctggaaagcactgaaaaatcaagacccagaaaaggctagccagaagcccaagtttgattttggaaaccttacagaggtgaggatagctattttgaaattactatggggaggaagcaggcacagaacacagaacaacctgacagaaatggcccaagaatcttaaagtcttgcaagatgtctgtctgcatgaaagcaaaaagaaaaaaataaaatattaaataaaaaaaaaatcttagtctgaagtttaagtagggactttaattgactactgactctaaactgtgcggctctaataaatctactaaaagtaatctaacttttaaaagcaccatatgaatagacaatttaggaaagaaatgttaataggcctcaaggaacatgtttttgaagtgagccttgaaaatctgcaaaatgacgaggttgcattgtgcaaattgaagctattatgagaatgttcaggtcaaaaaaattacctgacaaattcatgcacaggatctcacaaggaacacaaatgtgttcgttggctttaaaaaaatcacattaacattcatgttgatatacaaaaactcttctccatctgttttgtgtgagttttaccaagaaaccaaac

SEQ ID NO: 700009 - DNA, 1925 bp, Homo sapiens
ttgagaggttaagaaacttgcctgtggtcaaaataagcagaagagcaagggtctaaatgcaccccaacactctatcctcaaagctgtcacattcaactaccactgtaatattgagtcttcaatcaattgttatatatatagctgtatcaggcctgaaagtacttaccacatagtgggtcagcaagggcattacagttctatttctgttaaaacagaacgatgaaggatccaccaccaccactcccatttttaaaatattctaaatattcacacttattaactcaaaaataaggtgactaagaaggataatttctgtatttggagataaatttaaaatatctacattttaagggacataaaagttttaatagtgaactgctctcttgaatttatttgaaggaaccctaaacaatttaaaaaggaaataattataaatgtataaattattcctttgttacctttgtgggagtaacattagctgctggtctgagaagatactgggaattatatgctggtgactgactataatatactgaagggccagtagttgcaactaaaaaaaaaaaaagaaaagaaagaaaacactgttaaagtctatactacagttaagactatctagtcaagagctacaaatacaaaagcaatagaaattaaagaaagatttaactacataaattttaaatttctgtacatcaaaatacaccaatcaagattatcaaatgacaaactagaaaaaaaytgctaaatatgacatgaagaataagagaatagcatcgctgtgatcaacaagaactacctcacaagcattaaaaaaggaataaagaagaaagtaactgttgccttttctaagaaagatcagtatgatgtggaattatggacattcagtcacagaaaggacgtaaggaaccaagatgccatctgatggtcaatgcatttgaagtgggcctagaaaatctgcagaaagactaggttgtattttgtaaactaaagctattactgagaatgttcagctcaaaaatcacctgacaaattcatggaaaggatgtcataaataacataaaatgtgttccctggcttaaaataaaaagcacatcaacactcatacagatgtacaaactgtctgctccctctgtttggtctgttttaccaggaaacaaaacaactagaaggcacccctgttaatgacaaaactaccaatagtcatttgcttcaactgttttatgatagttttaccagaaaacaaccaaaagatctttcatgcctgtacatggaagaagaaacagaaactgtgccaagaggttccaaacaattgcctctggaaagcactgaaaaatcaagacccagaaaaggctagccagaagcccaagtttgattttggaaaccttacagaggtgaggatagctattttgaaattactatggggaggaagcaggcacagaacacagaacaacctgacagaaatggcccaagaatcttaaagtcttgcaagatgtctgtctgcatgaaagcaaaaagaaaaaaataaaatattaaataaaaaaaaaatcttagtctgaagtttaagtagggactttaattgactactgactctaaactgtgcggctctaataaatctactaaaagtaatctaacttttaaaagcaccatatgaatagacaatttaggaaagaaatgttaataggcctcaaggaacatgtttttgaagtgagccttgaaaatctgcaaaatgacgaggttgcattgtgcaaattgaagctattatgagaatgttcaggtcaaaaaaattacctgacaaattcatgcacaggatctcacaaggaacacaaatgtgttcgttggctttaaaaaaatcacattaacattcatgttgatatacaaaaactcttctccatctgttttgtgtgagttttaccaagaaaccaaac

SEQ ID NO: 700010 - DNA, 599 bp, Homo sapiens
gttgaaggccatgtttttcctgggctcttagagtgtttatttcatgctgaactaaaagtctcaattttgctgagtttccaggtctaaaaaatagttcaatttactaaaattgctttctaaatacacagttcagcgcttacatacatatatgttaatgggtcacatgacaaattaaatcttcacaygaggattaaatccctggtaaaacctacgcactaagtgaaagcaatatttttgttttactacttacactgcttttctgtgaatcagagtacaaaccgcatcccaccaagatttttgtctttctgtacaaagctgtttacatacaggaaggggcaggcataacggctgataggagctgtggtgagaattacatttctcctttaattgtaagtggctggtatatactactccaaggagaaatacctgttttatttaaggaaaagttaagttagaaaaaaaaattaaacaaaattcagaatatttaatttgttaaaatctttgcttacttcaagatctaaaatacatattgattcaggtgcatttgtttcaagccttgaggtttcctggggcaaatgatggaaaagctgttttagcca

SEQ ID NO: 700011 - DNA, 599 bp, Homo sapiens
gttgaaggccatgtttttcctgggctcttagagtgtttatttcatgctgaactaaaagtctcaattttgctgagtttccaggtctaaaaaatagttcaatttactaaaattgctttctaaatacacagttcagcgcttacatacatatatgttaatgggtcacatgacaaattaaatcttcacatgaggattaaatcccyggtaaaacctacgcactaagtgaaagcaatatttttgttttactacttacactgcttttctgtgaatcagagtacaaaccgcatcccaccaagatttttgtctttctgtacaaagctgtttacatacaggaaggggcaggcataacggctgataggagctgtggtgagaattacatttctcctttaattgtaagtggctggtatatactactccaaggagaaatacctgttttatttaaggaaaagttaagttagaaaaaaaaattaaacaaaattcagaatatttaatttgttaaaatctttgcttacttcaagatctaaaatacatattgattcaggtgcatttgtttcaagccttgaggtttcctggggcaaatgatggaaaagctgttttagcca

SEQ ID NO: 700012 - DNA, 599 bp, Homo sapiens
gttgaaggccatgtttttcctgggctcttagagtgtttatttcatgctgaactaaaagtctcaattttgctgagtttccaggtctaaaaaatagttcaatttactaaaattgctttctaaatacacagttcagcgcttacatacatatatgttaatgggtcacatgacaaattaaatcttcacatgaggattaaatccctggtaaaacctacgcactaagtgaaagcaatatttttgttttactacttacactgcttttctgtgaatcagagtacaaaccgcatcccaccaagatttttgtctttctgtacaaagctgtttacayacaggaaggggcaggcataacggctgataggagctgtggtgagaattacatttctcctttaattgtaagtggctggtatatactactccaaggagaaatacctgttttatttaaggaaaagttaagttagaaaaaaaaattaaacaaaattcagaatatttaatttgttaaaatctttgcttacttcaagatctaaaatacatattgattcaggtgcatttgtttcaagccttgaggtttcctggggcaaatgatggaaaagctgttttagcca

SEQ ID NO: 700013 - DNA, 599 bp, Homo sapiens
gttgaaggccatgtttttcctgggctcttagagtgtttatttcatgctgaactaaaagtctcaattttgctgagtttccaggtctaaaaaatagttcaatttactaaaattgctttctaaatacacagttcagcgcttacatacatatatgttaatgggtcacatgacaaattaaatcttcacatgaggattaaatccctggtaaaacctacgcactaagtgaaagcaatatttttgttttactacttacactgcttttctgtgaatcagagtacaaaccgcatcccaccaagatttttgtctttctgtacaaagctgtttacatacaggaaggggcaggcataacggctgataggagctgtggtgagaattacatttctcctttaattgtaagtggctggtatatactactccaaggagaaatacctgtttyatttaaggaaaagttaagttagaaaaaaaaattaaacaaaattcagaatatttaatttgttaaaatctttgcttacttcaagatctaaaatacatattgattcaggtgcatttgtttcaagccttgaggtttcctggggcaaatgatggaaaagctgttttagcca

SEQ ID NO: 700014 - DNA, 587 bp, Homo sapiens
tttaatattggtactttaatgtgtacctcttcctccactctcctgagaatatgttatcatgcacggacttagggaactacatgtcagtgggagatcaattcccgcttttggggagaaaaagcaggttttgcatttataaatcatttattttttaaaaacacattttctaagtgccttttacattctgaacactgtyctcagtactgagaatacatgtagaaaattatacaaaccttgccctcaagtaacttatccatgaaaagaaagaaggaacaaacaagcaaaagctgcacttctatatactattgtaagtgctgagaaggatgtagcatatctgtacacacagattctagggaaagttcaaacaaaaggtcttaatcagatggaggaattcttctcggaggagcggggagagtcatttattcaataaatatataaaaacacctggccgggcacggtggctcacgcctgtaatcccagcaatttgggaggccgaggtgggcggtttatttgaggtcaagagttcgagaccaggttggctaacatggtgaaaccccgtctctactgaaaatacaaaaattagccgg

SEQ ID NO: 700015 - DNA, 927 bp, Homo sapiens
ggtttcaccgtggtctggatctcctgacctcatgatcctcccgcctcggcctccaaaagtgctgggattacgggcatgagccaccgcacctggcccatcgttttctatttttaaaattttaagtatacatttaatgaaaagcgtaagctcccccccaacttttttttttttggacggagtctcgctctgtcaccaggctggagtgcagtggtgcgatctcgactcaccgaaacctctgcatctcgggttcaagagattctcctgcctcagcctcccgagtagctgggatgacaggcacgcaccaccacgctcagctaattttctttttttttttcttttagtagagatgggatttcaccatgttagccaggatggtctcgatctcctggacctcgtgatcagcccgccttggcctcccaaagtgctgggattacaagcatgacacaccgcgcccggccagccctctcttttaaagaactgtttcccctttgctcagccccacttagaaacaggtggagcagcgtgttcccttcataagccaccaagaagaccgcaagctcagactcagggagagcagaaggaggcccatcccatgctctgggaacaaacagtgctgtcagagggtgggtcccatagaattttgtgaatttgctggtctctctccggtcctgtacagacacatttccttgtgttaccacattggcctataagaagctgcccaccttcctcctgtcaaactttaactctctaatcatcccttttgaatcaattttcaaaaaaaataccaaaggtcagtaaaagataccactatccctccaggttatctcccaaatacccaggaatcaactgaaaatyattctgtctctcatatctgcaccatattgctcttctgtgacctcactttctccatctctgtcatctctctag

SEQ ID NO: 700016 - DNA, 853 bp, Homo sapiens
gagacgagctgcataatttatgacagcaaaaagtaataagcaaaataaaagcaaaataagaagcatagctgagctggaagataagaaaagaaaatccccaggtgccagaaattacccattacctaaaaaagacactggaatttttcctatgtcttgaggtagagttttcatattcactctgtagaagagttaaggctgtattccccggattctaaattaaatgtaactgaggcccctgagtaagaagcagctggaaagaggagtcatgcccatgaaaggaggactaaaacaaaactgttttcaccagtccagaggtgccatatgtagcatgctgccagccttggaccacaggtttggaaagagtgccaacggcaacaaaacccagacactcaaatttgtgttctgcatgatcttaggatttagtctttaattttgtacagggtgagaacaccataagctgagaaattaaccttaaatacttgattattaaaactgatttaactcacagtgcccartgagaggcaaaaacttccctactcaaatatcttcatcaccagaccctagcaagactctgcaaaaaatgattcacatggaagataagctcagagtcaaaaattaaaagcaaaaatgcaacaccatctgaattcctaaccaatgagctctaacttcagagcgatctaaaagcaattttaaagaaatgtgcttgaattattcaaaatgctgaaagtggcgctggactctataaggaaagaccaaagcattaagaagtaaatatcgcagataaactgaaagggaacttaaatatgcgagaactgctgcttagggctttgggttggaatattccttagggaaa

SEQ ID NO: 700017 - DNA, 609 bp, Homo sapiens
cacctgggagcacagggctcccactccactaacttggcaggggagttacttcagatgataatacaatctgcttgtattacttcagatgatactcctgcctgctctcggccccactggctccacagagcatgcagcctcagtcacacctcccctgctgcacccagtgtctttgcagcagccactccaaacagcctagtactgccatggaaaatacttayattacctattaaaaataatcaaactcaaatttcaaagactttataaaagatggtgctatctaaacaggttgggtaaattatttgttgtaattgcgtttatctttttattttactaaagagcaatgtttatttagcattataatttatgtaccagatccaaggtttatattgctggatattttattggagaacctgcatatctttaggtagtatactgtagatataagaacccatggattgaatgttttcgtcccccaccccaaaattcacatactgaaatcctgcccctcaatgtgatggcattaggaggtggagcttttgggagataattaggattagatgaggtcaggaaggtggagctgtcatgaataaaagtagttcccttctaaga

SEQ ID NO: 700018 - DNA, 609 bp, Homo sapiens
cacctgggagcacagggctcccactccactaacttggcaggggagttacttcagatgataatacaatctgcttgtattacttcagatgatactcctgcctgctctcggccccactggctccacagagcatgcagcctcagtcacacctcccctgctgcacccagtgtctttgcagcagccactccaaacagcctagtactgccatggaaaatacttacattacctattaaaaataatcaaactcaaatttcaaagactttataaaagatggtgctatctaaacaggttgggtaaattatttgttgtaattgcgtttatctttttattttactaaagagcaatgtttatttagcattataatttatgtaccagatccaaggtttatattgctggatattttattggagaacctgcatatctttaggtagtataytgtagatataagaacccatggattgaatgttttcgtcccccaccccaaaattcacatactgaaatcctgcccctcaatgtgatggcattaggaggtggagcttttgggagataattaggattagatgaggtcaggaaggtggagctgtcatgaataaaagtagttcccttctaaga

SEQ ID NO: 700019 - DNA, 624 bp, Homo sapiens
ctttctgtcagtctcagggcccartggggttgagaagctctcccaggcctgagattactgaagtctgcagtggaaatgtggcccacctatcctttttctgctttagggagcctcttcaggcttccagcagatcctggctgagcaggttgctttgcttacctctccgtccttgccttgggtatttcctgtcatttctatattgaattatcgtgttctcttttagatgtatttctttgtggaggaggtgaggagtaccaattacccgtactcagccatcctgaagctcctcttctttccttgattgttgacgactatgatagggcatttatctagtagctttctccaactatttttgcagagactgtatttcttgtcatgtgtagtcattgaagatttagttcattaccttgtgttctgatagtattttggcagatattttctaaaacatcacaagctacataaacaataaatcacctctcacactctttgcagattagttctgtactaaatattttctttaatacttacctagatttgcactgattctagagttaagcccaaagtgaaggcataaggtcatctcacatcttttctaagtgtattttcctaggtatgtccatggct

SEQ ID NO: 700020 - DNA, 609 bp, Homo sapiens
ccaagcataaaatattctttaaaaaaaaaggaaggaaaagcaccataaatatggtgggaaaagattggttattgccatcatgaaaagcagaaaataagcaccctatatagttcataaacaaaagcaaacatccaaggttgtgagcatttcaggctgttatttgtgtgtacttgttsccacaattcagaagtgtacagccaccctcaactcctgttttcattattgtttgcttcatcttctagtttactgcctcttattttataaatacaagcaaagaaacaaagagaagctgtgggaagattgattaatatttttatttcaagatgataaattagaagaaaattcattttatcaatgtatactgctgatcataatgttcttattctttaatgctaaatttttaaagttatttatcatttcatcatatattatactcctactagtattcttatagttattgtatgtacattttgtacatttaacaaacgtataaaaaattaaattatttaaaattaattattaaattaattaaaattgaacccaaagctccaattatttatattttccacccttttttaggttcttttgtatacacataaacatttaaag

SEQ ID NO: 700021 - DNA, 627 bp, Homo sapiens
atttccagtgtgaccatgtgtacatcagtttgtacacctgggaaatggccagtttatctctgttgctccactgcaatttaaaaaatcagctcactttattctcaaatatgcagtccagtttagaggaaatataattggaatcaccctccttacatcccccatgtggccttaaagcttacaagagaaacatcaggaaggagagattgatgctctcttccttatttggccttatttttgctttggcacttgagatgttgtgatttctgtgattttgagcggcatgtgatgaagggtcacctcttgtggcgctaagccccgctgcagcctccccaggatcaggatccagggatacctcatgtgaggccctgaagttaacatggaaactcttcaaacagattctgaggacayaggcaatgcctcacaaagcagacaagaccactgcaggcctatttatagaggtttgagcacaaaagtattctataagatttggatcaaatacttccacattttcatagaatagccatccccgtgtaaaatagcgaaacagaatacaactgtgtaaaataaattatcaaaggatgctatgttccagtgtcccaccaaacatgtgattagatgcttgaacat

SEQ ID NO: 700022 - DNA, 1722 bp, Homo sapiens
aggagttgttggcagccatctttgtggtcaacctacctgggaattgtaggttcaaaaatggatgagaaagaaactaaaagacttactatccacaccaaagggtgtgaggagcagaattaacactgtggaaaactggaataatgatgtgggagacaaacatgagtagttctcccataaagtatgaatggatagagagataaaataatgaatgagaggatggaggacagggaaccaaggtcatagtgggaccccctttctgtgtttatggaatcctccatgttaggtgtcgtggtgacagaaactgccttacacatagaatctgaaaagggcggaatcacattttctcaggctgcttgctggggtaccagaacgtgaactatgccagccaatcaggcacacccatccaggactctgaaaaggaagcttgtagcacagagatgaaagaaaaaggaagaattcattttgaggttgacagcatgacgtccagggcagcaaaagccgtggagcaagcggcagtaatgctgcaagccacgcccctagcattcagtggtatcataccttgagtcctcattaaatgtgttctgtgtgtaacgtggctgtcactctggctgctgctgagcctcgtactgtactgctcattttctaagcctgggtcttgaccttattgatatttttgtaagattcccaatatccttttaataaattatttcatgatgaagacagccagagttaatttctgctgcttggaagtaagatccctgactagtgcaagcacctgaacaaagaatgcagttggccttttgtttctgcaggttcaaccaactgtggatcaaaaatagctaaaaaaaataataaaaataacaatagaacaataaaaacaacacaagataacaactaatttacatagcatttacatagtattatgtattataaataatctagagatgatttaaagtatactggaggatatgcataggctatatgcaagtactacaccattatatataagagacttgagcatctgccaatttcagtatctggggggagtgttctggaaccaatccctgcagatactgaggataactctaataggtattgctgttgggggaaaagcaggttaactggaacaaaggcagtgatcaktcaaaacaattcctttttaatttcttagaagccaaaaaggaatccaagtatgtgttcagaaatgttttactgtattctagatgatttaataaaaggagatctcgtctagacaaattttaaaagtaattctattaaataggatattaactcataaaattatataatcataaaattctaaaaaggatataataatatttactgggataaaatattctataggaattaagaagtgaaaaaatagattatctacaagttaggatgacttcagactcctgatctgcaacactaattgccaacagaaagtatagtgatatttacagtttttagttttgcaggtaagagtttgtgatccacattttttcttttagaaaagtactggaagatgttcagcatggaactgagttaatgattctcacacaagtcttctttctgaagattgttttagttattctagggcctgtgccttccatacaaactttagaataagcttgtctttgtctacaaaaaaatcttgctggattttgataggaactgcattaaatgtagaaacccatttggataaaactgctatctttatta

SEQ ID NO: 700023 - DNA, 1722 bp, Homo sapiens
aggagttgttggcagccatctttgtggtcaacctacctgggaattgtaggttcaaaaatggatgagaaagaaactaaaagacttactatccacaccaaagggtgtgaggagcagaattaacactgtggaaaactggaataatgatgtgggagacaaacatgagtagttctcccataaagtatgaatggatagagagataaaataatgaatgagaggatggaggacagggaaccaaggtcatagtgggaccccctttctgtgtttatggaatcctccatgttaggtgtcgtggtgacagaaactgccttacacatagaatctgaaaagggcggaatcacattttctcaggctgcttgctggggtaccagaacgtgaactatgccagccaatcaggcacacccatccaggactctgaaaaggaagcttgtagcacagagatgaaagaaaaaggaagaattcattttgaggttgacagcatgacgtccagggcagcaaaagccgtggagcaagcggcagtaatgctgcaagccacgcccctagcattcagtggtatcataccttgagtcctcattaaatgtgttctgtgtgtaacgtggctgtcactctggctgctgctgagcctcgtactgtactgctcattttctaagcctgggtcttgaccttattgatatttttgtaagattcccaatatccttttaataaattatttcatgatgaagacagccagagttaatttctgctgcttggaagtaagatccctgactagtgcaagcacctgaacaaagaatgcagttggccttttgtttctgcaggttcaaccaactgtggatcaaaaatagctaaaaaaaataataaaaataacaatagaacaataaaaacaacacaagataacaactaatttacatagcatttacatagtattatgtattataaataatctagagatgatttaaagtatactggaggatatgcataggctatatgcaagtactacaccattatatataagagacttgagcatctgccaatttcagtatctggggggagtgttctggaaccaatccctgcagatactgaggataactctaataggtattgctgttgggggaaaagcaggttaactggaacaaaggcagtgatcagtcaaaacaattcctttttaatttcttagaagccaaaaaggaatccaagtatgtgttcagaaatgttttactgtattctagatgatttaataaaaggagatctcgtctagacaaattttaaaagtaattctattaaataggatattaactcataaaattatataatcataaaattctaaaaaggatataataatatttactgggataaaatattctataggaattaagaagtgaaaaaatagattatctacaagttargatgacttcagactcctgatctgcaacactaattgccaacagaaagtatagtgatatttacagtttttagttttgcaggtaagagtttgtgatccacattttttcttttagaaaagtactggaagatgttcagcatggaactgagttaatgattctcacacaagtcttctttctgaagattgttttagttattctagggcctgtgccttccatacaaactttagaataagcttgtctttgtctacaaaaaaatcttgctggattttgataggaactgcattaaatgtagaaacccatttggataaaactgctatctttatta

SEQ ID NO: 700024 - DNA, 597 bp, Homo sapiens
tttgcattcttttgttacattttgctaagagaaacatttattactttcatagtaaagaacttaaaacccaatgtaaattatacttaaaaaaaaaaaaaaacaaaagtagcaaaaagaaatgccaaaggtttggcaagcgtcaaggcagggaccagagagctttagtgatttaccttggtcaggaataaagaaaaggtctgagactttggctttcatcaaggaaaacagtgtacccagtcactcccccttctgatcttctgtttcctccctctgtaaaaggaagatagaacaattacaattttttaagctttcttcacttctgagatttttaaaaatctcagctgtgttctaagtaatgtgataggtctccccaacccccaacttttaagaatgtttattaaaatgatgagagggagatgttttccttagtttacacrgtaaaagaactggttatactctcttgttcgtagtaagaggataacagagaatgagtaagctacagaattcattattagctaattgacttactgaaataaaactaaatctttctaattctgaaaataatctttctactagactgcattgatatcagtttca

SEQ ID NO: 700025 - DNA, 886 bp, Homo sapiens
tgattacaaactaggaaatcaagattcatcagggcatggatgaaggcagtgcttagaaaggaataaagttagctgggtgtggtggctcacgcctgtaatctcagcactttgggaggccaaggcaggtgaatcacctgaggtcagaagttcaagaccagcctgaccaacaaggtgaaaccccatctctactaaaaagcaaaaattagctgggtgtggtggcacacacctgtagtcccagctactcaggaggctgaggcagaagaatcacttgaacctagtaggcagaggttgcagtgaggtgagattgcaccactttactccagcctgggtgacagagcaagactctgactcacaaaaaaaaaaaaaaaaaaaaaagaactaaaattgttttttatgtgtgggttgctcttttccgactcttattaaccaactgcccttgcatttaatcttcaaaacattcctttgaattaggaattatttattaccttctttttacctatgacaaaactgagactcagagagattaagcaatatgaccaatggcacacagctgacggagctagtcagaattcaaatctagatttgtgtgactccaagcatgcacattccggtttttttttgaggcagtatctcactccattgctcaggctggagtgcagtggtgcaattgtggctcgctgcagcctcggcctcctgggctcaggtgatcctcccaccccagcatcccaagtagctgggactatagatgtgccccaccatgctaggttaattaattaattaattaattattttggtagagatggtgtattagtccattttcatgctgctgataaagacatacctgagacgmgactgaagaaaaaaaggtttaattggacttacagtt

SEQ ID NO: 700026 - DNA, 2473 bp, Homo sapiens
tagttagctgttgaaaaaaagtttgatgttcagcatgtcttctttgttacacacacagagaatttagaaaagcactgtgatcccagtaacattacatatactgttctacaggttgcttttgttcacttaacaaaatagacatattttcatatcagtgcatatagctctgtgttattctttgaagtggttaaatgagtctactgtatgaatgtcccattagttatttgagcagttccctgttaatggatagttagatattgttcttatattttttatgttagtgtttatatatgtccccatacattcttttaatctatcatgtgtaaaggcaaactgatcttaagttcgttaaaaaaattgtatgccacaaaatttttgacaaactaaaaattatgtctaatataaaattaagttattcagkttgggtctctgccaaacatttcaaaaggaaaatttcaaataaaaaaagattctcaacaaagtctctatatttttcaaataacatgtaatgttttattaaactgtaaacattttatttttctcttaaaaatctttatctgtaatagaagcatctgttgcatttaggagtaattctagtactaattttaactctgatttcatagtgacatagaagaaatgaagactgttaaccaccttaaggatcttatttttaaaagtatagagtgcagcaaaatagaagcatataatattgctatatccctaaattggggagatgattcagggaagactttggaggaatagaatctagacaggtaagagtgagtctggaaaagaggtgtaagaagagcataggtggatcagcaagtgcgaagacctagaggtgaaagcatggcgcttagaaggatctttaacaagttcactaaggctgaagtgtaagagtcaagagacagggctggtgaggatcctacaaatctttgttagcttggttaaggagtttgggctttatcctgaaaacactgggcaaccattaagggttataagcagggcagtagtaaaatgtccttggatcagagttgtgaaaaaatcattctggctgtggttcatgaagaacagggttgcaaggctggagaaaaggtgactgtttcagtaaacctggagaaggatgatggtggcttgaactagaggagtggctgtaggtattgagaaaatttagaggtagaagcaacaagatatagtcactgttctggctgaggaaagatggggcaggtggaggtgtgagagaggagggaattaagaatgtcctggtaacttagtgaattttaatggtgttccctgagatggtaaacacaggcagcctctgtaaacatataaatgagtgaatggatggatgaatgatagatgtacaaaggcaggaccatttgatgaggaggaggatgatagtaaatacatagtacttgcggtaggtttaacctatcagtttttttcttcttttgcatgctttatatagctggtgctcttttcttcattatttcaacagattaggttagctgcatcttctaattgtatatcatattttggatacatattactttctctaggtcaagtgtcttggcaaatcttcctttcttcacgtaagatgtgtattggcggcagccgtgggaggtccagacacaggtggccatggaactcgctggtaatagaggacacatctcttaactgggttgctctaagaactgatgcctaaaccatctcagcatggcgtataaaggagaaggtgggcatggccagcctccctcagctacactgtctcaggttagccctggaagtctttacacacgtagaacccatacccataatatatgtatggcatctgactttttctacccaaatatgggaggtgtggaaagccacatttaccagctccctcagtgcctgattggaagaggggataaggttataattgtcatccatgcttatggaaatcgaaaaggcatccgttacctcactaatgacctcaaagtctattacttgcctctgaaagtcatgtataaccagtctatggccatgaccctctttcacagtctgccattgctcaagtacatatttgttcaggagagagtcacaataatccattcacatagttcattttctgccatggcccatgatgttctcttccatgccaagacaatggggcttcaaacagtcttaacagaccatcccctttctggatttgctaaggtccattcagtgcttacaaacaaacttctaactgtgtctctttgtgacacaagccgtatcatttgcgtttcttatactagtaaggaaaataccgtactacgagcggcactgattactgaaatagtgtctgtcattcctaacgctgtagatcctattgacttcactccagacccatttagaaggcatgatagtataactattgttgtcagcagacttgtttacagaaagggaacaaatttggttagtggtattatacccaaactcttgtcagaaa

SEQ ID NO: 700027 - DNA, 609 bp, Homo sapiens
tgataatagctcactgtaacctcaaactcctgggctcaagtgatcctcccacttcagcctcttgagtagctaggaatacaggtgcctgcaacacctggctaatttttttagttttatttttgtagagatggggtctcactatgttgcccaggctggtcttgaactctgggtgtcaagtgatcctcccaccttggcctcccaaagcactgggattacaggtgtgagccactacacctagcccaggcaagatagcatcttcctatggaggggttgggataaggataaaggcttttgaatatttaatagtatcactctctctcctctgctcatgcagaaggcagggaatgtggtgctagatgagtataytaacgctgctatttaatgagttaaaatttatcagagagtttgtataaataatctattgctaaaacagagcttcagacaagcaactctcctggggttcaaataaaacaaataaaacccaggactctttgaccctgactgggcctaaggagtgaggacagttcccattaaaatttgagattaaaactagttgagaaggaaaagtcaggcatcaatgaattatgtttcaaactgtgcgttaggatt

SEQ ID NO: 700028 - DNA, 2967 bp, Homo sapiens
ggatccagtctcaacaggaaacacagaagaaaccaagataggagtgccttatgtttattgtgctggtgcctaactggtttctagttcctcatcttaacttaatataggctctctccttcctacatatttacttgccctttcagctaaattctcttgactgcccactgtgaccaactctgagccagacttgctttcaggcttgctcctacctattcttttcttatttatttatttttttgagacgtgttatctttctgtcacagatgctagaatacagtggtgcaatcgctactcactgcagctcaaactcctgcgctcaagagctcctccctcctcagcctcctgaggagctaggactataggtgtgcatcaccatgcccagctaattttatttttttatttttattttttatagagacagggtctcgctatgttgcccatgctggtcttgaactcttggcctcaagtgatcctcctgcctcagcctcccaaagtgctggaattacaggtgcgagtcatgcccccagcctctccctattctttcttagccttctggtcaccagctgtggtgtctatctgcaaatatggctgccaatactcatctcatccctgtacatgcatgtctctccgcttcacaaaaggtgaagtctgtttatttcccctccctttgaggggaggtgttgtgacttttgaggggaggtgttgtgagaggaggtgttgtgactcatctcatccctgtacacgcatgtctctctgcttcaaaggaggtggagtctgtttatttctcctccctttgggctggtgttgtgactttactctgaggaacagaacgtggcagaagtgacactgcaagttttgggcctagttcttaattggtctagcagcttctgctttgattctcctggaacccagctgtcatgctgtgagaaaactacaggttatcctgctggagagacggcacatggagaaccaagacgccattgccacaacccgcaccaaggccccaggcatacgaatgaggaacagagcccatctttcctctgcatgtgtaatctcagcctgcaccatataagcaaaagaactgtgaagctgcatgagtaatctcagcctgcaccatataagcaaaacaaccatccagacaacccacaaaatgtgacaaatcattgtttctgtagtaagtactaaggttttgygactgtcatacagcaatagataactgacacatcatcttccttcccgttgccacgatccaccattattgctctgtccctactaagacatgatttagaaagagaaactagggacacctacacaagcctaatcattgtatttagatgagttatgacaaattaatgactcagtgagcttttagctcatctacccttatacaatttgttcactgagatttccttgaattagtaaagggagactgaagttatgctgtgcagaagatagtaaaaaagctagttctaaattcccaaagttaagggttttggaacatgcttctcctcttggaccccaaactagttacttctcccttaaaattccctgctacattgccatccattataacatgtcacttctcttcaatagttttcactaccattggaatatattcagatttctcagcatagagttccccttgggtggtggcagaaaaaaagcacccactggcatgggaatgcccatgagcttttcttcatttgggagtgcctgggcctgaatagtcacagactacaagtcaaatcctgccacaacagggtcaaggaaatactcaaattcttatcttctaaagcagtggtccccagtctttttggcaccagagaccagttccatggaagaccatttttccatgggaccagggagtcagggggaaggatggatgattttgggatgattcaagtgcattattacatttattgtgtactttattcgtattattattattattattattgagaaggagttttgttcttttccacccaggatggagtacaatggcatgatctcggctcactgcaacctccacctcccaggttcaagcaattctcttgcctcagcctcccgagtagctgggattacaggtgcgtgacaccacgcctggctaactttgtatttttagtagagacagggtttcaccatgttggccaggctggtttcaaattcctgacctcaggtgatctgcctgccttggcctcccaaagtgctgtgattacaggcgtgagccactgtgcccagccctatttctattattattacatactcactataatgtagaatcaatggaagccctgagcttgtttttctgcaactagatggtcccatctgggttgaagggagacagtgacagatcatcaggcatgagattctcatatggagtgtgcaacctagatccctcgcatgcacagttcacaatagggtttgtgctcctatgagaatctaatgccgccgctgatccgacaagaggcagagctctggcctggttcctaacaggccatggactggtactggtcagtggcccaggggttgggaatctctgctctgaagtatttatggggggaaatgatatgtaggattttttctaaaaatactccaggggaaaaagtgaggggaggtgtagatgaaacaagatgggcagaatcctgacaactgttgaagctgattgacgggaatatgaggcaggggagtgatgctattcattctattttcatgtatgcttgaaaatttacatactttaaagcttaaaaacatttttaaaaatcatggctcaataattacttaaaatagatgggctattagttagggtttgaaaagtctcgttacagagatttgttataacgcatatgaccttacacaaattcaacgatttaaacttttgtcagaaattttctttaacaagaaaattctggaccccgataatgagtgatacaaatcaaatcaaaggcacagggttttcaatagggatcc

SEQ ID NO: 700029 - DNA, 775 bp, Homo sapiens
tagtgggattagcagataggaatcagcaggtcaagaatgagactagggctgggcacggtggcacgtgcctatartctcaacactttgggaggccaaggtgggcggatcacctgaggtcaggaattcaagaccagcctggccaacatggtgaaaccccttctatactaaaaaatacaaaaattggccgggtgcgatggctcatgcctttaatcccagcactttgggaggccaaggcgggcggatcacttgaggtcaggagttcgagaccagcctagctaacatggtgaaaccctgtatctactaaaaatacaaaaatgagttgggtgtggtggcgggttcctgtaatcccagctactcgggaaactgagacaggagaatcacttgaacccgagaggtggaagttgcagtaagctgagatcgcgccactgcactccagcctgggcgatagagtgagactccgtctcaaaaaaaaaaaaaaaaaaatgagactatgagactatttgtgggtcgggaattcaccagacgcctcacacagagctggtacgcagtcaggctgataacagaagagcagctcgtctgtgtacttcagcagtttatttggggtttttgccatgatccaataggataaagtacttcaggtttggtttgtgaaaaatgcattataaactctattatataaatggtagtaattgtttgccagtatgttcttaaagatgaaaaagatgtatatgtagtcacagttggtgtttttcttacctccagagagcatagaatc

SEQ ID NO: 700030 - DNA, 590 bp, Homo sapiens
cctagctcctgatgggggcggggaggcggactaaaataacataaagatcggagattcagttcctgaaaccttctgtcaatgttggctttagctgaatttcaagtcaagttgacattttttgaaagcaggaagcaatgacagagtggactactgatgctgtcaccatctgccagcacaacataaattagaacagaaaggactaagcaaaggtcttccaccattttaacgagaggaaatggcatcagtacaatcaacatacacaatttttacaaacaacttttagatttgcatctacatacattttaaaaggcagtgtgcctgtttataaatctctactctaatttagtttcagagctttttactaccctgatcactgataatgccacagtcaaaaagcaaactcaaaataaaaatcaatctaaaaatggtactgcatgccaaataagaaaatatatacacttyatcattaagctacagctaacagaaatctaatcaacgatccttatgatttcctcgtatctaaaaaataaatgcaagcacttgaggaactgtataaatacagggcatctaccctacaatactgctttatt

SEQ ID NO: 700031 - DNA, 685 bp, Homo sapiens
attcttatttttcttctctcattatgcttctgctttaggtgttatctacctcattcctattatgaaagattaggattgtacaccacacacacttctttccttcatcctcttgacwtggctacatggcatttttggttaaattactatccaacgtttatattattgtgactatgtaaatattgttaagaacagaatcatatactgtgctgtgatcacattttctttcttatacaacttttgttttgattgaagttaaactttgcctcattttgcatctgcttggtgttctatatatttagcattaagttgtgccaaaatggacacacataactctaagtttccctaaatgactgtagactcagttgtgttgtatcaggtctatctctggtcatcccacctggagaattgggatgatacactctttggtcctaccaaacagctttcatcttgagatcgtcctccatcttcattgtggcccttcctctcagttctcttttgtgtggtccctcatttcctgggttctttttcttcctctttctgggtttacttgtctagtcactttgtgagaatggatctgcgagaggcaaatttttaaaaaaccactcatacactgttgatagttgcctgggtataaaactctgggtgagaaagaattctccctctgtattttgaaagagttgcttca

SEQ ID NO: 700032 - DNA, 685 bp, Homo sapiens
attcttatttttcttctctcattatgcttctgctttaggtgttatctacctcattcctattatgaaagattaggattgtacaccacacacacttctttccttcatcctcttgacttggctacatggcatttttggttaaattactatccaacgtttatattattgtgactatgtaaatattgttaagaacagaatcatatactgtgctgtgatyacattttctttcttatacaacttttgttttgattgaagttaaactttgcctcattttgcatctgcttggtgttctatatatttagcattaagttgtgccaaaatggacacacataactctaagtttccctaaatgactgtagactcagttgtgttgtatcaggtctatctctggtcatcccacctggagaattgggatgatacactctttggtcctaccaaacagctttcatcttgagatcgtcctccatcttcattgtggcccttcctctcagttctcttttgtgtggtccctcatttcctgggttctttttcttcctctttctgggtttacttgtctagtcactttgtgagaatggatctgcgagaggcaaatttttaaaaaaccactcatacactgttgatagttgcctgggtataaaactctgggtgagaaagaattctccctctgtattttgaaagagttgcttca

SEQ ID NO: 700033 - DNA, 685 bp, Homo sapiens
attcttatttttcttctctcattatgcttctgctttaggtgttatctacctcattcctattatgaaagattaggattgtacaccacacacacttctttccttcatcctcttgacttggctacatggcatttttggttaaattactatccaacgtttatattattgtgactatgtaaatattgttaagaacagaatcatatactgtgctgtgatcacattttctttcttatacaacttttgttttgattgaagttaaactttgcctcattttgcatctgcttggtgttctatatatttagcattaagttgtgccaaaatggacacacataactctaagtttccctaaatgactgtagactcagttgtgttgtatcaggtctatctctggtcatcccacctggagaattgggatgatacactctttggtcctaccaaacagctttcatcttgagatcgycctccatcttcattgtggcccttcctctcagttctcttttgtgtggtccctcatttcctgggttctttttcttcctctttctgggtttacttgtctagtcactttgtgagaatggatctgcgagaggcaaatttttaaaaaaccactcatacactgttgatagttgcctgggtataaaactctgggtgagaaagaattctccctctgtattttgaaagagttgcttca

SEQ ID NO: 700034 - DNA, 1384 bp, Homo sapiens
tttcccatgttgatagagggaggatagcatttctgagatactcttataattcagatatccccggggccttaaaaatcttagatacaagtaggcttgaaacaaagatctttggcagggcgcagtggctcactcctgtaatcccaccactttgggaggccgaggcaggtggatcacctgaggtcaggagttcgagaccagcctggccaacatggcgaaaccccatctctactaaaaatgtaaaaattagccaggcgtggtggcgcatgcctgtaatcccagctactcaggaggctgaggtgggaggattgcttgaacccaggaggcggaggttgcagtgagctgagatcacaccactgcaccccagcccggatgacagagtgagaccttgtctgaaaacaaacaaacaaacaaagaaacatctttggaccatccttgaaacagataaagtgggccatgggtcccattcccatgatacacccttacctcttgttctggaggcagggatctctgtgtctgctgaacaatccttggctgcaccaaagagcatgcctgctcctatgagattacctttccctgcagtccagcttccatgggcacagatggacagaaaaaaactgctatttcatatggagtgggcaatactagggctctaatattcttccagtttttctaaggttttgcccattattctgcacctgactctacccagagtgcttctggccgctctgtttgtgcattcatgttgcacaagggtgacttacctgcatgtgcccctcacaccccaagggtcttaatgaaggacaggtgaaactccttgattctacccccaccttatcaagaatccaaaataatctctttgtaaattttttttgtcaatatcttcataccatactgtcagagtaaacttgcctcctttctgagatcccaggcattggaagtccagatatggcagtttatcctgagaattgaaaggttcatgttgcatgcttcctttttctaatttggcaatttgaaaactattaggcaaaactcaatgatagagaaataaaaacaaaacttcctgcttagcctgtagtacctggtggtgtttagggttttcaacaatgaataatataatatakatatttcaaaatactataggaacagctgtatccatttatttaattttatcataaaacatgcttaattgtttaaaaatatctagccctcagctgggaaaagtacactttactacaattcaggcatggtcataatggaaatcaaatacatgtaacatagtttacttacagctctaagaagaaaaaagaaacatgaacaagaaagagtaaacaggagctactaggaacactgaagaagccttggcactatgaacataaatactgcc

SEQ ID NO: 700035 - DNA, 644 bp, Homo sapiens
aaaaactagtcatttaacctttctcaaaacagatggtataataaatgtataaaaaggcaagctgttatcagctaaaggctcacaaattgattacacagtgaaactgaaacttgcatcctgttgggaacatacatattggtttagttgactggcatgagggaaaaggctgatttaacaaatagataaatgtaaaaaaacaaagtcattcctattctgatagatccctttcagatttaaaagttactaaygattttgatgttgtggctgttttaaacatagttcaaagaactttgactaattcagcttttttttgtactgtgctttgtttatttttatagatatttgggctttgacttatattctcattggtgagctcactgccattttcttcctaattcttctttaaagaacttgggctggaaattctgtagtcaccaaccttagctgataagtatttctgctattgttagcttagtgttccatctgcccccttactgatgccatggctgtgacatctcagttggggaaaacagctgcttcatgagatctctagccttaacagttgtcccagtgaaaatgagcaggggggtttcattgcaaagacaactggcataaatgtatgaatgaatgccagattagtagca

SEQ ID NO: 700036 - DNA, 760 bp, Homo sapiens
acaggaagggctcagaacagtctggaaggtaaaccagaaataaaattctagctccccacagccatcggaatggacccctacccctcctcttgacaagggcattggaacctattccaattatacattatgttgattatttatttatttattcattttgagagggagtcttgctctcgcactcaggctagagtgcagaggtgcgatcgtggctcactgcaacctctgcttcctgggttcgagtgattctcctgcctcagcctcctgagtagctgagattacaggcaccgggcaccatgcctggctaatttttgtattttagtagagacggggtttcaccatgttggccaggctggtctcgaactcctgacctcaaatgatccacctgccttggcctcccaaagtgctgggattacagacatgagccactgcrcctagcctgttgatctgattttttatgaacaagttaatcctttgccttggagttttctggttacccatggggctgacatttgacctgtgtggccaagagccttggccccttaaggtttgctgaaaaatcactgacatgaggcagattgattagtaggagaaaaggcatgcaattatgtaattatttaatgtgtatatacacaggaggcttcaaaatgaagacccaactccccagcaaggtatagatgcttatctatcatcttggggttataggaagaatgagggctgagagcatggcccaaaccgggttatggtggagaaccaggtttca

SEQ ID NO: 700037 - DNA, 640 bp, Homo sapiens
tttcttatgtacaagaaaataaacaaaacaagagaaaatccccaaacttcacattaggatttcttttgttgtttgtttatatttaattctattttattttaagttccgggatacatgtgcaggacgtgcaggtttgcacattagactttctacttatgctcttgatctcgtctgacaaattaacaacttcgtcacttccgcaagccttattaagccctctttacttttggaattaattgtgatgggttgacagaactccagagagcattgaagaatagatttgactctattgccagcttactctaaatttgtctcactcatgtgaaagcaatggcactttgtaatctggaatcaggaatttatcaaattagagctttctctagtgtcagagtaaattagagcacaaatgattttttttgaataatactaataaaatgaggctgatggttccatttgctgtcktgtatatgaaatgatcttgtttacatgagtttatttttagcagactctttacctaagagttcaggataaattcagtgtttggacctaaatttaccctatttatacaggatagtacattttaaaaagagatacatcaatgaaattactttgtgcctacgcaaatctttggtttaggaat

SEQ ID NO: 700038 - DNA, 1688 bp, Homo sapiens
gccagagtcagtgtcacatcaggcaggaagccacacggctctcggcaggacccaggccagagtcagtgtcacatcaggcaggaagccacacggctctcggcaggacccaggccagagtcagtgtcacatcaggcaggaagccacacggctctcggcaggacccaggccagagtcactgtcacatcagrcaggaagccacacggctctcggcaggacccaggccagcctgtacatgtctggcacaatgctcatcccttcctagtgccctcctgttcctgcccactgcacagcagtccccacaaagcacagagggaacacactcaggacaagctcagtgagaggccgtcgttccccatgaccccatgaccccactacctgggtggacagaggaggcattgtgcccctgcctcagtggggcccagcagtctcacatggccgctccctggcctgcacctccctacagaccaggggagggcatgtggggtgtagaggagctccccaggccccatccccatcactgaaaccttcttcctttccagggccccgacgggctgcctgtgcctggctgctggcataaggtaccgtgcagggaagtctccagggcaggcttgggagaggcaggggagggtgggggaatgggagggccccagagcctgggtgctgtcactcaaacctctgggtgtctgcggcttctcgcacagtgactgaatagccaggtttcccatcatgaccctggttttgactctcccatcttgcatgtgaggcgtggggctgtggtcctgggtgatggtgtataacccatcctgtgggtcacatggactcaactgacacctggaccaggcagggcaaagccatcagtgccccctgggatattgtcccaactggcccactgagagggagtggggggagggaagataggaggaaatgggcaggaccggggaggccaggcaaggtggcctggatgggggcggagcttctcgggctcctcgtcaccttcagtctcttcctccttttccagtgacccacaggcccagctcacacctgtacagatccgtgtggacatttttaatttttgtaaaaacaaaacagtaatatattgatcttttttcatggaatgcgctacctgtggccttttaacattcaagagtatgcccacccagccccaaagccaccggcatgtgaagctgccggaaagtggacaggccagaccagggagatgtgtacctgaggggcacccttgggcctgggctttcccaggaaggagatgaaggtagaagcacctggctcgggcaaggctagaaagatgctacgttgggccttcagtcacctgatcagcagagagactctcagctgtggtactgccctgtaagaacctgctcccgcaaaactctggagtccctgggacacaccctatccaagaagacccaggggtggaacagcggctgctgttgctcctggcctcatcagcctccaaactcaaccacaaccagctgcctctgcagttggacaagacttggcccccggacaagactcgcccagcacttgcggctgggcccggggagcagtgagtggaaatcccccacgagggtctagctctaccacattcaggaggcctcaggaggccagcctgccatgagagcacatgtcctctggccaggagtagtggctgagctctgtgatcgctgtga

SEQ ID NO: 700039 - DNA, 643 bp, Homo sapiens
cctcaaaaacacagggaaatgaattttgccaatgaccaagtgagcctggaagataccctgaggtccagaaaagaacaaagccccaagatacagggactgcaggcttgggggaccctgatcagaggacccagctcagctgtgccccagctctgacccttagatactatgagataatcaatgtgtgttgttaaagccatgaagtttgcagtaatgtattacaaagcaatagctagctcatgtgattatctctgcatgctatctctaccctgttttgtgtttatatctcaaatccgtcagcagtaaaaaatttccctagagcagggaggtagtaggtccatcatgactttcccttgctgaatgtccaggaggtgaagcctaagtacttttcatcaatctcacaytggtcaaactgcaagacatacgtctctctcttcccccgctttctccctctttcctttcctctttttataaagcaagaaacttctagattaaaaacagcatattatgagtggaagctttaaaatacttctctgacattgcactgctgtgtgtaagggcagaaggagcgggaatgaggattcactcttcgaggacacatgtgtcctcagctgcctgcatttctgtgtcaagtcacattgctgtc

SEQ ID NO: 700040 - DNA, 613 bp, Homo sapiens
tggcatatttctgggttttagcagtttgtgagttatttaattatatttcttctttgccctgttgtttgtaaaacacttccacagcccaatatatgagtagacaccacttacctcctggtagagtcctatctgaattatgtgaggctgctttccagagtagcagttcttcaacctggcttcatagtagaatcattcaaaaaaaaagagagacagggtctygggtctcgctctgtcacccaggctagagtgcagtgatgcaatctctgctcactgcaacctccgcctcccggattcaagtgattctcctgcctcagcctcctgagtagctggaactacaggcacccgctaccatgcctggctaatttttgtatttttagtagagacggggtttcaccatgttcgccaggctggcctcgaactcctgaccttaagtgatctccctgtcttggcctcccaaagtggtaggattacagatgtgagctactgcccccggccaaaaatttttttttttaaataaaaatgacagagttctacacccacaggtttggacgagggacctattaggtgattctaatatgcagccagggttgagagccaccaccgtagagctctg

SEQ ID NO: 700041 - DNA, 613 bp, Homo sapiens
tggcatatttctgggttttagcagtttgtgagttatttaattatatttcttctttgccctgttgtttgtaaaacacttccacagcccaatatatgagtagacaccacttacctcctggtagagtcctatctgaattatgtgaggctgctttccagagtagcagttcttcaacctggcttcatagtagaatcattcaaaaaaaaagagagacagggtcttgggtctcgctctgtcacccaggctagagtgcagtgrtgcaatctctgctcactgcaacctccgcctcccggattcaagtgattctcctgcctcagcctcctgagtagctggaactacaggcacccgctaccatgcctggctaatttttgtatttttagtagagacggggtttcaccatgttcgccaggctggcctcgaactcctgaccttaagtgatctccctgtcttggcctcccaaagtggtaggattacagatgtgagctactgcccccggccaaaaatttttttttttaaataaaaatgacagagttctacacccacaggtttggacgagggacctattaggtgattctaatatgcagccagggttgagagccaccaccgtagagctctg

SEQ ID NO: 700042 - DNA, 613 bp, Homo sapiens
tggcatatttctgggttttagcagtttgtgagttatttaattatatttcttctttgccctgttgtttgtaaaacacttccacagcccaatatatgagtagacaccacttacctcctggtagagtcctatctgaattatgtgaggctgctttccagagtagcagttcttcaacctggcttcatagtagaatcattcaaaaaaaaagagagacagggtcttgggtctcgctctgtcacccaggctagagtgcagtgatgcaatctctgctcactgcaacctccgcctcccggattcaagtgattctcctgcctcagcctcctgagtagctggaactacaggcacccgctacyatgcctggctaatttttgtatttttagtagagacggggtttcaccatgttcgccaggctggcctcgaactcctgaccttaagtgatctccctgtcttggcctcccaaagtggtaggattacagatgtgagctactgcccccggccaaaaatttttttttttaaataaaaatgacagagttctacacccacaggtttggacgagggacctattaggtgattctaatatgcagccagggttgagagccaccaccgtagagctctg

SEQ ID NO: 700043 - DNA, 1523 bp, Homo sapiens
gatcctcattttaaagggcgcatccatgactcatctagcagcccctctctatttttcccttcacttgatggtaaatccattctatatgtccatttactagctggacatagagaacttgagctcacctctgggagttaaatattccaccccaactatcccatattgatagcaactggactcagaggtccccctcctgtttgaaagtgaacacattgccaatgttttgagaatggcaaaagcaatagatacgaagctccatttttctaatatataaacaatatcatgtgagtaagggaagcgtgtgggaaagttgtccaagctcattcagtcccctaaatcctcgatactttaactgtctgagaaccaactgcataggcatcacctgggcagtgtttgaaaattccatttgcagaatcttaagcatcagaatctgcattttactaagatccccaaatgattcaattgcacactgaagtttgagaagcattgttctagacaaccatttccactaaaggttattttagttcatagtaacaatcctcttttggaaaggacagatcaagtctgtttgacttgcaatgaacaacactgcatgtaagcaggcaaaaaaagaaacatatcagtagtttaagattcacattatgctgaatcttatatgaattcacataaaagaatgacctgcaaaactacgcacaacttctgaaaggccaaggaatataatctaccttgagagacattaaccaaagacagtcaccctcaaagccaatgcagactaaatctttcctaacatagtctattctctaagaatagagaagatatgtatcagtcactcttatagtctgaaaacctaaacataaaagtaatctgcttttgacatataattttgtataatacgtatgaaaaaatgtgacagctaaggacttgaattaaatccctaaaaaacaattagccactcattargccaagactttaattctatgatcaattagcactgtttatctgaattaagcttttttgtggtctaacaaaaagtttttttgtggtctatcaaggagacagctgttcaaatggaaggatacatgtggggcaggggggcggtgaagagacctagattctggtcctaactgctttgccttggagagattaattcccccctctaagcctcagtttcctctgaagatgttggaccagataacctctaaggtcctttgaaactgactccttgattccatgactcactgaatatttttctgcaaagataatcccaaccaatgccttctatcctaatctaacaaaaaattgctcttcatcatagaaatacaaagtaatcttcagtgatgtgctctttatactttgctttttaaaccgtccattccagttggtcttaatatattgcacaagtattttataagtgaaatgtgtacagaatcatattctaagattatgtgcaaatatatgtgtagaaagaggcatttaaaaaaagaggcaggagattgagaagagacatattgaatgaggcacta

SEQ ID NO: 700044 - DNA, 1030 bp, Homo sapiens
tgcttatttatattttacagctgttgccttcccagttaccaaagaacaaaaaagcttaccactggtacggttgtgaatcaaaagaaaagatttttttctaaataattagaaggttataaaataattaggttatatttttaattcacaaatagactatcctgggtcacctttgagtaatggaaatctctgtttaaacattcttctggcaatgggcaccaagcattaggtcttatttccaagctttaccagctgggttttgtcattaacatttattaacaatctaagatatggctttcaccatctaatccgtactacacaaatgttttgtatggccctccagagggttttgatgtgacaaattactggcagagattacagccccgtggctattcaccagaggcaatgtaaaattaacatggtactaatccaatttaaacaagaagttgcacaaacaatcttctgaacaaaaccagatagacgattccaaaattacattcaagcacaataaatgtgtttttaataaaaagtttaaggaaaagaaattgagtaattttcacacacatgaaatgtgcctatttgatgaagttattaattttaatcttactaaaacagtcaggggcagagcacaattcactatgataatcccaaggtctattacttttcttcttaaagtgttgcatctcagtgtagtctgcagaacatcaatgattcctagtgacctcaaaatgtgtttacagtgttgcctctaaagcagaaagtttgtgggataaggattaaaattggtttgcaatgaaaaagcaatgagcatctctgcactcaaagaacttttctttcatggagtataagtttcagaattgaaccagtaatttaaaactttttttttccttttctttacaaaaggtatctgaatgtttgtgatattctccttatttgaataaaatagctaaaattactttgcaatgctttttgggcaagagggtaggaaatacamaagaagaaggttaaatagaaaatggattaaatggaaaaa

SEQ ID NO: 700045 - DNA, 632 bp, Homo sapiens
tcaagatctctctccattttattcttcacaggctcttcccctcagtattttttgcatgaataattccaccttcttatctgcttcccagaaaactaacttaaatcaaggattctaatagcatgataatgaaagagagaatattagagaaacatcgactttctctgctataagtcacaagtcctcaacagtttgtagaacttacaaaaatgttttaaaaagtagcttcagatgaaaactaattgttggagcagtagtagttttcatgccataaaaaagttattatccctaaaactctatgaatattggcattaaaactgcatgaataaacagctacacttttggaaactcttcattgtgtatgatacgaaataaggaaaaatrttctaaataagtggcttatgatagcaaataagcatcagttcaaatgtccagtgtgaaattgactacatgtaggaccccaagcaaatcattaaattttcctaagtctccagttatgatccattaacaacagaggtgaatatttctcctcccataagtttatcatatagaataacaggagataatgaatgtaaaggcttagcacagtgcctcatacagaagatgcatttctgtttccttctcccctctttcct

SEQ ID NO: 700046 - DNA, 1287 bp, Homo sapiens
ttctttctttctttctttcgttctttgtttctttcgttctgttctttccttccttctttctttctttccttccttctttccttctttccttccttctttccttctttccttccttctttccttctttccttctttcttwtttcatgcagtctcactttattgcccagactggagtgcaacggtgctatcttggctcactgcaacctccacctcctgggttcaagtgattctcctgactcatccttccaagtagctgggattacaagcatgcaccactacaccaggctaatttttctatttttaatagagacgacgtttcactatgttagtcaggctggtcttcaactcctaacttcaggtgatccacccaccttggcttcccaaattgctgggattacaggcatcagccaccatgcctggcctccattcaattatcttagatggctttagcagaaccatgatggaaaatgacagataaatataaacccttgtgtgcttaaccaggtggtagcttggttttgaaactgctatttctacatgtgagaccttaacttaaaaagtgtattgtagccattgtcactgggattttgggaatgcattttttggtctcattattcattaaaaagaaacacacatacacacacatacatgcatgtgaacacaccatatttgttttcatatggttatatggcaagaacaacaatccaccttaatggttttatttcgggtttacgtcaattttctcatgccctgcataatagtttagagaggaacatttatgaccttgacaatcaacagcagataccagaaatttgtaacagcgatggcttcaaattaaataaatctgtgaaattggaagtgtcaggttctctagacaccatgtaagacacatgtataatctcaataaagtttttgtgtcattttatatgtccttctacatggacactttttatctagccatcaaggacatgctggtacaaatcctttaagataaagagcaatttcctgctccttgcacctccaatcactgtgaatgaaacctaggtcttagcagacaactctagattttgaaacaacattgactatacttaaaatactgctccaacttatttactgatttacctggaatgtggccaagttcaagtaatgtccaggggaaaagagacctctgccacagttccaggatatggtaaaactattttgttcttgtgttgtataacatagcatatttagtaagataccatgatatgtatataattgtcgaggcctaatgggaattacagagat

SEQ ID NO: 700047 - DNA, 1287 bp, Homo sapiens
ttctttctttctttctttcgttctttgtttctttcgttctgttctttccttccttctttctttctttccttccttctttccttctttccttccttctttccttctttccttccttctttccttctttccttctttcttttttcatgcagtctcactttattgcccagactggagtgcaacggtgctatcttggctcactgcaacctccacctcctgggttcaagtgattctcctgactcatccttccaagtagctgggattacaagcatgcaccactacaccaggctaatttttstatttttaatagagacgacgtttcactatgttagtcaggctggtcttcaactcctaacttcaggtgatccacccaccttggcttcccaaattgctgggattacaggcatcagccaccatgcctggcctccattcaattatcttagatggctttagcagaaccatgatggaaaatgacagataaatataaacccttgtgtgcttaaccaggtggtagcttggttttgaaactgctatttctacatgtgagaccttaacttaaaaagtgtattgtagccattgtcactgggattttgggaatgcattttttggtctcattattcattaaaaagaaacacacatacacacacatacatgcatgtgaacacaccatatttgttttcatatggttatatggcaagaacaacaatccaccttaatggttttatttcgggtttacgtcaattttctcatgccctgcataatagtttagagaggaacatttatgaccttgacaatcaacagcagataccagaaatttgtaacagcgatggcttcaaattaaataaatctgtgaaattggaagtgtcaggttctctagacaccatgtaagacacatgtataatctcaataaagtttttgtgtcattttatatgtccttctacatggacactttttatctagccatcaaggacatgctggtacaaatcctttaagataaagagcaatttcctgctccttgcacctccaatcactgtgaatgaaacctaggtcttagcagacaactctagattttgaaacaacattgactatacttaaaatactgctccaacttatttactgatttacctggaatgtggccaagttcaagtaatgtccaggggaaaagagacctctgccacagttccaggatatggtaaaactattttgttcttgtgttgtataacatagcatatttagtaagataccatgatatgtatataattgtcgaggcctaatgggaattacagagat

SEQ ID NO: 700048 - DNA, 1094 bp, Homo sapiens
cagtatagaaattgaatcaaaatatcagtcacaattagaaatgtgggtaactagaaatttctgagtacctctaaatatctttttgaggaacaactatgtccttgagggagaaaagaatatacaaaatttcctttggcaagatatgaaagtttaccatcctcagaggatttttttgagaaataaattatctatataaatgtgtggcaatatctataaaaataattttaaaaatttaaacatccagacttcccaaattaagacaaaaatctcaaatacacttctcctagcatgaataacaatcacaattatatataatgtatttataaatttataatttatataccatgtataatgtatatatgatatacaacttataatatataatatgtatataatatacagtatatatgcacaaaatgatatatgtgccgtgcgtgtgtttagtccagccacaatgcctgctataaagaaagtgtttgaaaaaactgttactatttctttataaaacaagacatccagagtgttgagcacaaatatgctattattgtatgaatgatacatgataatctttacctatgcataaattaatagattaggattaatatgattamgttggggaaataatgctttccttgaaatagtatataaagtacttagacagcagccacttacggttatacaggttgtgcactgtgcaaaaatacccaactaaggagagtaagaaagggcagaattccagcatttgtgccattcgggagatgagatttctcaagaggaatgattttacaaatatttatcaagttgccttaaaggctaatgtggtaatacctataaaataacttttatattttgatcatctggacttctcaagtttaagaaaaaattctcgaatactcttctcctagcacgaataacaatcatgagaatcttagatttatgtgcagacaaaattgttaattgtaaaactttaggtgactgttttttcttttttccagaatactaatactcatcttgaaatatattttattatccatctatatgaagtgagagaaaaaataaataggcatctgggtttaatttgttacatgaggaca

SEQ ID NO: 700049 - DNA, 563 bp, Homo sapiens
gacaatgcagaacatatggtaagttgcttgtagaaccctttctgctacatagcaatctttggtacgctgttgagaaaaagcctaatttgcgactccaagcagctatacttttgcttcgttttgtatttttgagcattgcgatggaaatgaggccaaataaggtgaagcagaaaaattatgccttttaatcaaaattttctaaaactatggttgcccttactttctggtgtctgagtggttagggggttttctattatccaaacattaattactcaacctgaaattatttagacttaaaggagaagttatactcgtctgtaattatggctgtttgatcaatgattctgacatttttacatgttcactattgtgaacaagaaaatcaatttttaagatttgctgtttaataaattacaaaattaaaaattaatctgattgaatattgcatatctayaataaagaaaattttagatgccattttatccagtaagggacagttgttcctttcccaagtcttgccacacacagtgagtaccagatttaatattttgataacactttga

SEQ ID NO: 700050 - DNA, 662 bp, Homo sapiens
aaaaatattcttctagaaggatataggtactttagtagtttcagtgtatgaatgttacattctcttggcaagactatataatttagaggaaagcagctccttgatttttaggttacatttgattaaacacttaaacctgataaaaagtaggttccagcagtgtattgggcacctaaataggtttcrcataaatatttgttgagtgattgattaatcttggcattgcaatactttgttttctaattttggcagtgtgaaaaatgtcaggttccatgccttccccaccctcaaccaaaaaggcaacatgtttcattcatatttgaaaaaacatattctagaaatgtcacagtaaccttttaagttgacagtctctgcctaggaattcttgacagcagctatgcacaattatgccagctctatattgaactttcttacatcatcttcctaaaagtgatagtctgagcagacagcatgtagatgactagatagaaaaaaacacacactcaatgcactcttttataaattttatttttgaggcagaaataagaaaaagtgaaacaatttttgtgtgtttttattgacaaagagaattattatttaaagattatcttataatgccttaactcccatatgtataaaattgatgctcctataaattacta

SEQ ID NO: 700051 - DNA, 662 bp, Homo sapiens
aaaaatattcttctagaaggatataggtactttagtagtttcagtgtatgaatgttacattctcttggcaagactatataatttagaggaaagcagctccttgatttttaggttacatttgattaaacacttaaacctgataaaaagtaggttccagcagtgtattgggcacctaaataggtttcacataaatatttgttgagtgattgattaatcttggcattgcaatactttgttttctaattttggcagtgtgaaaaatgtcaggttccatgccttccccaccctcaaccaaaaaggcarcatgtttcattcatatttgaaaaaacatattctagaaatgtcacagtaaccttttaagttgacagtctctgcctaggaattcttgacagcagctatgcacaattatgccagctctatattgaactttcttacatcatcttcctaaaagtgatagtctgagcagacagcatgtagatgactagatagaaaaaaacacacactcaatgcactcttttataaattttatttttgaggcagaaataagaaaaagtgaaacaatttttgtgtgtttttattgacaaagagaattattatttaaagattatcttataatgccttaactcccatatgtataaaattgatgctcctataaattacta

SEQ ID NO: 700052 - DNA, 595 bp, Homo sapiens
cttctctttcaccttattacatcactcaacatattcaaccatatttgggtgtgtccatgttcttctcccctgccagaccttaggattattatggaagggatgactaagtgacttgcctaagttcacatgggtgtatatggcagtacaaggatttgaagctaaactggcagaataaaaaaaaaaagtattttaaccactatgcaatgctatcacttatatgataatcaataattaggcaagtatgcatgcaatttgtatacatacaagacagagacaaaaaaggttgttacgtttttcttaccgactcttgttcaaaaatgaataaatccctgctggcttctttaataaagattgagtaaatatatttagttatcttaaattattaatctataaatcagctcatactcagatatatgaaatacattctgcttttacctcattgtaaagattatgcctactgtttgcctttaaaacttaatttaaaaaatgtaactttaaaagatgccttctattattggccttcagaagtgattaagacccasccaatgcagaaagagaacaaaacaaacacataaaaacaaaaaacaccagaaca

SEQ ID NO: 700053 - DNA, 592 bp, Homo sapiens
gcatattccagaagtagggtctggaacttaataaggtagtagcataattaagaagacagtgacagaaggagatgagtcaggcccaaggttttaattttgtttaacaaatacatgtcagttactgtgagtccgacactgttctaacatttctacatatcttaatccattataatcatcaatatcagaatattagaaatattcaatatttctaattctatttctaattgaatattagaaagggactgttatcacccccgtggtggttctgtgatgcacaccgccaggtcccccttacggaatgaagggcttactcctccagctgcaggagtgctgcagaggatgccacacagctgttagtcctttttgggtaccatctttgctacagacaactaacactcacagtgtctcacttcctcctagggtgagccaatgactgatcagcacaggggtgcgaaagrctggcctcctcgtggcaatttgggacaactctgcaaggtgtgggctgaggcctttgttgcgcctgcatcacagctcagcttctccctcatccagtgctgcttcctttaccttcccccgccgggtgatgattcca

SEQ ID NO: 700054 - DNA, 609 bp, Homo sapiens
cgtgcacgcctttgttcaacataaccccctttccaccccatctgcctagtatcagcttgaatatcatttcctcagggaagcggctcccgatcagcttgtggtctgggtgaggtctttgatgtactctcctattacaccctcttyttttacctttgcagccagcggtgctctgtatacctctacttattacaatatttataataatttaatgtctgtcttttccactaaagggtaagttccaggagggcagaggctttttctgcaccacttgtaacctcagcactttaatattagcacagggcctggcacataccagatgcttaataaatacctgtttactctttgagccttgtggcgtgaaggtctagcagacaaagagtaagacagagaggagcaaagagcctggaacaagaggcggctggtataatgcctggtctgttataacacgatttctgaactaggtttttgaaaaatatatatacccacatatacgacataaacaatcccatagagcacactggtaggaaacatattttcataggctgagaggactgagcaatacttgtatgactagcagctggatgaatccatggccaaggcatatcacca

SEQ ID NO: 700055 - DNA, 854 bp, Homo sapiens
ttaactagactamaaaaaaacatgaaacttttcaaataactcctttaatcgttattagaggacatcattttcaaaataaatgtgtagactgttatttttaacagcatatcagatctatttattttgctattgcaatctagttttgcaatttgatcttggtttattgttccctccaagccccatccctttattatgttatattttgttagggccctcttttgttaatgtttcttacaatccaatttatgaaacatactttaactttcaagccatgaatgactcaagttaatgcctttctaaatgtgaaccacaatccataggattcgaattgtttaatataaaaatgattagattgctttgtatctcagagcatgattgaacacgtctgtgatgagtttcagagcatgtaaaacaccttcaaaacttgtcatttctttgatcttttacaaaatgaacaacccacatctgtgccgatgggttttttcattagcctctcagtgatctgactctaatcactcttttctgctgtgtaaattatatttactatagacaaaagctgacatcttataatgtctaccgattatacttctataacagcacagaggcagcttatgaagtcatttgccatatttattttgtatcttcagttctgtttctgaattcaattatttttattataggtagagcaagatgaaaaattactcaactgtataattgttttcatgataaaatagagtataattttctaaatctgtgtaatatttaatatatgtattatgtgggtcacaaaatccattatgcactattaaataataatatttataatttatttaaggatgtgtaggggtcagtag

SEQ ID NO: 700056 - DNA, 854 bp, Homo sapiens
ttaactagactaaaaaaaaacatgaaacttttcaaataactcctttaatcgttattagaggacatcattttcaaaataaatgtgtagactgttatttttaacagcatatcagatctatttattttgctattgcaatctagttttgcaatttgatcttggtttattgttccctccaagccccatccctttatkatgttatattttgttagggccctcttttgttaatgtttcttacaatccaatttatgaaacatactttaactttcaagccatgaatgactcaagttaatgcctttctaaatgtgaaccacaatccataggattcgaattgtttaatataaaaatgattagattgctttgtatctcagagcatgattgaacacgtctgtgatgagtttcagagcatgtaaaacaccttcaaaacttgtcatttctttgatcttttacaaaatgaacaacccacatctgtgccgatgggttttttcattagcctctcagtgatctgactctaatcactcttttctgctgtgtaaattatatttactatagacaaaagctgacatcttataatgtctaccgattatacttctataacagcacagaggcagcttatgaagtcatttgccatatttattttgtatcttcagttctgtttctgaattcaattatttttattataggtagagcaagatgaaaaattactcaactgtataattgttttcatgataaaatagagtataattttctaaatctgtgtaatatttaatatatgtattatgtgggtcacaaaatccattatgcactattaaataataatatttataatttatttaaggatgtgtaggggtcagtag

SEQ ID NO: 700057 - DNA, 590 bp, Homo sapiens
taataaataaaaaaattaattggtttcatcaaaataaaagtattttggcattcaaaatctatcatcaggaaaaagaaaaggcaagcctcarctaagggaacaatagtttctgatgatgtatctgataaagatgttaaatataaaatagtaaaaaaaatcttaaaagtcaatagtagacaaacagcataataaaaataaaattataaaaatattttatattttatttttatatttttatatttcaaattcaaaatatgaatttgaatagatactttattaaaatgtcaaataataagcagatcaaaagatgctcaacattattagtccttaggggaatgcaaacaaaaccaataaacacccattacaatggctacatttaaaaagactacaataatgagtgtcaataaagatacagggaaacagaaattttatcacatcactggtaagaatataaaatgctccaaccatattgcaaaaccctttgacagtttcttaatgagttaaacatacatttacattaaaacactgcaattatgctccttgttattcatccaaagaaatgaaaacatatgttcaaagacatacacacc

SEQ ID NO: 700058 - DNA, 590 bp, Homo sapiens
taataaataaaaaaattaattggtttcatcaaaataaaagtattttggcattcaaaatctatcatcaggaaaaagaaaaggcaagcctcagctaagggaacaatagtttctgatgatgtatctgmtaaagatgttaaatataaaatagtaaaaaaaatcttaaaagtcaatagtagacaaacagcataataaaaataaaattataaaaatattttatattttatttttatatttttatatttcaaattcaaaatatgaatttgaatagatactttattaaaatgtcaaataataagcagatcaaaagatgctcaacattattagtccttaggggaatgcaaacaaaaccaataaacacccattacaatggctacatttaaaaagactacaataatgagtgtcaataaagatacagggaaacagaaattttatcacatcactggtaagaatataaaatgctccaaccatattgcaaaaccctttgacagtttcttaatgagttaaacatacatttacattaaaacactgcaattatgctccttgttattcatccaaagaaatgaaaacatatgttcaaagacatacacacc

SEQ ID NO: 700059 - DNA, 590 bp, Homo sapiens
taataaataaaaaaattaattggtttcatcaaaataaaagtattttggcattcaaaatctatcatcaggaaaaagaaaaggcaagcctcagctaagggaacaatagtttctgatgatgtatctgataaagatgttaaatataaaatagtaaaaaaaatcttaaaagtcaatartagacaaacagcataataaaaataaaattataaaaatattttatattttatttttatatttttatatttcaaattcaaaatatgaatttgaatagatactttattaaaatgtcaaataataagcagatcaaaagatgctcaacattattagtccttaggggaatgcaaacaaaaccaataaacacccattacaatggctacatttaaaaagactacaataatgagtgtcaataaagatacagggaaacagaaattttatcacatcactggtaagaatataaaatgctccaaccatattgcaaaaccctttgacagtttcttaatgagttaaacatacatttacattaaaacactgcaattatgctccttgttattcatccaaagaaatgaaaacatatgttcaaagacatacacacc

SEQ ID NO: 700060 - DNA, 590 bp, Homo sapiens
taataaataaaaaaattaattggtttcatcaaaataaaagtattttggcattcaaaatctatcatcaggaaaaagaaaaggcaagcctcagctaagggaacaatagtttctgatgatgtatctgataaagatgttaaatataaaatagtaaaaaaaatcttaaaagtcaatagtagacaaacagcataataaaaataaaattataaaaatattttatattttatttttatatttttatatttcaaattcaaaatatgaatttgaatagatactttattaaaatgtcaaataataagcagatcaaaagatgctcaacattattagtccttaggggaatgcaaacaaaaccaataaacacccattacaatggctacatttaaaaagactacaataatragtgtcaataaagatacagggaaacagaaattttatcacatcactggtaagaatataaaatgctccaaccatattgcaaaaccctttgacagtttcttaatgagttaaacatacatttacattaaaacactgcaattatgctccttgttattcatccaaagaaatgaaaacatatgttcaaagacatacacacc

SEQ ID NO: 700061 - DNA, 598 bp, Homo sapiens
aatggagttctgatacatgctacaacatggattaaccttgaaaatattgtactaagtgaaagaaaccggacacaaaatgcacatactgcatgattccatttatacagaagttccagaaaaggcaaaatatagagacagaaagtagattagtggttgtcaggaactggggaggaactgttaatgggtacagggtttctttttggcrtgattaaaatggtctaaaattaaatggtgctgatggttgcacagttctgtgaatctactaaaaaccactgaactgtgatatttttacactttaaaaggatgaaatttatggtatataaattatatctcagtacatttgttataaaaatgcaattgcctctaaaaggacacacacaaacatttgtcactgatatcataatatgatttaattagagcaggggtcagaagactttttctgtaaatagccacataataaatattttaagccgtatgacagatgatctttgttgcaactactcatctttactgtggaagcacaaaagtatccacaaataatacgtaagtgaataaacagggcaatttccaataaaactttattaaaatggtgggttgg

SEQ ID NO: 700062 - DNA, 659 bp, Homo sapiens
atccccaggagcaacttggggaagtttagaaacttgcagcctccagctgcgtgactcctaaaacataatttctcatcttctagctaatttgttagtcctgyaaaggcagtctagtccgcaggcaggaagggggtttgttttgggaaaggcctgttatcatctttgtttcaaagctaaactataaactaagttcctcccaaagttagctcagcctacatctaggattgaacaaggacagcttgaaggttagaagcaagatggtgttagttaggtccgatctctttcactgtaataattttctcagttatggctttgcaaaggcagtttcaggaagttgtggccacaaagggctagtacttggcattttttcaataatctactgtgcaacaggacctgtgtccagctgtggattttgatttacatagaaatcagaacctagacatggaatcaccagtatgaagaattaaacttgatgcgggcatctgccttcagagactggtattatttatcatttcgtggccaggattaaggttctggtgaaggggcattgttgtctggggtaaatactcggggtttgccgtctcacgccaagggaattgaggacgcaaacacaagaagtgggtttaggagcggaggtttaataggcaaaagaaagagaa

SEQ ID NO: 700063 - DNA, 659 bp, Homo sapiens
atccccaggagcaacttggggaagtttagaaacttgcagcctccagctgcgtgactcctaaaacataatttctcatcttctagctaatttgttagtcctgcaaaggcagtctagtccgcaggcaggaagggggkttgttttgggaaaggcctgttatcatctttgtttcaaagctaaactataaactaagttcctcccaaagttagctcagcctacatctaggattgaacaaggacagcttgaaggttagaagcaagatggtgttagttaggtccgatctctttcactgtaataattttctcagttatggctttgcaaaggcagtttcaggaagttgtggccacaaagggctagtacttggcattttttcaataatctactgtgcaacaggacctgtgtccagctgtggattttgatttacatagaaatcagaacctagacatggaatcaccagtatgaagaattaaacttgatgcgggcatctgccttcagagactggtattatttatcatttcgtggccaggattaaggttctggtgaaggggcattgttgtctggggtaaatactcggggtttgccgtctcacgccaagggaattgaggacgcaaacacaagaagtgggtttaggagcggaggtttaataggcaaaagaaagagaa

SEQ ID NO: 700064 - DNA, 1440 bp, Homo sapiens
gccatcttcatatgaaacaaatgacatatgatatatgaaacaacatatgaaacaaaagccatcttgcttttaacatccatcatgaaaagtccaatggaaccgttaaggtacaacatggacaaagccaccatccccctagaaataggcaacctgcctgttcaagctgcttgcaaaggagaaagaatgtgtggcatttagaaaatctgaaatacacagtcagaaactgaaatgaaactttatgcaacagtaaaaaaaacagatgttgggcagtcattgatgtgcagcaataggaatgtctggggaaattattagcagacagagacctgttggatcccacactccttcgggtagcgtgctgttcggtggggctccgctatcccaggaacagacgctggtgccaactgtctcctccatcccctgaccacagtcaaatgaagcctgtctggccaaatgtaacttcagaagtcactggcttaccacagtagttcatgaacttgtcaatgatctctatttcatccaatcacctcattttggactctatggtttttggtttgctgcctctgacctctggaacacctttcccttccccattcagaaacatcctccctggccttmgaagtctctcatggctctactacttccaaaaagccatccttgaggagcagtgcaaccaccaagatggcaactttcaacacttccaatggggcccgatggcctagtggataccattgaaaagaacagaatcagggatgtgctgactggatgttgtcctggctttctgggcctcccacgccagcatagggagcagccctgtggcggcctcacggcacacgcgagagtaggatggtggctttttttttttttttccatggaagaggcacacttgagagaaggatgctggctgtttttttccgtggaagatatgctctggctgctggggtctagaagatgagtgtttcttcctcccccaggacagaaaagctgtgaacctctttcccaagagcaacaaggaccattcttagagtccagaaataagaaaatctatttgggttttagcgcaaattagtaaaaacctatccatcccccttactagtttacaccaccattcttttctccttttcccctcctctttgttaaacaaaacatgtaagtatggttaacaaaggatgtgacaatactaggtacattcctttctaatttttaaatacttttagaagtaggacatgtgacaagaaacatgcaaaacgatgttcatgggaatacaatatcagctcaaatgtatatatatatatactgacagaagagttcaagacactttccatcaagagcacccacatttccactccacttgcctgcccccagccccaaaccacaaaactcgttaaaaataaagtcatgcaaaacacttaacaaataaaactggcttcagagggcagaaat

SEQ ID NO: 700065 - DNA, 1067 bp, Homo sapiens
cagccagaaattcagattttaaatgtagccactgattgaaaattaaaaaacaaaaaattgaaacatttggcaggccaacactgtatgcctggataccagctttccacttctgtagtatacaatcttaaggaatttcagaactaagatctcccagtgcatgttaccttgtatttctcacagccaacccaaacagcactgctacagtgatatttttatttccatctggttctttttaaacttctgaagcatacttttttggttagttttaaaaggatgtagttattttgattttacttaatctggggctttgggggttatttcttaatttattttgctcttgcttttacttttactatacttgtctactggaacttaaaggggccattttatcacttttgggttacatctttgcacacaaggaatacaataaacaggcgatgaagtgaaactgacctaatacttttcaaactttctttttcttcaaaatagccaggtttgtttgagataaaaataaagtttagtttgatcaagtgtgtgtgtgtgtgtgtgtgtgtgtgtgtgtgtgtgygcgcgcgcgcgcgcgcgtgcgcaaaatctaactactgaggatcaaaataaaataagaggtctgggactggacaaaagtatctaggtaacaaccaggtaataaaagtccaaaagagagtaaacctcttaagaatgaaaaatttgtgaccattgcctcaagagatccgtttagaaagttaatgcttataatttaaaaatagagaaacactagtttttttaatattaagatgacattttacctatgatgttatgaaagtacttatctatcttttcaagaatgatctagtccagatcctttgttattaaccatatctttgctattttaatttaatttttattatagaaatatttgatgaatgactatttcaatggtaacaaaattggtattttaaaacagaaaaagcaattaaaaaatatatttgttattgatttataagtcatcaaattaacattgtagccataagaatacatatttatagagtgatttttttctccctcag

SEQ ID NO: 700066 - DNA, 579 bp, Homo sapiens
ttgttctcccccatgttaatttaacttttgttctcctctgatgtaaactttaattgtttaagtactctgtctagttttatgacaattattgttttcagtttcacttcagtgaatgtcttcactcatacattttagatttattcagtgaggagtttgtccacagtatacattccaaataagtattactttagaaacagtattttattttaggatgagttatagcatacactatttaggaggatagcttatttatttatttattctcataatttggtttgtcagtataaagagtactgctttcctcataattaaaagtaatttttaaaatattatagatatcatgtgcagatttattttagtgaaaccacaaccatattagaaaggcagtcagcctaaatttactcaataatttctgaaaatacattcctcattattaatagtttctttcagagaagctataattttacatagatttctatttttatctatgtccaacttaatttctactgattaaaaaatactcgtttyaaagatttatttgcagaagaaatgccagtttttactaagcaataatatttg

SEQ ID NO: 700067 - DNA, 645 bp, Homo sapiens
ccgagacctgtctcagaaacattgggttaacaacrctctcacatattgctgctgagaaggcagcttcatttggaacttcacgccaaaaaccccattttaccttaattacctctttaaagaccctgtctccaaatacagtcacattctgaggtactggaggtaagagcttcaacatgtgtttgtctgtttatttgtttatttatttgagatagagtctcgctctgtcacccaggctggagtgcagtggcgcgatctcagctcactgcaacctccggctcatgggttcaagtgatcctcctgcctcagcctcccaagtagctgtgattacaggcacccgccaccacgcctggctaattttgatatttttagtagagacagggtttcactgtgttggccaggctgatcttgaactcctgacctcaagtgatccacctgcctcagcccccaaagtgctgggatttcaggtgtgaggcaccgcacccagccagggcttcaacatatgaatctgggaagagagagaagtcagctcctagttggcaacctcacaactgctgtctacactgacaacgatcattttcccatccccctctctgccttccatttccaagtcttgctttcagtccccagaagcagctgatcctcttt

SEQ ID NO: 700068 - DNA, 651 bp, Homo sapiens
atttcagtaattgtatgtaacagtaattttatctgtttttctgtttcgatatatcttatgaaggtgacaacctcctaccagagacaatggctcattgggttattgttcctttttttaaatatatgttttkttttgttttgtgttttcagatagaatctcactctgttgcccaggctggagtgcagtggtataaccatagctcactgcagccttgactttctgggctcaagctatcctcctgcctcagtcttccaagctaggattacagttaagcaccaccacgcctggctaattttttaaatttttgtcgagatgggatctcactctcttgcccaggctggtcttgaactcctgtgttcaagctatcctccttccttggccccccaaagtgctaggattataggcatgagccactaggcctggcccctttttaatgtattaatcagtacacctcattgctatgggcatttttaaataatcattctttttcatttttgtaatatgttcctcaaagtgtgtgtgtaacttttattacaccatggcggatgactgctcagaagactagaacaacagagagcctctaacaaagcaattaatgggcatgtgtccctttagcctattgggttggatcagttacaattattggtaatt

SEQ ID NO: 700069 - DNA, 651 bp, Homo sapiens
atttcagtaattgtatgtaacagtaattttatctgtttttctgtttcgatatatcttatgaaggtgacaacctcctaccagagacaatggctcattgggttattgttcctttttttaaatatatgtttttttttgttttgtgttttcagatagaatctcactctgttgcccaggctggagtgcagtggtataaccatagctcactgcagccttgactttctgggctcaagctatcctcctgcctcagtcttccaagctaggattacagttaagcaccaccacgcctggctaattttttaaatttttgtcgagatgggatctcactctcttgcccaggctggtcttgaactcctgtgttcaagctatcctccttccttggccccccaaagtgctaggattataggcatgagccactaggcctggcccctttttaatgtattaatcagtacacctcattgctatgggcatttttaaataatcattctttttcatttttgkaatatgttcctcaaagtgtgtgtgtaacttttattacaccatggcggatgactgctcagaagactagaacaacagagagcctctaacaaagcaattaatgggcatgtgtccctttagcctattgggttggatcagttacaattattggtaatt

SEQ ID NO: 700070 - DNA, 986 bp, Homo sapiens
tggtgcgactctgtaatcccagctactcaggaggctgaggcaggagaatcactttaacccgggaggaggaggttgcagtgaaccatgattacgccactgcactccagcctgggagacagattgaaactcaaaagtaaaattaaattaaattaaattaaaattaaaatacaaaaattagctggctgtggtggcacacacatttaatttcagctgcttgcaagggtgaggcagaagaattgcttgaacctagaagacagaggttgcagggagagaaggtcacsagactacactcacagcctggacggtagagtgagactctgtctaaaaaaaagaaaataaaataaaaagagtgtttctgatgtgactgatgcagagataataaaatctgagtaacgtgatagagactgacgggcagagggaacttcagatgggggtgggagggcatgggagacatctctgagcctagacctgaaggagaagaaaggcacagggccgtgatcatttaggaacacagggtaagagcagggacagcaacctgagacaggaagggttttagtgtttgggaaaagagaaaagcaaatatgactggggcagagacagtcatgcgatgagggcaagctcccaggaggaggctggacactggcaggggccctggacacagggctatggagccacagtgaggagttgggctttcaacatttgtccacatggaccagaggtgccttgagggaaacatgcacttaatagctcacagctcaagattttaacaaatgacaacaaaactgaaaaacaggctaactcgttaaactacattttgatgttaaaggtttccaataaataataaagactagaaagcatgcagacctcgatctgaactggacgcaactaatttcaaacagaaactatttggaaattgttttttaaaaaatcgaacaaattcagatgtcaatgggaaaataactgaacaatgtgagctggttatagga

SEQ ID NO: 700071 - DNA, 650 bp, Homo sapiens
tatctacatctatctttgcttttcaagtgagcccgccacctggaataaaacttgtaagtattttttaaactctcaggyatgaacatcagaggtaaagaaagggttttccatttctaagaatgtgctggtgttgagttcgcagccgtggctgcactgcctccagctctgggagttccagcccaaggagaagaggggtaaacagggcgtccaaccagggtcatgcaccgcccacccgcaggaaatcgaccgggtgcaaatccacgctgggaagcagccaggaagccgccgctacaaacgccgggcaggagcgccctctcccggagcgagaaggaacctcctggtccccgcgggactccgctctcggtgaaatgggacttggttagaaatccaccgaactcctcattggcggcgcctggtgcaagaagttgcttaggacatctaagcagacccgcgcttccagagcagggctgtcggtgctctgcagggggtaagtgcagaggatctaagtggggcttttgaagtcaccgaccccgtgcagtccacgccacgtggctcagtactgccgggagacgcctccagagggcccaggctggggagcgcgcctaggaacccaccgtgttgtgccccatggcactgcaggatggctatcg

SEQ ID NO: 700072 - DNA, 607 bp, Homo sapiens
agaaaaccgccgccacgatccaatcatctcccaccaggccccaggtctaacactggggatgacagttcaacaggagattaggggacacacatccaaactatatcaactcccacgtcctgactcagccccctcatctagcagagaggtgagtctacactccaccctcaataaccaggtgctatctagacctcaggatctcttaatcccactcagttgctgagctcctgtccacaccctggaggcctccttgccttcctgttcccgtcagggataaaaagcaagagccactgactttccaggagctgtcgctgaaactgagctgttggcttgttacagttctccccgtctgagactttgggtgacccatcccctacggccatacagcacaacctcatctattcccccgacacatagtgaaccaggctgttcttagaccacttatctttggccccacaaaggccagaatctccagtacacattgccactgagctycctgccatggggagaccgagctgcccacctcggtgcaaaacgcagaatgaggcagccaggctgttgatgtatgcctcaatatttgaaacatgcagaaagtagtttgtgttgttca

SEQ ID NO: 700073 - DNA, 2840 bp, Homo sapiens
aatcaatatgtccccaactgtaaaaaagtaaaaagtaagcttagtcctgtaacatgtgcaagccccataaaagtactacctccatgtgagttttgctaaatattctagtaatatattcatcaatccatcaatatattcatcatattcatttctgctaaatattctagcaatatattcatcaatccatctgctcaaacgttcacttttcctggagttagaaagagtcagaaagttagaaacaaaaaaggatttattttatgttatgttatattatttatttatttattttatttttaattttttgagacagaatctcgctctgtcacccaggctggaatgcagtggtgcgatctcggctaactgcagcctccacttcccgggttcaagcaattctcttgcctcagccccccaagtagctgggactacaggcacgcaccaccatgcccggctaatttttgtatttttaatagagatggggtttcgccatgttggccaagatagtcttgatctcctgacctcgacatccgcctgcctcagcctcccaaagtgctgagattacaggcgtgtgccactgcgcccagactattttatgttatattttaatataggtcagcttttaaaagtgagtgggacactagcatatttaactagtatcttcaaagaggtatgacaaagaatatctcagccccaaatcactcatagaccagaagacaatgcaaaccaacatcaaggctagaattcttaactgtgattccaatacatttgaggacaaagattttttacaaggtgaacactctccaaaatgggaatgaagacaagtataaaatattctgcaatgtttaataatttttgatgcatttcaatttttaagacatatcctctgcaaaaaaaaatagtaagcaaaacatacaaggtagaaaatagtgcatatttttaaatctaaatctgtaatagtttcttggagatacagaattttgtattctgaaataattcaggaaagctgtaggaggaatagctgggaatggtttaagcccagctttctgtaaatggcacttgtgaagaaaggaagtacgtcagagacaaaagtgcagaagaccaaggttctggttccatttctactactaactagttttgaagggctggaaaagacaggtgacttctctgtgctccggtttcttcatctgtattaaaaaaacaaaaacaaacaaacaaaacactggactggttgaattttaaagttctatccagctctaagttcctgaaaaaatctaagtcagaatcttaagaatggtgaagatgaatgcatgttgcattcgtgcagctataggcacaagatacagtcacaatatcttcagtattttttacattacgaggcttgacattccccagcagtgcccctttgtaaacacaggaaagaaccrccggctaggagactcccagagatacttgcctgaatccttcctcatcctctcaataggcttcagaaggtgcaaaaacaaacagacaaaaaacaagaagatattggcagagagggaaattggagcctttcccatgatagggctagtaaaatttccagttaggttaactcagtcatgatagaacctataactggcaggcagtaaacatttttttagtctaccctgtgtgacaaagattctttgcttgacaaaactttagtcaggctcctgagccttctgctacgcccatctgtgtgcttccttgtacaatacagttttcataagaaccttgctaagtcaatctggcaataacccactactctcaatgtctgattacactcagagtctgatcaagttcctcatccttcactcttccccaggtgatgcctgatcaccctggctatcttcaggaagaaccacaggttccccatatcaccgatgtttcctcttagtaattttccatccactgtccttgccccttggctataaaatcccacttgcccttgctgtctttggagttaagcccaatctttctcttccccactgcaggaccccattgcagtggtccctattcaatggtcctgagtgaaatctgccttactgtgctttactacaagtcattgaataatgttttaaacatctgcccggaactgtggaggtacatgggaactaaaaagtcttagaggagctcccaatccaggtgtagaggcagacaggacctcgccacagtgcactaaaaagtagaggcagagagagcatcaggctgcctgcatctgagccaagcagggcttcccgagatgacacctgcactatcctgaatcagaaaaggtgtttacaaaatatggaagaggggtgtagaaagagggggcgtggagtgagggggcgcggtttgggaaggtgcaccatggaggtgctgcacaagaacacaggacagcatgacacatcctgggtgaggaaaaatagctgtagggctggagcccaggtgagaacgcaggagtggtgggcgtaagacggcaagcgcaacggctgttctgaaaagacctgctgttcatgcaaaggactttcacatcctggatgggatggaagatgttaaaggattttaggcaggggagtgacattatcaaacttggccttagaaaggtcatcttacaagcagatgggatgcaataagattagagacaagatttaaataccagtgcaataacctaggaaagagttccaaatgatgtaaatgaaaaagatcagtggccacacagaggagggaacggatttaaagtatatttaagagatataaatcatacctattaacctttattgaatgtgtgaaatatactaggtacgatgccaaggaactttatgatacactgtttcatttaatcttca

SEQ ID NO: 700074 - DNA, 1594 bp, Homo sapiens
aaatgtgagacacaaaaattacttaaaatgaaattgtttagcaagaataaaacmaagtttaaagatctgaaaaattttcaggctattcatattgcaaaaatgagaaagtatttgagagtgaatactaaagatgtggctaaatgtcttttgataaaggggttagtaggggtgtgaaccatagacttaatatgacagcccaggaggaaagctgccagtttgaagtgaagaagaaggatatgggaaggaatgaaagaaggctggtggatttcttggattttataggccagctccctacagctattcagctgcaaaaaaaaaaaaaaaaaaaaaaaagaactattattcaagacaagagaagaatgactcgaaagataattcaggtatgtgttgttggtttcaaaggagggactattgcctcactttcaacatgccagatagtttcttcacagggcttcagggtaggggtggtcacccagaaccatggggatgggactgccaccccaggaggttcagaaagtgagaccactgccccagtggacttggaccgcagagcactaagcaaaagaggattattctcaaggcttaaaatctcatggagtttgccttgttgggttttaaacttgctttggacctgtcatcctttccttctttcttattcctcccttttagaataagtatgtttatcttatcattgcttatcccattattgtattttgagagcacattacctgcttgctatcagtggttcatatgtagacaaaaattttactcaggataaataataccttatgtctcatccatatcttatttacatgatattagatgagattttgaacttcatagagttgatgttggaataagtatagactttggggcctattgggatgaaatgaatgtgttttatatgtgaaaaggacatgggagaactagggtagactattatagactaaatatttgtggcccatcaaaattcatatgctaaaatcttaacccccagactgatagtattaggaggtggggcctttaggagataccaaggttagattagatcatgagagtggagtctctaatgatgagatttgtccctttaaaaggacatgaaggtacctgagctttttttcctgttttttttgtttcgttttgttttttgtttgtttgtttgtttgtttgtttgttttgtttttttttgctcttggctatgtgaagatacaatgagaaaatggttgtctgtaaaccagaaagagtgctgtcatcagacagcagacctgctggtgcattcattttggattccccagtttccagaattttcagaaataaaaatttgttgtttaagccacacagtctatggtatcttgatatagcagcatggactgactagaacaaagtgatattgctccatatgtgccaacttgaagacctcctatgtgttttaagcacttgcccaattcacggacttcttgcctttgctcatgctctaacctgcatctatcttatctcgctcatccatagccatctcctcattctttcagtttttatattatattctgttttgggggaagtctctgaacaaccttttgaaaaatagcttaccccg

SEQ ID NO: 700075 - DNA, 657 bp, Homo sapiens
taatgacaagaaaaagaagtctgtacattttcactaaaggtgcaacaatcctttatttttctctgaatattttcagtctactgttggctgaataaacatatgtggaatccacatatatggagagccaactgtactaaaaatatcagstaaaatatttgggaggcagaggcaggtggatcatgtttttatacatgcttgcatgtataaaaccagagagtctaaacaaaatgtgtggaaaaattttaaatttttatgattttatatatgacataatatgacatggctaatactaacattttaacagtatgccaaaatgtagcattgacagagaaaagcaagataaaacaggcataaaaacaatagaaaatcaacagtgtcaaaaataaaaccaataaataggtagaaaaatatttagacaacttacccttgtcttagtgaaatcattataaatatcttaggttttttaaaatgatttttaaattttatgttcctggtttttaacagggagcacatactgctttcataatgacatcatcatcatcatcatcatttacagccttgtacataaataattctccccatccctctctccatacccttctgaagataatgtcacttctgtcacttgttgtttccctccctccgtctcgtccttcc

SEQ ID NO: 700076 - DNA, 657 bp, Homo sapiens
taatgacaagaaaaagaagtctgtacattttcactaaaggtgcaacaatcctttatttttctctgaatattttcagtctactgttggctgaataaacatatgtggaatccacatatatggagagccaactgtactaaaaatatcagctaaaatatttgggaggcagaggcaggtggatcatgtttttatacatgcttgcatgtataaaaccagagagtctaaacaaaatgtgtggaaaaattttaaatttttatgattttatatatgacataatatgacatggctaatactaacattttaacagtatgccaaaatgtagcattgacagagaaaagcaagataaaacaggcataaaaacaatagaaaatcaacagtgtcaaaaataaaaccaataaataggtagaaaaatatttagacaacttacccttgtcttagtgaaatcattataaatatcttaggttttttaaaatkatttttaaattttatgttcctggtttttaacagggagcacatactgctttcataatgacatcatcatcatcatcatcatttacagccttgtacataaataattctccccatccctctctccatacccttctgaagataatgtcacttctgtcacttgttgtttccctccctccgtctcgtccttcc

SEQ ID NO: 700077 - DNA, 605 bp, Homo sapiens
gtaagtagacatagttttgagacttcatgaaacttttttgcctttacaaggttaatgtagctcccagatttaagaaacattggtctgggacatttttaaaaattgaaaactgtaagacataattataatttggtattagtccctctttatttcagtttctcaaccacaaaactttcttccagcctctcccttaaatgagatgtaaagtcaggtgagattaatgtgcactacagctccataagaggaaagatacaggctaaatggagggcatgaattgctttaagcataaatatagttactgaggagaagtgcaaatcactacggatcagaaaaaaggtgattcttacctagcagccttgtgacagtgaggctatgaaatacaggctcagagccagctggttggctcctccgcagtggcagaaattccccaactgtgaccakcataggaagactaggcagaagccacgtggggcttctatttgggctaaatgagcaaagcaaagacatatggagaggattgcagcaaggaggagcaggtgacagtgcaagtaaaagtacctagcacagtgcttcgcacaaaccaggtggtctacacatgtttattc

SEQ ID NO: 700078 - DNA, 642 bp, Homo sapiens
tttcatatttataactgtcactttgttaatcagaactgtatctgaatagagtaggttcttagtgattatttcttcamtaaatgaaggaataaagtatgactttcaatttgggctaccccaggtgagatgaaggcagagatgaattgctgatgctttgagaaatgcaatcccagggcagaaaggatgtgggagcaaggcagaaatggatgggagtcaatgccagccaaggctttattgtgccaacccctcttcaccatgagccagaaagagatccagccagttgctcagtggagcatctgcttggctctatggaatgtctctgcacaggctgtgcagaaaagtcctgcctcagagcagtcctccagagagaagaaatgtatcttctcggcttggtcctgtctcctgtttcccactggatgattttcactacctggggagtcagctcccacacgtccatgccatctggtacgattattttttatttttttttagaaacagggtcttgctctgttgcccaggctatagtgcagtggcatgaccatagctcactgcaactcctaggctcaagagataatcctgcctcagcctcccaagtaattagagcaactagcgcacatcgccacacccagctaagtttttaaa

SEQ ID NO: 700079 - DNA, 1497 bp, Homo sapiens
tgcggagaaagagcaactcccaccgaatccctgacagatctcggggtgatgctcacagggtttagggctctatgacaccgctatacaattgttctttcacattgggaagatactcctgttgccatgcctaccataaccttttgtctcccaaacagttactattttatttgaagtgaagtccttgacttgtcagggactctgtttcattagagaacacattgaaacatctcatcctaattgtttgtgtrtgggtatttgttcaggcagtaacaaatgttggcagacgaataacagtactttggaagtaggaggcagcccccagtgtctacaaagcgataccccaagacccttctaactttctctaattcaaatactggcttttatccctgcaaccagagcagcgactgagcgagagatcagtagccggtctgaaatccttctggttgtcaaaaactcagtccagaaagcaaaaaggaaaatctacgtttgaagatgctgttggggcagaggctccttaacccccttttccagataggagcagagtatgggcagtcgggcctgaacataaaaaattagtcacaaaatttgttgtatgacttcttctttctggatcagggaactgccaagaacctcgtttggcttccactctcattccccacccaccttcaatgacttgtcacatgggaaagacagcaatgtgacttgacacagaaatgcaggcagctgaggacacatgtgtcctcgaagagtgaatcctcattcccgctccttctgcccttacacacagcagtgcaatgtcagagaagtattttaaagcttccactcataatatgctgtttttaatctagaagtttcttgctttataaaaagaggaaaggaaagagggagaaagcgggggaagagagagacgtatgtcttgcagtttgaccaatgtgagattgatgaaaagtacttaggcttcacctcctggacattcagcaagggaaagtcatgatggacctactacctccctgctctagggaaattttttactgctgacggatttgagatataaacacaaaacagggtagagatagcatgcagagataatcacatgagctagctattgctttgtaatacattactgcaaacttcatggctttaacaacacacattgattatctcatagtatctaagggtcagagctggggcacagctgagctgggtcctctgatcagggtcccccaagcctgcagtccctgtatcttggggctttgttcttttctggacctcagggtatcttccaggctcacttggtcattggcaaaattcatttccctgtgtttttgaggactgaagtccctgttttctttctagttgttggctgggaaccactcgcagctcctagaagccctcaaaattccttgacacatggcagctcacttctttcaggccagcaggataaccacatgctccagcgtagggttgtagcgttctcacagaagtgatatcccgtca

SEQ ID NO: 700080 - DNA, 1497 bp, Homo sapiens
tgcggagaaagagcaactcccaccgaatccctgacagatctcggggtgatgctcacagggtttagggctctatgacaccgctatacaattgttctttcacattgggaagatactcctgttgccatgcctaccataaccttttgtctcccaaacagttactattttatttgaagtgaagtccttgacttgtcagggactctgtttcattagagaacacattgaaacatctcatcctaattgtttgtgtgtgggtatttgttcaggcagtaacaaatgttggcagacgaataacagtactttggaagtaggaggcagcccccagtgtctacraagcgataccccaagacccttctaactttctctaattcaaatactggcttttatccctgcaaccagagcagcgactgagcgagagatcagtagccggtctgaaatccttctggttgtcaaaaactcagtccagaaagcaaaaaggaaaatctacgtttgaagatgctgttggggcagaggctccttaacccccttttccagataggagcagagtatgggcagtcgggcctgaacataaaaaattagtcacaaaatttgttgtatgacttcttctttctggatcagggaactgccaagaacctcgtttggcttccactctcattccccacccaccttcaatgacttgtcacatgggaaagacagcaatgtgacttgacacagaaatgcaggcagctgaggacacatgtgtcctcgaagagtgaatcctcattcccgctccttctgcccttacacacagcagtgcaatgtcagagaagtattttaaagcttccactcataatatgctgtttttaatctagaagtttcttgctttataaaaagaggaaaggaaagagggagaaagcgggggaagagagagacgtatgtcttgcagtttgaccaatgtgagattgatgaaaagtacttaggcttcacctcctggacattcagcaagggaaagtcatgatggacctactacctccctgctctagggaaattttttactgctgacggatttgagatataaacacaaaacagggtagagatagcatgcagagataatcacatgagctagctattgctttgtaatacattactgcaaacttcatggctttaacaacacacattgattatctcatagtatctaagggtcagagctggggcacagctgagctgggtcctctgatcagggtcccccaagcctgcagtccctgtatcttggggctttgttcttttctggacctcagggtatcttccaggctcacttggtcattggcaaaattcatttccctgtgtttttgaggactgaagtccctgttttctttctagttgttggctgggaaccactcgcagctcctagaagccctcaaaattccttgacacatggcagctcacttctttcaggccagcaggataaccacatgctccagcgtagggttgtagcgttctcacagaagtgatatcccgtca

SEQ ID NO: 700081 - DNA, 1497 bp, Homo sapiens
tgcggagaaagagcaactcccaccgaatccctgacagatctcggggtgatgctcacagggtttagggctctatgacaccgctatacaattgttctttcacattgggaagatactcctgttgccatgcctaccataaccttttgtctcccaaacagttactattttatttgaagtgaagtccttgacttgtcagggactctgtttcattagagaacacattgaaacatctcatcctaattgtttgtgtgtgggtatttgttcaggcagtaacaaatgttggcagacgaataacagtactttggaagtaggaggcagcccccagtgtctacaaagcgataccccaagacccttctaactttctstaattcaaatactggcttttatccctgcaaccagagcagcgactgagcgagagatcagtagccggtctgaaatccttctggttgtcaaaaactcagtccagaaagcaaaaaggaaaatctacgtttgaagatgctgttggggcagaggctccttaacccccttttccagataggagcagagtatgggcagtcgggcctgaacataaaaaattagtcacaaaatttgttgtatgacttcttctttctggatcagggaactgccaagaacctcgtttggcttccactctcattccccacccaccttcaatgacttgtcacatgggaaagacagcaatgtgacttgacacagaaatgcaggcagctgaggacacatgtgtcctcgaagagtgaatcctcattcccgctccttctgcccttacacacagcagtgcaatgtcagagaagtattttaaagcttccactcataatatgctgtttttaatctagaagtttcttgctttataaaaagaggaaaggaaagagggagaaagcgggggaagagagagacgtatgtcttgcagtttgaccaatgtgagattgatgaaaagtacttaggcttcacctcctggacattcagcaagggaaagtcatgatggacctactacctccctgctctagggaaattttttactgctgacggatttgagatataaacacaaaacagggtagagatagcatgcagagataatcacatgagctagctattgctttgtaatacattactgcaaacttcatggctttaacaacacacattgattatctcatagtatctaagggtcagagctggggcacagctgagctgggtcctctgatcagggtcccccaagcctgcagtccctgtatcttggggctttgttcttttctggacctcagggtatcttccaggctcacttggtcattggcaaaattcatttccctgtgtttttgaggactgaagtccctgttttctttctagttgttggctgggaaccactcgcagctcctagaagccctcaaaattccttgacacatggcagctcacttctttcaggccagcaggataaccacatgctccagcgtagggttgtagcgttctcacagaagtgatatcccgtca

SEQ ID NO: 700082 - DNA, 775 bp, Homo sapiens
ctgttttcatgctgccgataaagacatacccaaggctgggcagtttacacaagaaagaggtttaattggactcccagttccccgtggcttaggaggcctyacaagcatggcggaaggcaagaaggagcaagttacatcttacgtggatggcggcaggcagagagagcttgtgcagggaaactccaccttataaagccatcagatctcgtgagacttactatcacaagaacagcatgggaaagacctgcccccatgattcagttacctcccactgggtccctcccacaacatgtgggaattcaagatgagatttgggtggggacacagccaagccatatcatttgggactgggaggaaggcctctgtgcttctcagtgaagcatttgctgcctgcaggtggaatggccagctttctgcaaccctcctttctgggcttgaacacctggttattttgagcaatgtgatgcttggtgtccttattgctctaagaaataggaaattgcttgtatgaatctctagtaatatcccggctaagaagtttttttttttttttttttctctgagacagagtctcactctgtcgcccaggctggagggcagtggtgtgatcacggctcactgcaacctccgccttctgggttcaagcagttctcctgtctcagcctcccaagtagctgggactacaggcgcacactgtagtacaaagagacagggaggaatagaaatagcctaactgtggtttccttctgaggcgtcggggttgccatatgttgtg

SEQ ID NO: 700083 - DNA, 875 bp, Homo sapiens
tgaatcacttgagataaggagtttgagaccagcctgaacaacatggtgaaaccccatctctactaaaaacacaaagtgagctgggcatggtggtgagcgcctgcagtcccagcctccaagaaaggtggggcacaagaatcctttgagcctgaaaggcagaggctgcagttagccaagatcgttccactgcactgtagcctggatgaaagagtgaaactatcaaaagaaaaagaaagaaaagaagaaagaaagaaagaaaagaaagaaagaaggaaggaaggaaggaaggaaggaaggaaaagaaaaaasaaaacaaaagaaaagaaaagaagtaaataaggaaagagcagagggataagtgagggcaaagaaagatgtcccttcagagatctcaggattgaaacttttcttttgccacagaattctcccacttgcagagagtttccccacacactatttgaaggtggagcttccactctgcccatctgagctcttacctgcgtttacacctgtaatacattcccacccatctggagttttttgttattttcacttaactctccacagtccagggctctttcccttgctccaacatggagataacaggtcagaaagagactcgtgcttataaaaagaaaggaccatgatgtgctggagcttttctagagtcccagccctatatttctgtaggaaagaagacattacaggtggatctaggaaaatatttcacaaattcctccactgactgcctcattctgaatgctgttggagcactgtaatatgtaatatgtggacatcgggctatcttccaagaactaatgagttgaaagcacaggagaagcaaacagggaactggatatgtttaaagtctacca

SEQ ID NO: 700084 - DNA, 875 bp, Homo sapiens
tgaatcacttgagataaggagtttgagaccagcctgaacaacatggtgaaaccccatctctactaaaaacacaaagtgagctgggcatggtggtgagcgcctgcagtcccagcctccaagaaaggtggggcacaagaatcctttgagcctgaaaggcagaggctgcagttagccaagatcgttccactgcactgtagcctggatgaaagagtgaaactatcaaaagaaaaagaaagaaaagaagaaagaaagaaagaaaagaaagaaagaaggaaggaaggaaggaaggaaggaaggaaaagaaaaaacaaaasaaaagaaaagaaaagaagtaaataaggaaagagcagagggataagtgagggcaaagaaagatgtcccttcagagatctcaggattgaaacttttcttttgccacagaattctcccacttgcagagagtttccccacacactatttgaaggtggagcttccactctgcccatctgagctcttacctgcgtttacacctgtaatacattcccacccatctggagttttttgttattttcacttaactctccacagtccagggctctttcccttgctccaacatggagataacaggtcagaaagagactcgtgcttataaaaagaaaggaccatgatgtgctggagcttttctagagtcccagccctatatttctgtaggaaagaagacattacaggtggatctaggaaaatatttcacaaattcctccactgactgcctcattctgaatgctgttggagcactgtaatatgtaatatgtggacatcgggctatcttccaagaactaatgagttgaaagcacaggagaagcaaacagggaactggatatgtttaaagtctacca

SEQ ID NO: 700085 - DNA, 618 bp, Homo sapiens
cataacgtacaaggaggaacgcaaaggctcaggaagactggaatgttgaagcacattgattatatgcaggcttactccccactgtctttcacttctctcccacctagaggtctcaggatattccattcacaaaagcactaagaaataagtaaagatgagagtaccagaatatttcaagcaccaatttaaacattttgtagtgccctccacagcagtcaagttgtgatggtgggagatgtcaccattgatatgggcttcctgatatcaatgaagatggagagattccagaggaatagaagccaaggagcaatgcttaattaaccgccacakctaagattttgcacttaccaagtaagcagcaggaactaagtagtaatcaggattttacttgcaaggatctttgctgttagccaatgattatactctttctactaaaattttactgagtatatacaacaacaacaacaacaactttaggtctatgatcagaaacctgacttgagttcccataatgaaaaatcacggccccttaactggttctcaaaacaaggccagttcacatatatctgaaacaacttaattaactgggatggtggattcccttgagtaaagaagagc

SEQ ID NO: 700086 - DNA, 727 bp, Homo sapiens
tcctcaaatatatcagcaaaaagagatgtaaactgggactacaaaaggatactagtttatggacattagactagcaaaatgtaggccaagagaaactctgacacattgctcgtgggagtataaacttgagcaactacttttataaaaacaacttgtcattagacgtatatttgaactttcccataccctatgttccaccagtccctttgatatacgtaggtcctcctatgatgaacccccagcctcaaggagttttgtctttttacccaaaggtgatatataaatattagtaattttgtgtcctatggaaataaaaatgtactcagaggagcttgcatttgtgcaccaggagacatgtatgatttctagcaacgttgctcataatagcaaacaaacaaacaaaaaattaacgaccagatacccaatggccaaagaacaaataaaacagtgcttttcacaacagtataatacacrccagtaaaagaaacaacaacaacacaaaacaaaatagttgaatcttagaagcgacatttttgaggaaaacaaaatcaagttataaaataatatgtaatatgttgatcgttttgagaatcttaaaaagcaaagctaagtaatactgtatgttgtttagggacatatatgagtttaaaaaactacttttacaaaaaaaaatgaaaattataaaattcaggatcttggttaccttgagaaaaaagcagaatcaaca

SEQ ID NO: 700087 - DNA, 669 bp, Homo sapiens
aatcactggagatggctcacactcctgaccctgccccttttgcctcgtatccaataaataacagtgcagccaggcattcggggccactaccggtctccgcgtccaggtggtagtggtcccctgggcccagctgtcttttcttctctttgtcttgtgtctttatttctatgatcgctcgtctccgtacacgaggagaaaaacctacagaccctgtaggaccctacaaatactgttaataaaattaggcctaatacccttgcagcccaccagggaccccccragtctccaatcccagacggaaaacgccaggctgggaggggaacagacaggatgattattgataagtggatcctggatgatcagcagccaggctgggaggggaacagacagaacgattattgataagtgcatcctggaagatcaggacgcgtcccttctggaggcttcagagccgcctgcaggggctgctgctccatggaagggcatggaccccggagccccctgctcctcgactcagggcctccagccaaggcttggctagtgggtagtgaagcctcccagcagctcccaggggaccctgcctgcacctccgatgctgtggccacctccacccagccttctccctgccaagtcagatctggaagtgacctgggcccagtggcttcccac

SEQ ID NO: 700088 - DNA, 669 bp, Homo sapiens
aatcactggagatggctcacactcctgaccctgccccttttgcctcgtatccaataaataacagtgcagccaggcattcggggccactaccggtctccgcgtccaggtggtagtggtcccctgggcccagctgtcttttcttctctttgtcttgtgtctttatttctatgatcgctcgtctccgtacacgaggagaaaaacctacagaccctgtaggaccctacaaatactgttaataaaattaggcctaatacccttgcagcccaccagggaccccccgagtctccaatcccagacggaaaacgccaggctgggaggggaacagacaggatgattattgataagtggatcctggatgatcagcagccaggctgggagggraacagacagaacgattattgataagtgcatcctggaagatcaggacgcgtcccttctggaggcttcagagccgcctgcaggggctgctgctccatggaagggcatggaccccggagccccctgctcctcgactcagggcctccagccaaggcttggctagtgggtagtgaagcctcccagcagctcccaggggaccctgcctgcacctccgatgctgtggccacctccacccagccttctccctgccaagtcagatctggaagtgacctgggcccagtggcttcccac

SEQ ID NO: 700089 - DNA, 637 bp, Homo sapiens
caccaggagctagaacacacacacagaccacacctgcctggggccttcggggagccccccccaacaggggaggcacgagacagattcgtgtgccagccctggctccttgctagccacagggcccagcaaatgcagaccctccctccctgtttccttgttgggaacatgagggtggtaccagccaatctcaaagggttagtgtgaggacagaagaggtcatggacgcagcatcttttggccatggttagaatccaaaagatggtggtttataattaatgcaactttgcaaawgtcccttgggattctttcccaatttaaaagttcacctgtaatcccagcactctgggggtgccgaggccagtggatcacttaaagccagggtttgaggccagcctgggccaatttaaaagttcagtacttgacagtttactttttacagactctttctcctcaaaggtaaatggataaaaatagcaaggtggtaactcttagacatcaaagagctgatttccagcggtacagtcgctcacgcctgtaatcacagcactctgggaggctgaggcgggcagatcacttgaggtcaggagttccagaccagcctagggaatatagtcagacctcatctctattagaaaaa

SEQ ID NO: 700090 - DNA, 2876 bp, Homo sapiens
aagtggaacaaagaaagaagatctggatgacaaagagaaaaaagatgaaactcctgcacctgtatatagggccaagtcaattctggagagctgggtatgggagtaagcaaccaggtaatctttgatcagagatagaaattagtatagacattttgcctccagatcctcaggtggttttagaaattggttctctaattctgtaggagaaggttgatactggtataggcttacacgtcattgaaactggaaaaggtagctagatattcttctactcatgttttggataatgagatattttatgcttcacacacttggagtatgtcatctactgtaatacggtatctgaatgaatactttaaataaaatacatttctgtaagttaattgtatactttaaaaatctctgaaaaatttgagtagcaagtctcagaaacttggttctaaatattaagaatatatccttccttgggagggagcatgtagtaaacatgttagtgtgattgtaagcatactgtctttctggaggtcgctgtgttcctgcatccactgttttcatttcagggatgttcacrgaacgccaggcaccaaaaggccagaagcatgcccctgcaggaccagcacttggctctggccatcctgctggagctggctgtgcagagaggcacgctgaggtgagggcttgtgcagaatgggaacgctttggggaagcgcctctgtatccaaatacctgttgcattgtgtgcatttcactgaatcgtgtttgactgcagcagagagcaccatgtcccagagctcgctctctctttaccttttcttcacttccttttttatgctcagttttctagcctgggaactgttcttttttttttttttctttcagttttcctcatttaattatttttattccatgaatttaagatcctagaacttccatgtgaatgtgctctttgagcttcttaactggtctttcctatcagcagaaggcgatgacttgtgctaaaatcttagtgtcaattcagtgatttaattaccacggctttactttcatttcctttcatatcccaagtattgcttcacttctatctagctgtttgcttttatttttgatcaaccatgaaaaaaaaagttaatctgtttttactaggaataaatgtgttttctcctttagccaaatgttgtctgccatcctgttgttgcttcagctgtgggacagcagggcacaggaaactgacaatgagcgttctgcccagggcaccagcaccttgcttttgcccttgctgcaaacgttccagagcatcatttgtggtaaggatacgcccccctccgagggcaacatgcacgtgagtgtcatgatggaacgttgtgtttaggtggtactcaagtctagttattttttacgcaagaccagtgtgtgtgtccacggcagtgtttttctctggcgtgtgtgtatttggtggtaacagcagcgagtcagatgagacaggtgtgggaggccacttgtttgtggagaagacttggatcagtgagcaccgacttccttgtcagcacagaaccaagcttgaaacacgcacttttaaatcaatactagaaaagaacaacgaaaatagtggctttctttgttggcccttcctatgtactgggctctgtgcagggcatgtcatctgagctgtcactctgtttagtaccagctccccccttaacaggtgtggacgccgagctgggggaggagcaggcatgtggggccctgggtgtaaacctccaggagtgctggtctttacaggtcaagtacaagttgaattttgcatctttttgggaaagtcttaggcatttcaatatcatgctttggtttaatttttctattatttgttagtctttaaactaatgataatagggctcttctgcctttagaagaattagaactatgatttaatttgcaaatgaaagtaggtgttctccagagtgggcaatgtttagattaaaataaaggttttggttttagatttcaaggccagcttgagatgctgttctgggttcccacagaggtggttctgcctttctccaggggtcctaggcctgtagggtggtttggtcatgttagtaatctgtgtggattcaacttacctgtggtgtcataaatgtatacatgcacagtcaatgttgtgtacatgtgtacagcacatttagacatttatacagtcagtttgtatgctacataaatatatagatgtatagtataactgtatcatcgacattgtcatttgatgggtcaaatgagtcaataccaaaatataaagagtgggtaaaggctaactgtattactttaatttttcccaccatttctgaatgtttgtttacctttcctttctagcttttgtctggccctctgagccccagtgagtttcctgaggtacctcaccctccacaagacaacgagcttgccattgatctgcaacaaacggcggttgttgtcatggcccatttagaagatctggctacaccctgtagatgcctctgccgtgtagctgtccgacgtctcataaggtgtgtgtgcaagaaccgtgttctccatgggttttgtagctagtaccacttgtaggttctcatcctgggcccgtgtggagacttgctttttctggtattggtagggggagctggcctgtggtttttaaacgtgtttgcagttgaaggtgttatccgtgttgagagtgaatgatgagcaagctgaggcgcacaggcctggggacccaacctgggggcccaggttccaggttcaggtggcacagccccagagagctcccctttacccacagccccaggccctcccaccttctacagagggttccacagccttctttatactctgaacgtgggctgtct

SEQ ID NO: 700091 - DNA, 574 bp, Homo sapiens
attctgaattctaaaacttatctggcccaatgattccagataagggactgtgggcctattacacttttaatccctacctttaagaaaatacaaacacagcgaacagatgagagtttaacatttttacatggatttgtacttcactagttactacagcatctacctacacttgagaaactgaaatagaatgataaaggtgaaacatcctgtggtctgacaaaaatgcacggtgcacgtactgactgcagcgccctaggccataatcaaacttggaaggttttgcctcgtccactctgctacaaaggcaattccataatagcgtaacatgccgcttacacatataaaaatgatgctaaatgaacatatccttttatggttcaaatttacagatgaaaattttctactggttcatcatttttatggttttagagttcatttyttccccccagtaaagaatggattttcactcaactataaatacttctggatttcttaacatgtaaactacataataaggccataaaagatgagattgagaagctgctgcaacgacaagaggacctctttccaccct

SEQ ID NO: 700092 - DNA, 1300 bp, Homo sapiens
ttagtcctattaataaaaagaagtcagggctgctgttggtggtggaattgtcaaaatgagggcagaatgaatgaatttggcacacacaagtgattcacttgggtgcctctttgtactcccttgcctgattttgatagtaattggacaagttcaataacttctgcttacaatggatatggtaaacatgagcttaaatctgtcaagcatatggatctgggttatgtcactgggggaatctgctatgccagatggggaactagctgagtgtggaaggagtgtagaatggcatcagaggtgaaagaatagtagttgcaactctgacagcagctgttgaggagggattagagttcattctactagcctccctcataggttttcctaggaatcctggggcatctgcttctagaactcaattgaaaagagtcccctccctcatggatatacttctatttgaccattacttacctgaggattaatcaatgtaaaagcattaataacttgccctcttgagccaacttgggasaattctgagggagtcatctcagcttcaaagctcctcatatgattgtccgaggcctttgttgagattgcataacttcttccactgcccaattctgctttcttctattctcttctacacatggtcacccccaagagcactctcttatgaacctccagttcctggggaactcaatctatgacattccctttccatcagaaaaattacccgtcctcatccctccacagaggccatgtttttttttttttttttttttttttttttttttttttgagacagagtcttgctctgtcacccaggctggagtgcagtggcgcaatctcagctcactgcaacctccacctcccaagttcaagcgattctcctgcctcagcctccagagtagctggaactacaggcgcatgccaccaagcccagataatttttttgtatttttggtagagatggggtttcaccatgttggccaggatggtctcgatctcttgacctcgtgatctgccccccactcggcctccaaaagtgctgggattacaggcgtaagccaccacgcctggcccacacaggccatatttttaagactcagtgtctttgaactctaccaactttgaatttgaatatctgaatcttcccttcttgtaaatgcttctactctgctgattgcattagttatgacaggtttcgtggctcactaagccaaaaatccttactattgggttacttacagggaaaatttggcaaaccctaattcagattacacccttttccattagttctttcaat

SEQ ID NO: 700093 - DNA, 531 bp, Homo sapiens
ctaatgaaaagtagacatagtcttttatttcttttttatttttatttttatttcaatagctttttttggtacaagtggttttctattacatggataaattatgtagtggtgaattctgagatgttagtgcattcatcacccattagagtacatttgtacctaatatgcagttttttttaatctgagataccttcccaccctcccccttctgagtctctcaagtctattatgtcactctgtgtgcctttgcatactcacagattagctcatacatagagtaataacatacagtttttagttttccattcctgtgttacctcacttagaatagtggcctccagcttcattcaagttgctgcaaaagacattattttgttcctttcaatggctgagtagcatttcatgtgtgtatataccacrttttctgtatccactcatgagttgataggaatttaggttggttccacatctttgtaattgtgaattttgttgctataaacatagatgtgcaagtgtctttttcatataatg

SEQ ID NO: 700094 - DNA, 543 bp, Homo sapiens
ttattcaggagatgatcccaggaatcagtactaaaagaacccaaggagtgagacaggataggaggaaatgacaatatgaagtgttctaaaggttgatgctatgagcactgggactccaggaaagagtaaagaattcctcctctaattgtccacttgaaagatgggaaactggaacctttatcctcaaactcttgtccagcatcattaagggtttttctgggattgctaacttgccctgtgtattcgcaggctgtgcttcctagttgagtgagctctggaaaagtgcctgaagcagaatgtcagaaggcatgtggagtgtttgagcagtgcaaagggagctctaagttcacatacaactgttcaccgcagctacagcgaaagcaagaggtgtgccaaagtgatgtgcgtgcatctcagaggtatctgctctattctcccatcaatctactagatttcactatacccagcctgtaaactggggataaatatagcaactaycctagagttgttatgcacattgaaattcaaataccaatttttttt

SEQ ID NO: 700095 - DNA, 622 bp, Homo sapiens
gaggcctcctccttccacagaagtctcaggacggtctgctcagccgcctgctgcctcctccttagctcattcctccatgttgaacacctgccatgtaccaggcggctggtgcctccgggaatccaggccaagcccaagaggcttggtctgccctcagggagcttccagccgcagccaccttcttagcaaatgagctaccttgtaaacttgttgcttaatgaagacatgacaaatccttttgtaatttaattcttttttttttcttttttgagacagagtcttgctctgtcacccaggctggagtgcagtggcaccatctcagttcactgcaacctctgtctcccaggttcaagtgattctcctcagcctcctgagtaactgggatcacaggtgctcaccatcatgtcctgctaatttttgtatttttagtagagatggggtttcatcatgttgaccaggctggtctcaaactcctggccycaagtgattcgcctgccttggcctcccaaagtgctgggattacaggtatgagccaccacgcccggcctcagataattcatgtttgttatagatacatggctggggtatttggtgttttcctctggattcatttagactttga

SEQ ID NO: 700096 - DNA, 622 bp, Homo sapiens
gaggcctcctccttccacagaagtctcaggacggtctgctcagccgcctgctgcctcctccttagctcattcctccatgttgaacacctgccatgtaccaggcggctggtgcctccgggaatccaggccaagcccaagaggcttggtctgccctcagggagcttccagccgcagccaccttcttagcaaatgagctaccttgtaaacttgttgcttaatgaagacatgacaaatccttttgtaatttaattcttttttttttcttttttgagacagagtcttgctctgtcacccaggctggagtgcagtggcaccatctcagttcactgcaacctctgtctcccaggttcaagtgattctcctcagcctcctgagtaactgggatcacaggtgctcaccatcatgtcctgctaatttttgtatttttagtagagatggggtttcatcatgttgaccaggctggtctcaaactcctggcctcaagtgattcgcctgccttggcctcccaaagtgctgggattacaggtatgagccaccacgcccrgcctcagataattcatgtttgttatagatacatggctggggtatttggtgttttcctctggattcatttagactttga

SEQ ID NO: 700097 - DNA, 1002 bp, Homo sapiens
tcttcagtgatgaaattcagaaaacagggatcaaaagtttaatttcactcaacatatttagataactgcttcaaatattcatttagcactgtgagtagagatcacataagtttcacaatgtttctttgcttaacaaatgcacttggacatacatggggcctggtcggcatactaaaaatgcaaagcagaaaggcatttatttggcatgtttctacgaggtaatgtatcgacgaaattcctcacaactatctcccttactcttgcacaagtgaaaaatgccaccatcactagtgtgtccagtgaactagtaaaaggctcaaccacatttggcgtgactcaaacttgtttggtagcaaaagttgtatctcattaacaataacaaacagcagcatctctcaccatttgctttatgctggttgaggtacaggcctttataaaacttgcaagttgaattatcacctttgcaaacgccacaagcatctgaaactgctttagagcctagttcatgatcacatcccactagctgtgacaaaaacaaaaaacgtgagaaaataaaagatcagagaagccagaggctgggaataattaagaggtatatggttctctgtatttacagaacattagggaagcagtacagcttatggttaaaaatcacagcctcaagttggactcacttggggttcaaatccctcccctgacattattagatgactgagcaagttgtataactcatctaaggcttagactcttcatcaatgaaactggaataaaaagtcactattgctactaataccagctgagattattcaggccagctgtgtaactcaaatatgaaaatgctggacaatacacatgcatgcatgtgtacaaacatacacccttaaaagatcaaasggctcaaactaaaattaaaatggaagagaaaatgagcactcaaagtgaaaggaaaaataactggggaaaaatagtatttcaaaatacatttgtgagattctaatcata

SEQ ID NO: 700098 - DNA, 2320 bp, Homo sapiens
actaaaacacactcctaccaatgccatcacagtttacaaatgctatggcaatgtcagggagttaccttatatggactaaaaacgggaggaaacctcagttctgggaattgcctacaccttacccaaaaaactcatgaataatccaccccatgtttagcatgtaatcaagaagtaacactaagtctgagcagctgagcggcccaagccgctgctctgcctatggagtagccgttctttattcctttactttcctgataaacttgctttcgctttatggattcacctctaattctttcccgcgggagactcaagaaccctctcttgggtctggatcaggacccctctccggtaacagttggagcatataattaccacccacctgtcaaaatgtgggccacccgaaaataagttagttataaaaattaaagctgatatggtttggatttgtattcccacccaaatctccaatgtcgaattgggggaggggcctggtgggaggtgattggatcttgcacgtcagcgtcccccttgctgttctcasgatactgagttctcaggagatctaatcctttaaacgtgtgtggcacctcccccttcttactcactctcctgctctgccctggtaagacgccccagtaagacgatgcttgcttccccttcgccttctgccatgattttaagtttcctgaagcctctcagccatgcttccagttaagcctgcggaactgtgagtcagtgaaacctctttttttcataagttaccccgtctcagatagttccttgtaacaatgggagaacggactatacaaagagtgcagcttttttcacacctgtgtggactgagattaatactgtctacatatacatggcaggtgtcttcattttaacctaggaggatgtttgaggaatgatttacacaggtttcccttgggaagacaggatgaggagacattttcttcatttcatgccatttcctttaaattaatacatgttaagcctttaaataatttttttaaagccaaaaggagaggattatgagctgctttttgtttttagtatttatgtgtttaatttgttctataagtacacacaaagccaagtgaaaaggttccaatagaggtttgggtgtgaggctttaagtggcttctattttgcaaggtttctatgaggttaaacagtaaatataacagtatatattgctttagaatacatatttgtttccatgcataaataacatggaaaaattactttctggtaaagttgcttaattcctaccactgacaacaacatcttcacataatttgcttcagaatcatgtaggggcctcaaagaccagaaagaaaacaagcagcacagggtggtttgtaaagtgcagcagggtgggtaccgtggctcatgcctgtaatcccagcagttttggaggctgatgcaggagaatcctttgaggccaggagttttagaccagcctgggcgacacagtgagaccctcacccccaccacctctgcaaaatatatttttaaaattagctgggcgtggtgggtgcacctgtggttcccgctattcaagaggttgaggcatcaggatcacttgagtccagggaggtccaggctgcagtgagctgtgattgtgccactgcactcaagcctgcgtgacagagcaagaccctgtctcaaaaaaacaaaatcgcaaaacaacaacaaaaaaacccaaccaccccctcgccaaacatacaaaagtgcagtggtaaagatttgtgtaggggaaggcgggcccagaggatgttttgaagtcatcaggggctctgctggcagccaactagtctttcctgtgtgttttcatgccttccaaaagtggaccctgggaattcgggcgaaagtggcccagtccttgtggctcctagcctagaacgctgaatagtctggagatttgctgaaagcgactctcaccaggagatggcagcgtcggctcagagatgctccaagcggtcccaaccgccttgtgacgccatgcaatatgttcagggcacaccagagggcgctacggcttcgcggctgggcactgagccgggctggctccgaggctttctttgcggagcctcctgtctctgctccccgacccacatgtgcacctactaaccaagagcgccctgttactgtccacgtaggtgtgactgctctgcgtagacacacaccgcccccaagctgaggcaaggccactgagccaccaattccaagcaaggttcagaaggagctgccatctttttagcacctcttttagacttaagccaccgagggggaaaaagcaaagaactaggacgag

SEQ ID NO: 700099 - DNA, 2320 bp, Homo sapiens
actaaaacacactcctaccaatgccatcacagtttacaaatgctatggcaatgtcagggagttaccttatatggactaaaaacgggaggaaacctcagttctgggaattgcctacaccttacccaaaaaactcatgaataatccaccccatgtttagcatgtaatcaagaagtaacactaagtctgagcagctgagcggcccaagccgctgctctgcctatggagtagccgttctttattcctttactttcctgataaacttgctttcgctttatggattcacctctaattctttcccgcgggagactcaagaaccctctcttgggtctggatcaggacccctctccggtaacagttggagcatataattaccacccacctgtcaaaatgtgggccacccgaaaataagttagttataaaaattaaagctgatatggtttggatttgtattcccacccaaatctccaatgtcgaattgggggaggggcctggtgggaggtgattggatcttgcacgtcagcgtcccccttgctgttctcacgatactgagttctcaggagatctaatcctttaaacgtgtgtggcacctcccccttcttactcactctcctgctctgccctggtaagacgccccagtaagacgatgcttgcttccccttcgccttctgccakgattttaagtttcctgaagcctctcagccatgcttccagttaagcctgcggaactgtgagtcagtgaaacctctttttttcataagttaccccgtctcagatagttccttgtaacaatgggagaacggactatacaaagagtgcagcttttttcacacctgtgtggactgagattaatactgtctacatatacatggcaggtgtcttcattttaacctaggaggatgtttgaggaatgatttacacaggtttcccttgggaagacaggatgaggagacattttcttcatttcatgccatttcctttaaattaatacatgttaagcctttaaataatttttttaaagccaaaaggagaggattatgagctgctttttgtttttagtatttatgtgtttaatttgttctataagtacacacaaagccaagtgaaaaggttccaatagaggtttgggtgtgaggctttaagtggcttctattttgcaaggtttctatgaggttaaacagtaaatataacagtatatattgctttagaatacatatttgtttccatgcataaataacatggaaaaattactttctggtaaagttgcttaattcctaccactgacaacaacatcttcacataatttgcttcagaatcatgtaggggcctcaaagaccagaaagaaaacaagcagcacagggtggtttgtaaagtgcagcagggtgggtaccgtggctcatgcctgtaatcccagcagttttggaggctgatgcaggagaatcctttgaggccaggagttttagaccagcctgggcgacacagtgagaccctcacccccaccacctctgcaaaatatatttttaaaattagctgggcgtggtgggtgcacctgtggttcccgctattcaagaggttgaggcatcaggatcacttgagtccagggaggtccaggctgcagtgagctgtgattgtgccactgcactcaagcctgcgtgacagagcaagaccctgtctcaaaaaaacaaaatcgcaaaacaacaacaaaaaaacccaaccaccccctcgccaaacatacaaaagtgcagtggtaaagatttgtgtaggggaaggcgggcccagaggatgttttgaagtcatcaggggctctgctggcagccaactagtctttcctgtgtgttttcatgccttccaaaagtggaccctgggaattcgggcgaaagtggcccagtccttgtggctcctagcctagaacgctgaatagtctggagatttgctgaaagcgactctcaccaggagatggcagcgtcggctcagagatgctccaagcggtcccaaccgccttgtgacgccatgcaatatgttcagggcacaccagagggcgctacggcttcgcggctgggcactgagccgggctggctccgaggctttctttgcggagcctcctgtctctgctccccgacccacatgtgcacctactaaccaagagcgccctgttactgtccacgtaggtgtgactgctctgcgtagacacacaccgcccccaagctgaggcaaggccactgagccaccaattccaagcaaggttcagaaggagctgccatctttttagcacctcttttagacttaagccaccgagggggaaaaagcaaagaactaggacgag

SEQ ID NO: 700100 - DNA, 2320 bp, Homo sapiens
actaaaacacactcctaccaatgccatcacagtttacaaatgctatggcaatgtcagggagttaccttatatggactaaaaacgggaggaaacctcagttctgggaattgcctacaccttacccaaaaaactcatgaataatccaccccatgtttagcatgtaatcaagaagtaacactaagtctgagcagctgagcggcccaagccgctgctctgcctatggagtagccgttctttattcctttactttcctgataaacttgctttcgctttatggattcacctctaattctttcccgcgggagactcaagaaccctctcttgggtctggatcaggacccctctccggtaacagttggagcatataattaccacccacctgtcaaaatgtgggccacccgaaaataagttagttataaaaattaaagctgatatggtttggatttgtattcccacccaaatctccaatgtcgaattgggggaggggcctggtgggaggtgattggatcttgcacgtcagcgtcccccttgctgttctcacgatactgagttctcaggagatctaatcctttaaacgtgtgtggcacctcccccttcttactcactctcctgctctgccctggtaagacgccccagtaagacgatgcttgcttccccttcgccttctgccatgattttaagtttyctgaagcctctcagccatgcttccagttaagcctgcggaactgtgagtcagtgaaacctctttttttcataagttaccccgtctcagatagttccttgtaacaatgggagaacggactatacaaagagtgcagcttttttcacacctgtgtggactgagattaatactgtctacatatacatggcaggtgtcttcattttaacctaggaggatgtttgaggaatgatttacacaggtttcccttgggaagacaggatgaggagacattttcttcatttcatgccatttcctttaaattaatacatgttaagcctttaaataatttttttaaagccaaaaggagaggattatgagctgctttttgtttttagtatttatgtgtttaatttgttctataagtacacacaaagccaagtgaaaaggttccaatagaggtttgggtgtgaggctttaagtggcttctattttgcaaggtttctatgaggttaaacagtaaatataacagtatatattgctttagaatacatatttgtttccatgcataaataacatggaaaaattactttctggtaaagttgcttaattcctaccactgacaacaacatcttcacataatttgcttcagaatcatgtaggggcctcaaagaccagaaagaaaacaagcagcacagggtggtttgtaaagtgcagcagggtgggtaccgtggctcatgcctgtaatcccagcagttttggaggctgatgcaggagaatcctttgaggccaggagttttagaccagcctgggcgacacagtgagaccctcacccccaccacctctgcaaaatatatttttaaaattagctgggcgtggtgggtgcacctgtggttcccgctattcaagaggttgaggcatcaggatcacttgagtccagggaggtccaggctgcagtgagctgtgattgtgccactgcactcaagcctgcgtgacagagcaagaccctgtctcaaaaaaacaaaatcgcaaaacaacaacaaaaaaacccaaccaccccctcgccaaacatacaaaagtgcagtggtaaagatttgtgtaggggaaggcgggcccagaggatgttttgaagtcatcaggggctctgctggcagccaactagtctttcctgtgtgttttcatgccttccaaaagtggaccctgggaattcgggcgaaagtggcccagtccttgtggctcctagcctagaacgctgaatagtctggagatttgctgaaagcgactctcaccaggagatggcagcgtcggctcagagatgctccaagcggtcccaaccgccttgtgacgccatgcaatatgttcagggcacaccagagggcgctacggcttcgcggctgggcactgagccgggctggctccgaggctttctttgcggagcctcctgtctctgctccccgacccacatgtgcacctactaaccaagagcgccctgttactgtccacgtaggtgtgactgctctgcgtagacacacaccgcccccaagctgaggcaaggccactgagccaccaattccaagcaaggttcagaaggagctgccatctttttagcacctcttttagacttaagccaccgagggggaaaaagcaaagaactaggacgag

SEQ ID NO: 700101 - DNA, 2320 bp, Homo sapiens
actaaaacacactcctaccaatgccatcacagtttacaaatgctatggcaatgtcagggagttaccttatatggactaaaaacgggaggaaacctcagttctgggaattgcctacaccttacccaaaaaactcatgaataatccaccccatgtttagcatgtaatcaagaagtaacactaagtctgagcagctgagcggcccaagccgctgctctgcctatggagtagccgttctttattcctttactttcctgataaacttgctttcgctttatggattcacctctaattctttcccgcgggagactcaagaaccctctcttgggtctggatcaggacccctctccggtaacagttggagcatataattaccacccacctgtcaaaatgtgggccacccgaaaataagttagttataaaaattaaagctgatatggtttggatttgtattcccacccaaatctccaatgtcgaattgggggaggggcctggtgggaggtgattggatcttgcacgtcagcgtcccccttgctgttctcacgatactgagttctcaggagatctaatcctttaaacgtgtgtggcacctcccccttcttactcactctcctgctctgccctggtaagacgccccagtaagacgatgcttgcttccccttcgccttctgccatgattttaagtttcctgaagcctctcagccatgcttccagttaagcctgcggaactgtgagtcagtgaaacctctttttttcataagttaccccgtctcagatagttccttgtaacaatgggagaacggactatacaaagagtgyagcttttttcacacctgtgtggactgagattaatactgtctacatatacatggcaggtgtcttcattttaacctaggaggatgtttgaggaatgatttacacaggtttcccttgggaagacaggatgaggagacattttcttcatttcatgccatttcctttaaattaatacatgttaagcctttaaataatttttttaaagccaaaaggagaggattatgagctgctttttgtttttagtatttatgtgtttaatttgttctataagtacacacaaagccaagtgaaaaggttccaatagaggtttgggtgtgaggctttaagtggcttctattttgcaaggtttctatgaggttaaacagtaaatataacagtatatattgctttagaatacatatttgtttccatgcataaataacatggaaaaattactttctggtaaagttgcttaattcctaccactgacaacaacatcttcacataatttgcttcagaatcatgtaggggcctcaaagaccagaaagaaaacaagcagcacagggtggtttgtaaagtgcagcagggtgggtaccgtggctcatgcctgtaatcccagcagttttggaggctgatgcaggagaatcctttgaggccaggagttttagaccagcctgggcgacacagtgagaccctcacccccaccacctctgcaaaatatatttttaaaattagctgggcgtggtgggtgcacctgtggttcccgctattcaagaggttgaggcatcaggatcacttgagtccagggaggtccaggctgcagtgagctgtgattgtgccactgcactcaagcctgcgtgacagagcaagaccctgtctcaaaaaaacaaaatcgcaaaacaacaacaaaaaaacccaaccaccccctcgccaaacatacaaaagtgcagtggtaaagatttgtgtaggggaaggcgggcccagaggatgttttgaagtcatcaggggctctgctggcagccaactagtctttcctgtgtgttttcatgccttccaaaagtggaccctgggaattcgggcgaaagtggcccagtccttgtggctcctagcctagaacgctgaatagtctggagatttgctgaaagcgactctcaccaggagatggcagcgtcggctcagagatgctccaagcggtcccaaccgccttgtgacgccatgcaatatgttcagggcacaccagagggcgctacggcttcgcggctgggcactgagccgggctggctccgaggctttctttgcggagcctcctgtctctgctccccgacccacatgtgcacctactaaccaagagcgccctgttactgtccacgtaggtgtgactgctctgcgtagacacacaccgcccccaagctgaggcaaggccactgagccaccaattccaagcaaggttcagaaggagctgccatctttttagcacctcttttagacttaagccaccgagggggaaaaagcaaagaactaggacgag

SEQ ID NO: 700102 - DNA, 625 bp, Homo sapiens
atgaaacctgagaccatatttagcaaactggtgatcacaagtcaagttcagccttaggcccgcactatctatcaatcgtatgtatatatgtacatatatatatatacacacacacacacayacacacacattttgtttttttttgagacagagtttgctcttgttgcccaggctggagtgcaatggcacaatcttggctcactgcaacctccgcctactgggtccaagcgattcttctgcctcagcctcccaagtagctgggattacaggcgtgcactaccatgcccagctaatttgtatatgttttttagtagagatggggtttcaccatgtggtcacgctggtctggaactcctgacctcaagtaatccacccgcctcggcctcccaaagtgctgggattactggtgtgcaccacgcccagccatgtataatattaaaatggagaaaatagattaaagctttaatatcaggtgacttatacatatgaatttttgaaactcttaagaaaacctctagtcccaggagatacttgagttgcagccttgatcgttgagttaactcccatcatcttcctaactggagatacccagtcccatcagtccatctgtttggtggacgtccct

SEQ ID NO: 700103 - DNA, 430 bp, Homo sapiens
aggggaactgggggacaggggagctggggcacaggtgagctaggggacaggggagctaggaggaagatgaactgggggacaggtgaactgagggcaggcagttgagctgggggacaggggaactggaaggaagatgagctggggaaccggtgagctggaggacaagcaaattgggggcaggtgatttgggggacaggggagctgggaggaagattagatggagaacaggtgagttgtggggcaggtgacctgagggcaggtgagtggggtacagatgaactagggggaaggtgatctggggaaggtgagttgggggataagggagtttctagggaagtcaagcagtcaagaaccagtccctacatttgagmgacataaaataggcagggaagtggcctctccatggagtcttgatgtctctgcccaggga

SEQ ID NO: 700104 - DNA, 388 bp, Homo sapiens
aaagatgttaaacctatctgatacatgctggtatgttaaaaagcggggaaactaggttgcgtctacatgggaaatctgcattttcttcccatgttctgtatgaatctaaaactaatttaaaataaaacctctatttaaaaattgtaattttttcagatatctgctaaattatttgtactaaaaattagtaattgacagtaactactcctacttttaaaaataagagcattcatgatactgcaagtaaattatacagactaatatatactttcaaagaaatgccccttttacatgttttaygttaagataacatatatgtgtaaacatggtcatatcattttccttatggtgtagttcactctctaagaaagctggtcatcttagaacc

SEQ ID NO: 700105 - DNA, 1631 bp, Homo sapiens
ccttctcagtattaaatatgctgtcacaatagaagaaagctttactgacttcttaaatgacgtgttgagaccggaaccctaaaatgatagttactgaggatagtgctaatgccctaagaccggaaacctaaaatgatagttactgagaatagtgctaatgccctaagaccagaaacctaaaatgatagttactgagaatagtgctaatgccctaagaccggaaccctaaaatgatagttactgagaatactgctaatgccctaaggttttagtcacaccctcacctaggcaggaacccaaccaaaaggggagaactgtggaacaaactacgggaggtcattgtttcggtcaccactcccgcattaggccacactgagcaggcaaaaccagaatggagacactcacgctgaatgacacacaacgaagctgaaactytaaggaagtagatagatcccaaaagagctccctttttccctgaagagattccagtctacctgagtcagcataaagaagtcccctctgctttaattcttaccaaaacaagtaacttgaagtaatctgatattaacaaatcagttgttattttctattgctctatttccgccttacacaacacagtgttctgctattgcccagagggcactgagaccaaataaaacttgaaaatgccacactgaaagcaaataagtcctaataactcaatttacaacgataacaaagagtgacaccaatgcccaaagttttgatcaatatctcaaaattgagaggctgaccaaaagggaggaattcttacatcaaacaacatttgggctctagaagcctcccaaggagtccttgtaaagagtcgcggccgggcgccgtggctcacgcctgtaatcccggcactttgggaggccgagacgggtggatcatgaggtcaggaaatcgagaccatcatggcttacaaggtgaaacccagtctctactaaaaaaaaatacaaaaaaattagccggacttggtggcggcagcctgcagtctcagctactcgggaggccgggacaggagaatgacatgaacccgggaggcggagcttgctgtgagctgagatcgcgccactgcactccagcctgggcgacagagcgagactccgcctcaaaaaagaaaaaagaagaagaacaagaagaatcgcaacctaatttagtatagaaacaaactgtaaatctgacttgggaatgtatcatggtaacaaatagcggcggttcagccaatcacatcagccgagtgtcagtcaatggccggcagccagctgttcaaaacaagttccaagaaggcaaatccgggctgtaaccaggtctgtaaccaatccagccacctctatacctcacttctgtcttctgtatgtcactttttttctctggctataaatataacccgcacatgttgtgtggcagatcattctgaaccatttttggtctggactgctgcctgattctagaaccacaaaaaaagccaattaagatctgcaaacccacatttgttgtaattttgtattttaacagttgtgccctacaaaagacattaagctgaaattaattaaaaatcatttacggtcatgattaggtcataaaaaattgtcaaacataacaattct

SEQ ID NO: 700106 - DNA, 1631 bp, Homo sapiens
ccttctcagtattaaatatgctgtcacaatagaagaaagctttactgacttcttaaatgacgtgttgagaccggaaccctaaaatgatagttactgaggatagtgctaatgccctaagaccggaaacctaaaatgatagttactgagaatagtgctaatgccctaagaccagaaacctaaaatgatagttactgagaatagtgctaatgccctaagaccggaaccctaaaatgatagttactgagaatactgctaatgccctaaggttttagtcacaccctcacctaggcaggaacccaaccaaaaggggagaactgtggaacaaactacgggaggtcattgtttcggtcaccactcccgcattaggccacactgagcaggcaaaaccagaatggagacactcacgctgaatgacacacaacgaagctgaaactctaaggaagtagatagatcccaaaagagctccctttttccctgaagagattccagtctacctgagtcagcataaagaagtcccctctgmtttaattcttaccaaaacaagtaacttgaagtaatctgatattaacaaatcagttgttattttctattgctctatttccgccttacacaacacagtgttctgctattgcccagagggcactgagaccaaataaaacttgaaaatgccacactgaaagcaaataagtcctaataactcaatttacaacgataacaaagagtgacaccaatgcccaaagttttgatcaatatctcaaaattgagaggctgaccaaaagggaggaattcttacatcaaacaacatttgggctctagaagcctcccaaggagtccttgtaaagagtcgcggccgggcgccgtggctcacgcctgtaatcccggcactttgggaggccgagacgggtggatcatgaggtcaggaaatcgagaccatcatggcttacaaggtgaaacccagtctctactaaaaaaaaatacaaaaaaattagccggacttggtggcggcagcctgcagtctcagctactcgggaggccgggacaggagaatgacatgaacccgggaggcggagcttgctgtgagctgagatcgcgccactgcactccagcctgggcgacagagcgagactccgcctcaaaaaagaaaaaagaagaagaacaagaagaatcgcaacctaatttagtatagaaacaaactgtaaatctgacttgggaatgtatcatggtaacaaatagcggcggttcagccaatcacatcagccgagtgtcagtcaatggccggcagccagctgttcaaaacaagttccaagaaggcaaatccgggctgtaaccaggtctgtaaccaatccagccacctctatacctcacttctgtcttctgtatgtcactttttttctctggctataaatataacccgcacatgttgtgtggcagatcattctgaaccatttttggtctggactgctgcctgattctagaaccacaaaaaaagccaattaagatctgcaaacccacatttgttgtaattttgtattttaacagttgtgccctacaaaagacattaagctgaaattaattaaaaatcatttacggtcatgattaggtcataaaaaattgtcaaacataacaattct

SEQ ID NO: 700107 - DNA, 1631 bp, Homo sapiens
ccttctcagtattaaatatgctgtcacaatagaagaaagctttactgacttcttaaatgacgtgttgagaccggaaccctaaaatgatagttactgaggatagtgctaatgccctaagaccggaaacctaaaatgatagttactgagaatagtgctaatgccctaagaccagaaacctaaaatgatagttactgagaatagtgctaatgccctaagaccggaaccctaaaatgatagttactgagaatactgctaatgccctaaggttttagtcacaccctcacctaggcaggaacccaaccaaaaggggagaactgtggaacaaactacgggaggtcattgtttcggtcaccactcccgcattaggccacactgagcaggcaaaaccagaatggagacactcacgctgaatgacacacaacgaagctgaaactctaaggaagtagatagatcccaaaagagctccctttttccctgaagagattccagtctacctgagtcagcataaagaagtcccctctgctttaattcttaccaaaacaagtaacttgaagtaatctgatrttaacaaatcagttgttattttctattgctctatttccgccttacacaacacagtgttctgctattgcccagagggcactgagaccaaataaaacttgaaaatgccacactgaaagcaaataagtcctaataactcaatttacaacgataacaaagagtgacaccaatgcccaaagttttgatcaatatctcaaaattgagaggctgaccaaaagggaggaattcttacatcaaacaacatttgggctctagaagcctcccaaggagtccttgtaaagagtcgcggccgggcgccgtggctcacgcctgtaatcccggcactttgggaggccgagacgggtggatcatgaggtcaggaaatcgagaccatcatggcttacaaggtgaaacccagtctctactaaaaaaaaatacaaaaaaattagccggacttggtggcggcagcctgcagtctcagctactcgggaggccgggacaggagaatgacatgaacccgggaggcggagcttgctgtgagctgagatcgcgccactgcactccagcctgggcgacagagcgagactccgcctcaaaaaagaaaaaagaagaagaacaagaagaatcgcaacctaatttagtatagaaacaaactgtaaatctgacttgggaatgtatcatggtaacaaatagcggcggttcagccaatcacatcagccgagtgtcagtcaatggccggcagccagctgttcaaaacaagttccaagaaggcaaatccgggctgtaaccaggtctgtaaccaatccagccacctctatacctcacttctgtcttctgtatgtcactttttttctctggctataaatataacccgcacatgttgtgtggcagatcattctgaaccatttttggtctggactgctgcctgattctagaaccacaaaaaaagccaattaagatctgcaaacccacatttgttgtaattttgtattttaacagttgtgccctacaaaagacattaagctgaaattaattaaaaatcatttacggtcatgattaggtcataaaaaattgtcaaacataacaattct

SEQ ID NO: 700108 - DNA, 1631 bp, Homo sapiens
ccttctcagtattaaatatgctgtcacaatagaagaaagctttactgacttcttaaatgacgtgttgagaccggaaccctaaaatgatagttactgaggatagtgctaatgccctaagaccggaaacctaaaatgatagttactgagaatagtgctaatgccctaagaccagaaacctaaaatgatagttactgagaatagtgctaatgccctaagaccggaaccctaaaatgatagttactgagaatactgctaatgccctaaggttttagtcacaccctcacctaggcaggaacccaaccaaaaggggagaactgtggaacaaactacgggaggtcattgtttcggtcaccactcccgcattaggccacactgagcaggcaaaaccagaatggagacactcacgctgaatgacacacaacgaagctgaaactctaaggaagtagatagatcccaaaagagctccctttttccctgaagagattccagtctacctgagtcagcataaagaagtcccctctgctttaattcttaccaaaacaagtaacttgaagtaatctgatattaacaaatcagttgttattttctattgctctatttccgccttacacaacacagtgttctgctattgcccagagggcactgagaccaaataaaacttgaaaatgccacactgaaagcaaataagtmctaataactcaatttacaacgataacaaagagtgacaccaatgcccaaagttttgatcaatatctcaaaattgagaggctgaccaaaagggaggaattcttacatcaaacaacatttgggctctagaagcctcccaaggagtccttgtaaagagtcgcggccgggcgccgtggctcacgcctgtaatcccggcactttgggaggccgagacgggtggatcatgaggtcaggaaatcgagaccatcatggcttacaaggtgaaacccagtctctactaaaaaaaaatacaaaaaaattagccggacttggtggcggcagcctgcagtctcagctactcgggaggccgggacaggagaatgacatgaacccgggaggcggagcttgctgtgagctgagatcgcgccactgcactccagcctgggcgacagagcgagactccgcctcaaaaaagaaaaaagaagaagaacaagaagaatcgcaacctaatttagtatagaaacaaactgtaaatctgacttgggaatgtatcatggtaacaaatagcggcggttcagccaatcacatcagccgagtgtcagtcaatggccggcagccagctgttcaaaacaagttccaagaaggcaaatccgggctgtaaccaggtctgtaaccaatccagccacctctatacctcacttctgtcttctgtatgtcactttttttctctggctataaatataacccgcacatgttgtgtggcagatcattctgaaccatttttggtctggactgctgcctgattctagaaccacaaaaaaagccaattaagatctgcaaacccacatttgttgtaattttgtattttaacagttgtgccctacaaaagacattaagctgaaattaattaaaaatcatttacggtcatgattaggtcataaaaaattgtcaaacataacaattct

SEQ ID NO: 700109 - DNA, 2753 bp, Homo sapiens
ttcaatatatgggtctacttttcaccagcactaaagtcctacagatcagtaacactgctgcagagctggtcctcatcagcctctttatatataatacttttatattccattgtatgggcacagacctatgcctacttattctgagagtggagcttggtagtctcactagtctcaccttctcagaagtctcttagcctcataggcaaacatactttaagcacacacagcaaagtcttcgccttcacagtcctgaaacagttataatagtgccattctaccagattcaaagtctgatcattttgaaccttagtgatgagaatttctgcttcaatcaagttggggattctgtaacgttggtcagggggctggtgatatgggcaaagaaagagagctgagatctcttgcatgttattatatgtgcttgtgtacatgtgtcctgggaattaggagaagaagatgcgttctgagtctgtatcacatcgatcttctgtttgttacctttgttgtgctatatcatttccaggagaaactcaagaagtctgttgggggtaagggtgcatacagtcagctgaccagcatcacccacaggaaggttaggggcaagtactgcaagctgaaaggatccctacagatggcccctttcatctgtattacccaaaactcatgttctttatgtggactttccagcaatgacactgacaacaaaataaccaaatagctcatgtatgcagtaggcctgtcttttcaattggatttggagttsgtaatttgatttcatttcagtacttgtccaactctcttttagttaccaagatcaaaggggacatcctcacagactgatggtagatgcagtttataaaagtgtaaacacatcaagttaagataatctcttagaaaaacaggaaaacaactaattcccagcatacacctggcacatagctcaataaatgttagctctcacaggaagaatatatatatgtctcatttcaaaattcttaaagcagcaaaaaacaggataggaggaagtagggagggaaaatgcctttgaagttatattagttatcaatccaacagagaaaaaaggaaaggagacaggaagaatgaagaaaggaattggagaaagaaagaacaggttatgatttccatgaatccaaacctttccgtaattattgcagagataaacttcaaagacttgagaactacaagggatatgaaagtccgtacttcaggtatgaagtacaattatgaagacagaatgtatatgaagacatatacattcacaaagccagtatggatataccaaagaagtacaggaattcaccacataaaggaagtattaagtcatgaatacactttgatcaaggcagaatgttcaactttctattatccctctggtactgagaaatgtctttgtaattgttgggcaggtataaaacgttttagcagtctagacaagcagtccccaaagtggaacagtagacttaaggagatactcaattgatccactggggtatggaaagaaaatattttacaacttctatttttgttcactttttaacccatcttttcaatgtttctactttttatttattatgttacaaaacattaactaaaacacctagtatgtttgtatgtttattagtttattagaataaactaataaatttattagttttagtttaatttattattctaataaattagtttattagaataaactaacacatttattctaaatatattagaggatcatgattaaacctttgtagaaacttgatcaaacatgtggagaaaatgcttagtatactaggcatgtttcaaatacttagcatgggtacacacacacacacacacacacacacacacacacacacacacacggatatcacctcttccctatcctttgtaagagtaggctattatagccagaaaaatggccctggttgtcagtccaaagggaaaggtattttggcaaatatgaaggatctgttattcctttaaacctttctattatttgggcaataattcaatcttaagtgctctagctccctggtgacaatggtaacagcctatcttaggctttgcctgttgcttggacttcagctaaatgtcgactttactgccatcccttctttatttctagaaagtcttaaaaccagcattccaattctgcacaaattctaaaactgatttaaacaaacaactgctggagttgctgccagggccaaggatcatgttatctcacatcagaacaccagtccagtccctttcttggctatacacttggtatccaataaatatgcagcaatgacaaaaagaggagaggtcagtgagatcttgacccatgccaggtgatatggtttggctgtgtccccatccaaatctcatcttgacttatggttcccataatcccctcttgtcattggagggacctggtggcagttaactgaatgatgggggcaagttacccctgtgctgttctcatgattgtgagttctcatgaggtctgatggttttataaggggttttgcccactttgcttggcacttctccttcctgccaccatgtgaagaaggatgtgtttggttccccttccatcatgtttgtaagtttcctgaggcctccccaaccccgcagaactgtaagtcaattaaacctctttcctttataaattacccagtcttgggcagttctttatagcagtgtgacagtggactaatagcaccactacctttataataagtgtcttctga

SEQ ID NO: 700110 - DNA, 2753 bp, Homo sapiens
ttcaatatatgggtctacttttcaccagcactaaagtcctacagatcagtaacactgctgcagagctggtcctcatcagcctctttatatataatacttttatattccattgtatgggcacagacctatgcctacttattctgagagtggagcttggtagtctcactagtctcaccttctcagaagtctcttagcctcataggcaaacatactttaagcacacacagcaaagtcttcgccttcacagtcctgaaacagttataatagtgccattctaccagattcaaagtctgatcattttgaaccttagtgatgagaatttctgcttcaatcaagttggggattctgtaacgttggtcagggggctggtgatatgggcaaagaaagagagctgagatctcttgcatgttattatatgtgcttgtgtacatgtgtcctgggaattaggagaagaagatgcgttctgagtctgtatcacatcgatcttctgtttgttacctttgttgtgctatatcatttccaggagaaactcaagaagtctgttgggggtaagggtgcatacagtcagctgaccagcatcacccacaggaaggttaggggcaagtactgcaagctgaaaggatccctacagatggcccctttcatctgtattacccaaaactcatgttctttatgtggactttccagcaatgacactgacaacaaaataaccaaatagctcatgtatgcagtaggcctgtcttttcaattggatttggagttggtaatttgatttcatttcagtacttgtccaactctcttttagttaccaagatcaaaggggacatcctcacagactgatggtagatgcartttataaaagtgtaaacacatcaagttaagataatctcttagaaaaacaggaaaacaactaattcccagcatacacctggcacatagctcaataaatgttagctctcacaggaagaatatatatatgtctcatttcaaaattcttaaagcagcaaaaaacaggataggaggaagtagggagggaaaatgcctttgaagttatattagttatcaatccaacagagaaaaaaggaaaggagacaggaagaatgaagaaaggaattggagaaagaaagaacaggttatgatttccatgaatccaaacctttccgtaattattgcagagataaacttcaaagacttgagaactacaagggatatgaaagtccgtacttcaggtatgaagtacaattatgaagacagaatgtatatgaagacatatacattcacaaagccagtatggatataccaaagaagtacaggaattcaccacataaaggaagtattaagtcatgaatacactttgatcaaggcagaatgttcaactttctattatccctctggtactgagaaatgtctttgtaattgttgggcaggtataaaacgttttagcagtctagacaagcagtccccaaagtggaacagtagacttaaggagatactcaattgatccactggggtatggaaagaaaatattttacaacttctatttttgttcactttttaacccatcttttcaatgtttctactttttatttattatgttacaaaacattaactaaaacacctagtatgtttgtatgtttattagtttattagaataaactaataaatttattagttttagtttaatttattattctaataaattagtttattagaataaactaacacatttattctaaatatattagaggatcatgattaaacctttgtagaaacttgatcaaacatgtggagaaaatgcttagtatactaggcatgtttcaaatacttagcatgggtacacacacacacacacacacacacacacacacacacacacacacggatatcacctcttccctatcctttgtaagagtaggctattatagccagaaaaatggccctggttgtcagtccaaagggaaaggtattttggcaaatatgaaggatctgttattcctttaaacctttctattatttgggcaataattcaatcttaagtgctctagctccctggtgacaatggtaacagcctatcttaggctttgcctgttgcttggacttcagctaaatgtcgactttactgccatcccttctttatttctagaaagtcttaaaaccagcattccaattctgcacaaattctaaaactgatttaaacaaacaactgctggagttgctgccagggccaaggatcatgttatctcacatcagaacaccagtccagtccctttcttggctatacacttggtatccaataaatatgcagcaatgacaaaaagaggagaggtcagtgagatcttgacccatgccaggtgatatggtttggctgtgtccccatccaaatctcatcttgacttatggttcccataatcccctcttgtcattggagggacctggtggcagttaactgaatgatgggggcaagttacccctgtgctgttctcatgattgtgagttctcatgaggtctgatggttttataaggggttttgcccactttgcttggcacttctccttcctgccaccatgtgaagaaggatgtgtttggttccccttccatcatgtttgtaagtttcctgaggcctccccaaccccgcagaactgtaagtcaattaaacctctttcctttataaattacccagtcttgggcagttctttatagcagtgtgacagtggactaatagcaccactacctttataataagtgtcttctga

SEQ ID NO: 700111 - DNA, 638 bp, Homo sapiens
ggaatcagaaagcaagaaagtgtgcttgaaaattaaaagcatgagtcttaggctgggcgcagtggctcacgcctgtaatygcagcattttgggacgctgaggcaggcggatcacctggggtcaggagtttgagaccagcctggccaacatggtgaaaccccgtctctactaaaaatacaaaacttagtcaagagtagtggcgcgtgcctgtaatcacagctactcaggaggctgaggcaggagaatcgcttgaacccaggaggtggaggttgcagtgagccaagattgcaccactgcactccagcctggggaacaagagtgaaactctgcctcaaaaataaaataaaataaaataaaataaaataaaataaaataaaataaaataaaataaaaataaataaataaaaacatgagtcttgaaacaaaaagttcaatactcagatcagatgataaagccaagagaattttccagaatatagaataaaatatatagaacagacactttaagagaaaagtaacagaaaatattgatacaggaggtctcacatgcaattaagatttttagaaagacagaaacctgagaagaggaagttgcttaagaaaattataattgcttttatttgaggaaggatatatgt

SEQ ID NO: 700112 - DNA, 638 bp, Homo sapiens
ggaatcagaaagcaagaaagtgtgcttgaaaattaaaagcatgagtcttaggctgggcgcagtggctcacgcctgtaattgcagcattttgggacgctgaggcaggcggatcacctggggtcaggagtttgagaccagcctggccaacatggtgaaaccccgtctctactaaaaatacaaaacttagtcaagagtagtggcgcgtgcctgtaatcacagctactcaggaggctgaggcaggagaatcgcttgaacccaggaggtggaggttgcagtgagccaagattgcaccactgcactccagcctggggaacaagagtgaaactctgcctcaaaaataaaataaaataaaataaaataaaataaaataaaataaaataaaataaaataaaaayaaataaataaaaacatgagtcttgaaacaaaaagttcaatactcagatcagatgataaagccaagagaattttccagaatatagaataaaatatatagaacagacactttaagagaaaagtaacagaaaatattgatacaggaggtctcacatgcaattaagatttttagaaagacagaaacctgagaagaggaagttgcttaagaaaattataattgcttttatttgaggaaggatatatgt

SEQ ID NO: 700113 - DNA, 595 bp, Homo sapiens
aacacaatacaggttgtgcatccctaatctgataatcccaaatccaaaatgctccaaaataacaactttttgagtgctgatatgatgtggaaaattccacacctgatctcacatgatgggtcacagttaaaatgcagtcaaaactttgtgtaatgcacraaactattaaaaaatattgtataaatcatcttcatgctatgttcataactgtatataaaacaaatgcatccctggttactcctgggcctcattctcaagggatttcaatacatatatatgtaaacattccaaaatccagaaaaatataaaaatatgaaacactcctggttccaagtgttttggataagggatacttactctgcctggcttaattgagtgtaaagtctttgtataaagagacacaagagatcacagatggcaggccctgtgggatgacatctgaagtgcactgattgctagggctggaagcctgagactagacacttaaatttttcctgtgctacttggtagctctgtaaccttagagctagtcctttttgccatcatgagtctcagtttcctcgtgtacaaagtggcaagaataagtgaggaagat

SEQ ID NO: 700114 - DNA, 985 bp, Homo sapiens
tagctgtctgtcttaatctgttcctgctgctataacaaaatacctaagactgggtaatttataaagaaaataaatttatttttcacaattstagagcctggatgttccaaatcaaggtgccagtgggtttagtgtttggtgagggctgctgtctgcttccaatatggcacctgttgcttgtctttacacagcagaaaatgaaagagcgaaaagggctaagtagtttcccccagccttttataaggtactagtccattcatgagggcagagccctatgacttcatcacttttcaaaagaccccaccttttaataccaccgcaatgtggattaagaattttggaagatggcacaaacattcaaaccatagcactgacaatatcactaaattttcttatatgtctcaattttttcttttatatttcttttcactttctttagtagacttttagttttactttttacagattcctagtttcattggtatcggttattttcctctttctcccccacccccacccccacccctgccttttttttttttttctttttttggtcttgcgatggttagaactttacatgttaggccgggtgcggtgctcatccccgtaatcctagcactttgggaggtcgaggcaggtggatcacgaggtcaggagttcaagactagcctgaccaacatggtgaaaccccgtctctactaaaaatacaaaatttagcgggacgtggtggcgcatgcctgtaatcccagctattcaggaggctgaggcaggagaattgcttgaacctggaaggcagaggttgcagtgagccgagatcacgccactgcactctagcctgggccacagagtgagactctgtctcaaaaaaaaaaaaaaaaaaaaaagaactttacatgttaagtagaagtaatgattggtattttaagaagaaaatgatgctgacatttcaccattcagtataattttgccgtaccttttggactga

SEQ ID NO: 700115 - DNA, 985 bp, Homo sapiens
tagctgtctgtcttaatctgttcctgctgctataacaaaatacctaagactgggtaatttataaagaaaataaatttatttttcacaattctagagcctggatgttccaaatcaaggtgccagtgggtttagtgtttggtgagggctgctgtctgcttccaatatggcacctgttgcttgtctttacacagcagaaaatgaaagagcgaaaagggctaagtagtttcccccagccttttataaggtactagtccattcatgagggcagagccctatgacttcatcacttttcaaaagaccccaccttttaataccacygcaatgtggattaagaattttggaagatggcacaaacattcaaaccatagcactgacaatatcactaaattttcttatatgtctcaattttttcttttatatttcttttcactttctttagtagacttttagttttactttttacagattcctagtttcattggtatcggttattttcctctttctcccccacccccacccccacccctgccttttttttttttttctttttttggtcttgcgatggttagaactttacatgttaggccgggtgcggtgctcatccccgtaatcctagcactttgggaggtcgaggcaggtggatcacgaggtcaggagttcaagactagcctgaccaacatggtgaaaccccgtctctactaaaaatacaaaatttagcgggacgtggtggcgcatgcctgtaatcccagctattcaggaggctgaggcaggagaattgcttgaacctggaaggcagaggttgcagtgagccgagatcacgccactgcactctagcctgggccacagagtgagactctgtctcaaaaaaaaaaaaaaaaaaaaaagaactttacatgttaagtagaagtaatgattggtattttaagaagaaaatgatgctgacatttcaccattcagtataattttgccgtaccttttggactga

SEQ ID NO: 700116 - DNA, 985 bp, Homo sapiens
tagctgtctgtcttaatctgttcctgctgctataacaaaatacctaagactgggtaatttataaagaaaataaatttatttttcacaattctagagcctggatgttccaaatcaaggtgccagtgggtttagtgtttggtgagggctgctgtctgcttccaatatggcacctgttgcttgtctttacacagcagaaaatgaaagagcgaaaagggctaagtagtttcccccagccttttataaggtactagtccattcatgagggcagagccctatgacttcatcacttttcaaaagaccccaccttttaataccaccgcaatgtggattaagaattttggaagatggcacaaacattcaaaccatagcactgacaatatcastaaattttcttatatgtctcaattttttcttttatatttcttttcactttctttagtagacttttagttttactttttacagattcctagtttcattggtatcggttattttcctctttctcccccacccccacccccacccctgccttttttttttttttctttttttggtcttgcgatggttagaactttacatgttaggccgggtgcggtgctcatccccgtaatcctagcactttgggaggtcgaggcaggtggatcacgaggtcaggagttcaagactagcctgaccaacatggtgaaaccccgtctctactaaaaatacaaaatttagcgggacgtggtggcgcatgcctgtaatcccagctattcaggaggctgaggcaggagaattgcttgaacctggaaggcagaggttgcagtgagccgagatcacgccactgcactctagcctgggccacagagtgagactctgtctcaaaaaaaaaaaaaaaaaaaaaagaactttacatgttaagtagaagtaatgattggtattttaagaagaaaatgatgctgacatttcaccattcagtataattttgccgtaccttttggactga

SEQ ID NO: 700117 - DNA, 622 bp, Homo sapiens
agttttattaaatcatgaaaaaggatttggtatagccatttttgaaagtggctataccacctttgagatcttcagcaagtaagaagacctgtaaagggttccaagatgtgctggtgcttacaggacatgtgtaggagatccaaggttatttctccagggcgttcaccatgtaggagttcaagatgctaaagacccaggaaccaggctcttttgagacctatactcaggcctaggctacaagagcatgtttgtgtttgagaggcattaaaagagtaacggaaagagcactgggctttgtgtagaatccctccactcaaccacttatgagatctataagcctgagcaagttaactgacttctgagcatcagtttattaatatttaaaatagacacaaggcctggtacagtggctcacgcctgtaatcctagcacttcgggaagccgaggcaggcggatcacgtgaygtcaggagtttgagaccagcctggccaacatggcagaaccccatctctactaaaaatacaaaaattagctgggcctgttggttcatgcctgtaatcacagctactcaggaggctgaggcatgagaattgcttgaaccaggaggcggaggttgcagtga

SEQ ID NO: 700118 - DNA, 1085 bp, Homo sapiens
tgttacctcaaatgaggctgaaatgttactaagaattttcagtagcttccccaccaacccccaagacaagtctgtctgttgtcacaggaaatagtggctcattcataaaaagttcattcagaggcactcagtttgtctgacctacagggcagagttcaaacttttgtcaattgattgaagggacatcttctatgcactcactcagcacttagggaatgtattttccatcagacacctaaacagggaaaatttttcttcttccctacagagcaccttttccacatgatgcagagagggctaaataattcaatttcaaacaaaatgggatggccacaaatttgtaactcaaaatctgagaaagtagatttatctgcctatcagggtccagatttttttttctaaaattaattctaaaataaatcagatttagaataaaacagatttaaattatgttctattttcccttttcctggagaagagaacactaactttatgtggctccaagtaaattacttgattacctcttcaagccactggaacaaggctgagcgagtgcatcgcagaatcacagaacatcacgttggagggagcgaagtgttacctaagcaactgggttttataagatggaggatttagtgccaagatagctagcccggggacatggcgagggagttattaaaatcagctcagsggttcgcaggagaattctgaagagggcacattgtccaaaaggagagctgaaggcaggtgggtttacgttgtgcctcgtggcagcaattactgaatggcagcctagagcgagccaggggcgtccgtcacgccaccgccactcacttcctgaaacaagttgtaatgcctgtttatcatagaccttaattccctaatgtcgggaacaaaggcgagtatcaaaatctagcaaatttttttgacactaggaagtgaagcaaaggactaacctctcctcaatcccatctttgttaaaataaactctcattttagcagctcattccagatgtcagtcaagccctacacattagcaccaaatagtgcccgtgactaaagccacaaaagaaacagaggagaac

SEQ ID NO: 700119 - DNA, 1085 bp, Homo sapiens
tgttacctcaaatgaggctgaaatgttactaagaattttcagtagcttccccaccaacccccaagacaagtctgtctgttgtcacaggaaatagtggctcattcataaaaagttcattcagaggcactcagtttgtctgacctacagggcagagttcaaacttttgtcaattgattgaagggacatcttctatgcactcactcagcacttagggaatgtattttccatcagacacctaaacagggaaaatttttcttcttccctacagagcaccttttccacatgatgcagagagggctaaataattcaatttcaaacaaaatgggatggccacaaatttgtaactcaaaatctgagaaagtagatttatctgcctatcagggtccagatttttttttctaaaattaattctaaaataaatcagatttagaataaaacagatttaaattatgttctattttcccttttcctggagaagagaacactaactttatgtggctccaagtaaattacttgattacctcttcaagccactggaacaaggctgagcgagtgcatcgcagaatcacagaacatcacgttggagggagcgaagtgttacctaagcaactgggttttataagatggaggatttagtgccaagatagctagcccggggacatggcgagggagttattaaaatcagctcaggggttcgcaggagaattctgaagagggcacattgtccaaaaggagagctgaaggcaggtgggtttacgttgtgcctcgtggcagcaattactgaatggcagcctagagcgagccaggggcgtccgtcacgccaccrccactcacttcctgaaacaagttgtaatgcctgtttatcatagaccttaattccctaatgtcgggaacaaaggcgagtatcaaaatctagcaaatttttttgacactaggaagtgaagcaaaggactaacctctcctcaatcccatctttgttaaaataaactctcattttagcagctcattccagatgtcagtcaagccctacacattagcaccaaatagtgcccgtgactaaagccacaaaagaaacagaggagaac

SEQ ID NO: 700120 - DNA, 599 bp, Homo sapiens
tgctctgaaagggaggtggatgtctggagcccattcctttggccttggctattcagacagtattatcttctaactgtccttgaagtgagctgctaggcagaggcaaacttgttcttttctttttaactcttgccttaccacattgtgggccttagcttttacttttcttggggtgaacaaatgcagtacctattatttttaaacttctgcctcactttaagccaaataacagtgtttgacacgtgagtcgcacccaaacaagtgctcttcatgatcattgttaaagcagcaatagcaacatgtgctttcctgggacctgctggcctgttttccactgatataaagtggagaagggattgaaatagcaaaggagggtgatataaattgaatacctatatgaaatacaattttaaatgaaaaacagcatttgatgttgtacaactctaagtgagactrttagtgcgagatcatatttttacttgtattgacaaaataaccattcacaatattcttatttagaataatattccatttctcttgtatatttgctagcttttgatcaaatattttgggaactcaatagaaattaacaaaatgaa

SEQ ID NO: 700121 - DNA, 630 bp, Homo sapiens
aattaaccaattagctcatgttagttgattccaataaggcaattagttctgcccaggtggatcaaatcagccaataatctagtgactgtagattcattaagtcagaatggtggatgtaaaaagcacttttctacactgagaaraaaagcagtgcccagacatactaatctggtcataaagcattacattgctgtattgtcagcttatttcaaagaccttgcctttgaaagtgaagtattgtttatgtttctataaacatcattgtatatggctatgttccatttggggttcctactgtgccataaagtagactagtaagtctacatctgcattcttagtatatactaaggtattaaaaatataatttgtggaacatcttgtatattcataaacatttacataattgtacttatataattctgtacgtgcatgtttatctgtctacctatgtccagatgtatccatctttgtatctatattcataaaaagtgaagatgtagaaggtgaaaatgttgatcattattgatatcaatattaatatataaagataattccatagatgtataaaattttctgcactatgaaatatacctagaatactacccaaatggatgtatactattacctaaa

SEQ ID NO: 700122 - DNA, 665 bp, Homo sapiens
ccacctcggccttccaaagtgctggggttacaagcgtgagccaccgcgcctggccggaaactttcttctgtagatttagaaacagatatgagacatatatgtaggaaaacacatataaaaactaaggcttatatacataagtctaattaatgtctatttgtgagtatgtcttgaaaaaaagccccaaaagaaaagtatgtaagaggtcattaccttactcattctcctcaagacgcagtcaatgaactcagcccatgtgattctagtaggccagttagctcagcccaggtgattccaatcagccaattaaatgagcccaagtgataccaattagtcaattatatcagtaaaggtgaatccaattagctaattagattagcccaaggtgattccaattcaccarttaaatgagcccaagtgataccagttagccaattttatcagtaaagatgaatctaattagccaattagattagcgcaaggtgattccaatcagccaattttcttagcctaggtagatccaatcaaacaattatctaaatagtgactataggtttatcaaagcaggcccaaactagtgggtgtgaagggcacatacatacattgagaagaaatgcagggccctgaagtgccaacctgaacagcatgaataacatggctttgct

SEQ ID NO: 700123 - DNA, 665 bp, Homo sapiens
ccacctcggccttccaaagtgctggggttacaagcgtgagccaccgcgcctggccggaaactttcttctgtagatttagaaacagatatgagacatatatgtaggaaaacacatataaaaactaaggcttatatacataagtctaattaatgtctatttgtgagtatgtcttgaaaaaaagccccaaaagaaaagtatgtaagaggtcattaccttactcattctcctcaagacgcagtcaatgaactcagcccatgtgattctagtaggccagttagctcagcccaggtgattccaatcagccaattaaatgagcccaagtgataccaattagtcaattatatcagtaaaggtgaatccaattagctaattagattagcccaaggtgattccaattcaccagttaaatgagcccaagtgataccagttagccaattttatcagtaaagatgaatctaattagccaattagattagcscaaggtgattccaatcagccaattttcttagcctaggtagatccaatcaaacaattatctaaatagtgactataggtttatcaaagcaggcccaaactagtgggtgtgaagggcacatacatacattgagaagaaatgcagggccctgaagtgccaacctgaacagcatgaataacatggctttgct

SEQ ID NO: 700124 - DNA, 588 bp, Homo sapiens
catttgatgttgtacaactataggtgagactattagtgtgaggtcatatttttacttatattgacaaaataaccattcacaatattcttatttagaacaattttccttttctactgtgcttttgctagcttttgatcaaatattacaggaactcaatagaaatcaacaaaattaatctttattttactagaagggttactgatgcatatgctaattttttttcagttttttgtttattgcagagaagtggctgtcctactagaaaactgctactctcatctgtatccacattgaataatagtgaatggaagtgaagcggataaaaggtaaatgtgtcttctctgyatcttttttcatccattggctgaagaacaggaaaatgtggaaaataaaagaaaatataacccctgaaaaatcctgaagaagctctcttaaccagacaaaaaaccttataggggattttttgtttgttttattattgtaccatctgcttctatgagtttaattttttttttttttttacactttacatagaaataggattatgtgggctgggcacagggactgaagcctgtaatcccaacactt

SEQ ID NO: 700125 - DNA, 1984 bp, Homo sapiens
tagccaataaatattcgaaggttttatgaagatattttaatgcaataaaatatttctttcaaaattaagtatgcactggctactctgaaacagctgggtgtctacttcatgttgtttgctacaagggcaggagataaacagtaaattaaaatatgcactggcccttatagattctgtccatcattttgttggtcagttttagtcatttcactctgcctatcttcaaggggaaagtaactgccagcttatcttatgcctggaagtaggagaacgaacattatgaaaccacatactatatctccaagctgcgattttgctacaattccatgaagtaagattatgtaactcaaaaaaaaatcatcttggcatttagatacaataaattcataaatgaaaaagttcatggacaaagtttcggattaacacctgtttactgttaagctaaagaggagccgaatattttatgtcaaaaagaaaatgacttcatctaagattgtatgctcactcaaccagcctgggctcttttaaaaaaacacttaagagaaatgtaatttaattgtataagatatctgagaagtataagcaagcaatggctaagcatttcagtaagaacgcttttgtctttttttttttttttttttttttttgagacagtctctgtcacccaggctgragtacactggtaccatcatggctcaatcagccttgacctctccaggctcaaatgatcttcacacctcagcctcctgaggtagctgggaatacaagtactacatgcacatgacaccatttctgtctaatttatatatttctttagagatgggtgttttctcattttgcccaagttggtttcaaactgctgagctcaagcgatctctctgccttggactcccaaagtgctgggattacaggcatgagccactgcatctggcccttttatttttttattactgaaaaagtaattggccctctagattcctgtaatatgaaaccaattaaattatccgcatatatttgcagggtagtttactctttgcccatccggccttatctcactgaaagcaaagctttatgagtaaactcctaaaaatttaagcaaattatgatgataactgttgccttaaagctaaatagtttgtgttaaatatggtgctcaataagcaagagttactttaataaatctctagatttgcttcattaagataatcaagtagcagatgggttaggccttctcttgtttttcatccttttgccctttccagaatcttacctacataatgtcccaattcctgagcaattctgaactaagaaactcatccacattcttgaattcatttttcacaagctaacttggtctttttcatctctatgtcatattaatgtaatgtagttgtgttaatgtagccacaaatgtattgtttattaaattctctccaaatatttgtgagcaatcagaatgatattataaacatcctttaatgttttagtatatcattaacctcaagcttataatagtatctatattttattttctatatatttttatatttgtaagtgaaattgtgtgagtaaaatacttaataaaatgtgtcaacatatataattggaccaatgtgaaaattaaaatggttctctgacatttggcattaaagcttatgtttaaattttgtctccctctgttggaaaaatcatattgctctacaactgggtgcttttttgctttttttgtttgtttgtttgtttatgaaactgggtctcactgtgttgccaaggcgggtctggaactcccgggctcaagcaatcctcccgtcttggcctcctacagtgctgagatgacttgcgtgagccacctgtgttctgccctataactgagtctttaccttttcttcatatactaaatgtagcacacctaggcattatttacatggggagaattgtctcagagttatacgccaatcaaagattaacagattgtttttatgcc

SEQ ID NO: 700126 - DNA, 1984 bp, Homo sapiens
tagccaataaatattcgaaggttttatgaagatattttaatgcaataaaatatttctttcaaaattaagtatgcactggctactctgaaacagctgggtgtctacttcatgttgtttgctacaagggcaggagataaacagtaaattaaaatatgcactggcccttatagattctgtccatcattttgttggtcagttttagtcatttcactctgcctatcttcaaggggaaagtaactgccagcttatcttatgcctggaagtaggagaacgaacattatgaaaccacatactatatctccaagctgcgattttgctacaattccatgaagtaagattatgtaactcaaaaaaaaatcatcttggcatttagatacaataaattcataaatgaaaaagttcatggacaaagtttcggattaacacctgtttactgttaagctaaagaggagccgaatattttatgtcaaaaagaaaatgacttcatctaagattgtatgctcactcaaccagcctgggctcttttaaaaaaacacttaagagaaatgtaatttaattgtataagatatctgagaagtataagcaagcaatggctaagcatttcagtaagaacgcttttgtctttttttttttttttttttttttttgagacagtctctgtcacccaggctgaagtacactggyaccatcatggctcaatcagccttgacctctccaggctcaaatgatcttcacacctcagcctcctgaggtagctgggaatacaagtactacatgcacatgacaccatttctgtctaatttatatatttctttagagatgggtgttttctcattttgcccaagttggtttcaaactgctgagctcaagcgatctctctgccttggactcccaaagtgctgggattacaggcatgagccactgcatctggcccttttatttttttattactgaaaaagtaattggccctctagattcctgtaatatgaaaccaattaaattatccgcatatatttgcagggtagtttactctttgcccatccggccttatctcactgaaagcaaagctttatgagtaaactcctaaaaatttaagcaaattatgatgataactgttgccttaaagctaaatagtttgtgttaaatatggtgctcaataagcaagagttactttaataaatctctagatttgcttcattaagataatcaagtagcagatgggttaggccttctcttgtttttcatccttttgccctttccagaatcttacctacataatgtcccaattcctgagcaattctgaactaagaaactcatccacattcttgaattcatttttcacaagctaacttggtctttttcatctctatgtcatattaatgtaatgtagttgtgttaatgtagccacaaatgtattgtttattaaattctctccaaatatttgtgagcaatcagaatgatattataaacatcctttaatgttttagtatatcattaacctcaagcttataatagtatctatattttattttctatatatttttatatttgtaagtgaaattgtgtgagtaaaatacttaataaaatgtgtcaacatatataattggaccaatgtgaaaattaaaatggttctctgacatttggcattaaagcttatgtttaaattttgtctccctctgttggaaaaatcatattgctctacaactgggtgcttttttgctttttttgtttgtttgtttgtttatgaaactgggtctcactgtgttgccaaggcgggtctggaactcccgggctcaagcaatcctcccgtcttggcctcctacagtgctgagatgacttgcgtgagccacctgtgttctgccctataactgagtctttaccttttcttcatatactaaatgtagcacacctaggcattatttacatggggagaattgtctcagagttatacgccaatcaaagattaacagattgtttttatgcc

SEQ ID NO: 700127 - DNA, 1984 bp, Homo sapiens
tagccaataaatattcgaaggttttatgaagatattttaatgcaataaaatatttctttcaaaattaagtatgcactggctactctgaaacagctgggtgtctacttcatgttgtttgctacaagggcaggagataaacagtaaattaaaatatgcactggcccttatagattctgtccatcattttgttggtcagttttagtcatttcactctgcctatcttcaaggggaaagtaactgccagcttatcttatgcctggaagtaggagaacgaacattatgaaaccacatactatatctccaagctgcgattttgctacaattccatgaagtaagattatgtaactcaaaaaaaaatcatcttggcatttagatacaataaattcataaatgaaaaagttcatggacaaagtttcggattaacacctgtttactgttaagctaaagaggagccgaatattttatgtcaaaaagaaaatgacttcatctaagattgtatgctcactcaaccagcctgggctcttttaaaaaaacacttaagagaaatgtaatttaattgtataagatatctgagaagtataagcaagcaatggctaagcatttcagtaagaacgcttttgtctttttttttttttttttttttttttgagacagtctctgtcacccaggctgaagtacactggtaccatcatggctcaatcagccttgacctctccaggctcaaatgatcttcacacctcagcctcctgaggtagctgggaatacaagtactacatgcacatgacaccatttctgtctaatttatrtatttctttagagatgggtgttttctcattttgcccaagttggtttcaaactgctgagctcaagcgatctctctgccttggactcccaaagtgctgggattacaggcatgagccactgcatctggcccttttatttttttattactgaaaaagtaattggccctctagattcctgtaatatgaaaccaattaaattatccgcatatatttgcagggtagtttactctttgcccatccggccttatctcactgaaagcaaagctttatgagtaaactcctaaaaatttaagcaaattatgatgataactgttgccttaaagctaaatagtttgtgttaaatatggtgctcaataagcaagagttactttaataaatctctagatttgcttcattaagataatcaagtagcagatgggttaggccttctcttgtttttcatccttttgccctttccagaatcttacctacataatgtcccaattcctgagcaattctgaactaagaaactcatccacattcttgaattcatttttcacaagctaacttggtctttttcatctctatgtcatattaatgtaatgtagttgtgttaatgtagccacaaatgtattgtttattaaattctctccaaatatttgtgagcaatcagaatgatattataaacatcctttaatgttttagtatatcattaacctcaagcttataatagtatctatattttattttctatatatttttatatttgtaagtgaaattgtgtgagtaaaatacttaataaaatgtgtcaacatatataattggaccaatgtgaaaattaaaatggttctctgacatttggcattaaagcttatgtttaaattttgtctccctctgttggaaaaatcatattgctctacaactgggtgcttttttgctttttttgtttgtttgtttgtttatgaaactgggtctcactgtgttgccaaggcgggtctggaactcccgggctcaagcaatcctcccgtcttggcctcctacagtgctgagatgacttgcgtgagccacctgtgttctgccctataactgagtctttaccttttcttcatatactaaatgtagcacacctaggcattatttacatggggagaattgtctcagagttatacgccaatcaaagattaacagattgtttttatgcc

SEQ ID NO: 700128 - DNA, 1984 bp, Homo sapiens
tagccaataaatattcgaaggttttatgaagatattttaatgcaataaaatatttctttcaaaattaagtatgcactggctactctgaaacagctgggtgtctacttcatgttgtttgctacaagggcaggagataaacagtaaattaaaatatgcactggcccttatagattctgtccatcattttgttggtcagttttagtcatttcactctgcctatcttcaaggggaaagtaactgccagcttatcttatgcctggaagtaggagaacgaacattatgaaaccacatactatatctccaagctgcgattttgctacaattccatgaagtaagattatgtaactcaaaaaaaaatcatcttggcatttagatacaataaattcataaatgaaaaagttcatggacaaagtttcggattaacacctgtttactgttaagctaaagaggagccgaatattttatgtcaaaaagaaaatgacttcatctaagattgtatgctcactcaaccagcctgggctcttttaaaaaaacacttaagagaaatgtaatttaattgtataagatatctgagaagtataagcaagcaatggctaagcatttcagtaagaacgcttttgtctttttttttttttttttttttttttgagacagtctctgtcacccaggctgaagtacactggtaccatcatggctcaatcagccttgacctctccaggctcaaatgatcttcacacctcagcctcctgaggtagctgggaatacaagtactacatgcacatgacaccatttctgtctaatttatatatttctttagagatgggtgttttmtcattttgcccaagttggtttcaaactgctgagctcaagcgatctctctgccttggactcccaaagtgctgggattacaggcatgagccactgcatctggcccttttatttttttattactgaaaaagtaattggccctctagattcctgtaatatgaaaccaattaaattatccgcatatatttgcagggtagtttactctttgcccatccggccttatctcactgaaagcaaagctttatgagtaaactcctaaaaatttaagcaaattatgatgataactgttgccttaaagctaaatagtttgtgttaaatatggtgctcaataagcaagagttactttaataaatctctagatttgcttcattaagataatcaagtagcagatgggttaggccttctcttgtttttcatccttttgccctttccagaatcttacctacataatgtcccaattcctgagcaattctgaactaagaaactcatccacattcttgaattcatttttcacaagctaacttggtctttttcatctctatgtcatattaatgtaatgtagttgtgttaatgtagccacaaatgtattgtttattaaattctctccaaatatttgtgagcaatcagaatgatattataaacatcctttaatgttttagtatatcattaacctcaagcttataatagtatctatattttattttctatatatttttatatttgtaagtgaaattgtgtgagtaaaatacttaataaaatgtgtcaacatatataattggaccaatgtgaaaattaaaatggttctctgacatttggcattaaagcttatgtttaaattttgtctccctctgttggaaaaatcatattgctctacaactgggtgcttttttgctttttttgtttgtttgtttgtttatgaaactgggtctcactgtgttgccaaggcgggtctggaactcccgggctcaagcaatcctcccgtcttggcctcctacagtgctgagatgacttgcgtgagccacctgtgttctgccctataactgagtctttaccttttcttcatatactaaatgtagcacacctaggcattatttacatggggagaattgtctcagagttatacgccaatcaaagattaacagattgtttttatgcc

SEQ ID NO: 700129 - DNA, 1984 bp, Homo sapiens
tagccaataaatattcgaaggttttatgaagatattttaatgcaataaaatatttctttcaaaattaagtatgcactggctactctgaaacagctgggtgtctacttcatgttgtttgctacaagggcaggagataaacagtaaattaaaatatgcactggcccttatagattctgtccatcattttgttggtcagttttagtcatttcactctgcctatcttcaaggggaaagtaactgccagcttatcttatgcctggaagtaggagaacgaacattatgaaaccacatactatatctccaagctgcgattttgctacaattccatgaagtaagattatgtaactcaaaaaaaaatcatcttggcatttagatacaataaattcataaatgaaaaagttcatggacaaagtttcggattaacacctgtttactgttaagctaaagaggagccgaatattttatgtcaaaaagaaaatgacttcatctaagattgtatgctcactcaaccagcctgggctcttttaaaaaaacacttaagagaaatgtaatttaattgtataagatatctgagaagtataagcaagcaatggctaagcatttcagtaagaacgcttttgtctttttttttttttttttttttttttgagacagtctctgtcacccaggctgaagtacactggtaccatcatggctcaatcagccttgacctctccaggctcaaatgatcttcacacctcagcctcctgaggtagctgggaatacaagtactacatgcacatgacaccatttctgtctaatttatatatttctttagagatgggtgttttctcattttgcccaagttggtttcaaactgctgagctcaagcgatctctctgccttggactcccaaagtgctgggattacaggcatgagccactgcatctsgcccttttatttttttattactgaaaaagtaattggccctctagattcctgtaatatgaaaccaattaaattatccgcatatatttgcagggtagtttactctttgcccatccggccttatctcactgaaagcaaagctttatgagtaaactcctaaaaatttaagcaaattatgatgataactgttgccttaaagctaaatagtttgtgttaaatatggtgctcaataagcaagagttactttaataaatctctagatttgcttcattaagataatcaagtagcagatgggttaggccttctcttgtttttcatccttttgccctttccagaatcttacctacataatgtcccaattcctgagcaattctgaactaagaaactcatccacattcttgaattcatttttcacaagctaacttggtctttttcatctctatgtcatattaatgtaatgtagttgtgttaatgtagccacaaatgtattgtttattaaattctctccaaatatttgtgagcaatcagaatgatattataaacatcctttaatgttttagtatatcattaacctcaagcttataatagtatctatattttattttctatatatttttatatttgtaagtgaaattgtgtgagtaaaatacttaataaaatgtgtcaacatatataattggaccaatgtgaaaattaaaatggttctctgacatttggcattaaagcttatgtttaaattttgtctccctctgttggaaaaatcatattgctctacaactgggtgcttttttgctttttttgtttgtttgtttgtttatgaaactgggtctcactgtgttgccaaggcgggtctggaactcccgggctcaagcaatcctcccgtcttggcctcctacagtgctgagatgacttgcgtgagccacctgtgttctgccctataactgagtctttaccttttcttcatatactaaatgtagcacacctaggcattatttacatggggagaattgtctcagagttatacgccaatcaaagattaacagattgtttttatgcc

SEQ ID NO: 700130 - DNA, 631 bp, Homo sapiens
ttttctgtattatcatgccatcacttctatattataaataatgtcaactgtatcttttatgaaaattgaaggacttcacattcattgtataaaagacatagttccagacaaaggagtcagttatgacggagctgcatatgtctggggttacccttgcatagaacatagttgttaatcataatcatagctctatttccttatgtggtagcattaaaaatggatgttcacttaaattaggttgctcatcactgaaaatcrtttcatgctacaacactgaaatgggaaaacaaaaaatgactgtacttgtaaaaattgcttatgacacaccaggtactgcaattaaaggaagtagaaattgccaaatctgtatggacgatcataaaaattatgttagttacctcttaaaaatactcctcccttcattctgtcttaattaaattctgaaattcttcttagataccagaaagaacttctagatctctactggttttctcatacactttatatctctttatgctaccataaaacttaaaaaatccttatgttcagtctttgggctcactgtttttctcctaagttgcaactgttttgttattcagcctatctaccagttttcctaatggcaatgata

SEQ ID NO: 700131 - DNA, 1502 bp, Homo sapiens
tctaatatttctttgttagtagtgcaagtattctgaattgctgtgttcaggcaaatattttcacagtctttcctgctttactattatattttaatccyactttttaatcttatatcaaattacatgatgctttgcaacatgtatctttactgtctttttactgctttataaataattgatatttaggaaatgattacttaaattaatgaacacattattgttcttcatgacctgtgacaaatgtatatttgtatatactcccttagaaatttggaagtttatatttatagttgagaaagcagactaataggctatattctaattaagactgttcttattttcagaaatctattatttaatgaatataccagcatatatagacttctgtggaattgaaagcagatgattattttttaatggaaattgtttccagatgaatttcacagcaaaacaaacttgactccataggaggatatattaactctgtgcatgatagaatacattctgccagtgctattctcagtataggtatgtgttagtcagcttgggcttccataataaaatttttaaaaatgatgaaatggtttaaaaaaataatttattgtctcaaaattttagcagctagatatctgagacaaaggagccaataaattgagtctctgtgagggttgtctccttggcctatagatggtctccttctcactgtgtcctcagatggacgcttctttgtaaatatgtggacagatagagatctctggtgtctcttcttattattgggataacagtcctattagattaaggccccacccttgtaattttatttaatctttataacttctgtatagatcctatctctgaatacaatcacactgagagatagagcttcaagatatgaattttaagggaacgtaatttattccataacaaggtactcgattgacgcagatccaaaggatatttctcagctattcaggcctgaagagaattttaaaaccttgctttaaaagttttcaatgagcagtttttaaaaagtaagaggagaagagaaaatattgatatatatagtgctgaaatttagtatttaaatccaataatataaataaacatatgcatttagatctcattatatattaaaataatttgtagttatttatttaaataaaggctcaattcttcccaactttttctaatacatcttgagaatcactttttctcaccataatcactagggaaacaccaggaaagattaatcttcagctttagtagatattagtttagaatattatccatctaagtgataactttattgatatattccactaaaatttttgcagttcatgtgcaaagttgaaatcttcttcactttgtccccagcatataagtctactcatggatcttctaaagaaatcatttctgagttaacatagggaattacaatgtgaacagaatataattttatttagtttcttgacactattgttatatttaaatatatgtaatta

SEQ ID NO: 700132 - DNA, 1502 bp, Homo sapiens
tctaatatttctttgttagtagtgcaagtattctgaattgctgtgttcaggcaaatattttcacagtctttcctgctttactattatattttaatcctactttttaatcttatatcaaattacatgatgctttgcaacatgtatctttactgtctttttactgctttataaataattgatatttargaaatgattacttaaattaatgaacacattattgttcttcatgacctgtgacaaatgtatatttgtatatactcccttagaaatttggaagtttatatttatagttgagaaagcagactaataggctatattctaattaagactgttcttattttcagaaatctattatttaatgaatataccagcatatatagacttctgtggaattgaaagcagatgattattttttaatggaaattgtttccagatgaatttcacagcaaaacaaacttgactccataggaggatatattaactctgtgcatgatagaatacattctgccagtgctattctcagtataggtatgtgttagtcagcttgggcttccataataaaatttttaaaaatgatgaaatggtttaaaaaaataatttattgtctcaaaattttagcagctagatatctgagacaaaggagccaataaattgagtctctgtgagggttgtctccttggcctatagatggtctccttctcactgtgtcctcagatggacgcttctttgtaaatatgtggacagatagagatctctggtgtctcttcttattattgggataacagtcctattagattaaggccccacccttgtaattttatttaatctttataacttctgtatagatcctatctctgaatacaatcacactgagagatagagcttcaagatatgaattttaagggaacgtaatttattccataacaaggtactcgattgacgcagatccaaaggatatttctcagctattcaggcctgaagagaattttaaaaccttgctttaaaagttttcaatgagcagtttttaaaaagtaagaggagaagagaaaatattgatatatatagtgctgaaatttagtatttaaatccaataatataaataaacatatgcatttagatctcattatatattaaaataatttgtagttatttatttaaataaaggctcaattcttcccaactttttctaatacatcttgagaatcactttttctcaccataatcactagggaaacaccaggaaagattaatcttcagctttagtagatattagtttagaatattatccatctaagtgataactttattgatatattccactaaaatttttgcagttcatgtgcaaagttgaaatcttcttcactttgtccccagcatataagtctactcatggatcttctaaagaaatcatttctgagttaacatagggaattacaatgtgaacagaatataattttatttagtttcttgacactattgttatatttaaatatatgtaatta

SEQ ID NO: 700133 - DNA, 1502 bp, Homo sapiens
tctaatatttctttgttagtagtgcaagtattctgaattgctgtgttcaggcaaatattttcacagtctttcctgctttactattatattttaatcctactttttaatcttatatcaaattacatgatgctttgcaacatgtatctttactgtctttttactgctttataaataattgatatttaggaaatgattacttaaattaatgaacacattattgttcttcatgacctgtgacaaatgtatatttgtatatactcccttagaaatttggaagtttatatttatagttgagaaagcagaytaataggctatattctaattaagactgttcttattttcagaaatctattatttaatgaatataccagcatatatagacttctgtggaattgaaagcagatgattattttttaatggaaattgtttccagatgaatttcacagcaaaacaaacttgactccataggaggatatattaactctgtgcatgatagaatacattctgccagtgctattctcagtataggtatgtgttagtcagcttgggcttccataataaaatttttaaaaatgatgaaatggtttaaaaaaataatttattgtctcaaaattttagcagctagatatctgagacaaaggagccaataaattgagtctctgtgagggttgtctccttggcctatagatggtctccttctcactgtgtcctcagatggacgcttctttgtaaatatgtggacagatagagatctctggtgtctcttcttattattgggataacagtcctattagattaaggccccacccttgtaattttatttaatctttataacttctgtatagatcctatctctgaatacaatcacactgagagatagagcttcaagatatgaattttaagggaacgtaatttattccataacaaggtactcgattgacgcagatccaaaggatatttctcagctattcaggcctgaagagaattttaaaaccttgctttaaaagttttcaatgagcagtttttaaaaagtaagaggagaagagaaaatattgatatatatagtgctgaaatttagtatttaaatccaataatataaataaacatatgcatttagatctcattatatattaaaataatttgtagttatttatttaaataaaggctcaattcttcccaactttttctaatacatcttgagaatcactttttctcaccataatcactagggaaacaccaggaaagattaatcttcagctttagtagatattagtttagaatattatccatctaagtgataactttattgatatattccactaaaatttttgcagttcatgtgcaaagttgaaatcttcttcactttgtccccagcatataagtctactcatggatcttctaaagaaatcatttctgagttaacatagggaattacaatgtgaacagaatataattttatttagtttcttgacactattgttatatttaaatatatgtaatta

SEQ ID NO: 700134 - DNA, 1502 bp, Homo sapiens
tctaatatttctttgttagtagtgcaagtattctgaattgctgtgttcaggcaaatattttcacagtctttcctgctttactattatattttaatcctactttttaatcttatatcaaattacatgatgctttgcaacatgtatctttactgtctttttactgctttataaataattgatatttaggaaatgattacttaaattaatgaacacattattgttcttcatgacctgtgacaaatgtatatttgtatatactcccttagaaatttggaagtttatatttatagttgagaaagcagactaataggctatattctaattaagactgttcttattttcagaaatctattatttaatgaatataccagcatatatagacttctgtggaattgaaagcagatgattattttttaatggaaattgtttccagatgaatttcacagcaaaacaaacttgactccataggaggatatattaactctgtgcatgatagaatacattctgccagtgctattctcagtataggtatgtgttagtcagcttgggcttccataataaaatttttaaaaatgatgaaatggtttaaaaaaataatttattgtctcaaaattttagcagctagatatctgagacaaaggagccaataaattgagtctctgtgagggttgtctccttggcctatagatggtctccttctcactgtgtcctcagatggacgcttctttgtaaatatgtggacagatagagatctctggtgtctcttcttattattgggataacagtcctattagattaaggccccacccttgtaattttatttaatctttataacttctgtatagatcctatctctgaatacaatcacactgagagatagagcttcaagatatgaattttaagggaacgtaatttattccataacaaggtactcgattgacgcagatccaaaggatatttctcagctattcaggcctgaagagaattttaaaaccttgctttaaaagttttcaatgagcagtttttaaaaagtaagaggagaagagaaaatattgatatatatagtgctgaaatttagtatttaaatccaataatatamataaacatatgcatttagatctcattatatattaaaataatttgtagttatttatttaaataaaggctcaattcttcccaactttttctaatacatcttgagaatcactttttctcaccataatcactagggaaacaccaggaaagattaatcttcagctttagtagatattagtttagaatattatccatctaagtgataactttattgatatattccactaaaatttttgcagttcatgtgcaaagttgaaatcttcttcactttgtccccagcatataagtctactcatggatcttctaaagaaatcatttctgagttaacatagggaattacaatgtgaacagaatataattttatttagtttcttgacactattgttatatttaaatatatgtaatta

SEQ ID NO: 700135 - DNA, 605 bp, Homo sapiens
ggtcatcagatttcatcattagtattaattaacactttgcagtgacttctgtgtgaatgagttagaaagcattttccaaagagtaggacaaatatgttccatgaactcggaatttacaatttgggagattatttctgtgttccttttaggaaagataaattccttttgtttactgtcttcagcttgaattcatatttttctagccataggrtgtgtgtgtgtgtgtatgtgtgtgtatgtttgtggctaaaataataggatgtatcatggactgagagaaaggcaaatatttatttcattgttaatacgattgtattaaccttcatagtatgaaccatctacttactttatgagtgattaactgagatcttagtaagatagtaattataagtctggcttgaagtttgaattatttgatctttattatactaggccatataccctggtaataattatgggggtcttgtggctattgtgtctgaaatgtttgcagacttatatgtgatctcttgtcatttgagagtggatttggcatgacctacttcaatataattcctattagtaactccattgaagtgttaaatgataaatcctttgaaattttt

SEQ ID NO: 700136 - DNA, 660 bp, Homo sapiens
aaaagtactgtatatagttgctagttggcttttttcacttcctattatctcatgagcaatacaaacttcaaatatgagcttttcaaataagcatctgataaaatattatgtagyttcaatctaatctttgcaatataatttaaccatttctattgaagttctatgagtccttagaattttatactcctacacattctacatggtataaaatgcattctaaatataaatgatttgcagagtattcacatttccttattagtataaggatccaacttaaataaaaataaaaagttctatgtcacaggcctgcatagagtttgttaacttgtgaaaccacacaagaacttattataattcagaaatatgtatttttctagttcagtgattcccaacacggtgcctttggtctcctaggggtccgtgaaatagtaatgacagcctttgagctattttcagtatttcgagaagctgaatataaatcatatatttatctacaacaagcaaaatgccaagacagcagaaattgtacaactcagtatggcaacactggctatcttatactaatccaaaaatttgattggcttacaatcttttgattatcttaaaggaaaacatgttaattattactacataaatttaatgtatttggtgagctaaatc

SEQ ID NO: 700137 - DNA, 1196 bp, Homo sapiens
aaagtcaagaaatgatctttacattttactccttaagtcaacctttcaagatcttttggtggtgcttatttttcacactgggatatcacttaatagaagtatttctatttaactttgtaaaataaaaatcaactggaaaataaggctggttattcaagctaccctcactctaacatttaagtttacaataatataccttggctgattcaaagatcaaatttataatttataatcatatattccaaagtgttttggttataaaacctttaaaggataacatagtgaattttttcctctgatcattatattaactctagtgtgctttccaaaatacagatgtgtatgtgtgtgtatatgtgtgtgtgtctgtgtttgcttgtttgttttatttttaaagaagcatcacattgaccgcttaaacatttaaatatttttgtatacttttggaacatatctttatatgtataaatgttatagctagaaataatgacacgatgggtccactggcaatgagcagacctaaaagaagcctcatatatgttctggctttgaatacgtcttggtctattctgtcctgggaaagtactgcttgtaatatagctggtcattactcctcctgcccccagttcaactattttgtatattattttatacattagttctagtctccatgtatatttctaccagaattggaaaattttaatttattagatactttgccccaaatgtaacatttaattatagatattcctgaagaatttgattctcaagtaaagtcattttaaattggtctggtacatcatctaagctgtttgccttacttgctatacaaattggcttctttgcagctgtggtgaaggatacaagaaatctgcttctaatctgctttaaatttggcaatagcattttctaaaaatgtagtgtgtgtccaggatgttttagtttagtgacatggagcatcctgttaccttcatttaaggctgaaagcaaaatttggtaaaaaaaaaaaaaaaaaaaaaaaaaaaaaccataaaaatgcatgtttatccaggttcatagatccaggttttttaaatgggaccccaggttatttggctgcagctctagtgttttggaatccactttgagaatgcattgctaatccaccttgttcacagccttttagatttgctttgtttaaaaagattackggtatt

SEQ ID NO: 700138 - DNA, 587 bp, Homo sapiens
atttttatttaaatttaggttttttttggttttttgtttgtttgtttgtttgagacagggtctccctctgtcacccaggatggagtgtggtggctcaatcacagctcactggatgtaactccctggccastttcctcatctgctcccatgctgcacattctagaagagggaggaggctgctaggatggctgcctggactcccaggaagatgagctgacggcatctccttgtcagtgtcttgcctcagtccgagcactcaaacctgcagctgagagccccatggaacggggaaaaacatgggcaaatgggcagttttaactccctgcaagatgagccttgaatctaaaatgtgattattttgttaggaatatcatgaaattcctagccatcaaacacatacacattctagaggcaacggtgcacctgacacgtcatggttcctggaccgacgagtccaggagggcagacccatcaccgcgtctgtctccccatctctgggagggcagtcaggagggacgtggttcaagagacacacgaggcaggctatctctctcctctgatgttcatctcaagttagaaatgtcccc

SEQ ID NO: 700139 - DNA, 642 bp, Homo sapiens
gcaatgctccttaattcctgaacccgagtgttccctcctgccctggagagactttcccaggaaatcccgatttccctacttttgcctgcagggctcgcctttggaggtctgctctgacccggaagcacttttctccccgtttctggctagaattctacgctgcttataaaatggagtgtattgttcatggcttgcaaataaaagctgctgctgcttcaggcgggccaggggtcagctggagctgggggaggggtgaaaagaacctggcttgagatgcaaagagccaggctcctggcggcccctgtgtgacccctacagccacagccccctctgggcccctgcctaacagagggacagagagagggctgtgtccacyctgcagctctctggatttggccaaacctggctgctgtgtggcccattcttgggaacaccacactctcttcctgggtgactttgatcactcatccccccaacacatataaactgagcactcacggtctgctgggcactcgtgctgggagagctcagtggggtgcatcaccatgcacaaccttgtgaatggaccgaaacccactgaaatgtccactttcacagggtgcagttcatgctgtgtaaatcatatcttaggatgaaaaagca

SEQ ID NO: 700140 - DNA, 642 bp, Homo sapiens
gcaatgctccttaattcctgaacccgagtgttccctcctgccctggagagactttcccaggaaatcccgatttccctacttttgcctgcagggctcgcctttggaggtctgctctgacccggaagcacttttctccccgtttctggctagaattctacgctgcttataaaatggagtgtattgttcatggcttgcaaataaaagctgctgctgcttcaggcgggccaggggtcagctggagctgggggaggggtgaaaagaacctggcttgagatgcaaagagccaggctcctggcggcccctgtgtgacccctacagccacagccccctctgggcccctgcctaacagagggacagagagagggctgtgtccactctgcagctctctggatttggccaaacctggctgctgtgtggcccattcttgggaacaccacactctcttcctgggtgactttgrtcactcatccccccaacacatataaactgagcactcacggtctgctgggcactcgtgctgggagagctcagtggggtgcatcaccatgcacaaccttgtgaatggaccgaaacccactgaaatgtccactttcacagggtgcagttcatgctgtgtaaatcatatcttaggatgaaaaagca

SEQ ID NO: 700141 - DNA, 2374 bp, Homo sapiens
tgcatgcacacacatccaccctcatacacaggagtgcacacacatacacatatatacacacaggcacacacacatccactcccacacacaggcatgcacacacaccaccatacagaggtgtgcacacacacaaaatgggtatcacagacttacatatgttgtactacatccacttacaaaataatatttggccattacaataatagaaacaggccgggcatggtggctcatgcctgtaatcccagcactttgggaggcccaggcaggcggatcacctgaggtcaggagttcgcgaccagtctggccaacatggcatctctattaaaaataccaaattagctgggtgtgttggcatacacctgtagtcccagcttcttgggaggctgaggcaggagaatcacttgaaccacgaggcagaggttgctgtgagccgagatcgtgccactgcactccagcctcggtgacaagatcaaaatgccatctcaaaaacaaattataaaaacaaaaagcatttaggaaatgtcaagagaaaggacacaggctatatctctgctctgctaaaggctgtggcaagggctccacgggaaggggcagacccctctgtgtgaggtggagggtagtggctgatcacttagctcctgcattttgtcggaaccctttcggcaaaccacagcgacttagaataaaaccaccacggggcgaagactaagcgtgtgtgcttgtttcataagggaatctcacgaggcaagatgtccgagaataaagaatgacaagaggtggacaaaagtatgcagcggtccagggaagaggaagagaagagggggaggaaagacactcatacacaggggcaagatgtagagtgcagtgagccttcggcctttcatgaaggctgggaaacatgcacttcacacacaaagagctctccagattcatttcttcaggttaagacctgtacacgttcgaatgctgcatcctcacggcacagcgactgtataccgtgctagcgactgtgtcgggaatcactgcaccacagcgtccggaggccagctgctggcaggtgcctggggcaggtaccaggctagggcaggctggccaagggctggcactggtctggagtttggtggagggcagccaggtcacagcccgctgggcagaattctttgcttattcaggtggctttatttacatgccaggcccaaacctagggtgcagggatctccttctttctcctaggagactgtttttccctctaagacttttttttgagacaaggtcttgctctgtcgcccacactggagtgccactgcatcctcacagtggtgtgatcatagctcactgcatccttgacctcctgggctcagcctcccgagtagcttggactacaggtacataacaccatgctcggctaattttttcatatattttttgtagcagcagggtctcactatattgcccaggctggtctggaactcctgggctcaagcaatcctcccacttcagctcccctaagggctcttaacctctttagtaaaagatcaacaaagcagatgcatcgcttttgagtttcagatcttcccagggctcctcactgccctcccattataaaagccccacatttaaagtggcctccagtcccccaccttctagcttccacctgaacactcatcttggctcaagaactagtcctccctaagcctcagtttcctcatctgtatattggggtcagtacagcccccggctcatggatgaataagcctggccctccatatacgatacctgatcccaccattcacaggctgcatgggagctttttatttttcaattgtgcaatttgtgttttaaaaatatatgacatgaggccrggcatggtggctcacgcctgtaatgccagcactttgggaggctgaggtgggcagatcacctgaggtcagtttgagaccagcctggccaacatggtgaaaccccatctctactaaaaatacaaaaattaggctgagcatggtggcagatgcctgtggtcccagctacttgagaggctgaggcaggagaatcgcctgaacccaggagacggaggctgcagtgagccaacatgtcgccactgcactccagcctgggcaacagagtgagattccatctaaaaacaacacacatataaatatatgtatgtatgtatgtatgtatgtatgtatgtatgtatgtatgacatgaacaacaagaagtgcccccggcctgagcccaggcccaggtgaaattcatcaggccaaaaaggccttctggttatgcaaataccgtccttccatgaaccactggcttaaggaagtgtaaacacgccacatagaagtaaacagctgaaaccctttgaaggcagcgaaca

SEQ ID NO: 700142 - DNA, 2374 bp, Homo sapiens
tgcatgcacacacatccaccctcatacacaggagtgcacacacatacacatatatacacacaggcacacacacatccactcccacacacaggcatgcacacacaccaccatacagaggtgtgcacacacacaaaatgggtatcacagacttacatatgttgtactacatccacttacaaaataatatttggccattacaataatagaaacaggccgggcatggtggctcatgcctgtaatcccagcactttgggaggcccaggcaggcggatcacctgaggtcaggagttcgcgaccagtctggccaacatggcatctctattaaaaataccaaattagctgggtgtgttggcatacacctgtagtcccagcttcttgggaggctgaggcaggagaatcacttgaaccacgaggcagaggttgctgtgagccgagatcgtgccactgcactccagcctcggtgacaagatcaaaatgccatctcaaaaacaaattataaaaacaaaaagcatttaggaaatgtcaagagaaaggacacaggctatatctctgctctgctaaaggctgtggcaagggctccacgggaaggggcagacccctctgtgtgaggtggagggtagtggctgatcacttagctcctgcattttgtcggaaccctttcggcaaaccacagcgacttagaataaaaccaccacggggcgaagactaagcgtgtgtgcttgtttcataagggaatctcacgaggcaagatgtccgagaataaagaatgacaagaggtggacaaaagtatgcagcggtccagggaagaggaagagaagagggggaggaaagacactcatacacaggggcaagatgtagagtgcagtgagccttcggcctttcatgaaggctgggaaacatgcacttcacacacaaagagctctccagattcatttcttcaggttaagacctgtacacgttcgaatgctgcatcctcacggcacagcgactgtataccgtgctagcgactgtgtcgggaatcactgcaccacagcgtccggaggccagctgctggcaggtgcctggggcaggtaccaggctagggcaggctggccaagggctggcactggtctggagtttggtggagggcagccaggtcacagcccgctgggcagaattctttgcttattcaggtggctttatttacatgccaggcccaaacctagggtgcagggatctccttctttctcctaggagactgtttttccctctaagacttttttttgagacaaggtcttgctctgtcgcccacactggagtgccactgcatcctcacagtggtgtgatcatagctcactgcatccttgacctcctgggctcagcctcccgagtagcttggactacaggtacataacaccatgctcggctaattttttcatatattttttgtagcagcagggtctcactatattgcccaggctggtctggaactcctgggctcaagcaatcctcccacttcagctcccctaagggctcttaacctctttagtaaaagatcaacaaagcagatgcatcgcttttgagtttcagatcttcccagggctcctcactgccctcccattataaaagccccacatttaaagtggcctccagtcccccaccttctagcttccacctgaacactcatcttggctcaagaactagtcctccctaagcctcagtttcctcatctgtatattggggtcagtacagcccccggctcatggatgaataagcctggccctccatatacgatacctgatcccaccattcacaggctgcatgggagctttttatttttcaattgtgcaatttgtgttttaaaaatatatgacatgaggccgggcatggtggctcacgcctgtaatgccagcactttgggaggctgaggygggcagatcacctgaggtcagtttgagaccagcctggccaacatggtgaaaccccatctctactaaaaatacaaaaattaggctgagcatggtggcagatgcctgtggtcccagctacttgagaggctgaggcaggagaatcgcctgaacccaggagacggaggctgcagtgagccaacatgtcgccactgcactccagcctgggcaacagagtgagattccatctaaaaacaacacacatataaatatatgtatgtatgtatgtatgtatgtatgtatgtatgtatgtatgacatgaacaacaagaagtgcccccggcctgagcccaggcccaggtgaaattcatcaggccaaaaaggccttctggttatgcaaataccgtccttccatgaaccactggcttaaggaagtgtaaacacgccacatagaagtaaacagctgaaaccctttgaaggcagcgaaca

SEQ ID NO: 700143 - DNA, 2374 bp, Homo sapiens
tgcatgcacacacatccaccctcatacacaggagtgcacacacatacacatatatacacacaggcacacacacatccactcccacacacaggcatgcacacacaccaccatacagaggtgtgcacacacacaaaatgggtatcacagacttacatatgttgtactacatccacttacaaaataatatttggccattacaataatagaaacaggccgggcatggtggctcatgcctgtaatcccagcactttgggaggcccaggcaggcggatcacctgaggtcaggagttcgcgaccagtctggccaacatggcatctctattaaaaataccaaattagctgggtgtgttggcatacacctgtagtcccagcttcttgggaggctgaggcaggagaatcacttgaaccacgaggcagaggttgctgtgagccgagatcgtgccactgcactccagcctcggtgacaagatcaaaatgccatctcaaaaacaaattataaaaacaaaaagcatttaggaaatgtcaagagaaaggacacaggctatatctctgctctgctaaaggctgtggcaagggctccacgggaaggggcagacccctctgtgtgaggtggagggtagtggctgatcacttagctcctgcattttgtcggaaccctttcggcaaaccacagcgacttagaataaaaccaccacggggcgaagactaagcgtgtgtgcttgtttcataagggaatctcacgaggcaagatgtccgagaataaagaatgacaagaggtggacaaaagtatgcagcggtccagggaagaggaagagaagagggggaggaaagacactcatacacaggggcaagatgtagagtgcagtgagccttcggcctttcatgaaggctgggaaacatgcacttcacacacaaagagctctccagattcatttcttcaggttaagacctgtacacgttcgaatgctgcatcctcacggcacagcgactgtataccgtgctagcgactgtgtcgggaatcactgcaccacagcgtccggaggccagctgctggcaggtgcctggggcaggtaccaggctagggcaggctggccaagggctggcactggtctggagtttggtggagggcagccaggtcacagcccgctgggcagaattctttgcttattcaggtggctttatttacatgccaggcccaaacctagggtgcagggatctccttctttctcctaggagactgtttttccctctaagacttttttttgagacaaggtcttgctctgtcgcccacactggagtgccactgcatcctcacagtggtgtgatcatagctcactgcatccttgacctcctgggctcagcctcccgagtagcttggactacaggtacataacaccatgctcggctaattttttcatatattttttgtagcagcagggtctcactatattgcccaggctggtctggaactcctgggctcaagcaatcctcccacttcagctcccctaagggctcttaacctctttagtaaaagatcaacaaagcagatgcatcgcttttgagtttcagatcttcccagggctcctcactgccctcccattataaaagccccacatttaaagtggcctccagtcccccaccttctagcttccacctgaacactcatcttggctcaagaactagtcctccctaagcctcagtttcctcatctgtatattggggtcagtacagcccccggctcatggatgaataagcctggccctccatatacgatacctgatcccaccattcacaggctgcatgggagctttttatttttcaattgtgcaatttgtgttttaaaaatatatgacatgaggccgggcatggtggctcacgcctgtaatgccagcactttgggaggctgaggtgggcagatcacctgaggtcagtytgagaccagcctggccaacatggtgaaaccccatctctactaaaaatacaaaaattaggctgagcatggtggcagatgcctgtggtcccagctacttgagaggctgaggcaggagaatcgcctgaacccaggagacggaggctgcagtgagccaacatgtcgccactgcactccagcctgggcaacagagtgagattccatctaaaaacaacacacatataaatatatgtatgtatgtatgtatgtatgtatgtatgtatgtatgtatgacatgaacaacaagaagtgcccccggcctgagcccaggcccaggtgaaattcatcaggccaaaaaggccttctggttatgcaaataccgtccttccatgaaccactggcttaaggaagtgtaaacacgccacatagaagtaaacagctgaaaccctttgaaggcagcgaaca

SEQ ID NO: 700144 - DNA, 435 bp, Homo sapiens
tttgtccttgtgatagtttgctgagaatgatkgtttccagcttcatccatgtccctataaaggacgtgaactcatccttttttatggctgcatagtattccacggtgtatcacccagttcaattcaagaaaccttattcaaagcaagactgggtagcagaagggacacagagaccagaaagaaatagttggtgccttctagaaactgatattctagtagcagactgtgatcagcaagtaaataaataactcaaatataaagcagaaacaggataaatgctacagtagagatgggagcaaggaaatgttcaaatagagaaaattaagtttatgggcgcagtcttctgatgcttcctttctctggaacatggggcaatcaaaagctattacagctcagatttctgaaaaatacagaaatgcattcttttgtactata

SEQ ID NO: 700145 - DNA, 435 bp, Homo sapiens
tttgtccttgtgatagtttgctgagaatgatggtttccagcttcatccatgtccctataaaggacgtgaactcatccttttttatggctgcatagtattccacggtgtatcacccagttcaattcaagaaaccttattcaaagcaagactgggtagcagaagggacacagagaccagaaagaaatagttggtgccttctagaaactgatattctagtagcagactgtgatcagyaagtaaataaataactcaaatataaagcagaaacaggataaatgctacagtagagatgggagcaaggaaatgttcaaatagagaaaattaagtttatgggcgcagtcttctgatgcttcctttctctggaacatggggcaatcaaaagctattacagctcagatttctgaaaaatacagaaatgcattcttttgtactata

SEQ ID NO: 700146 - DNA, 687 bp, Homo sapiens
cattcaataggttaaaggcatcattcagaaataaccaattaagagagagtgggtaagacatggatggaagttcttactctggttcatggattcgacccagaactggtagcctggttttcaggctttagactgccctggcttgaaggttcagttttaccggggacccatttctggctgcttgggaatttgtctgtctcctgtcgctgtcactatgtctgtatatatttactatacatagagaataacatttctcctctacttaaaagccaccaaaggcctatgcacttcttattcccttaatataaaatccagaataattctcttaccctacaagacccataagatcacctatttgwcatcctattcctcccctctcttcctcactcactatgcttctaatacattggccttatttctgttcctcaaatagcccacattcttttccctgttagggccttagcatatgttgtttattctacttgccatgctctttatactgctctcctcattcttcagttttagtataaatatcactcctcaaagtgcttttttctgatcaccttctctaagtaggtcagtcacctgctattctctctcatagcaatttttttcaaaatattttatgagtcataattatatatttatgcacttatttagtctggctcctccactggaccataagcccca

SEQ ID NO: 700147 - DNA, 459 bp, Homo sapiens
aacacacccagaaataacattttaccagctatctagacattctctagactagtcaaatttacatataaagataaccattacaggaagctacttcagtagatcaggaggtggctgatgccaaaatctgggagatgcttgtaggtgaaatggtctctgatgagatatacttagagttgaaatcattaaaaagtggtgatagagatttgagtgggaaacctggggaaaggaggaagaatatgggatggctttaagagagagggtcagcaaatgtattctgtgaaaggccaaatmataataatgaatatttgaggacttgtgggccatgtgttctctgttgcagttactctgctgcagttgtaatgtgaaagcagtcatatgggaaatgaataagtgtggctgtgtgccaataaaacttaatttctggacactgaaatttgaatttcatacaagttttatgtg

SEQ ID NO: 700148 - DNA, 1400 bp, Homo sapiens
ttaagtaatttgttaataaagtctcaaaacctatgccataggtatgtttgagatcatgtaacacatgagctatatagataaatttatccttcaaaattatgtatgtggaaattgcatagaagattcaagttaaaattaatgacaagataagaatattgtacgagtccagatttaggamagtattatcttcacctgaaaaagacaataataaacacattacctattatttattgaatatatgatactaggctagctgtagatatattaccaatacactgatactcttgacaatatccctgcaattgttaacactaacaccaatttgcagaagaaaacagtatatcctgcctaaggacatatcacataaatagcaagtggcagtaaagtttgaatacaacactctgatcaatgccaaaatacattatttttttcactataccatgctgattatactaatacttttgaaagagtatttatagcttagaaagatttgggaaggaattaaaaatttaattcttcattctgtagtttacatctaacatttaaacttcaattctaatttttacctaccttatggtacataattaaatattcttatgaaaagtggtgcttttaaagattacacattcactagattcactgagaaaatacattacatttctagatattgacactagttgtggctcccaagaattggtacttatataggacagacttcaaatgatccaatagagtaaatgcattttggagaaaacgatatgagagtagtgtaccacaaattgtcatcgttttgccactctttccttgctgtcacataacaatctcattttatataccaagtataatgccacatacaaaaaacaaggctttgcgggcaggtaaatgtgggttcaaatcctgactgtattgccaattaatgtgtgatattgggtagttacctaacatctctgaacagaggtctgtgatttgcaaaatggaagaaaatatcactgaaatattttattggttcaagatatttaactgagaattttatatcagatagagttctaggccttagaaatataccacccagagtgaatgaatgagtgagtgaatgaaagagtgctaggcactaggaatacaatattgagtattctcatttttcagagtgcttacaatctactagggaagacatttggaatacaattaagtgattttaataaatatctgatagatgttattttataggcaatgtaatgtgttattatagtacacagcagaagtagccaaactaatctcggctatttatgtattgcttcccagagaaagggatataaaactgatatgaataatatgtttgaattaaggcacatgaacaagaggagaaggagtgcttctacaatgttccaaagaaagagaca

SEQ ID NO: 700149 - DNA, 1907 bp, Homo sapiens
tttatctctatggattagaccctctttttttttcctgagagttggggtctcactctgttgcccggctagaatgcagtggcacaatcatagctcactgcagctttgaaatcctgggctcaagcaatcctcccacctcaacctcctgagctgctggaattataggtgtgagccacctcgcctagttctatttttttttctttttcttttagtgagtgcagattctataggaacaaggtaaagctagcttatgctcagagtcaggacatgtgtggaatgtaaggtagtgactggccacagggctactgtgtttctaactaaattctgtgtcttgatctgggcactggttatataggcaagctcatttaatcaacatttgtcaagccatatatttaggatggtttacttttccatatgtacgtgattctacaatataaagtttacatctaaaatgagggaagaagctagggagtatatgggaagtttaagcaaaataaaacaaaacctcctaaatcaatgcaatacacaatgccaagcaatttagttaagagggggcttcacagagggaagaatgttgtctctcttttttttttttttttggatctgagttcaccagagtctattattcaacttctttgcttctagactgtgcctagaggaaagaggctttgtcatagtcatcttattttgctgtctagcatgatgactagaattgacaagaaaattaataaacatcaaataaatggcagactatttagttaattccatcttgaaactatagcttgttttcaaagagttctgcctagaaaagtttagttatcttctcaactgaatttttttttttctttttttcagacagagtatcactgtgtcacgaggctggagtgaactggcatgatctcggctcactacaacctccacctcctgtgttcaagcaattctcctgcctcagcctcccaagtggctgggactataggcacgtgccaccacacccagctaatttttgtatttttagtagagatggggtttcaccatgttggccasgatggtctcgatctcttgacctcatgatccacctgcctcggcctcccaaactgctgggattacaggcatgaaccacagcacctggccccaactgaattttttaatgtactacttatacccagatactgtaacaagtatagaggaagagcaatgattcaacatctctacttagtatgacttaaatatttaaattaattttaatattgaatagcttcaaattaatatttttaagattcacaaaaacaatatttaaagtttctatattaatctctctatatatatgtatgcatatgatgcatatcacataactccctccatatatcttctttcctgttaagtatgttagcttaacccttaaatgttcttgggtgcatttattctcaggttcataaaatagaattgcaaagctttacaaatcctattgtgaattttaaaaactggtgacatatgctttatattcataatatagatatatatagaagtataatacatatctctgaagtttattaatgcaaatgtttttgcatcataagatttttcattttgttattatcattcactaaagtcccaacaacactaaatgattaattggtatacatgatgctggaataatttctgaatcagttctctgttgtgctaatatttaaaaaaatgaatcactaggcagtgaacaaataattgtttaatgcaattaaaactactcagtgatgtcagaatgctaaatcaatacccatgagaaaacagtcaaatgtgagcatatttataaaactgtcctggaacttatgcaaagaaatataattatgtctgtatgaaaggatcctcagaatgggtgacttaaatttgaaaatcttcaaaggctatagaat

SEQ ID NO: 700150 - DNA, 1907 bp, Homo sapiens
tttatctctatggattagaccctctttttttttcctgagagttggggtctcactctgttgcccggctagaatgcagtggcacaatcatagctcactgcagctttgaaatcctgggctcaagcaatcctcccacctcaacctcctgagctgctggaattataggtgtgagccacctcgcctagttctatttttttttctttttcttttagtgagtgcagattctataggaacaaggtaaagctagcttatgctcagagtcaggacatgtgtggaatgtaaggtagtgactggccacagggctactgtgtttctaactaaattctgtgtcttgatctgggcactggttatataggcaagctcatttaatcaacatttgtcaagccatatatttaggatggtttacttttccatatgtacgtgattctacaatataaagtttacatctaaaatgagggaagaagctagggagtatatgggaagtttaagcaaaataaaacaaaacctcctaaatcaatgcaatacacaatgccaagcaatttagttaagagggggcttcacagagggaagaatgttgtctctcttttttttttttttttggatctgagttcaccagagtctattattcaacttctttgcttctagactgtgcctagaggaaagaggctttgtcatagtcatcttattttgctgtctagcatgatgactagaattgacaagaaaattaataaacatcaaataaatggcagactatttagttaattccatcttgaaactatagcttgttttcaaagagttctgcctagaaaagtttagttatcttctcaactgaatttttttttttctttttttcagacagagtatcactgtgtcacgaggctggagtgaactggcatgatctcggctcactacaacctccacctcctgtgttcaagcaattctcctgcctcagcctcccaagtggctgggactataggcacgtgccaccacacccagctaatttttgtatttttagtagagatggggtttcaccatgttggccaggatggtctcgatctcttgacctcatgatccacctgcctcggcctcccaaastgctgggattacaggcatgaaccacagcacctggccccaactgaattttttaatgtactacttatacccagatactgtaacaagtatagaggaagagcaatgattcaacatctctacttagtatgacttaaatatttaaattaattttaatattgaatagcttcaaattaatatttttaagattcacaaaaacaatatttaaagtttctatattaatctctctatatatatgtatgcatatgatgcatatcacataactccctccatatatcttctttcctgttaagtatgttagcttaacccttaaatgttcttgggtgcatttattctcaggttcataaaatagaattgcaaagctttacaaatcctattgtgaattttaaaaactggtgacatatgctttatattcataatatagatatatatagaagtataatacatatctctgaagtttattaatgcaaatgtttttgcatcataagatttttcattttgttattatcattcactaaagtcccaacaacactaaatgattaattggtatacatgatgctggaataatttctgaatcagttctctgttgtgctaatatttaaaaaaatgaatcactaggcagtgaacaaataattgtttaatgcaattaaaactactcagtgatgtcagaatgctaaatcaatacccatgagaaaacagtcaaatgtgagcatatttataaaactgtcctggaacttatgcaaagaaatataattatgtctgtatgaaaggatcctcagaatgggtgacttaaatttgaaaatcttcaaaggctatagaat

SEQ ID NO: 700151 - DNA, 610 bp, Homo sapiens
tgacagcacgtggaacaatggcgagggatcagcttccctcttggaaatcagatgaccacggaatgccataggtccgccaagcatcagaacttcatcagcgtggcacagaggctcgcgagctgaattgcctttgcaaagtgtgctctgcacgcatgattttaaacagcctggcctgctccttttatcctgtcatgaatatttatgttcctgttttgttcggatgggacagcctcaggcaaagcatgattcagatggcgctggtggcaggcaagggcttcacgggacagctaattgtcttctcaggattgctgagagcaggaaggggtggtgctgaycgtgctggtgctggagctgggagagcaggcgtctggatttcggctccccttatggagtcagtttgaacaagctgcttaactccttcaagccaccatttcctcatctgcaatgtggaggcaataatagcactgtatacctacctcacataggcaatctttcatggcgtgccgtgagttcactgaagtctgtctcagcacacactcacacatgcacgctcatacccgtgctgagtgaatccagttaattcccagagaactgcaaataaagtgtcagc

SEQ ID NO: 700152 - DNA, 610 bp, Homo sapiens
tgacagcacgtggaacaatggcgagggatcagcttccctcttggaaatcagatgaccacggaatgccataggtccgccaagcatcagaacttcatcagcgtggcacagaggctcgcgagctgaattgcctttgcaaagtgtgctctgcacgcatgattttaaacagcctggcctgctccttttatcctgtcatgaatatttatgttcctgttttgttcggatgggacagcctcaggcaaagcatgattcagatggcgctggtggcaggcaagggcttcacgggacagctaattgtcttctcaggattgctgagagcaggaaggggtggtgctgaccgtgctggtgctggagctgggagagcaggcgtctggatttcggctccccttatggagtcagtttgaacaagctgcttaactccttcaagccaccatttcctcatcygcaatgtggaggcaataatagcactgtatacctacctcacataggcaatctttcatggcgtgccgtgagttcactgaagtctgtctcagcacacactcacacatgcacgctcatacccgtgctgagtgaatccagttaattcccagagaactgcaaataaagtgtcagc

SEQ ID NO: 700153 - DNA, 610 bp, Homo sapiens
tgacagcacgtggaacaatggcgagggatcagcttccctcttggaaatcagatgaccacggaatgccataggtccgccaagcatcagaacttcatcagcgtggcacagaggctcgcgagctgaattgcctttgcaaagtgtgctctgcacgcatgattttaaacagcctggcctgctccttttatcctgtcatgaatatttatgttcctgttttgttcggatgggacagcctcaggcaaagcatgattcagatggcgctggtggcaggcaagggcttcacgggacagctaattgtcttctcaggattgctgagagcaggaaggggtggtgctgaccgtgctggtgctggagctgggagagcaggcgtctggatttcggctccccttatggagtcagtttgaacaagctgcttaactccttcaagccaccatttcctcatctgcaatgtggaggcaataatagcactgtatacctacctcacataggcaatctttcatggcgtgccgtgagttcactgaagtctgtctcagcacrcactcacacatgcacgctcatacccgtgctgagtgaatccagttaattcccagagaactgcaaataaagtgtcagc

SEQ ID NO: 700154 - DNA, 610 bp, Homo sapiens
tgacagcacgtggaacaatggcgagggatcagcttccctcttggaaatcagatgaccacggaatgccataggtccgccaagcatcagaacttcatcagcgtggcacagaggctcgcgagctgaattgcctttgcaaagtgtgctctgcacgcatgattttaaacagcctggcctgctccttttatcctgtcatgaatatttatgttcctgttttgttcggatgggacagcctcaggcaaagcatgattcagatggcgctggtggcaggcaagggcttcacgggacagctaattgtcttctcaggattgctgagagcaggaaggggtggtgctgaccgtgctggtgctggagctgggagagcaggcgtctggatttcggctccccttatggagtcagtttgaacaagctgcttaactccttcaagccaccatttcctcatctgcaatgtggaggcaataatagcactgtatacctacctcacataggcaatctttcatggcgtgccgtgagttcactgaagtctgtctcagcacacactcacacatgmacgctcatacccgtgctgagtgaatccagttaattcccagagaactgcaaataaagtgtcagc

SEQ ID NO: 700155 - DNA, 1054 bp, Homo sapiens
tgggttctttgtgctggcgtctccaaggagctgggtcccaaccctgtgcttccctcccccatcgtggagcagcgacttggacatggtgctgacatggtccctccccccgaccaggaggagtggaatgttgtgatgtcacagtccacctagtaactgccgttactgcaagactggcctttgaccttacgacccagtcccctaagcgttctcaccccgtttctggttcctctggtcacagcacaaatttccagctggaaggggaatggagactatgggacctaggagcaagaggttccaggctgcctcactcccttacagatgttgacggtgggaaaagcctacacttcccccatgaactcaaaacawtgacagtatctctgggtggcaatgagagaatgggtttgatttggttttctcccaggcttctactttccagagagattttaacaattttttctgagttctccacctcatattctaattctccatggttctgggaccagactctccttcagtcagtggtctctgaagtgagatttgctcatcttctgtggaatagatcttgggaaactgaacttgacaccttgaatcttcctcatattatctcaaccttgggtactttgagtgccacaggataaatgtgggacatctttctgaagcatcagtttcccttgattctcttgagatcaagagaaaaaacatgaatgtacttagggaggacagtcacataggtttctaagagtataccagacctctctctgaaatgaggcttgggttgtcctctttctgataaattctgatttaagagaaaggctgccttctgccatgaggacacattgatataaaagtttgagaggtactggtgcacttcttcacactaacagacgtgtgaggatgtatgactaaaccacatggcatacatttcctgcctacttaatgtttacttttctacctctgcctctggttttggtccctggcagctgctgattcttggcaaaacctcagagcttggagtcagaagactgagtctcaaagttccagtattgcctttttc

SEQ ID NO: 700156 - DNA, 1054 bp, Homo sapiens
tgggttctttgtgctggcgtctccaaggagctgggtcccaaccctgtgcttccctcccccatcgtggagcagcgacttggacatggtgctgacatggtccctccccccgaccaggaggagtggaatgttgtgatgtcacagtccacctagtaactgccgttactgcaagactggcctttgaccttacgacccagtcccctaagcgttctcaccccgtttctggttcctctggtcacagcacaaatttccagctggaaggggaatggagactatgggacctaggagcaagaggttccaggctgcctcactcccttacagatgttgacggtgggaaaagcctacacttcccccatgaactcaaaacattgacagtatctctgggtggcaatgagagaatgggtttgatttggttttctcccaggcttctactttccagagagattttaacawttttttctgagttctccacctcatattctaattctccatggttctgggaccagactctccttcagtcagtggtctctgaagtgagatttgctcatcttctgtggaatagatcttgggaaactgaacttgacaccttgaatcttcctcatattatctcaaccttgggtactttgagtgccacaggataaatgtgggacatctttctgaagcatcagtttcccttgattctcttgagatcaagagaaaaaacatgaatgtacttagggaggacagtcacataggtttctaagagtataccagacctctctctgaaatgaggcttgggttgtcctctttctgataaattctgatttaagagaaaggctgccttctgccatgaggacacattgatataaaagtttgagaggtactggtgcacttcttcacactaacagacgtgtgaggatgtatgactaaaccacatggcatacatttcctgcctacttaatgtttacttttctacctctgcctctggttttggtccctggcagctgctgattcttggcaaaacctcagagcttggagtcagaagactgagtctcaaagttccagtattgcctttttc

SEQ ID NO: 700157 - DNA, 1054 bp, Homo sapiens
tgggttctttgtgctggcgtctccaaggagctgggtcccaaccctgtgcttccctcccccatcgtggagcagcgacttggacatggtgctgacatggtccctccccccgaccaggaggagtggaatgttgtgatgtcacagtccacctagtaactgccgttactgcaagactggcctttgaccttacgacccagtcccctaagcgttctcaccccgtttctggttcctctggtcacagcacaaatttccagctggaaggggaatggagactatgggacctaggagcaagaggttccaggctgcctcactcccttacagatgttgacggtgggaaaagcctacacttcccccatgaactcaaaacattgacagtatctctgggtggcaatgagagaatgggtttgatttggttttctcccaggcttctactttccagagagattttaacaattttttctgagttctccacctcatattctaattctccatggttctgggaccagactctccttcagtcagtggtctctgaagtgagatttgctcatcttctgtggaatagatcttgggaaactgaacttgacaccttgaatcttcctcatattatctcaaccttgggtactttgagtgccacaggataaatgtgggacatctttctgaagcatcagtttcccttgattctcttgagatcaagagaaaaaacatgaatgtacttagggakgacagtcacataggtttctaagagtataccagacctctctctgaaatgaggcttgggttgtcctctttctgataaattctgatttaagagaaaggctgccttctgccatgaggacacattgatataaaagtttgagaggtactggtgcacttcttcacactaacagacgtgtgaggatgtatgactaaaccacatggcatacatttcctgcctacttaatgtttacttttctacctctgcctctggttttggtccctggcagctgctgattcttggcaaaacctcagagcttggagtcagaagactgagtctcaaagttccagtattgcctttttc

SEQ ID NO: 700158 - DNA, 1054 bp, Homo sapiens
tgggttctttgtgctggcgtctccaaggagctgggtcccaaccctgtgcttccctcccccatcgtggagcagcgacttggacatggtgctgacatggtccctccccccgaccaggaggagtggaatgttgtgatgtcacagtccacctagtaactgccgttactgcaagactggcctttgaccttacgacccagtcccctaagcgttctcaccccgtttctggttcctctggtcacagcacaaatttccagctggaaggggaatggagactatgggacctaggagcaagaggttccaggctgcctcactcccttacagatgttgacggtgggaaaagcctacacttcccccatgaactcaaaacattgacagtatctctgggtggcaatgagagaatgggtttgatttggttttctcccaggcttctactttccagagagattttaacaattttttctgagttctccacctcatattctaattctccatggttctgggaccagactctccttcagtcagtggtctctgaagtgagatttgctcatcttctgtggaatagatcttgggaaactgaacttgacaccttgaatcttcctcatattatctcaaccttgggtactttgagtgccacaggataaatgtgggacatctttctgaagcatcagtttcccttgattctcttgagatcaagagaaaaaacatgaatgtacttagggaggacagtcacataggtttctaagagtataccagacctctctctgaaatgaggcttgggttgtcctctttctgataaattctgatttaagagaaaggctgccttctgccatgaggacacattgatataaaagtttgagaggtactggtgcacttcttcacactaacagacgtgtgaggatgtatgactaaaccacatggcatacakttcctgcctacttaatgtttacttttctacctctgcctctggttttggtccctggcagctgctgattcttggcaaaacctcagagcttggagtcagaagactgagtctcaaagttccagtattgcctttttc

SEQ ID NO: 700159 - DNA, 2483 bp, Homo sapiens
  misc_feature 2225, 2226, 2227, 2228, 2229, 2230, 2231, 2232, 2233, 2234,2235, 2236, 2237, 2238, 2239, 2240, 2241, 2242, 2243, 2244,2245, 2246, 2247, 2248, 2249, 2250, 2251, 2252, 2253, 2254,2255, 2256, 2257, 2258, 2259, 2260, 2261, 2262, 2263: n = A,T,C or G
  misc_feature 2264, 2265, 2266, 2267, 2268, 2269, 2270, 2271, 2272, 2273,2274, 2275, 2276, 2277, 2278, 2279, 2280, 2281, 2282, 2283,2284, 2285, 2286, 2287, 2288, 2289, 2290, 2291, 2292, 2293,2294, 2295, 2296, 2297, 2298, 2299, 2300, 2301, 2302: n = A,T,C or G
  misc_feature 2303, 2304, 2305, 2306, 2307, 2308, 2309, 2310, 2311, 2312,2313, 2314, 2315, 2316, 2317, 2318, 2319, 2320, 2321, 2322,2323, 2324: n = A,T,C or G
aaaaatactacttggccagatcattataatgtgaacttgaaattgatactcttcaacaatctttctacacagaaccaaatataacactttgaaggccagagaaagatttcactagtgaccttcatcaatacttgggagaataattaaaggagtagctgttaatagaaatactggtcatttctgcataacacaatataacaggccaacccaataaagagaaagaagctcaagaatatctgcagatcaggtcagagatgccaatttcttagtagggtctgtagagttataaaagtgacttgtttaaatatttaggaaaatgaattaaagattcaacaagaataaagaccacctagagagattttatactacaaattcattagcataatttttattacctgtctgtcagagcagttcacatcattgctattagatgatcttgaacatttacagaaaatcgaagcctgggaattgtttaatattctggggattgaactaaagatacccaggataccaaaatatttgccacagtacacgtacatgcccataagtaagagatagactctgattggactgtgttaagaattccattatattgtctcccaaagacctttataaagtgcattgagacttccatgcatttttcaagattacaaattcctaccaatgatgttgaaagctgtgttgtaaatgtactgtgacttctccaaaaaaaatgcttgccctcacttccctaagttaataagcaaaaagtcctttgagaaaggatacaaagaatccttatcgaaagcatttgtgccattataaaagtctgattttaggaaactctcaaaagacttcccaaacttttgtctactcttctgaggctctgttggtttctgggggaaaattawtatcattctcactgaatttggctcttgtaccaatttacttgaaatggaaatacttccatttcttagtaaaaatacagaaaatcaccaaatcaaacaagctttcctcagaacaattatatatatatcaatatgccaattgtgttggtactgaagtctagtgaacattaaagtaaaactaagtacagcttcagaatatatttaaattttttaataaaaacataataatttaaaataattgtagtcttacaggtttgtaaaaaatagtacagaaagtttctgcataacttttgcccagattcgtctgattttaacctttcatataaacttagaaaaattatcaaaataaagaaattataattagtaacaatgctattaactaaactgtggactttattcagatttcatcagtttttccactatcatccatgtttctagttttctgagatccaacccaggacctcacattgtagttaattgttttttctccttagtctccaataatctgtgagagcttgttagtctttgtgttttgtgatcttgacacttttgaaacgcactggtcagatattacgtaaaacataacgttgttttgggtttacctgatattttcccatgatttgattgaggttatgcatttttggtaagaatagcacagacacagtgtgcccttcccagtgaatctatcaggaaaaacaggctgttgatatgtcttattactggtgatgttcaattgttatggttattccattttggattcaacccatttcctgttgattttctctaacagacatatggtaaaaaatattactgtttgtgatggacagttctgtggtttttggtaaatctgtagagtcgtgtttccatcatcaaagtcataatttgcaacattttcatcatcaccatctctcattctgcctctttgcagtcggcccctctccacatccaacctttttgccagccacgaatttgctttcagtttctgttgttttgccttagaagatgcatttaagattcatccatgtttttgtgcgaatcaagtttgtcccattttattgccaaacagtttccattatatagatgtcacatggtttgtttattcattcacaagttgaagaatggctgctcttgttcatttttaataaagctgctataaacatttgcatacaggtttatgtccaggcttatatccttctcattaggatgtgcggcttttctaacatcatggaattgcctttgtccttttctaaaaacccagttgattatatatatgtggatttattcgtagccttctttactgcttaccattgagtatatcttttcactaataacacagtnnnnnnnnnnnnnnnnnnnnnnnnnnnnnnnnnnnnnnnnnnnnnnnnnnnnnnnnnnnnnnnnnnnnnnnnnnnnnnnnnnnnnnnnnnnnnnnnnnnncgtgttctgaaactcatccatcactgatcaccatcaacatctgtcatctaccttttgctaaaggtatctttccccttttcccctgcctgtgaccgcactattaaagagttgcttaagtttcctgatacaaaaaaaaagtatatatgaatagcaaaaaca

SEQ ID NO: 700160 - DNA, 608 bp, Homo sapiens
gtatcatatggggtctcaattttaaagaaagggtagagaatataaatcagcactagctgcttcctcatgagaacattttgttacggtaatgcaagraagtctgtgaaatgctaaatgccatggaggcaggtggtagcctcttaaagtcttaatgaaagcttgagaattttatctaattcatgtcattgacttaaagtaaaactaaacaaaaaccattctggaaaaaatgggtatagcatttacttagaattctatctaattcatatcattgacttaaagtaaaactaaaaaaaaaaattctggaaaaaatgggtatagaatttacttaattaaaaaaaaaaaggcaaaatccttcagagaagcaataacactctccacgttcttcccagcaggacatcgtgtttattaaaacatcatcgtcacttaattcctttgattatcttataagtattacatgataatttcacttttaggagtttgccatctttaaaattttgtttttagtttcaatacctttagaggtacaagtggtttttggttacatggatgaattgtatagtgatgaagtctgagattttagttcacccatcacacgagaagtgtacatt

SEQ ID NO: 700161 - DNA, 608 bp, Homo sapiens
gtatcatatggggtctcaattttaaagaaagggtagagaatataaatcagcactagctgcttcctcatgagaacattttgttacggtaatgcaaggaagtctgtgaaatgctaaatgccatggaggcaggtggtagcctcttaaagtcttaatgaaagcttgagaattttatctaattcatgtcattgacttaaagtaaaactaaacaaaaaccattctggaaaaaatgggtatagcatttacttagaattctatctaattcatatcattgacttaaagtaaaactaaaaaaaaaaattctggaaaaaatgggtatagaatttacttaattaaaaaaaaaaagrcaaaatccttcagagaagcaataacactctccacgttcttcccagcaggacatcgtgtttattaaaacatcatcgtcacttaattcctttgattatcttataagtattacatgataatttcacttttaggagtttgccatctttaaaattttgtttttagtttcaatacctttagaggtacaagtggtttttggttacatggatgaattgtatagtgatgaagtctgagattttagttcacccatcacacgagaagtgtacatt

SEQ ID NO: 700162 - DNA, 2146 bp, Homo sapiens
caggcacccaccatcatacccagctatttttttttatttttagtagagtagaggtttcaccatgttggccaggctggtcttgaactcctgacctcaggtgatctgcaagcctcagcctcccaaagtgctgagattacaggtgtgagccaccatgcctggcctggtacagcaatgttaaaaagtcattatccaacagctaaatgtaaggtgtcttagacttgatgctggacctgaaaatggacattagtgagacaagcagcaaatttaattgrgatctgaagatgagtcatagaattaaatcaatgtgaattccctgattttgataattgtactaggcttaagtaagatgttaacatctggaaaagctaggtaaagggtatatgagaattctttgtaccatttttgcaacagttgtataagtctaaaattatttcaaacttcaaaatgaaaagctaaaatttaaaaaaaattaaatcacagacaaagccatagatattttaagtgatcacattagacattgcataatttagaccactcaatccagaactgctcacctcagggaggttaaccacagctgaataaattcattaatgttttttcccttaatctgccacatcctacttcctgagtctgaagtatttgagttgagttcacttccaatcccataaaaagggaagaggaaacatgtttaaagtgggaagcaattgtactctaactggctgctgggggtgtgctacctccaggaaacagaaagccccacccctttctgtttgcacatcctaagcacttgcaaattaaaagccacggcagtgtgaaaattcctgaggaatttcaaaacgtcattattgataggaaaccaaatagagtcatatcagaaacacataagtaatttcttttcctattgcccttctttggtatcaacaccttttagccatgctatttctggctagaaaatttatagccaaaaccaggatgttcatcttctcttggtttcaggtaacacaatcagactcccaaaatatcatgtcatgctgtccattatgttctataaaccaacaatcaaacagttggaatttttgtccatcattttgtagcatacaaagttttcacaagtttttttttgcatgttgttgagggaattaaatcaatggtggcactagagaacttctcaagcctctccccatcccctgctccccctcctctgttttagaaggcagtagatgttgttttatggcatctgcactatcgacattacagctcatcaaccctctgtctgatcctaacattagccagaaacacttgggtagtactatatgttttaaagaacaacatgacatgatttgttaactagatcaagaaatacaacctcttaaactgtgggttcatacttgtgctattttgacacaaccaatgctacaaatttctattctgtgacagagtgcactagctaatggtcaatcttagaaaaataaagcatcaaggagagtcttctaagtgaaaccttagcaaaggttaattatctttacagtcatctgtcctatcatgatttaaatgtgctgggtagagctggggaagattacgttttgagaaaataaagtaaaagactcaaaggtgcattttgaaagatggcaaaatgctaagggtgttacaaaatgcttcatgattctcacctaggtgtggatattgagtaaggtcaagagctgtaaaacctttgcacacagctttgtctgtactcagatgaagatagttacaacagctccaagcaaatcataaaataagggaatcggtctttgatggccttgtcttattcctgctccacgcttcccagaatggtaccttctcctctcactgcagaagagctgtgcctctctgttcccagagccttgcccctatcaaaactaggacaaatctgatacctgtatttactttcccacacgtatccctttatactaagatgttaaactcttctagatgtgttaagacttttaattctgtgaaataaaaagctttgctttcttttaaaacggtgccagtatttagagaggaaaaacaaaccatagttctgctgagaaatcaagcattcctttctgacttcagaaagcaaagtagacaagcattgcttcttttagggaactagaggagcaaa

SEQ ID NO: 700163 - DNA, 880 bp, Homo sapiens
ccagtactacaagggtcacttaattggctccttatttttcctcctcytccaatctataaaactcaaaataaattaaatgctcattaccaactcctatagtggtggaataaagcaagaagtgtaatgataactccattagttttcatccttactagtacccatttcaaaaatcatattgggaaagacagttgaaactgtagactaaaacaagaaatattaaattacctgtaaatttcaccatacttaaccaacaaccctaccattggccatctttacctcctggtcccttgtggtataatagttaactgcattatgagggtaggggggtggatttggtctctaaggagaagtagaggccaggtttgggggacttctttgttgctgtttataataatgcaaatgaagtagtaccatctgcatattcccagagaatatctatattagttttaaaacttctgaaatgtatgtgtttattcaaaaacatttattaagagcttaatatgtccagaggagttatgctaggggctagaaacacaaagataaataacatagtctgcaatctcaagtagctcccactgtaaaataaaaaaaagcaaaaacttctaaagctttttcctttaatactaaaatgatagatttcattatatttttcgataacgctaagttaaagaaggagatataaaatcatccattatctttaccacctagaaataaccacttttaatactttttaacattatatatgcatatatttaaaaggaatgatatttgaaatatctactgttttgtaaactgttttttttgccccaggaacatttttccatgctaaaatttctgtgaatacctacaaaattggtactataatttataggtatcataa

SEQ ID NO: 700164 - DNA, 880 bp, Homo sapiens
ccagtactacaagggtcacttaattggctccttatttttcctcctcctccaatctataaaactcaaaataaattaaatgctcattaccaactcctatagtggtggaataaagcaagaagtgtaatgataactccattagttttcatccttactagtacccatttcaaaartcatattgggaaagacagttgaaactgtagactaaaacaagaaatattaaattacctgtaaatttcaccatacttaaccaacaaccctaccattggccatctttacctcctggtcccttgtggtataatagttaactgcattatgagggtaggggggtggatttggtctctaaggagaagtagaggccaggtttgggggacttctttgttgctgtttataataatgcaaatgaagtagtaccatctgcatattcccagagaatatctatattagttttaaaacttctgaaatgtatgtgtttattcaaaaacatttattaagagcttaatatgtccagaggagttatgctaggggctagaaacacaaagataaataacatagtctgcaatctcaagtagctcccactgtaaaataaaaaaaagcaaaaacttctaaagctttttcctttaatactaaaatgatagatttcattatatttttcgataacgctaagttaaagaaggagatataaaatcatccattatctttaccacctagaaataaccacttttaatactttttaacattatatatgcatatatttaaaaggaatgatatttgaaatatctactgttttgtaaactgttttttttgccccaggaacatttttccatgctaaaatttctgtgaatacctacaaaattggtactataatttataggtatcataa

SEQ ID NO: 700165 - DNA, 880 bp, Homo sapiens
ccagtactacaagggtcacttaattggctccttatttttcctcctcctccaatctataaaactcaaaataaattaaatgctcattaccaactcctatagtggtggaataaagcaagaagtgtaatgataactccattagttttcatccttactagtacccatttcaaaaatcatattgggaaagacagttgaaactrtagactaaaacaagaaatattaaattacctgtaaatttcaccatacttaaccaacaaccctaccattggccatctttacctcctggtcccttgtggtataatagttaactgcattatgagggtaggggggtggatttggtctctaaggagaagtagaggccaggtttgggggacttctttgttgctgtttataataatgcaaatgaagtagtaccatctgcatattcccagagaatatctatattagttttaaaacttctgaaatgtatgtgtttattcaaaaacatttattaagagcttaatatgtccagaggagttatgctaggggctagaaacacaaagataaataacatagtctgcaatctcaagtagctcccactgtaaaataaaaaaaagcaaaaacttctaaagctttttcctttaatactaaaatgatagatttcattatatttttcgataacgctaagttaaagaaggagatataaaatcatccattatctttaccacctagaaataaccacttttaatactttttaacattatatatgcatatatttaaaaggaatgatatttgaaatatctactgttttgtaaactgttttttttgccccaggaacatttttccatgctaaaatttctgtgaatacctacaaaattggtactataatttataggtatcataa

SEQ ID NO: 700166 - DNA, 629 bp, Homo sapiens
ctacaaatacattagaaaatatttcaaatcctcagagaatacttgtataatatttgcacacagaaaacggggaattggctatatatcgtttgaaaagtcttgatttcactcaaggtccttacatcagtcatggagatacatcatcttagaaaaggataacaactgtagtttatgaatattaaagatgttaaaaaatgatgaattataagattttattaaaatgaatatcactcacgttcacagtaatttaaaaaaaaatgttgtttttccctagggagaaaaagtttatgtatacatgcaaatacaacgttataagagcatatctcaagaaatgtattttaaggttttcaatggtcaactcctctggcacraattataccctctaatgatgtgcacttcctatgacagaagcctatgttccgagtatcatctctctgtaataatgtacatattaaggaaagtatattttatataaagcacaagatgtatcagtagagaaaagctatttaagtaatgtctcttgataaaactactcatagttaagatataaacacacatgtcctctatccagagatgtagttcctacaattccatgatgtcatgaaggcatcttctcatagagaaaatac

SEQ ID NO: 700167 - DNA, 1337 bp, Homo sapiens
cagtactgggcactcatttggagatgatgttcatttctgaatccctcacccccacccccttgatctgagagctctcagagagcaggaaccatgtcttttatctctttgttgaagcatgtcctcctgccatgaagaaggagccaataattgcaagaagagaagaggggggaggaagagaaaggggaaaagaggatgaggcaggagaagatggaggaaattaaataaagaaggacagaaaaatcttctaaaaggaaaagtagaaccaccccagattatcatttttttatgacaacaaagtactacattatgaaaaattatgtgctaatgtaaagagtgatagaagagagcagagacaaccagcaaaagacctctatgaagcatgtgctgttttctctgtgctccagtaatttaacacagcagcccagagccactaggggcaaacaaaccatacggggacaagactgagtagttgctggatataaaatacagggtaaagtgggagcttggtcagagatgaaaagcatgggaaccgagttataatacttagatctggcattcaaggacttgcttaaggaggactggggccagaatcctaactggggccaagtgaatggcaccggtcgacaggcttaaagaagggcaggagcaacaagacaaggtcattatatttactcttaccttctattaatcttcaattatttccatttttgctcaactaattttctggaaatatcagtaaggcctagaatggtaatacagccagtatatctaaagatgggaggcaaagtgtcaccagttgggttctctagaagcagacacttgagatggagtttgagtttccaagatttattgggattccaagggaggacgtaggattgaacagagggagaagtcaaactgcagcacatccctgacaaaamcttagccaatgtgaaggggagctctggaggaaatattgttgatcataattgttcatgtcaggtcaaagtggccaagcttctatacccctgtcttgctctgtcaccatatgcagcctatcctataaaggtatgacctcagaaaacttggctctctatagatgagcccaacccttcaggagttgatggcaggaagtttatgctgaccacctcacaactgaaagggaaactgagtggtgcatctctgtattattcatagtccaccctttgcactgctcaaatccacttctcatatgcatttagggaacatctattcaaggattctattgggtctctctacttaaatggaagttcattagagagtctcatgggatgaattgtgtccacccaaaattcatatgttgaagctttaaaccccaa

SEQ ID NO: 700168 - DNA, 1222 bp, Homo sapiens
  misc_feature 2, 3, 4, 5, 6, 7, 8, 9, 10, 11, 12, 13, 14, 15, 16, 17, 18,19, 20, 21, 22, 23, 24, 25, 26, 27, 28, 29, 30, 31, 32,33, 34, 35, 36, 37, 38, 39, 40, 41, 42, 43, 44, 45, 46,47, 48, 49, 50, 51, 52, 53, 54, 55, 56, 57, 58, 59, 60,61: n = A,T,C or G
  misc_feature 62, 63, 64, 65, 66, 67, 68, 69, 70, 71, 72, 73, 74, 75, 76,77, 78, 79, 80, 81, 82, 83, 84, 85, 86, 87, 88, 89, 90,91, 92, 93, 94, 95, 96, 97, 98, 99, 100, 101: n = A,T,C or G
gnnnnnnnnnnnnnnnnnnnnnnnnnnnnnnnnnnnnnnnnnnnnnnnnnnnnnnnnnnnnnnnnnnnnnnnnnnnnnnnnnnnnnnnnnnnnnnnnnnnnttaaagcatctccgaggcaaagtaagaggcatagggaggggattttcctctgcaggacagtttctagaggtttttctacatgaataaaaaaaaaatgagaaagtagtacaaataaaagaaaaattcctgcagtgtcccaccattttgcaaagcattataaagaaatgaaagagttctgctgactatgaccattaataatagttgtttggatgatggatgaatagacagattagatagattagatagatagatacatagatagataatatataggcagacaccagtaaatttattttgaaaataatattatatccctgtcctcttagagactgcattatagggcagatgaacagcaaaacaaatgactttatttattataaaattaaggcgagctgaatattctccatgtgtcccagccagatacactctccacccctctttgcctggctttgggccacaggagactgacctgtatcaaaagttcctctccttttggttccacttggtttcagtcaaagggaagtactagcaggagggcaggaagggattcaggttggagtactaattaattaatatattaagggcatagcacagtattagctgaataatggtagctacttctattaagaacaaaaacaaaaagtgaagaaggtccctaactaccaagcggtgctttttttactctttctctcagctgctgtctacaatcttcccaatataaatgtgccaatacaaacttgattgttttttaataatgtttacagagaggataacttgtgtgccttgacttctgctttgtagcaagcacaccgaattattcatttagtttggggctctttcttttaaaaagcaatcatcatcttcttgaaagaaatttttattttttccagctatcagtcctgtcagactttagaagttcacaatcatggaagaagagcaaagcaatttagataaaatttcctgttctgaaggaaaracttttgttattaaatgtgaggcattcaatagtaactgccagctgtttaatcaaaaagttattgttcattgtggaagaaaaattgaagtttggaaaacaatgggctacaagctcggaaagtgtctgatgaagttccaaatccttt

SEQ ID NO: 700169 - DNA, 553 bp, Homo sapiens
ccttccccaaacaaagcagctacaactctaccaacacttcttcataggacatgatctcacatcagagcccattgtgctttgaccacgtttttcttaaagtgaggtgctcagagctaagtcaacattccaggtgagacatgaccagggcccaggagagcagaattcaacctccttcatttttctgtataccataattaggatgccactgtgatacaagacaatcttagtactgaattcctagagcaattattttctgagcaacaggcttggtttttaatcatacattgtcctataatatcacttcacttgtcatgaattgttacccatttcactttatataagtgaactatrtatgtgtgtgtgtgtgtgtgtgtgtttcttcatactgtctatgttgggagttccctgaaatatatgtttttagacattttaatgactcctgttaaatctagcacgtttctgggaccataaaaatgaatctaattcgaatatttagggagaaccaaagcaaagggacagcatttattaaaatttaaaatggccactgtggaaa

SEQ ID NO: 700170 - DNA, 553 bp, Homo sapiens
ccttccccaaacaaagcagctacaactctaccaacacttcttcataggacatgatctcacatcagagcccattgtgctttgaccacgtttttcttaaagtgaggtgctcagagctaagtcaacattccaggtgagacatgaccagggcccaggagagcagaattcaacctccttcatttttctgtataccataattaggatgccactgtgatacaagacaatcttagtactgaattcctagagcaattattttctgagcaacaggcttggtttttaatcatacattgtcctataatatcacttcacttgtcatgaattgttacccatttcactttatataagtgaactatatrtgtgtgtgtgtgtgtgtgtgtgtttcttcatactgtctatgttgggagttccctgaaatatatgtttttagacattttaatgactcctgttaaatctagcacgtttctgggaccataaaaatgaatctaattcgaatatttagggagaaccaaagcaaagggacagcatttattaaaatttaaaatggccactgtggaaa

SEQ ID NO: 700171 - DNA, 553 bp, Homo sapiens
ccttccccaaacaaagcagctacaactctaccaacacttcttcataggacatgatctcacatcagagcccattgtgctttgaccacgtttttcttaaagtgaggtgctcagagctaagtcaacattccaggtgagacatgaccagggcccaggagagcagaattcaacctccttcatttttctgtataccataattaggatgccactgtgatacaagacaatcttagtactgaattcctagagcaattattttctgagcaacaggcttggtttttaatcatacattgtcctataatatcacttcacttgtcatgaattgttacccatttcactttatataagtgaactatatatgtgtgtgtgtgtgtgtgtgtgtttcttcatactgtctatgttgggagttccctgaaatatatgtttttagacattttaatgactcctgttaaatctagcacgtttctgggaycataaaaatgaatctaattcgaatatttagggagaaccaaagcaaagggacagcatttattaaaatttaaaatggccactgtggaaa

SEQ ID NO: 700172 - DNA, 553 bp, Homo sapiens
ccttccccaaacaaagcagctacaactctaccaacacttcttcataggacatgatctcacatcagagcccattgtgctttgaccacgtttttcttaaagtgaggtgctcagagctaagtcaacattccaggtgagacatgaccagggcccaggagagcagaattcaacctccttcatttttctgtataccataattaggatgccactgtgatacaagacaatcttagtactgaattcctagagcaattattttctgagcaacaggcttggtttttaatcatacattgtcctataatatcacttcacttgtcatgaattgttacccatttcactttatataagtgaactatatatgtgtgtgtgtgtgtgtgtgtgtttcttcatactgtctatgttgggagttccctgaaatatatgtttttagacattttaatgactcctgttaaatctagcacgtttctgggaccataaaaatgaatctaattcgaatatttagggagaaccaaagcaaagggacagcatttattaaaatktaaaatggccactgtggaaa

SEQ ID NO: 700173 - DNA, 628 bp, Homo sapiens
tacccaggacacaaaggagaacagggggatggcgggagggatgagctgagaatgctgaaatatttccccccagggcctgtgatccacaaagctgcctcttttcccacctggcctcaggatgcactgggtgctggcctgcctgcctgctcctcacccctcctgacctgctaatcaccataaagygtaaaccaagagaccagcacctgtttgtctttgagcctccatgtaaaaatacgtaggagcacattttaaaaccacatagcaaataattgattcataaatcaaagttccgttttatattctaccataaataatcatcactggccagtattgcctgagcctgggtccccggcaccaaatgaaagtcaaacacattatttgtttgttggcattggtaacaagccaaagagcatcatcttctatcacagactatggatggaagtagaaatcataaaactgcaaatgttctttcctaatgcttttaataaaaataaatatacctattgtcagaagttcaaccaaatgagttttacggaataaaagtgccattgaggagggggtgatcagagtgccgggtggatagagaacttgtggcctttcctttcaggcggtgggccaagatcagctc

SEQ ID NO: 700174 - DNA, 680 bp, Homo sapiens
gagcaggtgagaccacaagcttctccttcatacccccaactcctgcaaccttggggcatcatgggagcaggaggaggttgggtgtttcagaaacattcagccaggtaaaagaacatttagtaatggtgtgcttgtcccaggatgagggagtgtaaatccatacaggtcagcgctgtcaacggatgtcctgcagaacccttttcccctgcactgtctgataagttggaaattgacagtaactgttcagacacttttatggcaatctgacgttgttgcaacatccaagtgtgtggtctatggagccatcccgtgaaacagggaggaggcctgctcacctgctgtcacactcgcacgctgagtcacagcaggtgcaagctgtgtgctacatgtgggagggagaatgagcggccgacaagaagccaacaatgcataaagttttcagaaaatcagcatttgggtattttaacttgctactttcatgatcgttttactttttaatcaagcytattatttaatttatagctaatgttgttaactaaattaaagaagttaaatttgtactatttttgaccctaattgataagcagtaaaataagcttttctgggctttatttttttaagaaatcaatcataatttctgattcaagaaatacatgattattgtagaaaatttggaaaat

SEQ ID NO: 700175 - DNA, 1401 bp, Homo sapiens
tgtttatttcttgccttggtttgtttctggttctctgaaccccatcatctctgcttacayaggtgtggcccccatcacacacaccccttggaaaacattcctacttttccttgtcccagcatactctcaaaggcatgtatttttcaagtgtaggattcccgatcggctgctgaggaaggaggatgtgcttctgaggatactctaaagactatcctggcagcccataaaatcaaaacacagcccctctggcctgggagacagcagagccagaagagctcaaaggatctgggtaggctaaagatgagctcaccaggccctgggtgggacccacagcttttactattgcctccacccaccatcccatctcagcctttgcccaacacagggaggaagtccagaactactgtggataaacacatgacaacccaaagacacaaacatagttatttctaagcatacactacttctggtttcctttccccttttctttctcctttcccctttcctttcctttcctgtccatccctccctcccttctttccctccctccctccctcccttctctctctctctctctctgtctttctttttttgagacagggtcttactcttgttaccacgccggagtgcagtggtatgatcgcagctcactgcagccttcccgggctcaggaagcaatggaaatgagtctgggaggtgattctcccaactcagcctcagtcccagggagctgtgactacaggcacgagcccccatgcctggctaattttttgtattttctgtagagatggggttttgccatgttgctcaggctagtcttgaactcctgggctcaagcaatttacctgccttggcctcccaaagtgttggtactacaggtgtgaggtactgcgctcggcctacttctggttctttcggcgaattggtccgaagaacaggattgggaatcagaaatttgtccaccatgaccctgtttaatttaaactctaactcacaaaggacctggggcttctcttccacacttagtccatgggatactgcaaaaccaacttgggagtcaactgctaactgggaagattcctttacataatgggcttacctctgttgcctcacctgtagtaagagaggctaggatcacccatctcagtcccttgctagtgctacaatttagttctgggaatgcccctggggttgagggtctgtagagtctgagactgaagaggttcctggcaccaaatcatctgtgatgttgcaaggtgcagtatacagctgctagcaaaatccaacaaaatctggttgtactaggagtgctcctattttaatgtgaagtccagccccaacatggagagaggagttaggttaattctgccaggtaatcaatggaaatgagcctgggagtca

SEQ ID NO: 700176 - DNA, 1401 bp, Homo sapiens
tgtttatttcttgccttggtttgtttctggttctctgaaccccatcatctctgcttacacaggtgtggcccccatcacacacaccccttggaaaacattcctacttttccttgtcccagcatactctcaaaggcatgtatttttcaagtgtaggattcccgatcggctgctgaggaaggaggatgtgcttctgaggatactctaaagactatcctggcagcccataaaatcaaaacacagcccctctggcctgggasacagcagagccagaagagctcaaaggatctgggtaggctaaagatgagctcaccaggccctgggtgggacccacagcttttactattgcctccacccaccatcccatctcagcctttgcccaacacagggaggaagtccagaactactgtggataaacacatgacaacccaaagacacaaacatagttatttctaagcatacactacttctggtttcctttccccttttctttctcctttcccctttcctttcctttcctgtccatccctccctcccttctttccctccctccctccctcccttctctctctctctctctctgtctttctttttttgagacagggtcttactcttgttaccacgccggagtgcagtggtatgatcgcagctcactgcagccttcccgggctcaggaagcaatggaaatgagtctgggaggtgattctcccaactcagcctcagtcccagggagctgtgactacaggcacgagcccccatgcctggctaattttttgtattttctgtagagatggggttttgccatgttgctcaggctagtcttgaactcctgggctcaagcaatttacctgccttggcctcccaaagtgttggtactacaggtgtgaggtactgcgctcggcctacttctggttctttcggcgaattggtccgaagaacaggattgggaatcagaaatttgtccaccatgaccctgtttaatttaaactctaactcacaaaggacctggggcttctcttccacacttagtccatgggatactgcaaaaccaacttgggagtcaactgctaactgggaagattcctttacataatgggcttacctctgttgcctcacctgtagtaagagaggctaggatcacccatctcagtcccttgctagtgctacaatttagttctgggaatgcccctggggttgagggtctgtagagtctgagactgaagaggttcctggcaccaaatcatctgtgatgttgcaaggtgcagtatacagctgctagcaaaatccaacaaaatctggttgtactaggagtgctcctattttaatgtgaagtccagccccaacatggagagaggagttaggttaattctgccaggtaatcaatggaaatgagcctgggagtca

SEQ ID NO: 700177 - DNA, 2095 bp, Homo sapiens
tggtgtcttcccccaccgtccccccaccccagttccccggcgcccaggcagcacctgtagatgaacctccccttggccctactttgaagggggccccttctcagagcctttaatggccagaccccaggattgagttttcttgacctgacctctccaaagtttctctctccttccatcactgctggtctcatatcagtccagctcacccccgccttcctccaggaaaggactcctgacctcattaggctcgcgccccctcccgctgacctccgaatgggctgctacaagttcatggttcacctacagggagtggctgcgcacaccagtcactgaggtgagtaagtgcttcatctctctcaatcccggaacagcagacaccaccgtccctaggtgacagagaagaaacagaggttcagagaggcttagtaacatgccatgactcacaccagtggttagttaaaaaaccaggacttgaatccaaggctgacttgatgacygatctgaaaaacttcgctttgtttcatgggtcagcaaactatggtttgagctcccaagtagctgaggctacagttgacctgtgggcccggttttacccactgtctgcttttgtgcagcctgagagctagaatgattttttacgtggttgcagggagaaaatcaaaagcagcataacactctggcacatgtgaaaatcatatgaaattaaaatgtcagtgcccgttaaaaaatgttattgaagcacagttgtgcccagtcaggtatggccaagttgggtagttgtgacagagacaaaagactccaaagccttattctttttacatctggccctttacagaaagcatttgctgggccctgcgctaaagggttctcccacagccccaggggccctaaacacactgcctgaatctaggggttgctggaagaccctggaggaaaagtaaggtggatttcagccctttgtacacccaggtactcaagatttgctaaaggctcaagacctgaaaacatccagaaaatgcctctaaaccaacccctactggtgttccccgctgagccagactatctgtccgagggtctgcggtgggacaccttggtccctacaggatctgactcatctggtggagtgctcttccggtcttgtttagttttcaaagaaacaacttccaggaaaacagcagaaggaagaaggcttcatgggaagaatgagtcagagagttgttatggggactgcatgggacccagaaagaaaatactaagcctgaaaggatagcaagtgacaggtgctgatgacctgcaactcttagggggaggaggagggaaatagggaattctggaaacctgtgtgggacttttgcataaattagaaaaaggtggccgggcgtggtgactcacgcctataattccagcactttgggaggctgaggcaggtggatcacctgaggtcaggagttcaagaccagcctgaccaacatggtgaaactccgtctctactaaaaatataaaaaattagccgggcgtgggggcgggtgcctgtaattccagttactcgggaggctgaggcaggggaatcgcttgaacacaggaggcagaggttgcaatgagccaagattgcgccattgcactccagcctgggcgacagagcaagactacatctcgaaaaaaaaaaaagaaggaaagaaaaaggctccccttcctcctgcccaacaaggacgcccttggtgagtggggagggagctgtagttcagccccgccttgcgcccacccccaggccagacacgcttatgtagtgctcccatttcacagctgtctgtggcagcctgacttgacctgacagtaggcaggtcctgaaccagcttgggtttcctgagtttccctctaactctgctcctcactcaagccagtccaccagccttcctgggtttgtttcttcttctgtataatgggaatgtctgtcctgtctccctccggcagttctgggtatgcaatgatgaagcagatgtggacaccagggtggagggttttgatgtcaaccaaaggaccaaatggaagccttccatttggggtcctccagaagctgctatttacagaaaaggct

SEQ ID NO: 700178 - DNA, 1050 bp, Homo sapiens
tccccaaagactttactgggcccacgctaggcatcagcctggggattctcctcccaggyctccaccagctgctgagcacagcggaggtggggaggcaagagcatgtcctatcctgcctcctggcccccagccccagtaacacagaactagggtgcctattgtttcaatggcagaaatccccctcccctccgacccctgccccctgcagcactgctccccatcactgggctaaacgaatgacccgccactcagcaggtgacgacttactcctccttggccggcccttcagctcctcctcctcacccatcctgactcagaggcctgtcagctgccactgcccccgaggcctggcagatttgggtgggaaggagctatctgggtgccaggacctgaggggctggccatgccctcactccttactgacctgacctttagcagggcctctgagcattctctgatctagaaatgccacatgtacacgcatgtgtgtgcacacacacacaaacacccacacactcacacccagccgctctatgacctgatgaaacagtctgggtgcagggctgaggcaggccagggaggagagttagactgagcaaaagcaggatgtgtgtggagcagcctcctggcctctctcccgcagaggcacttcctggtactggagggcaaagcggcccggggttgggaaagagaccggtgctgcttgctccctctccagaacaggcattaattctggctgccccttggtattggcctccaactttatagttctctccctttctttctctctctctctcctacacacacccctctagactcctcccctgcacctcctcaaaatttctcacccaccctcaccccacagaaggagcatcaaagccccacatagcctctggcctctctcaacacctaggagttgagatcaggcccttgtggccagtcttggggacttcccctaccagggttggccctcttgggtccacgcctctttggctagacttctgatcgctctggcggccactccgcagtttcaccacgcctgctcctgcc

SEQ ID NO: 700179 - DNA, 1050 bp, Homo sapiens
tccccaaagactttactgggcccacgctaggcatcagcctggggattctcctcccaggtctccaccagctgctgagcacagcggaggtggggaggcaagagcatgtcctatcctgcctcctggcccccagccccagtaacacagaactagggtgcctattgtttcaatggcagaaatccccctcccctccgacccctgccccctgcagcactgctccccatcactgggctaaacgaatgacccgccactcagcaggtgacgacttactcctccttggccggcccttcrgctcctcctcctcacccatcctgactcagaggcctgtcagctgccactgcccccgaggcctggcagatttgggtgggaaggagctatctgggtgccaggacctgaggggctggccatgccctcactccttactgacctgacctttagcagggcctctgagcattctctgatctagaaatgccacatgtacacgcatgtgtgtgcacacacacacaaacacccacacactcacacccagccgctctatgacctgatgaaacagtctgggtgcagggctgaggcaggccagggaggagagttagactgagcaaaagcaggatgtgtgtggagcagcctcctggcctctctcccgcagaggcacttcctggtactggagggcaaagcggcccggggttgggaaagagaccggtgctgcttgctccctctccagaacaggcattaattctggctgccccttggtattggcctccaactttatagttctctccctttctttctctctctctctcctacacacacccctctagactcctcccctgcacctcctcaaaatttctcacccaccctcaccccacagaaggagcatcaaagccccacatagcctctggcctctctcaacacctaggagttgagatcaggcccttgtggccagtcttggggacttcccctaccagggttggccctcttgggtccacgcctctttggctagacttctgatcgctctggcggccactccgcagtttcaccacgcctgctcctgcc

SEQ ID NO: 700180 - DNA, 801 bp, Homo sapiens
atttttaaaaattatayttttaaataaaaaaaagaaaaggctttccacatccagaattgtgtactaagcctcgctccctctgagaaacagcatatacagatgcccacagctatgggccttcttccttcttctgctccaggggcaagtaaaaggaggtgcagtgaggcaaaggggtggaggctcaggagagtgataggggaagaaatgagcagagtttcaggagatgaaacagagcaaaagtttgaggtctgagaccagtgagattcagaggcaggggctgctgggggcagggactgtgggggcaggggcggtagggaatggaggaaagagcatggatctggggctctgctgctcaccagttaggtgacctgggcaatccccaggcctctctaagcctcagtttcctgagctagtggaagcccctaggtcacagggctattgtagggatgggtgtgctcctgaggaaaactagcatgagcttggcaccaggcaggtgaggccatgtgctgctctctgggcccccagcttctgtcccccagaccctggtgtcagacaggacctggtgagaaatccttgcggccctagcctgcctaagctgtggaggggcttgtccaggacctgccaggcagaggctgcagaagggttcacttggccttttcagtcctctcagtcccttactgtctgcctctcaagaacatcctggcacttgctgctccacagccctgctggggtcctgggtgggactttctgggggcagaggaagagattccagggccctgcctgtgacgagctcatagtcta

SEQ ID NO: 700181 - DNA, 1010 bp, Homo sapiens
gggtcactgtctctcattattctagctgctttcctgtggacatgcctcaccctctcttaaaggatggccaataggctggatcacaaatctcctgcatggtttgacccgcaggactattactttctctgttctgaactggagttgcatcacactgttgactcatatggagcacaaagtcaactgaaaccacagcccttcttttttgacrtggtctactgatggtggtgagtcatctttctcccactttgtactcagtacttaagccaagatgtgttttctttgtttattttaagcccaagtatatccctgttaaattttatcctcctgttaagttttatggtctacctttcatttgccgagatcttttcatattctcagttctgattaaaaaaataaaaaaaccaaaaacttattgcctgcttactatgtgctaggagctaaataagatcactgcccttaaggagtttatagtcagtctagtttgagaaagagaaatgcatgaacacataattccaatatagtggtacaaatgataacctaggcctcaaagaggaagacaggtgacaatgtgttagcaccaccaaaggcaggggaaccagctgagcaaaggctcaacaaaggcatgaaacagaacggaccatgtggggaactacaggccatcccataacactggagcataaaatttgaggtgggaaagggcaggagatgaggctagggaagaaatgtggctagagtacagaaagcctcctagacaatgtgaagcagctagttctgtatgcaacggaatgccactggggggttattttaagcagtaaggtcaggggcccattttcactgaagtgctcttatcgttgaggaggcaatattagaggcagggagaccagttacaacactactgcaccgtagtccaggagagaaataaatgacgagggccttaagttcagaaggaatcaggagaaggtgggtttaagaaacgctgaaggtctgaagccaaggtgatcatttaaaaa

SEQ ID NO: 700182 - DNA, 633 bp, Homo sapiens
tgaggctcagctgggtctgtcagtaccctaaagtcatatagctgagtgattccagagctcctactctcaacattgcactttattgttccaagtaaaagattgcattcaatcctgttcagttactcagtcatctagcatttagatggcaccaactgcatgcagccactgagtaagccacagccttgatttaagtatcttgtggccgcccagctggcactatgttggggaaggtggggggcgggaagcaggagagttgctgctccccaagagcctggaggtgtggggaaatggggctcagccacgggagattgtgaatacaggttctgccaccagccacttctaggcgtggctgcataaccgtggatgattcacttaacctctgtctgctggggttctggctcccatratggttagaacaccaccttctaggattggttcaaggatggcatggcataataagaacactttgagggagggggtttgacagagtatactccataaattatggccactgttattattattattattgagatggagtctcagtctatcacccaggctggagtgcagtggcgcaatctcagctcactgcaacctccggctcccaggttcaagtgattctcctgcttcggc

SEQ ID NO: 700183 - DNA, 664 bp, Homo sapiens
ggactaacaaaaagccctccaggaagtaaatcaatctcccccaagcttcctgaacacctacactctccttcatctaaggcagatgtcctgaagaggtctctgctgaaagggatcagttgacttatcactgtcaccttgctgaggccagggcaacagggaagataagtgttgactgggaagcaatacttatccaagaaagaaatgggtatttaatacctactaggtaccaccaggtgatttcacaaacaacctacctgttcatcacaaccaygcaaaatgagtgcttcattccccgttattgatgaggaaacaaaggtcctgagagaggggccaaggtcacagagctgtattatgacaaagctgggaacactcagccaatatttaataataatactatcacttagggtactattatcattcccattttacagaagagactctgaggcacagcaattaaattacctgtaagggccaagaagggtgcccctgaggcctgggctgttgatcccctcatttttctgcctctgcatgagaagcaactggttggaaagtcccaccagttctgagaattcatgttctgcccggattcctgcaaatgagtagggaagcacgaccaaggattctggtagctttgcataggacttaaagactcacattattttga

SEQ ID NO: 700184 - DNA, 627 bp, Homo sapiens
ttgccaatattttcacttgctttctaaatgcttggattctctagagctagtttcctctaccctctgcgtcccccagtctcctttcctccccttccctgcttttctttctctctgaatgatttgatttattctcatgggcttaacttcaccttttttttctgatgactctcaattttataacttgaaaccggacctcttgtttgagctccaggcttatataaccaacagtctacttgacatctgtatctggatatcttacaagtttctcaacttgaacttgtgtgaaaaggaacttgatgttccctgtgccttctgccctgtttctccctcagccttcattatctcagtaaatagcatttcctttgatccagttgcctgagtccgaaatctaggaatcattcttgattcaacttttgttcttatctccatacccagtctatcagtcttaaatgagtgaaattctctctactctttccttttatctcctgagagtcattatcttatactcaagctctgcaacagtctgttgggtttatgctctgcarcagtctgttgggtttataatctactgctttgccttatcaaggagaaagatctaggagagggatttcaacttgatgactcttg

SEQ ID NO: 700185 - DNA, 1789 bp, Homo sapiens
tccccatacacatctcccactcagatctccaaaatccactctgctttgatccaggtccttgttctgactggagttatggagggtcatctggacatttcccaggggccggtagagccactgctccttgggcctttttcctgaggacaagaggaagaacagcgactatttcccctaggaatgccaccacatgcaccaacctgctggtcacccacctagctgcatgttctcacagagcagtgctccttaaatgcagattcttgggcatactttgaacctactaaatcagaattttcaatggcaggacttgggaatctacatttaacaacctcccttaggtaatattaacatagagttttatgaagctccaaagaataccaaagcatatggccagccactcacctagaagctgcagacagctggatgagtgtggcttgaccattcattacccagcttgaaagcctccctgcagcagggccccttatacatgctacaggtcaagcagaaatgaattgaatccacctgttcctgtcaggggcacatagcacagggacaagggatgaggggtttggggagacagactctcagacaagtaatcacctgggtttgagtccctactctaccacttaaccaactgtgggggcctcacatcagtttcctatttttataaaaatagaaataaacactcagatactcaagaaaataaaataagttatttcactcagcacagagcctggcacacagtagacacttggttagcagtgaaactccatctgccaggataccacagagataagaatgatctcttatcagcagctattgttaactctggttttcagggagaataacacattcatctagttgtctgagaaagattttgttttatatcccattgttgaggtgaaaataagattctatcctcttgggactttgggggctgtttgtttcagccattcagagagttctaagtccctgggagcagcatgccctggaaacagaatacctcgcttttccaagggtggagtggtcatcccgactgctcctccccagaggagaggtctgacatggcatgggatagaggccagcagctcctctctcagggacatgtcaatccaagatgccaggacaaatagccttgttgtttgttcttgttctccggcagctaagtctatgccgttacaaagtgctttcccatgcatgaatccacaccacccactcgactgtcctgcaaggctgcagtgtgacgatgtcaacaacaatgatggcaatggcatctttgcgactctctcccttgcctcctccaaatctttgctcaaatatcatcttctcagtgaggctaccctgcccaccctattaaaattttgatctgtccacatcacagcaatccctgtcctccttaccctgctccattctttaggcttttttctcatgtgtgccaaccatgagaacgcactgtacagaccttcaactccaggtcacatagttgaccaagggcctcagctgctatgctgtgaaacccatcactgyatcggagctgctaccccacctccccagggcagttgctggccaaagactaaggccatcatagagacatgggactcctggtgtccagcttttgcttgaggactgactccccctcatggcttcagcaagccagggctcctccacccaaccttctctctctctcctcactcaaggtcacatttgcatggtggactgggggctccctggagccttttctggcagcctccctttctacctcccacaggcatgtcctttaaagaactctttg

SEQ ID NO: 700186 - DNA, 662 bp, Homo sapiens
aagtcttcttcaagacttggttatggttgtgcaagaaatagataattgaggtcatttatctcataggaaatactcattacaatgtcaaatataggcctcacttctctgttcccatgcctttctgcatgcactattacctttcatttcaacgatacatacagtatatttttaggacattttgagaggcagcaaactcaaaatatgtagtaacaataatgaacctaacatatttgaggtgatggcaagatgaacagaaataacaaaatttacaaatgggctggctattattatatatttctgttcttgtaggtcgaaaacagttcaatattggcaatttcatattgtttaatcctgtatgtcatgattgccatatccccaaaagtgattgtaaaacaccattyatatgacacatgatttcagagacattacaatgtggaaaaaaatgtgtaaatcagaatttaaaaatggtatttttcaattaacgctttccctgaaaaaaagttatatatgattttaagaattattagtgttaatgtcagacatgagaaaaaattctgcgataagaaaaccgataaggaggatagtttcactgagtatttcaaagacccattagaagaaatgtcctctacctgtttcagcaatacaacggtgtcttttcagtt

SEQ ID NO: 700187 - DNA, 1932 bp, Homo sapiens
ttcgtttgaagaaatacaattcttttttttttttttttttttttttttttttgagacggagtcttgctctgtcgcccaggccggactgcggactgcagtggcgcaatctcggctcactgcaagctctctgcttcccgggttcacgccattctcctgcctcagcctcccgagtagctgggattaaaggcgcccgccaccgcgcccggctaattttttgtatttttagtagagacggggtttcaccttgttagccaggatggtctcgatctcctgacctcatgatccacccgcctcggcctcccaaagtgctgggattacaggcgtgagccaccgcgcccggccgaagaaatacaattcttaaactttgtaaagaatatataataaagtaraaaacagtgtaatgctaagtgaaagaaggataaaaaaactgcacaatccctcttatcacaatttagaaaatatatatgaaagattaaaagtaatatcctacagtaaatggtaatattatgggctaatttaattttcttctgtaaattttttctttgtctatagttttacaaaactatatgctcattataaaaatttaaagtaatggatattatatagaaaaatacagtcccagaaaataatgtccatgaagatttgattataaattttagaaagcttgatctgaaataccacaaggaaaccatttcctttatattattctaaagctaggctcatgtttgaaacaatgaacccccctttccacttgccctcgttagtgttctgataaaagcatttcaccaaagttaggattaagggggctgaaggtggggggcaccaagttacaccaagtcatattttatgttttaaaaattttacaaaggtacagcattaaaaagacatctgttccctggctaaaacttatgcaaattagaatcattttagagatatatttgaggaagtttgcctttcacttcttttaatgcacatgtttcagggcaattagtatgaaacatttaaagtgattagaggtttatagatacactgaacattgcaggtctttgtagcataagcccatttaatgtgaatctcctattgtctgaaataggtcagttctgagagaggcccattataaatgaattctaatgatgtgaggatcttaagtatcattcatattaagtggagttcttatctaaaatcgtgtatcaaagcttgcagagatccaaaaatccctccaaataatcttcgtattataatcagcataacttatggcagagcttgtgaaatcctgccagcaattttgtgactagtaacatagaatccccaattcacctttgggcaaagcagcaccagcaaggcggccagctgttcaaatcaacacaactatctgcaattaggaaatgactaactaccacaacaaagtaatttttaagcgggggagggcatcagttcttctcttaataaaaaggtatacctgcatggtgaatgcaaaaaactcaaataaaatacccactttgggaactatacagacaaggtaataaatagaaaggtgtctcataactaactggcatctgtaccaatataaattcttccgaggagactttttttaaagataaacacccacaagcacatcaatttaggagtcccagcttgaacagatccatcctcccaccgccatcttagcatcagccatcttgaattcctctatcccattgcctcctcacacagctgcaacctggcttctaaggcagactttctagtggagctttcccattagagcaaatgatggcctccgcaaggtggaatcccaggattttgcttggtccttgtcttatgaccagtgcctacagcacttcacattttaaaatcatactctccctccctggtattctctgaaagtgtctccccgtattccatcactctgaggtccagcatggcctgtgctgc

SEQ ID NO: 700188 - DNA, 917 bp, Homo sapiens
tgccttcggccaaatccctggggcctagaacagtacctagcatgtacagaggcattcaataaacccttgttgcttgaataataaatacaatgcattatacacacacatagaaagaggactttgtgcccaataaacaaaatatccattctttgcaaacatctttgaacatttacatgaatagaccacagaacacttttcaatcaagttggtgagactataaattagtataagctttctaaggaataatttgataacatttatccaattttcaaatgcaaatatcctttgaaccaacaccatttattgaaaagcccttcctttccacactgaatttcattggcatmtttgtgataaattaagtaatcctctgtgtacgggtctatgcctggactctattccattctgtttatctactgtctattagatcactttcaatgatgatataaaggctcatatggacctgaaaaaggtttctttccacagcattatttttttctactagtctatgttgtggagctggttactctatacaataatacatttagtaaagatttaatactacggtaatatagaaaatgtttttggttttgaatttttgtaaattaagggaactaccactttgcctttttttttttattttttatttttttgagacagagtcttgctctgtcacccaggctggagtgcagtggcgtgatctctgctcactacaacctccacctcccgggttcaagtgattctcctgcctcagcctcctgagtagctggggttacaggtgcctgccaccacaccctgctaatttttgtatttttagtagagacggggtttcaccatgttggtaaggctggtgtcgaactcctgacctcatgacccacctgcctcagcctcccaaagtgctgggattacaggcgtgagcc

SEQ ID NO: 700189 - DNA, 2177 bp, Homo sapiens
aaccccctggacgtgcaatttacctataaaacaaacctgaacatgtacccttgaacctaaaataaaggttaaaaaaaaaagggattaaaaaggcgaatttgagggacaggaaaaataactgggccacataaatttatagctatattaaaaaaacttaaaacagtttaacatatatatgagtatacacgcaaatataatactgagatacataaatgcaaatataaacatatatacatacatatagataaatatatatactttatctgtatgcacatagagactatatataatatttttcatttatagtgaaaagcaagattttaaattaacaaattgtgagttttcacaagtttatacacctgtgtaattaacaccccattaggaaatagaatatttccatgaccccagaagtagccttcagtttaaaggcttttaaaaacaaagttggaagataattttaactcaacatattctgcttaatctattttcttttttaaaaaagcattagcacagatatatagaactattctttaaaatattattctaaattctaaaattaagtaaagttttaaatactttatagaagagataaaacatttgtttagtcatgattttctctttatactagagtatagctgacttttttcatcgagacagatgtgtgtttttttttttccaggttaaacaaattcaaatattccactggtgccagcttttctkgttttcttcatataccattgttcttgcaagttagattttatggttccatttcttcaggtatgtttacagctgtgcatagtttctgttgtttgtctaagctcgttgtcttgttagtgcatcttgttagtggcgttgctgacttctttgctgtgcccttccaaacctgatattttaagactctttacatttaagaaaagtttctctggtttaattagtggtgcccaacagaggttgattttgcctctggggggacatttggcagtgtctggagacgtttttgattgtcaccactggttggggtgggaggaggtgaagctgctctggcatccagggaggaggccagggatgctgctgtctccctgcaatgcacaggacagctcctccccaacaaaaggaattttctggtccaaaatgccaatagtgctaagattgagaaatcctgacttagatgatttacaaagtttagtgtagttgtcttcttcaggtgaataatatttccagcattatgcatgacatgcagattcctatcagaggtttattttgaggccctccttttttgttttctccagagactttccaaaattacctgcaacatttttttgggtagaaaacaaaatacagtagccttgctttatagttgcaggtgtttactttggcacttaaaacaaagctctcacttgaggctatttccaacagtacattatttgtaagtcttaagtatcactttttccacccccccgtttactcaagggacttcataaatcagtcaataaagaaaggtgattgcatttataaagctagaataataggccttgattttaacttagatcttctaaaaaatgttattgagtgaaaaatatattcttagcaaagtcttttaagactggatcattttaaagggattctcagcatgaacacatcacaacatatgctcaagaagtgatttagcatgtgtgctggcaactctcaagttgagaaactgaacaactagatcaatttttcattccctctggttgaacttcaagtactaataaacactatagcatgaaaacatatggatattttgggtctggggcttggtttgcagccttggtgaaaggtagtttgttttgttaaatttttttcttcttgtatgcagggttcgaactaagatacaaaaggaagtaggaaagttgaaatgtgccctgaagttttgaaaagagaaaagggaggattttagcctactctgtacttgctgattagtgtatcttaaacaccaaccaggcagatggcttccagaattcctaaacagaagtggagtcactgtaaccttctcatggtttcctgcacacatggcctttagaatatgggagcattttttattatagtttaaatcaaatatttattgactacacattgtgctaggtgtggggaatacagagaattcttagatgtagtctttgcatttaagggatgca

SEQ ID NO: 700190 - DNA, 2177 bp, Homo sapiens
aaccccctggacgtgcaatttacctataaaacaaacctgaacatgtacccttgaacctaaaataaaggttaaaaaaaaaagggattaaaaaggcgaatttgagggacaggaaaaataactgggccacataaatttatagctatattaaaaaaacttaaaacagtttaacatatatatgagtatacacgcaaatataatactgagatacataaatgcaaatataaacatatatacatacatatagataaatatatatactttatctgtatgcacatagagactatatataatatttttcatttatagtgaaaagcaagattttaaattaacaaattgtgagttttcacaagtttatacacctgtgtaattaacaccccattaggaaatagaatatttccatgaccccagaagtagccttcagtttaaaggcttttaaaaacaaagttggaagataattttaactcaacatattctgcttaatctattttcttttttaaaaaagcattagcacagatatatagaactattctttaaaatattattctaaattctaaaattaagtaaagttttaaatactttatagaagagataaaacatttgtttagtcatgattttctctttatactagagtatagctgacttttttcatcgagacagatgtgtgtttttttttttccaggttaaacaaattcaaatattccactggtgccagcttttctggttttcttcatataccattgttcttgcaagttagattttatggttccatttcttcaggtatgtttacagctgtgcatagtttctgttgtttgtctaagctcgttgtcttgttagtgcatcttgttagtggcgttgctgacttctttgctgtgcccttccaaacctgatattttaagactctttacatttaagaaaagtttctctggtttaattagtggtgcccaacagaggttgattttgcctctggggggacatttggcagtgtctggagacgtttttgattgtcaccactggtkggggtgggaggaggtgaagctgctctggcatccagggaggaggccagggatgctgctgtctccctgcaatgcacaggacagctcctccccaacaaaaggaattttctggtccaaaatgccaatagtgctaagattgagaaatcctgacttagatgatttacaaagtttagtgtagttgtcttcttcaggtgaataatatttccagcattatgcatgacatgcagattcctatcagaggtttattttgaggccctccttttttgttttctccagagactttccaaaattacctgcaacatttttttgggtagaaaacaaaatacagtagccttgctttatagttgcaggtgtttactttggcacttaaaacaaagctctcacttgaggctatttccaacagtacattatttgtaagtcttaagtatcactttttccacccccccgtttactcaagggacttcataaatcagtcaataaagaaaggtgattgcatttataaagctagaataataggccttgattttaacttagatcttctaaaaaatgttattgagtgaaaaatatattcttagcaaagtcttttaagactggatcattttaaagggattctcagcatgaacacatcacaacatatgctcaagaagtgatttagcatgtgtgctggcaactctcaagttgagaaactgaacaactagatcaatttttcattccctctggttgaacttcaagtactaataaacactatagcatgaaaacatatggatattttgggtctggggcttggtttgcagccttggtgaaaggtagtttgttttgttaaatttttttcttcttgtatgcagggttcgaactaagatacaaaaggaagtaggaaagttgaaatgtgccctgaagttttgaaaagagaaaagggaggattttagcctactctgtacttgctgattagtgtatcttaaacaccaaccaggcagatggcttccagaattcctaaacagaagtggagtcactgtaaccttctcatggtttcctgcacacatggcctttagaatatgggagcattttttattatagtttaaatcaaatatttattgactacacattgtgctaggtgtggggaatacagagaattcttagatgtagtctttgcatttaagggatgca

SEQ ID NO: 700191 - DNA, 665 bp, Homo sapiens
gtggtgcatgcctgtagtcccagctacttgggaggctgaggcaggagaatcgctcgaacctggcggggcagaggttgcagtgagctgagatcgctccaytgtgctccagccttgggtgacagagtaagactctgtcccaacccccaccccaccccaaaacaaacaaaaaaagcatttgactatgtatgtgaggatttatttctaagcttaaaaaaaaaactattaactccagactttattcagatttcaccagtttttccatgaatgtcctttttctgtttcagaatccagtccaggatattacatcacatttagttgtcatgtctccttaacctctactgatctagacaaattctcagtatttcctttttatgactttgatagtttcaagttttgagtattggtcaagcatttcatagactgtccctcagtttgggtttgcctgttttctcatgattccactggattatgggtatttggaaagaataccacagaggtgaagtgtaccttgattacatcttaggaggcatgtgcatccacatggcagcactgatgatgttaaccttgatcacctggttaagctggtgtttgccgtttctccactgtaaggctgcctttttccctttccatacagtatttactggagttgagtcactaagtccagc

SEQ ID NO: 700192 - DNA, 665 bp, Homo sapiens
gtggtgcatgcctgtagtcccagctacttgggaggctgaggcaggagaatcgctcgaacctggcggggcagaggttgcagtgagctgagatcgctccattgygctccagccttgggtgacagagtaagactctgtcccaacccccaccccaccccaaaacaaacaaaaaaagcatttgactatgtatgtgaggatttatttctaagcttaaaaaaaaaactattaactccagactttattcagatttcaccagtttttccatgaatgtcctttttctgtttcagaatccagtccaggatattacatcacatttagttgtcatgtctccttaacctctactgatctagacaaattctcagtatttcctttttatgactttgatagtttcaagttttgagtattggtcaagcatttcatagactgtccctcagtttgggtttgcctgttttctcatgattccactggattatgggtatttggaaagaataccacagaggtgaagtgtaccttgattacatcttaggaggcatgtgcatccacatggcagcactgatgatgttaaccttgatcacctggttaagctggtgtttgccgtttctccactgtaaggctgcctttttccctttccatacagtatttactggagttgagtcactaagtccagc

SEQ ID NO: 700193 - DNA, 665 bp, Homo sapiens
gtggtgcatgcctgtagtcccagctacttgggaggctgaggcaggagaatcgctcgaacctggcggggcagaggttgcagtgagctgagatcgctccattgtrctccagccttgggtgacagagtaagactctgtcccaacccccaccccaccccaaaacaaacaaaaaaagcatttgactatgtatgtgaggatttatttctaagcttaaaaaaaaaactattaactccagactttattcagatttcaccagtttttccatgaatgtcctttttctgtttcagaatccagtccaggatattacatcacatttagttgtcatgtctccttaacctctactgatctagacaaattctcagtatttcctttttatgactttgatagtttcaagttttgagtattggtcaagcatttcatagactgtccctcagtttgggtttgcctgttttctcatgattccactggattatgggtatttggaaagaataccacagaggtgaagtgtaccttgattacatcttaggaggcatgtgcatccacatggcagcactgatgatgttaaccttgatcacctggttaagctggtgtttgccgtttctccactgtaaggctgcctttttccctttccatacagtatttactggagttgagtcactaagtccagc

SEQ ID NO: 700194 - DNA, 1235 bp, Homo sapiens
tgccgcctgccctggcagctgtgccaggatctgtggcacctcctcagcaggactgccctggcctgcctgcagcagctgagacagacgagacagcatgaagtgggacacatggtggaatgatggtttgagaagagcatcccagacccatggagattgttgacccccagaagccctctcactcctacttcctggctctgctagggctccacttcagagaagctgaacagcctgtgggctgggccttggggaaaagggtctgcaagctgggtcctagagaggctagggtgggccgtggagggggcacgtgggcagcagggtggaagcttcaccttggttctagtgaacaaggccaggagcctcgcatctgtgcagctgctgtggaccggcccccagactccgtcagccccacagagcctcctcactatgcccctcttgctctcaggacatggggcctgtgccacgtggccagccttggtgacattccaggtgagcaccgaggcgtcctcagggcaggtgatgtctccatctgaagaatgacgagcaggcgctactcagcaatcacagcctcacctgagcctctccttgggcagaaccctatgcgggccccgaagcctggtcctgttgcccagggcagagacgtgccatgcaagagagcccgtgctcccaaggcaagcagctgggaccagcccactgcgcccaggccctgcgtaccctggatgatggtgatggagatggggaccctgagtggagccaggcccaggctctgcaggtcacaagygtacgtggtgtcagccatcgggcagcgctgaacagccagcacaaagcactgagagcctgactcgttgaaggaggaagctgaaggcaaaacgaagaagggaactgtcattgggccagggacaggcctggaacccagcaggctctgacatgctgtttcagtctttctagcaattcagaaacagaggaagcagtggggaagagccaaatgatgtgtgggctccacttggacagaggaagagagcttggattttgctggaggggactgtggggtctctaacaagctctaggactcagtttccaccatttcctcatttgtaaaatggagactaccatcaaactaattccatagagagttaaatgagattgtgtagatgacagcattttgcaaaagtttcctatacacatgtggttatgttatggcaatagacgtggcatggctctgatggggtagaaaacag

SEQ ID NO: 700195 - DNA, 601 bp, Homo sapiens
caactttgcagaaattatactcttgaaatttaccaagctttcctaatgttcaaattcagtatcgttttttcattcctgactgctaagtgaaatgccttggttgactatccactaaactgaaattctttcctccctttgcctttgtgatgccattctccctatgtttccgctagccatctcaccatttcattctgtgtcctttgttgccaattctacttcctgcatattactacctgggtgccccaccgtacttatactctctctctctcagaatccctcttaaagcacaactacaagcttacaacagatgactgcaatatctaattatggactcttggacaaactctaataatctgaacttcagattccagttgtacaatggggatgggttgaactattttctagtgtcccttacatctttaaaattcttkgatcctatgatctatagtgatataagttcctaattattttctctctcaaactccaaatcaatatatctggcaagctgctgggcacttcatttggatgttccattgtcatgcaacatattagccccagtttgtctcttccagacacctggtgactctacttggtttgaggg

SEQ ID NO: 700196 - DNA, 889 bp, Homo sapiens
tgcttagtttttctgctaagaaattactgtttctgaacaaggttaagtgtcgtatgctttcattgtagttttttttcccctaacatatactgttttcctaattagactataaattcctccacagctgggaccttgttttgttttctcgccttccccataacaaatatcatttaagtgaatgttgtaaacagttacttcatttaaattgcccttaaaatgctttatgacaaagacgttatttgtagtaatacctataatggtaaaaagtttgttgcagtcttacagacrataagattgatcaattgttatatatgcttagtggaattttatctagctgttctaaagagccattagactagtctttctaatggaaaatgtttattgtctaagttaaaacagcatttgaggccaggcacagtggctcactcctgttattgcagcactatgggaggctgaggtgggaggatcactagagcacaagagttggagactagcctaggcaatatagtgagacctcttctctacaaaaaatttaaaaattagctgagtgtgatggggtgtgcccgtagttccagctactcaggagactgaggtgggaggatcacttgggtccaagaggtagatgttgcagtaaaccaagatcatgccactgcactgcagcctgggcaacagagcaagatcctgtctcaaaaaattaaaaagcattttatagactgcatgtttgtggtcccccctccctccgcaccagaattcatatattgaagccttaatctccaatgacatgatattagtaggtggggcctttggggggtgattaaataataagggtgaagccctgcatgggattagtgcctttacaacaagagaccctagacagcttgcttccact

SEQ ID NO: 700197 - DNA, 1065 bp, Homo sapiens
tttgggtggggacacagagccaaaccatgtcagcactctaaggcttagtttcctcatctttgagttagacattgtaaagtaccttcttcgtagaggtgaatggtttgttttccctaaagtgacttagttcttggcacagttcttggtccttgwtaaaaagctccatgaaggttaactgttataattatgtagaacattgttggccatggtggatttgcttttggttaacagcaacagaaatacagaaagtctcagtcaaattgacttaaacaatggtttctggatttctaatgtgaaaggtgaatgaataagccaaacttcaggcatggctctctgagagacacatcctgaggtaagctggcaaattgttaaaaaccagctctggggggacagggaggaagagaaaagggaaggagaaaggagaggagaaaaagaaatagcagctctgatttttagtttttgcaaaattctgtggtgtaaatatcctaccatggccaattttgagctgccaagatgaccttaatgggctcataaaactcctgaaatcttaatactcagctctcatgaggtggaacaaggtggctccagtatcccactgggtccagctgtttccctgagtttctcctcacctccatgtcaccttcatcctgagaatggcttttcacatgatcccaaaatggttgctggaggaaatggtgtcatgtttctatgggaatgaggaaaggggcaaaaaaaaaaaaaaaatgcttctcacatcatgggaaagaagactcaagtttcactctgattggacctctgagccagtcacttgatcaagggcttactatggttcagaccctttaggtaaacttatagctggggatgggccagtctcactcaaatgaaataaagagagaacatgggttctcaaaatctgttagctgccattaggaagagaatcaaaggggcgtgaatactaggtgagctactggcaaaagcctgagataccgcctagggagtttatgctttactgggaagataacataaggatttggggtatgtgcatccttggaaaattactctccc

SEQ ID NO: 700198 - DNA, 1065 bp, Homo sapiens
tttgggtggggacacagagccaaaccatgtcagcactctaaggcttagtttcctcatctttgagttagacattgtaaagtaccttcttcgtagaggtgaatggtttgttttccctaaagtgacttagttcttggcacagttcttggtccttgataaaaagctccatgaaggttaactgttataattatgtagaacattgttggccatggtggatttgcttttggttaacagcaacagaaatacagaaagtctcagtcaaattgacttaaacaatggtttctggatttctaatgtgaaaggtgaatgaataagccaaacttcaggcatggctctctgagagacacatcctgaggtaagctggcaaattgttaaaaaccagctctggggggacagggaggaagagaaaagggaaggagaaaggagaggagaaaaagaaatagcagctctgatttttagtttttgcaaaattctgtggtgtaaatatcctaccatggccaattttgagctgccaagatgaccttaatgggctcataaaactcctgaaatcttaatactcagctctcatgaggtggaacaaggtggctccagtatcccactgggtccagctgtttccctgagtttctcctcacctccatgtcaccttcatcctgagaatggcttttcrcatgatcccaaaatggttgctggaggaaatggtgtcatgtttctatgggaatgaggaaaggggcaaaaaaaaaaaaaaaatgcttctcacatcatgggaaagaagactcaagtttcactctgattggacctctgagccagtcacttgatcaagggcttactatggttcagaccctttaggtaaacttatagctggggatgggccagtctcactcaaatgaaataaagagagaacatgggttctcaaaatctgttagctgccattaggaagagaatcaaaggggcgtgaatactaggtgagctactggcaaaagcctgagataccgcctagggagtttatgctttactgggaagataacataaggatttggggtatgtgcatccttggaaaattactctccc

SEQ ID NO: 700199 - DNA, 1503 bp, Homo sapiens
gatagatcccttatgggggtccccttgaactgactcccactctgctgatggcatgcaagattcctaaggaagtcaatggacagaaactcacgtagtgagaaagtttcagtccttctgatgacctcagagagaaaattgtcttggtgctaatttgtcatttaagaaagaggaagcagcctcaggctcacagttggtatcttgctagattttttttatagcaattgtttcatttatttcattgtacacatgcagcttatagggagaagcctgagcctaaggcaagccagaataatctacacttttttcagcgagatctacttttttcttttggccaaatggaacatgtaagcatttmgggatcgcggtgaaagaatcaaactactaaatttataaaatacctaaaatgagatgttatactaggcacattgatttagctatattgtatatttttaccacccacatttatgttaagcaacttaattttatattttctgtaggcatctttgatctgtgtctttctcatcactcaagatataatttcagaattctttcagcttgccagagcacataattgtacttgttatctaggttagtttaaggcagaacacttcttgtacctatatgatgctgtccctataaattttatttcaaaccacaaacaaatctctatttgtacattctctccagcaaatcaacatttccacatgtatatatttatatatttgtgatctccacaacataaccacttttctatattgtttttttaaaatgatctttaaaaggactgttcacagtgacatcctaaaatacaattataaggtcataacctccaagactaatgactgaatctatgctaattttctctgacaccctcttcccttttatagtaatgatttcatcaggttatctccaaaagcatcacaaactagtattaattcagattattttagggcagtgttttttccaaaacagtattaccgtattgattgattgattgagacagagtctcactctgttgcccaggctggcatgcaataactcagtctcagctcactgagacctccgcctcatgggttcaagtgattctcatgcctcagcctcacaagtagctgggattacaggcatgtactaccacacccagctaatttttgtatgtgtagtagagacagggtttcaccatgttggccaggctggtctcaaacccctgacctcaagtgaactgcccacctcggcctcccagagtgctgggattacaggcgtgagctaccacacccggccccaaaacagtattttattattcaaatgtgaaaaacaattttaagaaaagtctagaatacaagaatagcccctatttcttaaaggataacttggtagtgagggaaagtattactgataaccaggcacatgctgtttttatacgaaccttctaatgattgctagtgacagtgggtttccatttatgttagggttataaagtaccccttttacctggataaggaaaaa

SEQ ID NO: 700200 - DNA, 640 bp, Homo sapiens
ctgccatttgatttacacagaattactcatggaaatttaatttagaatgtatatatacatatacacacatgtacatatatatacacatgtatatttatataaatggaaaaatagccaataaacttatcttcaataagataaattttctctgagagattttaaattataattatattataaaatatttgctttaacctattgtaagacacctcagtttaaaattgtggttcagaggtgtctgtgactgcttgagcttaaaaccatgactcactacycaggtgacaagtatttcatctcttgtaagtctcagttttctcatctctgaaatgtacatagcatacctgcctgacttacagtagcaaagaatttgtcttatggcatgtgttaaagcttaggtgtttgaggaaaataattctcttttttaaaaaaattttaatagacggagtaaatacagtaaagccaaacaagaagcggatgaagagaaacatttgaatcaaggtacaaaaaattggattaaaaaattctatttttagagcatgtcacacgttttctagtttaaacatgttcaaataatatttacgtggctattaatgttatataatataatatatttattccttatcccaataatgtacttcct

SEQ ID NO: 700201 - DNA, 2482 bp, Homo sapiens
attcacccagactgacacataaaggaaagtaaaaaagaatgctaatatttcacatttaaaacctaaagcataaaaggtgtgaaatggaattttatttacggcttggaattcatttctggctgccgtaagtaatcaaagattagttttaaaaaaatgacaggcggctgaagtttctgctcatagtaagtagctaaaacaaagtactaaatatataataaagtgtattaagtatgtctttgtcattttgagaaaaagcttttacatggtatatggtatacagagtatatgctatacagtatggaataattctttggtctgaattatctacaacttggggctaagaaactcaatggcttacacagtggcaaatcaatttaatacctagggaactattgatatctctaccttataaaaccgttacttaatgaaatagttggaaaactataatttcccttacaaaataattcttgcaaattgagctaattaatttgtaaaataaaagaactataaaaatgtcatacctaagaacaccaccagcatctaccaagttcttctttagcatgttaaaagctttctcctgctccattctgataattttcttgtcaattttggggtctgtaggaactctatattcaggaaacttctgtacctttttaatgtaaatcctttatacaagataaagaagaatttgtttcattatattataatctcaagataatctatcttatcaaccagaagtctactttaagcatttaagcttagagaaaattcaatttatctgtaaagtattcagaggcttatgtaaaatatatgccatattctcagttgtattaatacttagcaaattaaaagtaaacattatttaaaaatatctaagtacttacagattttactatttttttcccstagatttgccttctcttcattctcctggaaggcataatcacctcatgcctggattacttatttatttatttatttatttatttatttatttatttattttttgagatggagttttgctcttgttgcccaggctggagtgcaatggcatgatctcagctcaccacaacctccacctcccagattccagtgattctcctgcctcagcctctcaagtagctgggattacaggcatgtgccaccactcccggctaattttgtatttttagtagagacagggtttttccatgttggtcaggctgatctggaactcccaacctcaggtgatccacccacctcggcctcctgaagtgctgggattacaggcatgagctgccatgcctggccctggattactttaatagcctccttccaggcctgtgcctccaatctttcattacttaaatccacttgataattcaatgtcacaggtgattctcctgcctcagcctcccccagtagctgggattacaggcatgtgtcactatgcctggctaattttttttgtatttttagtagagacggggtttcaccatgttggtcaggctggtctcaaactcctcacctcaagtgatccgcccaccacagcctcccaaagttctgggattataggcgtgagccaccacacctggcctctatagctttatttatatggttctcctaacctacaatatcatccctctaactctctacccacccaaattcaatttaaacttcaacatccagtttaaattgtactttctttcctgccatgaatttgtatggatatattccttctttaaatacctaaataggtagttaaatcatatatttcacactatattctatactatcatgttgtctactagtttttgtttcctgatccgttccctgggattaagtaaaattttattcctcttttggtttccctccttcctatggcacccaatgtagtttctgggcacagagtagacagtcaaaaagtacttgtagaatgatggaaaataaaattatttcttcacatgtagaggttttctcccaagttatacctaaagtttttataatgcttatatttaagaagcagttgataagtttcaagtcaaggctaaatggaaaaaaaaaagcaactgaaagtttgtttcacagtcaggtttaaatattacctaaagttaatattgcaggattaaatatgaaaagccttgtaaatgggctttaaaaacttcttgagaatgctaaggtatttattttattttatttttttgagacagagtcttgctctgttgcccaggctggagtgcagtggcgcagtctcggctcactgcaacctccgtttcctggattcaagcgattctcctgcctcagcctcccgagtagctgggattacaggggcccgccaccacggctggctaattttttgtatttttagtagagatggggtttcaccagttggccaggcttgtcttgaactcctgaccttgtaatccgcccacctcggcctcccaaagtgctgggattacaggcgttagccaccatgctcggccaagaatgctaaggtatttat

SEQ ID NO: 700202 - DNA, 1847 bp, Homo sapiens
taatgctctctctccccttgcccccgtcccccacgacaggccccagtgtgtgatgttcccctccctgtgtctttgtgttctctcccacttatgagtgagaacattattgttcaactcctacttatgagtgagaatattcggtgtttggttttttgttcctgtgttagtttgctgagaatgatggcttccagcttcatggtatatgtatttataaaagcatgcttaagttctgttttgaattgtgtcttctttaatcctttcttcaactctgcacagttttcatgtagcatgtttttagcatgaagtaaatattcaactaaatattatttcaattgaattaaaatcaaataattatctaaagcaaatacctacttttatgtgtcttatcgttctgtgtgtatatattctctgtgcattgaggtacctctgttaccagtttgtaatctgatttatcagcgtccatcagttagacatagtacttgtagaataaatgtatgaatgaatgacccacgtcgttccgaatgtataaggtgttgattttattattcaatgattattttatattaaacatttaattattgaattagttaaagtggagtctgagtaggaaacctgaacccagaggtacaagcgtaaaggtattaaaggcttatttaaacattcatctcactgtctattaattgaaggattttaaattactagtgaatatcataaatagtcattatcatgtgtaatagggctagcgttcagatactacaaaattcagtctttatttaacaggattcaacctttacatggaaagattcctgcttttgattaagaatgaattcaagcattattcagagacaattatgtgaagcctacatataactcatctgtatgtccttttggaatgcaagagcttgaagtaaaatcttgaaataaataataggagcagaattcccaaatgatagataccttagtatcataataagtggagttctattaagaaggaattagaaaatatgcaaatttcttcacatctatgcatactttaaaaagtcttaataaaattagatatttaaatcggagtaagaaaattttaatttctagtaaggggaagaagatatataacaacatttttgtctataatatggtctataatggaattacaaagaacatttataaatattttataaaattagaaaatatacttacttagaagtttataattatttgtagtatactgcaatagtatttgtagatttcttcttaaagatatygtgaaaaagggatcacaagtttgccaaagagagacattgcaaaaggatatttaccatgtttatttaaacatagtgtaggatagggtgacctggtcttctgctttttaaggacaaattcttggtacagttcaacagtatcaagttgatccagcttgaaaaggctatctcatgttgattaaaatcaaaggtgacatatataagttacaatgccaatttattttcttacaatagaaatataactgccatagcacatttcctttaggcaagctgcatgagaaaaccaccatcagaagattgctggctgaatacggaaccagaactggtgttagagaggctgggatatagctgagcagtagttatatcatttgaatatttaatgcctacaggctaaaacaccaaatatgtccattttctcaatagatttactttttattccatatgaggggttcagctattggttcaaagcaatctcttccttgcttaatgatggatgactgctgccaaaatgcctccttttttctttgtatacctttctgacaattttttttccagctggcacatttttaaacttagcaggtaatttat

SEQ ID NO: 700203 - DNA, 950 bp, Homo sapiens
tggattagcaggaggaatgttcatttattggaatgtattttgaaaattgactgcatatattayataccagctgcaattcataatactgccagtaatagctaccacttaggtttttccacctgtggatcagaatgttaatttatcatctgggattgtcttattttatttgcacgattcccaataaggaagttttacatgataaaactctctttcacatatgagaaaactgatcctcagatggaatacatatgctcaagatcacatcttgattgtcaacaaagggaagtgatcacaagtctcatgaaaccccaataatagtgattatcagaagaaaaacatgagtgaaagcattaaggcaactaaaacacactgaacaaaaaaaaaaacgcaaaaatatgtgatatttatagaacatgagaagaatagaattgattcaattccaataattcaattattaattctcaatattaatgagagaagattccatcagaagagggatgttggagtctttctggtccttgtttagtcgtctcttcagtgcaactgtatggtcttcacaatgaaaactatatactgcagtttccattcatgtaaggttgtaaatattagttaaacgacttagatattcacaggatagacccttcttatctgaggttctaaaatatttaacctagctagaatttttgagcttataaaaataaaagctattaaacttttgcatagaaaacgacaatgaattttctagcttatcaaatgcagaatcataattactaaaaatcatcactctagaagtccaaaggtatgataattatccctttgtcaaaataattatacaattgctaagatgtgaacatgtcttttatattccactgcgcaatatctggatttctatattactcttagggaccctgaatgtgctttagaaaaaaaataactaaaaatatttatcc

SEQ ID NO: 700204 - DNA, 855 bp, Homo sapiens
cagagacctaactatatcaatcgtaacactagatgtgaatggagtgaacaacccaatctaaagcagacagagaccccactatatcaatcgtaacattagatgtgaatggagtgaacaacccaatcaaaagcagacacagacccaactatatcaatcgtaccattagatgtgaatggagtgaacaacccaatcaaaagcatacacagaccccactatatcaatcgtaacattagatgtgaatggagtgaacaacccaatcaaaagcagacacagacccaactatatcaatcataacattagatgtgaatggagtgaacaacccaatcaaaagcaracacagaccccactatatcaatcgtaacattagatgtgaatggagtgaacaacccaatcaaaagcaaacacagaccccactatatcaatcgtaacattagatgtgaatggagtgaacaacccaatcaaaagcagacacagacccaactatatcaatcgttatgaatggagtgaacaacccaatcaaaagcagacacagacccaactatatcaattgtaacattagaagtgaatggagtgaagaacccaatcaaaagcagacacagacccgactatatcaatcgtaattaatggcatgaacaacccaatcaaaagcagacacagacccaactatatcaatcgttatgaatggagtgaacaacccaatcaaaagcagacacagacccaattatatcaatcgtaacattagatgtgaatggagtgaagaacccaatcaaaagcagacacagatccaactatatcgttattaatggcatgaacaacccaatcaaaggcagacacagacccaactatatcaatcgt

SEQ ID NO: 700205 - DNA, 2167 bp, Homo sapiens
tagacctgagttcaagtctgggttccttcctgtgactaatacaagtcaccttagcttcttagcagtgcaatgatggttccccaagttgccccagggttgttgtgaatatcagctgagatgccatctgtgaagtaccacatggcactaactattctgtgactttaagcatatgtagctactcatgcttttaactcccagtttaatgcggagggaaggaaaaagtcacgatacttttcttcctagaggcctgtaactcataactccaaaaataattattctggaattctgttagtcttctgcttacatatttagtggcagggaagtcactgggccaaatcaggcaggcagcttcctaatatgccttaataaagaggggtcaatttttttttttttttttttttggagacggattctcactttgtcacccaggctrgagagcagtggctgcaatctcagctcactgcaacctccacctcctgggttcaagcgattctcctgcctcagtctcccaagtagctgggattacaggtgcgcaccactatgcacgggctttttttttttttttttttgacacagtttcactcttgtcgcccaggctggagtgcaatggcgtgatcttggctcactgcagccgctgcctcccgggttcacgccattctcctgcttcagcctcccgagcagctgtgcttacagatgtttgacaccacgcccggctaatttttgtatttttgtcgagacgggatatcaccatgttggccaggctggtctcgaactcttgacctcaggtgatctgcccacctcagcctcccaaagtgctgggattacaggtgtaagccacagtgcctggccaggagggttaaatcttcttgactacctcctttaggaaatagaagtacattgtgcctattatcctctgccatatctatatttatattatgtatattattataatttatatataacaagtatatattatacatgatattacatatacatatataaatatatcatttataaatataagttacatatatttacatatattatataaatacatatttatatacaatattatataaatacatatatttatatgtaagtatataaatacaaatatttataagtatacaaatatatataattccccatcctcaccccttaaaattggactaataattcagatactctatgtaaaagaggctttggtagaataaactaaatgctggaggacagattgactctcaaggagtctgaaatcctgttctaaaattaacatttgaaacaactagagatatttggcaagaagcagaaagaatttcaaataggtttgataactgtgttatttgcggaggcatggcatagggaagagggaacatgtttcagatgcctatgacaaatgaaaatcatgtacaaggagtcagttaatgataaagttacttctttaggggaattagtcatgctttttttttttgagacagagtctaactctgtcacccaggctggagtgcagtggcatgatctcagttcactgcaatctccatctcccaggttcaagcgattctcctgcctcagcctcccgagtagctgggattacaggcatgtgccaccatgcctgactaatttttgtaatttttagtagagacaggtttttgccttgttggccaggctggtctcaaactcctcgtgtaaagcaatctgcccgcttcagcctcccaaagttctgggattacaggcatgagccaccacgctcagtctcgtcatactttttgcactccttgcatttgtattccagtatttgggcagtttcccagattatgatactaacatccccaaggtagcagtcatttaccaggttgctaagatatggctacctcctcctcttgttccaagtcggcagtctacatctcagccttcggatgcatgttcttcacccctgcctgacacactggctctctctctctctgctactcccagctctagtggaggactgaaaattccagacttcctcagtgctacagagagaagcctccagaagctaggcaggagggtgtacccccaccatccactgatgctctagatttgtgggtcgctggactcagggctactgagagtagtcctgataggaaaaaatgagcagggcttgctagacagtatctaaaatcattca

SEQ ID NO: 700206 - DNA, 914 bp, Homo sapiens
caacctctgcctcctgggttcaagcgattctcctgcctcagcctctcaagtagctgggattacaggcacctgccacaaactctcagcaaatttttgtatttttagtagagacagggtttcactatgttggccaggctgatcttcaactcctgacctcwagtgatgcacccaccttggcctcccaaagtgctgggataacaggcatgagccaccctgtgcccacacctggccaagaaataatctaatttttttaaaaagacataaaatgtgttcatgaaagagattccacccaaatcaacacataaatcactctagtggcaaagtagtttatttattatgtttccttaaaggagattaagactcgactcctctcccagccggggcagcccgggaactcagcgcccccctccagtggtgcccagagcctcccagcgccatgtccatctctcttcctcttggcatccattgtggcactcagcccacctctgcctcatttcatgattgtgtgcttttgtagtttagaaacagctgcggcaagcatttaggtaaaggcctcaagcagacaacctacagggtgctccgtgtcagtgcaggtgcctgggcagagaagctgcggcacagctgcagaggtggccctgggggtggcgggggcctctgctatcaggaggatgtggaaggccactgtggggcagcctgcacgggacagagggcttttgggaccacgggaactgagaggagccgttaggagggggtcacgggctgcaagttccacagtggggccctgttgtcccagccagcagaagcaccagtgactgtcccaccctggagcctggagcgaaccagaggacttgttaaaacagattgttggacccacactgtgtttctggattgggagtcaggagtaggcctgagaa

SEQ ID NO: 700207 - DNA, 642 bp, Homo sapiens
aaataaaatccaagattattaaccaaataaaccacactataataatatacattgttcatctgagttttcattaattgactgcactgggcagttggtgtgagtgtgtgatcaagatgtagacattagagagacaacagaactgaatgcagtaaagtataaaaactcactcctcactctttcactccatacagggattattctccattattctctggcgaaggcagtctctttccatgcctaactaaaaatcttttcaactggtcaatatgataattgtttaatccaatatgaccttgtagaccatacagccacagaagagaggaaactaccgaaagaactgtaagaacagaggaaaactatagtaatcaatagaactcacggttcttggacctggagtaaaycacaacttttctaaacctcaatctccccatcaataatgctgggggcaggggatggtgattagcagacagagcagagagaaatgacagtgatctttgccctgctgacagcatggatttattttgaggcttacagggagacaggtcaaagcgctctgtttattctacatgtctacgtagtaaattatcatcttttagcattagaggggatgttagaagacagctagttcaacctttcactcta

SEQ ID NO: 700208 - DNA, 620 bp, Homo sapiens
gccgttttgggatggaggacaggtcattaaaaacatatactgaaacatttggtactttacttgcacttagcaaacttaccataaaaatcaaacatattctctcaagcataaatccctcacaccaaaacagaactcttatttctgaaaactctatttctgaatattgtccctttaatgattttaaaaggtctgaattattttaagaaaggattttgacattaagtttcatgtaaccatggaccttttcaggtggttctaatagtctgtgatttgaaaagattctatactctgcttattattactctactagttaaagtgtccccacaatatatgycacacacttaccagggaggttgacttccatcaagtatttcatacacagtatgttgggatgaagatagcagtcttcagttatgtctggaaaacgaggcaaatctaaaaatgttccaacttctactgtttttttgtagatgtcctcgtagtcaggccaagactgaaataaaagagagaccatcatagttgcaatttttgcaacaaaacttatttttaaaaatatgttctgatttagaatggctattattaaaaagtaaaaaaataacagatgctggtgaagttgtgca

SEQ ID NO: 700209 - DNA, 620 bp, Homo sapiens
gccgttttgggatggaggacaggtcattaaaaacatatactgaaacatttggtactttacttgcacttagcaaacttaccataaaaatcaaacatattctctcaagcataaatccctcacaccaaaacagaactcttatttctgaaaactctatttctgaatattgtccctttaatgattttaaaaggtctgaattattttaagaaaggattttgacattaagtttcatgtaaccatggaccttttcaggtggttctaatagtctgtgatttgaaaagattctatactctgcttattattactctactagttaaagtgtccccacaatatatgtcacacacttaccagggaggttgacttccatcaagtatttcatacacagtatgttgggatgaagatagcagtcttcagttatgtctggaaaacgaggcaaatctaaaaatgttccaacttctaytgtttttttgtagatgtcctcgtagtcaggccaagactgaaataaaagagagaccatcatagttgcaatttttgcaacaaaacttatttttaaaaatatgttctgatttagaatggctattattaaaaagtaaaaaaataacagatgctggtgaagttgtgca

SEQ ID NO: 700210 - DNA, 620 bp, Homo sapiens
gccgttttgggatggaggacaggtcattaaaaacatatactgaaacatttggtactttacttgcacttagcaaacttaccataaaaatcaaacatattctctcaagcataaatccctcacaccaaaacagaactcttatttctgaaaactctatttctgaatattgtccctttaatgattttaaaaggtctgaattattttaagaaaggattttgacattaagtttcatgtaaccatggaccttttcaggtggttctaatagtctgtgatttgaaaagattctatactctgcttattattactctactagttaaagtgtccccacaatatatgtcacacacttaccagggaggttgacttccatcaagtatttcatacacagtatgttgggatgaagatagcagtcttcagttatgtctggaaaacgaggcaaatctaaaaatgttccaacttctactgtttttttrtagatgtcctcgtagtcaggccaagactgaaataaaagagagaccatcatagttgcaatttttgcaacaaaacttatttttaaaaatatgttctgatttagaatggctattattaaaaagtaaaaaaataacagatgctggtgaagttgtgca

SEQ ID NO: 700211 - DNA, 620 bp, Homo sapiens
gccgttttgggatggaggacaggtcattaaaaacatatactgaaacatttggtactttacttgcacttagcaaacttaccataaaaatcaaacatattctctcaagcataaatccctcacaccaaaacagaactcttatttctgaaaactctatttctgaatattgtccctttaatgattttaaaaggtctgaattattttaagaaaggattttgacattaagtttcatgtaaccatggaccttttcaggtggttctaatagtctgtgatttgaaaagattctatactctgcttattattactctactagttaaagtgtccccacaatatatgtcacacacttaccagggaggttgacttccatcaagtatttcatacacagtatgttgggatgaagatagcagtcttcagttatgtctggaaaacgaggcaaatctaaaaatgttccaacttctactgtttttttgtagatgtcctcgtagtcaggccaagactgaaataaaagagagaccatcatagttgcaattttygcaacaaaacttatttttaaaaatatgttctgatttagaatggctattattaaaaagtaaaaaaataacagatgctggtgaagttgtgca

SEQ ID NO: 700212 - DNA, 653 bp, Homo sapiens
taaacattgagtacacaggcacacaaagaagggaacaacagacacragggcctacttgagggtggagggtgaggatcaaaaaactacctttactgtgcttgttacctgggtgacaagataatctgtacaccaaacccccaccacactcaatttacccatgtaacaaacctgcccatgtgccccttgaacctaaaatcaaagttggaaagaaaaaaaaaatttctgatttagcaagtaatatgttccaagccaaagtatttggaatgcttaagaaaagaaaaaggaacagataaaactaatatgcacttactgaataaaatttggaatttggagaaaagcatgaagggagaaaacccccataaatccttaatattttaactcagcaattttaagtcataaatactaaatgttaaaagccactaaaattctatttggctcttaaaactcttactgggttttcccatgatatggtaaaatcactacttcttgccttagaagaatctggagaaaggatgaaagctacaacccaatcagagttataatgttgtcatgactgctctgatacacaacctccctctcacctttcccacctgcactctctcattactcttcaaattcatagctaacaaatgcggctcactgttacataatat

SEQ ID NO: 700213 - DNA, 650 bp, Homo sapiens
ttccaggtaagataaacgtcaggctaaagaacagaagtatagcattcctagattttaatgtctaaaaagggagatttgaagcactacaaaatgacattcctctagaaaataatattgatgagaagagagtaaagagtagtcatttactcaccaactgtttattgaaaacctagtgtaggtcagaagctgaccttgaagttaagaaggcaacaataaataaaacaaaattttgccctggcttacacttaacccaaataatgatgtctttgccatgaagagcttaggagtcatttacgtcttccacctcagtaatttacattcttcyacatcaagaaaaaatggtatgtcctgttaaacttcaacccatctggaaacgtaactgtgatacattaagcatcctctatgagtcagctgatttactcattctgtctcactctccttataactaaccccgccaagtagaaactattatgtttccattgtagatcactatactcctaaagaaataagatgatttcatcaaatcacatagcttgtgacagagctgagggtttccctcaggtgctggagtgattttgaaaaagtctgtcctagatacagtgttatttgaaatttgtgtctgaaatttctgccacttaattgtaccagaa

SEQ ID NO: 700214 - DNA, 1685 bp, Homo sapiens
tttttttttgtatgctattcaaaggcacgggccatgtcttttctatatcttggatagagttgagtgaataatgatctaatggtggtgacaacatgtttgattatgctaatgcctgtgatagtaaactttttttatttatccaagtgactttattgtttggatatctaattttttaaatattttgtcatcatttgcattttgaagctgttgtgctaatacgagaccttcattccacatccatcattgtttgttagaaatgtgtcagtattgatacaatagccagtacagcagcactaagaagattttacagtctccagttcgtacccacatagaattttattttttggcagtaagatcttcttattcaaacctgagaggaagcttaacatggstagtattttcatgatttttcaaatcacgaaaatggttattttgaatgaaaatctttcactgattatacaaattgagaaaatgggctaattgccttgaattgtaattgttcatctggtctagtctttctgcatacatatcagtattgatttatcattaatgaacccatcatcttaaaaccctgtgagccattctattaggttggtgcaaaagtaattgctgttttctccattaaaggtaatggcaagattgcttttacattacattattacattacattacattattaaaagtaatggcaaaaaccacaattacttttgtaccaacctaataagttagcttaaatagatgatataatttttactgttgaaaacaggcattttgctttgtagaatattgactgtgtatgtgaaattagtaacaagtggtaagtcgtggttcatggaatggcaagagacttttattagtgctgaatcactgaatctagtttaaaaatttggttaactgccttttcttaaagaattataccataaggatgagttaaagtaatactaatatgataagtttcaataaaactctcagttaacaacatatagctattttctgttctagtttgcttgaataatttgaaatgcttctgtctatatgatgaaattttcttgatgactggttgcctttggaaataatttttttgtttgctgtttatgaatagctgacttcttaaatccaggtgtatacgttttattgttgctcattttatcttacagttgcagagctgttcttaaccaaggcaagttaataccatatgaaataaatactcctttttgagtatgaatttaaaatattttttatcaaaattataagtggcattataaaatgtttcaactggtaaaatgctaactttaaatagtttttatttttatactttattgtaattataaaacaatctatactgttactgtttgcgttttactcaagaaaatgcaaatacttagtgaagatactagaggctacaaaatatcatgaaaagaatttgaagaagacctaaaaaatggaaatatatgtatgttcacaaatgggaagacttagtattgttaataaggcaaattgatttagagattcaatgctattgctgtgaaaatcctagcttccttttttttttgcagaaattgctatgctcattctaaaattcatttgtaaaataagaatagtctgaaacaatcttaaaaaaggtgaacaaagttggaagacacacttcttaatttcaaaactaaccgcaaaagtataataatcga

SEQ ID NO: 700215 - DNA, 1685 bp, Homo sapiens
tttttttttgtatgctattcaaaggcacgggccatgtcttttctatatcttggatagagttgagtgaataatgatctaatggtggtgacaacatgtttgattatgctaatgcctgtgatagtaaactttttttatttatccaagtgactttattgtttggatatctaattttttaaatattttgtcatcatttgcattttgaagctgttgtgctaatacgagaccttcattccacatccatcattgtttgttagaaatgtgtcagtattgatacaatagccagtacagcagcactaagaagattttacagtctccagttcgtacccacatagaattttattttttggcagtaagatcttcttattcaaacctgagaggaagcttaacatgggtagtattttcatgatttttcaaatcacgaaaatggttattttgaatgaaaatctttcactgattatacaaattgagaaaatgggctaattgccttgaattgtaattgttcatctggtctagtctttctgcatacatatcagtattgatttatcattaatgaacccatcatcttaaaaccctgtgagccattctattaggttggtgcaaaagtaattgctgttttctccattaaaggtaatggcaagattgcttttacattacattattacattacattacattattaaaagtaatggcaaaaaccacaattacttttgtaccaacctaataagttagcttaaatagatgatataatttttactgttgaaaacaggcattttgctttgtagaatattgactgtgtatgtgaaattagtaacaagtggtaagtcgtggttcatggaatggcaagagacttttattagtgctgaatcactgaatctagtttaaaaatttggttaactgccttttcttaaagaattataccwtaaggatgagttaaagtaatactaatatgataagtttcaataaaactctcagttaacaacatatagctattttctgttctagtttgcttgaataatttgaaatgcttctgtctatatgatgaaattttcttgatgactggttgcctttggaaataatttttttgtttgctgtttatgaatagctgacttcttaaatccaggtgtatacgttttattgttgctcattttatcttacagttgcagagctgttcttaaccaaggcaagttaataccatatgaaataaatactcctttttgagtatgaatttaaaatattttttatcaaaattataagtggcattataaaatgtttcaactggtaaaatgctaactttaaatagtttttatttttatactttattgtaattataaaacaatctatactgttactgtttgcgttttactcaagaaaatgcaaatacttagtgaagatactagaggctacaaaatatcatgaaaagaatttgaagaagacctaaaaaatggaaatatatgtatgttcacaaatgggaagacttagtattgttaataaggcaaattgatttagagattcaatgctattgctgtgaaaatcctagcttccttttttttttgcagaaattgctatgctcattctaaaattcatttgtaaaataagaatagtctgaaacaatcttaaaaaaggtgaacaaagttggaagacacacttcttaatttcaaaactaaccgcaaaagtataataatcga

SEQ ID NO: 700216 - DNA, 188 bp, Homo sapiens
gaatgaaacctgacagtggtgccaaactaagaagaaaattaattctaagtgtagatcctttggctagcaggatagaggtattgaataaatgctggtactctctgctcctttctctctcctctctttctctgtctcctcccatcccrtcactctttctctcttcccatctttaggttgttaaccactca

SEQ ID NO: 700217 - DNA, 586 bp, Homo sapiens
aggaaagggggtttctcacaggctatctctacagcttaggaagttttctcaggtgctagctctaaaatgatggagggattttcattgttcatatctataatgtgggatatctctctctactgtgaatgacatcatctccaggctatctctccacagtgaaggcagcatctgctgggctgtctccacagtgaagggagcgtctgctgggctgtctccacagtgaagggagcttctctgagccatctccatggtgaaggaggcatctctgtggctgtctccacggtgaagggggcatctccagggctgtctccacagtgatgggggcttctccagggctgtccccacagtgaatgtcatcttcttgatgctgtctccacagtgaaggaggcatctcgagggctgtctctcctatgctgtctccagataggccgacagcatagcataaaagtgcagcttaggatgaactgcctctgaataagtgtaaaccaagcattttagtgcaaagcagtgaaygtcactacaaagtgctgtacaggatccactggtagcagagggtgtcagacttcagttctgattgagaggaata

SEQ ID NO: 700218 - DNA, 586 bp, Homo sapiens
aggaaagggggtttctcacaggctatctctacagcttaggaagttttctcaggtgctagctctaaaatgatggagggattttcattgttcatatctataatgtgggatatctctctctactgtgaatgacatcatctccaggctatctctccacagtgaaggcagcatctgctgggctgtctccacagtgaagggagcgtctgctgggctgtctccacagtgaagggagcttctctgagccatctccatggtgaaggaggcatctctgtggctgtctccacggtgaagggggcatctccagggctgtctccacagtgatgggggcttctccagggctgtccccacagtgaatgtcatcttcttgatgctgtctccacagtgaaggaggcatctcgagggctgtctctcctatgctgtctccagataggccgacagcatagcataaaagtgcagcttaggatgaactgcctctgaataagtgtaaaccaagcattttagtgcaaagcagtgaacgtcaytacaaagtgctgtacaggatccactggtagcagagggtgtcagacttcagttctgattgagaggaata

SEQ ID NO: 700219 - DNA, 586 bp, Homo sapiens
aggaaagggggtttctcacaggctatctctacagcttaggaagttttctcaggtgctagctctaaaatgatggagggattttcattgttcatatctataatgtgggatatctctctctactgtgaatgacatcatctccaggctatctctccacagtgaaggcagcatctgctgggctgtctccacagtgaagggagcgtctgctgggctgtctccacagtgaagggagcttctctgagccatctccatggtgaaggaggcatctctgtggctgtctccacggtgaagggggcatctccagggctgtctccacagtgatgggggcttctccagggctgtccccacagtgaatgtcatcttcttgatgctgtctccacagtgaaggaggcatctcgagggctgtctctcctatgctgtctccagataggccgacagcatagcataaaagtgcagcttaggatgaactgcctctgaataagtgtaaaccaagcattttagtgcaaagcagtgaacgtcactacaaagtgctgtacaggatccactggtagcagagggtgtcagacttcagttctgattgagrggaata

SEQ ID NO: 700220 - DNA, 1039 bp, Homo sapiens
ggagcctctgattattgggttttttgtgtgatttcttttcccccatcctgtcaattattttgaaaatctaatagtatatgagtgaagcctggaaaaaaaaagcctaggattctgtgtactgctcatccctacacatttttttgcagtttacttgatctagagttcaaagccttagctagcttaggatttgagtgaaaggcttagctagtaattgtattaatggcacatattttgtcaagaatctcacagaggtgttaaagaaagccagaaagctgtattgaattgttactacatcttatttacccaaatcccttctttcagtatctttgcaagcccataaatcaaaatgtttcactgagttttcaatccctgttattacatttagagaaagaatttacatttacctaaaagttaatgattccaatttatgcttagcttttccagaataaagaaagttagaaaatcatttttataaaggcttaactcaatccctgggcaattttatttgccctacacttttctgcctaccattctgtggtatcattctgattattcagagatcatagatacaaagtatattccatgtttaaaaacatcataattttgcccaaagataaaataatccttcagtatataaaggctatatactggctatattggctcaactgtaatatgatacaatatttattcagagagatacaattaaggtgacaraagtgatagccccacctcattttgattagagatgtgtgagtatagcctaaaatcatgtttgtaaaatacaaaattttgtctcgtttattgtttttcatgcttttttctaagattttgaaactatattaaaaagtatgctgtggttgatggctttcttgttgaatacatttcatttgggaggtgatattttttctcattttaaacattctgctatcttttagatagaaacattcacaaaatcttatgtgtaaatgaatcatgaagagaaaaaaataattccctcactcaatatgcaggagtataaacattcaaaagaagaaaataa

SEQ ID NO: 700221 - DNA, 667 bp, Homo sapiens
gctgaatgatagaggtttccagagatttggagtgagtggctcaccttagatcataactaagggaaaccatatcatctaagaagccaaaccctttttacctagatcagaaatgtgttgagcagcttatattctgtcagttttgtggtggtggctgttgttgtttttggaagcaaggaagtactctcctagctgaaatacaagaaaaagaagaatagataaaatgttctattctctccccccttgcctcgttgtgtgctatatccaactgaaaacatcattatagcagggaagaaccctgtacaaaatcactgcagatataagcctgaccatcttctattgactataataaggttgatgtcctaattggttcatataaatgccacaggaattatgcaacatggtcctgacagagaccactttcaccctgaatgaattttagctgcagtctcaaattccactgtgtatcacagtagacatcttgttggtgtggagatctggatttttaaccattgcctacaagaagttctgttacatgtagtttgtcttgaaaaataatgtcctaagaagtaaacatcccaaggccagcaaagtaatacacaaatttagatttatawtgttgcccatatgagttaggaaaataacatctaatattatgtggcatttatta

SEQ ID NO: 700222 - DNA, 667 bp, Homo sapiens
gctgaatgatagaggtttccagagatttggagtgagtggctcaccttagatcataactaagggaaaccatatcatctaagaagccaaaccctttttacctagatcagaaatgtgttgagcagcttatattctgtcagttttgtggtggtggctgttgttgtttttggaagcaaggaagtactctcctagctgaaatacaagaaaaagaagaatagataaaatgttctattctctccccccttgcctcgttgtgtgctatatccaactgaaaacatcattatagcagggaagaaccctgtacaaaatcactgcagatataagcctgaccatcttctattgactataataaggttgatgtcctaattggttcatataaatgccacaggaattatgcaacatggtcctgacagagaccactttcaccctgaatgaattttagctgcagtctcaaattccactgtgtatcacagtagacatcttgttggtgtggagatctggatttttaaccattgcctacaagaagttctgttacatgtagtttgtcttgaaaaataatgtcctaagaagtaaacatcccaaggccagcaaagtaatacacaaatttagatttatattgttgcccatatgagttaggawaataacatctaatattatgtggcatttatta

SEQ ID NO: 700223 - DNA, 579 bp, Homo sapiens
tatgtttgaaatacacaaatacttaccattgtgttacaattgcctacagtagtcagtagaggaacatgctgtacaggtttgtagcctaggagcaataggttacaccatatggcctaggtatgtagtaasctataccatctaggtttgtgtaagtacactctatgatgttcccttaatgaggaactcacataatgatgcgtttctcagaatgcatccctctttgtaaatattacttcctgtagtcattacagcaaccttctgtgggtctattgtaatatttattttgcagataagaaaattaaaccttagaactgttaagtaatccatccacagtcctatccagctaggaagcaacataaatgaaaactttctccaaagctattagatatcatagtctagcaagctaggataacaattcctgccctacttacctcgtaggatttttgtgatgctcaaatgaataatagatacattagatttaaacagtacttcccacccttcaaaacaagttatgaatattttaaaatgattgttattgagattttcaagtatagcaaaatgttgagttttggaaataac

SEQ ID NO: 700224 - DNA, 579 bp, Homo sapiens
tatgtttgaaatacacaaatacttaccattgtgttacaattgcctacagtagtcagtagaggaacatgctgtacaggtttgtagcctaggagcaataggttacaccatatggcctaggtatgtagtaacctataccatctaggtttgtgtaagtacactctatgatgttcccttaatgaggaactcacataatgatgcgtttctcagaatgcatccctctttgtaaatattacttcctgtagtcattacagcaaccttctgtggktctattgtaatatttattttgcagataagaaaattaaaccttagaactgttaagtaatccatccacagtcctatccagctaggaagcaacataaatgaaaactttctccaaagctattagatatcatagtctagcaagctaggataacaattcctgccctacttacctcgtaggatttttgtgatgctcaaatgaataatagatacattagatttaaacagtacttcccacccttcaaaacaagttatgaatattttaaaatgattgttattgagattttcaagtatagcaaaatgttgagttttggaaataac

SEQ ID NO: 700225 - DNA, 1371 bp, Homo sapiens
gaatgacagtaaaatagtttcccatagtaatatttcttctgcagaggtgagtgtggctgaaaatttcttgggccaagtatttcctatgttcttatcactcataaagcagcgatacgagagcctgggaaattatattcacaacacgtcgtgaggctgctaatttccctgctaagctggttatgcttctctgcaagggttcaaagttaccaaatccaagttttctgtggttgtaataaaattctgctccagtgaacaaaaagaaatgtgcatattaatcaacatgaagtggatttggttgaattttctcatgtcactccagctctggagacaggcaagccttagaaagtgcctgtggtttcctaagagcaggatttaagagaacctgtgtttcagagagggaggcctattattcaggggctcttctgtgcagatctactgcatataaaaactctgaggttctrtagtttctgcttctcttttcatacaggaattaggcttgtttctccaaggacagccacttaggcatgaacccaggggatccctgataaatcaaggatgtgttgcttgcattggggatttgaggatgttaagtgtttctcttgaatgaggaacataatctataaacagagattactgaactctgtctgagcatctgctggatattttaggggaatgtggcctgttaagagtctggaaatcagatcacgtgggctaaaccctgtttaattacaggacagggttgattctgggacagaactttgactaaagcctcatcccaacaaaatcccaattctgccatagtccaatctcccagctagtatgtaacctacattccatcaccaagctgaagaaccggctgaacaagtttactcattactgaaaatggaaacacatttgtaccacagaaaacaccaagatttaggccagctagatgcttctcagagtaagatttggcctctaattttgcccagagatcctacatgagaatctctcaatttgtatttcaaagtaaaggctttctatctccagggtgtgtgtgtttacacatcaagtggaaagatcaagcaagcaccagttccagaacgagccaagaaatctgcccacctcatagtgtagccgccggactttgctcatagctggcaggctggactgcttcccactgatgttccgaaacacctgaaataccatgaagcatagaaacaggaagtagaggcagaggcagattccagccacgatgatgaaggccatctggtcgtgtccagtaaaggaaacaacgggctagccaaggccaagttgagccgggtccaggcccttctccccaggtctgttggcaatacttgttttgtctccaaatatgtagaaaattttcaa

SEQ ID NO: 700226 - DNA, 3661 bp, Homo sapiens
agaagtcttgagcctattccctttcttctttctcccaaacacgatagtgcactaggtggttgtttcttcttcctttgatagattttcaaaacataaaaaaaagaaaatggatgctctgattacttaagagatgtgcccacattttcagaactagtaagtgaaagttgggactttgcccagtctgccagccagctaagcccacgggtctcctgctctcacaggttgttggctcaacaatctctagaggcaaaggcccacacaatggagacctgcaacaagaccctgtctcctaggagtcagctgctttgtcctcagggtgtccttgggtgaggcggtaccttacctacgtgaagcccagaaaagagaagagacaaaagggtgcagtttgctactgcaatggtgaggagaaaatgtacaaattgggggaaacagtaaatccagtatcaggctactctgggggattcatgtcccattcccttcccttcacagttccacattctagacttgtatgtgaagataagctgctttttctcccaaatgcatatgttaaatgtgtctcacatacacacacacacactgcagttgctatgggaaccatcctggagaatttcctgtcttttatgcaattaaaatttcactctcacatcttcttgaagtggaatacactttcattcacaagaggacactaagaaaaaggtctcctgatgagtttcatttccaatgagcaggctgaatttctccaaatcggatcatcttccaagagactcccagcacgctggcaatcatcgaattagtcctaattaatgttcaggtgagcatacaatgctcaggcactgagtgagcctctctctcctcttggctctgcaaactacagcttccctgctccctctcagagaccctctaaaagtctcttcaccttcctgggcctctaccagccatctgtggcagaccagaaagaagggggagcaaatgcccattaattcaaggctgcaggaattctgccattgtgacaattctcagagggctccactccagttaaccttccctctctcggtggagaaggaggctgcaaatgactcttgttaatacattaatgtaagctagccaactatttcaaagcactgtggaggagtccatttacaaacctaacctgggaattgccaagtcagcatatagaaggaccgcttgagcctatgtacagataaaaatcagttttatctgatatggtttggctctgtgtccccacccaaatctccatgttgaattgtaatcctaatgtgttggagcagaggcctggtgggaggtgattgcgtcatgggggcggatttcccccttgttgttctggtgatagtgaacgagttctcaggagatctggttgtttaaaagcatgtagcgttttcccattcgcatgctctctcctgctccaccatgggaagacatgcttgcttcctcttcaccttccaccatgattataagtttcctgaggtctccccagccatgcctcctgaacagcctgtggaactgtgagtcaattaaacctcttttctttgtaaactacccagtcttaggtagttcttcatagcaatgtgagaatggactaatacattatctattaatttatctattatttagttcattgggttggaagcagaagacctaaatttatatctcatttgcaatatttaccgcctatgtgctccacaaatattcaaaattccttgaaccacacatttctcatctggaaaacagggctaacaatgcatagggtagtgtataccagatgatgtggtaaatgacaaatgacagtgtgaactttgcaaattgcagaatgtacatgtaagttggttttattgaagttattgccaataaggccaagttcatatacaacttgcttgccaaactgtgagtgaaaaatcacagttcactctattattttattacttaaaaawgtttttagtgagtgacgaatatcagggcacatgtacatgtgggcggtgagattgccatgaaagtaggcaccatgctggcttaatctcactgggctgggatcaaacctttcttatcaattccttaaagcaggataactgccctgtatctgaaagtaaagtgcttaggcttcactgaaaaaacaaaagccaaccacttagaatgagatactcctgggtaactctggactagtcagttttcaatacataaaaccactctttctgctatttaacccagttttacaaataggcataaaaatgagccaatgtcttagagaagatgggagcctgaccttgctcctcagaatgcaggaacacaaatctgctgaggacagaaaatatacatgaaagccccagcacactgaccgagagtctagtcatagatgattgcagttgctatgacctaaactgaaactgattattttccaaagtttatgtcccgcctacctcctgtggactcagctgctctcaggtaatatgactgtaatgaatgcttccaagattccaagaaattgtgaaggagctggtgatgaatatttaataccgagaggtgaaggatgataaataaactgcatttctaattttctctctgatgaggacgttctacaaaggcaagcggtgtgcaaagcatttgggatggctcaagcccaatgacagtagtgatcaggctcctgcttgagagaggccactatgtgccagacacacctgggcacttggcagtcatgttctcacagcaccttcagaagggcctggcaagctaagaattcctctcaccattttatagacaaagtaactaaggtgcagagagggtgaacgacacaccacacagccagtacatgatgggaacagacatgggcatgagcgtgtctgagtccaggacagcacggcacccctcccacaggcaggactgggaagaaggaattccagcagtcattgtcctaacaatgttcaaatagcataggcttgatgacacgttatgaatttccagagaaatttaatgcccttatgaggaacacaaggttgatggaaggaatcattgagtgatctctctactattgaactatctacttcccagacctttccttcgccaggattttcacatatatacacatatagagagagagagatatgttatatatatatgtatgttatatacatgtatatatgttatacacacacacagctattccagtgctacatgtgattttatatatataacaaacagccacacatttgcttgctattccaaaatcacttattgaatatctcccatatataatgtaagatattagacttattaggtgataaaaagatgattacaactcagttcttatcctcatggatttcagagactagcaggagaaaacctacatacttagattacaaatatagttatattacaatagttataatgctacaacatagtaaatgtcaaatcaaattataatttgacatatcatatatatataatactctaacatagtattgtgtccagaatttgtgggttcttggtctcactgacttcaagaatgaagccgcggaccctcgcagtgagtgttacagctcttaaggtggcgcgtctggagtttgttccttctgatgttcggatgtgttcggagtttcttccttctggtgggcttgtggtctcactggctcaggagtgaagctgcagacct

SEQ ID NO: 700227 - DNA, 2151 bp, Homo sapiens
ttcagaccaaatggttcattgcatttaatgttctctacatcactaagagggatagatggaaactgcagggcccttcctgcgaggcggtggggcagagaataggttcagtgttaagggaattaggcagtgtggctcaaccctgcctctgtaccattctttctgtgaccttaggtgagtcccttgacttctctaggacttggtctccattgaaacatgagcagattggcccaattggataaccccttccagctctaacattttgtgttgaaactattaaacagacatttatcaagcacctgctgtatacacacatgacattgtactaggggctgtgctgggaaagaccaaaatcctgccctgaagaagtttaggaagtatctctctggtttgagtgataggtaaggcccctgcataggcagcccaaggtggaagctcatgagctggtgtcccctgctgtcaccctgctgtccccacctacagatcagatttgtagtagctgctcctttggacacagtgcctcttggtccatgtttatcttttagggcagcaggcttcttttgcaagaggccatggtctgggggccatactctgtgtcacactactctgccattgtagggagaactggtacaggcaatatggtaaataaatggatttggctgtgttctaataaaactttatttgcaaagatggtttgctgaccatgtgttagtcattcaaaagactaacaccctgtcttaaactccagaagtggttgcctgcacctaactggggtctgtggacctggccagataattcctaaacatgggccaggctccgcatagaccccactttcagtttttcatcatcagagacctgtctggaggtcttgttattactgggcttgttctacagcaagagcattcaagactctccactagagagtcaaaggaactgccaaggattcccatgggcccccagagccaggagagcggatgcttgccacctttgtctttaggagcagatccttctatccagacagaggctctttgattgagattgacccaacaaagccagcccgtgcccgtttttggaaacacccayaggctcttaccttgtttccacatctcttagcctcttcagaatgttctgcaaggaaagaatgctgtctggctctgtgttccagggttgtgttggcagaagagttggtgggggttgtgcagtgtgagaaggcaagtcatgaagagttgccccaggacattttccttgtcaggaataagccaggctaaatgtgccctttgggcattgaaaattggaaatggctggtcctagaaaaacagctgccttaaatccttttggggcatgaataaatactttttttacatcctggaaaattgtggttttgactccagcaaggaccccagggaggaggggcacttgttccagaagctggtatttcagcaagccgtgcttgggtctctgttttttgcagggagaggtgatatccagcctcagttggacagtgctctccaagatgtcaatgataagtatctcttattggaagaaacagaaaagcaggctgtccggaaggctttgattgaagaacgtggccgattctgtaccttcatctctatgctgcggccagtgattgtaagttaatggaaaactccagaaggtttaaactgctggtgtagaggtggcttccttctaattttatccatccactgttgagtcatggagaatctactgtcaggaatcatgatggtggtatctcctgtacagaccagcgattcagtgcaagttgatggccatgtagctcactcctcattcactgttctagtaccacttgttccccgttactttgtctcaccaagtcaagaaggcccagcagggtggttctcaaagtgaggtccccaggtcagcagcatcacgtgggaactggctagaaatgcaagttcttgggcccaacccagacccaccaagtccaaacctctgggggtggggacccagtcgtctgtgttttaaaggagcactccaggtggttttgagactcactgttgtagccgagtactaaggggtgaccatgagatgaatatccaagagcctcaatgaatcaatttagacttaatttttaaggaaatcatttgcatgccgtaattgagaacttgcactgca

SEQ ID NO: 700228 - DNA, 2151 bp, Homo sapiens
ttcagaccaaatggttcattgcatttaatgttctctacatcactaagagggatagatggaaactgcagggcccttcctgcgaggcggtggggcagagaataggttcagtgttaagggaattaggcagtgtggctcaaccctgcctctgtaccattctttctgtgaccttaggtgagtcccttgacttctctaggacttggtctccattgaaacatgagcagattggcccaattggataaccccttccagctctaacattttgtgttgaaactattaaacagacatttatcaagcacctgctgtatacacacatgacattgtactaggggctgtgctgggaaagaccaaaatcctgccctgaagaagtttaggaagtatctctctggtttgagtgataggtaaggcccctgcataggcagcccaaggtggaagctcatgagctggtgtcccctgctgtcaccctgctgtccccacctacagatcagatttgtagtagctgctcctttggacacagtgcctcttggtccatgtttatcttttagggcagcaggcttcttttgcaagaggccatggtctgggggccatactctgtgtcacactactctgccattgtagggagaactggtacaggcaatatggtaaataaatggatttggctgtgttctaataaaactttatttgcaaagatggtttgctgaccatgtgttagtcattcaaaagactaacaccctgtcttaaactccagaagtggttgcctgcacctaactggggtctgtggacctggccagataattcctaaacatgggccaggctccgcatagaccccactttcagtttttcatcatcagagacctgtctggaggtcttgttattactgggcttgttctacagcaagagcattcaagactctccactagagagtcaaaggaactgccaaggattcccatgggcccccagagccaggagagcggatgcttgccacctttgtctttaggagcagatccttctatccagacagaggctctttgattgagattgacccaacaaagccagcccgtgcccgtttttggaaacacccacaggctcttaccttgtttccacatctcttagcctcttcagaatgttctgcaaggaaagaatgctgtctggctctgtgttccagggttgtgttggcagaagagttggtgggggttgtgcagtgtgagaaggcaagtcatgaagagttgccccaggacattttccttgtcaggaataagccaggctaaatgtgccctttgggcattgaaaattggaaatggctggtcctagaaaaacagcygccttaaatccttttggggcatgaataaatactttttttacatcctggaaaattgtggttttgactccagcaaggaccccagggaggaggggcacttgttccagaagctggtatttcagcaagccgtgcttgggtctctgttttttgcagggagaggtgatatccagcctcagttggacagtgctctccaagatgtcaatgataagtatctcttattggaagaaacagaaaagcaggctgtccggaaggctttgattgaagaacgtggccgattctgtaccttcatctctatgctgcggccagtgattgtaagttaatggaaaactccagaaggtttaaactgctggtgtagaggtggcttccttctaattttatccatccactgttgagtcatggagaatctactgtcaggaatcatgatggtggtatctcctgtacagaccagcgattcagtgcaagttgatggccatgtagctcactcctcattcactgttctagtaccacttgttccccgttactttgtctcaccaagtcaagaaggcccagcagggtggttctcaaagtgaggtccccaggtcagcagcatcacgtgggaactggctagaaatgcaagttcttgggcccaacccagacccaccaagtccaaacctctgggggtggggacccagtcgtctgtgttttaaaggagcactccaggtggttttgagactcactgttgtagccgagtactaaggggtgaccatgagatgaatatccaagagcctcaatgaatcaatttagacttaatttttaaggaaatcatttgcatgccgtaattgagaacttgcactgca

SEQ ID NO: 700229 - DNA, 607 bp, Homo sapiens
tacaaaaaccagtcaggcgtggcggcacgcgcctgcaatcccaggcacttggcaggctgaggcaggagaatcatgggagcctgaggtagggaggttgcagcgagctgagatcacggcagtacagtccagcctcggcaacagagggcgaccgaagaaagagagagggagaggggcagggggagggggagggggaggcttttttttttttctgagacagagtcttgctgtgttgcccaggctagagtacagtgatgcagtcacagctcactgcagcctccagctcctgggctcaagcratccacctcagactcccaagacctgggaccacaggcacacaaccacgccccgctaattttttaatcttttgtagagatgggggtctcattttgttgcccaggctggtctcaaactctgggctcaagcagccctcctgcctcggcctcccaaggtgctggaatttcaggcatgagccactgtgcccagccaagagttagctattattaatacacatgtaaagtgcctaggaatacaatccgtgggttagtattccctttccccttctcctggaatctggccatggtcaaaatgcggtgtcctcatcacatga

SEQ ID NO: 700230 - DNA, 624 bp, Homo sapiens
ccgacgccagcatcatcgtcctgttcctttgtccgatgggcagctgccagagctgaggactgaagtatacggaggcttccctttctctttttaaattctagatattaagcatagccttggtcaaacacagttaatggtgatgtttattttattaatagaataagtcctgaggctttcacaaaataattttgttctgccaaaaattaagaataaaagtctttacgtaaaagatgtgtgtggtggtggtggtggaagagagctagtttttatctgtaagaccaagttatcagattaacatgaacattaaagaaaaattcctcttcttagtgctatgttgaaccataatgataacaataatcagaaacaaaaataattcaattgttgactctacaagtatttactagctgcccatgtgaatgacactgtgtgcgacactatgataaaaatagtaataaaataagacagamctgcttcaagaagttcctaatctgattgaagaacagtacaacaagcaggcaatgacaatcccatccaattagtacctacagcagaatgggaatgtagaggagggacccctagtcagtgtttgtcatcccttttcacttcacacacacacaaagaagg

SEQ ID NO: 700231 - DNA, 1550 bp, Homo sapiens
aaatttttctccttttgtaaaaaaaagatactgggaccttgaccgaagaatttaatttatcggtcttgggcagaaccctggcattagcatttgtttaaagctcattaggcaatgccaggacgaccttgttgagaactatggctacagacggagagcagggcctggtakaagaccacctcaccaacaggtaggacctaaatttatcactggaagaaaacactgaactggaagagagagagagatgtgactaatggaaatctcacacaaaacacgatgttgcatcaaggttgatcatctctacacacactggaccaaaagagattttcctggggctagcattagggaactgcttttgaagctcctcaaacacaggtggatgtctcactttaacatgacttagctaccaaagagtcaagtaacaccacacagtgttgaaaacctcaaggcacccaacacccaataaattctcaaacagaaatctgccagaggatcagaaacctctgatctcttacaactaagagctttctgcaccaaacacataaattctcttaaagttctacaaaagcccacaagtaacatttccctccctgatctgttcaactgtacattttcatagagggtgtccgggagggcaaaggctgggggtggtgggtgagcagcaggcagaagagaggatcaacgtgcagggatgtggaaacgccagtacagaaggcacgtgagccccacggggctggggagatgggggttatctcaaggtatgggagggacgtggagttgatacaaaggctcagggtgtgatcgtggggtgggggcagctgttgggcagagcaaaggagatggagttcaagaggcgcgggactggaattctagttcttcctgaggacacgggagacgactgagagagtcaaggaaaaggggttggagaggaggctgggataagccagaggccatgtccttggtgaacaagaaagagtggcgtagtccaggtgctcacggtgagcactgagggcagaggtacaaccaaaagccagcctgtctgaccatggctctttccagcagccccttgtgaaggagcagccggcaccggccggatgtcagagcggctcctccctagtgaccactgcctatcccgtgactcagcatagtccgcgcaggcaccaaagccaggtatcctttcccagcctgctgcttccatctgctgagggtgcaggggcagacaggggctaaaagacccaggaattcagtcccaatctgcacagggaatcatctaatgagacttctaaccactggtaattctggactccctaaaaattattactattaagaaacaaaccaccaccctagaaataaagatttctgtcagtctggaaaaatgccaggaatcaataaaccaagtcttcttttttgttctatggtcaccaagggccctggctacaaaccaataaaagatcatcagtacaacataccagattagctgagtaacagtggtcacaaccatatattccagattttctcagacaatgccagttctaaatacttttagcctgtta

SEQ ID NO: 700232 - DNA, 655 bp, Homo sapiens
tgtgtgaaatgtctgttgccctgagcacggggtgacctgcctgtttaatacgcgttgtggcggcctcgcacttccaggtttgtagtgtttccacattcattcactcgcgaaagccgtggtgtgagcagtgcagaaatgaatgtcttcawgtctgtctttcagatgagaacacagactcacatggtcaaatgcctgtccaaggcccagggttagcaagtagcagagctggggctcgaacccatgttctctgaccctccagccagtggcatttcccctaacccatctatactctcctctaaagtggcatctccagattgggtctgtagtagtctgctagggctgccataacatcaagtaccagactgaatggcttaaacaatagacatttattttctcacagttctggaggttagaagtccaagatcaaggtggcagggttgatttttttttgttgttgttgttgttgttgttttttgttttttgagaccgagtctcgctctgttgcccaggctggagtgcagtggcacaatctcggctcactgcatgctccacctcctgggttcacgccattgggtgcttcagcctcccgaatagctgggactacaggtgccccgccactatgagaggatgctttcttgtatttttagtagagaca

SEQ ID NO: 700233 - DNA, 655 bp, Homo sapiens
tgtgtgaaatgtctgttgccctgagcacggggtgacctgcctgtttaatacgcgttgtggcggcctcgcacttccaggtttgtagtgtttccacattcattcactcgcgaaagccgtggtgtgagcagtgcagaaatgaatgtcttcaagtctgtctttcagatgagaacacagactcacrtggtcaaatgcctgtccaaggcccagggttagcaagtagcagagctggggctcgaacccatgttctctgaccctccagccagtggcatttcccctaacccatctatactctcctctaaagtggcatctccagattgggtctgtagtagtctgctagggctgccataacatcaagtaccagactgaatggcttaaacaatagacatttattttctcacagttctggaggttagaagtccaagatcaaggtggcagggttgatttttttttgttgttgttgttgttgttgttttttgttttttgagaccgagtctcgctctgttgcccaggctggagtgcagtggcacaatctcggctcactgcatgctccacctcctgggttcacgccattgggtgcttcagcctcccgaatagctgggactacaggtgccccgccactatgagaggatgctttcttgtatttttagtagagaca

SEQ ID NO: 700234 - DNA, 655 bp, Homo sapiens
tgtgtgaaatgtctgttgccctgagcacggggtgacctgcctgtttaatacgcgttgtggcggcctcgcacttccaggtttgtagtgtttccacattcattcactcgcgaaagccgtggtgtgagcagtgcagaaatgaatgtcttcaagtctgtctttcagatgagaacacagactcacatggtcaaatgcctgtccaaggccyagggttagcaagtagcagagctggggctcgaacccatgttctctgaccctccagccagtggcatttcccctaacccatctatactctcctctaaagtggcatctccagattgggtctgtagtagtctgctagggctgccataacatcaagtaccagactgaatggcttaaacaatagacatttattttctcacagttctggaggttagaagtccaagatcaaggtggcagggttgatttttttttgttgttgttgttgttgttgttttttgttttttgagaccgagtctcgctctgttgcccaggctggagtgcagtggcacaatctcggctcactgcatgctccacctcctgggttcacgccattgggtgcttcagcctcccgaatagctgggactacaggtgccccgccactatgagaggatgctttcttgtatttttagtagagaca

SEQ ID NO: 700235 - DNA, 655 bp, Homo sapiens
tgtgtgaaatgtctgttgccctgagcacggggtgacctgcctgtttaatacgcgttgtggcggcctcgcacttccaggtttgtagtgtttccacattcattcactcgcgaaagccgtggtgtgagcagtgcagaaatgaatgtcttcaagtctgtctttcagatgagaacacagactcacatggtcaaatgcctgtccaaggcccagggttagcaagtagcagagctggggctcgaacccatgttctctgaccctccagccagtggcatttcccctaacccatctatactctcctctaaagtggcatctccagattgggtctgtagtagtctgctagggctgccataacatcaagtaccagactgaatggcttaaacaatagacatttattttctcacagttctggaggttagaagtccaagatcaaggtggcagggttgatttttttttgttgttgttgttgttgttgttttttgttttttgagaccgagtctygctctgttgcccaggctggagtgcagtggcacaatctcggctcactgcatgctccacctcctgggttcacgccattgggtgcttcagcctcccgaatagctgggactacaggtgccccgccactatgagaggatgctttcttgtatttttagtagagaca

SEQ ID NO: 700236 - DNA, 648 bp, Homo sapiens
tgctttggctatgtgggctcttttttggttccatattctaaaacaattgggggggctgtgaagaatgatgatggtatttttaggggaattgcattgaatttgtagattgcttttggcagtatggtcattttcacaatattaattctgcccatccatgagcatgggatgtgtttccatctgtttgtgtcatctatgatttctttcagcagtgttttttagctttccttgtagaggtctttcatcttctttgttaatattcctaagtttttttttktttttttttttgttttgttttgtttgtttgtttgttttgcagctatgtaaaaggggttgagttcttgatttgtcataggtggcttttgttacattgagggaagtcccttgtatgccagttttgctgagttttaattgtaaagtgatgctggattttgttgaatgttttttctgcatctattgagataatcgtgtgatttttgtttttaattctgtttatgtgctataccacatttattgaccttttgtgcaggtatatctttctggcatgctttttttgtttgtagtaatattattctcccccttattctcttttttcttacaatactttggggttgtttgtttgtttgctttttgagacagtctcactgtgtc

SEQ ID NO: 700237 - DNA, 590 bp, Homo sapiens
cccatttatcaagtttaggtaggttgatatcttttaagtacagaacaagtctttcacagtcttttggtctgtatacacgaccagtattagtactgattaccatgcaagtctggctcagtttctgcaggagatgtcgagaagtggtttgtgcactacartgaactgtagcaatttgagtggaccggagttgtgaaaatgcgtacctgagcagcatcctacgaaaaatgcatgacatctgactttgataaaaatgcaaccaacaaaatacattttatactcaataagaaatttctatctcataaatatttcagtttctaaaatgtatatgatgataggaaaaatggtaaatacagatatggcttccataactatcaaagcaactttcttttagactagaaaaacataaattcatgttttaaggcattgtgaggactgttttcagccaaaaaaatcaaagttctcagaattaatctagtttgataaagtacatgtcaaatataccaaccctgtttccccacagttgaaggattttaagattttaagttccatgagtttaaaaaaattactatgattttatacaatttttaaaa

SEQ ID NO: 700238 - DNA, 1024 bp, Homo sapiens
tgacctttctgcactaattttttttttttgaggcagagtttcgctcttgtcacccaggccagagtacaatggtatgatctccagtcaytgcaacctctgcctcctgggttcaagtgcttctccagcctcagcctcccaagtagctgggattacaagcacctgtcaccacacccagctaattttgtatttttagtagagacggggtttcatcatgttggccaggctggtcttgaactcccgacctcaggtgatccgcccgcctcggcctcccaaagtgctgggattacaggcatgagccactgtgcccgtcctctgcactgatttttttttctagcttatgttttagattggggaaccttcatactcttagggactatctacagggctaagtagttactgtggttactattgacagacttaaagcaagaaaaatggtaatgcaagaaaaggaaaaagcaaaggaaggagataatttagaaataggagagaaaaaaagagggatgtgttctagatccttgctactaaaggtgtagtatgggggccagcagatttggcatcatctgctggcaatgcagaatcttgggcccaacctcagacttactggatcacaatcttcatttttcacaagatttttaggtgatttacatttaaattaaagtttgagaagcactgatttagagtgtcagaggtttactttggctcagtttgggcccctaagctgattgcaaacacttcattttaaggacattgtatatgaattcatatagaatagacctaaagagaagtacagtatctcataagttttacagacttttctacaggtcagttacccagacaccagaactgtcaacaactcagaagcaaacaaaaacaaaaaaaagaccccatatagctaaatcagagttcatgctgatatagctggtaataggagagatcctcaaatcttcatttggtgtttctttattttttgctatattttttataagcttaaataaactgaataggatattgaaggtagggaaat

SEQ ID NO: 700239 - DNA, 572 bp, Homo sapiens
aaaaaatcttgaaggacaccagtaaagtggcttcacaaaacggcaatattccatctttcagtgcccaaacttaagtagaaagcactgatctttaaaaggttttgaaaatctcatattcattaaaccagtccttttcatgtaagaaatgttgacaatctaacagctagtgacttcctgtatcaaaagaaacaaacaaacaaaaccatcaaatgctgattggcagcarcagctgagctatctaaagtcaaaaaaaaaaaaaagaaggaaaggagaaagagggagaaagagaaaggacaaccttctgtcacaaaggggctgggaaagtacagttatgtggtagactgccagaaatgacctgtggtatttatatgagagaaacccagatattagaggaggagctgctcatccctgctgtaagagttgcttactcagcgcaggagtagaaaatgtctttagtttgaaaattcgaagatactttaagcggaatggaaaaccaatgttaaagaactaaaatttaaagaatgctatataaaacatgtatatttaatggctattataaatgctaaaaataa

SEQ ID NO: 700240 - DNA, 938 bp, Homo sapiens
caattcacatttattttcttagagttctggagcccaaagtggatctccttgggctcaaatcaaatgtcagcatcatgttctttctggaggctctaggaagaatctatctcctttccttttccagttttgaaaggtccttgaytgtgattttctttcatcttccaagccagcaatggccagtcgagactttctcacatcacagcactccaccactgacacttttgccctcctattcccattcaaggacacttgtgattactttgggcccactcagatggtccaggataccagctgattaacaaccataattctatttgctaccctaattctcctttgctatgtaacatatttctagattctggacattagtacgtgaacatctttcggagacaattatttgtctacagatatattttctttatgaaaatgtgtggttttaataaataaatgtatttcaagaaatgaactattctattttcatgtcttgttgaaatggtccaagtctagagtagaagagaatcgacactttgtttactcctggtcagtttattcctcaaaaagaaccaaggtcaaggtatacccagagcagagccaagcttaaacaggaccaagctcaagaccaccagagtagggcaaggtcagaacaatcacagctgaaatttattttttccaattagactttgctgcttttttaaagaatacctgttctccatgagaggaaaccaatgacgttgcttgttatatgtaacgacctatttgcagacacacaagtctcaaagaggggtttatatgcagtgacttttggtacaatccctgtggttagtggaagcatttataccctgggaaagacttgaaattagtgctttacttttgcaaagcacacaacacttgagcactcccaaagtttttaaaaataaagtttgtaacaaattacttga

SEQ ID NO: 700241 - DNA, 938 bp, Homo sapiens
caattcacatttattttcttagagttctggagcccaaagtggatctccttgggctcaaatcaaatgtcagcatcatgttctttctggaggctctaggaagaatctatctcctttccttttccagttttgaaaggtccttgactgtgattttctttcatcttccaagccagcaatggccagtcgagactttctcacatcacagcactccaccactgacacttttgccctcctattcccattcaaggacacttgtgattactttgggcccactcagatggtccaggataccagctgattaacaaccataattctatttgctaccctaattctcctttgctatgtaacatatttctagattctggacattagtacgtgaacatctttcggagacaattatttgtctacagatatattttctttatgaaaatgtgtggttttaataaataaatgtatttcaagaaatgaactattctattttcatgtcttgttgaaatggtccaagtctagagtagaagagaatcgacactttgtttactcctggtcagtttattcctcaaaaagaaccaaggtcaaggtatacccagagcagagccaagcttaaacaggaccaagctcaagaccaccagagtagggcaaggtcagaacaatcacagctgaaatttattttttccaattagactttgctgcttttttaaagaatacctgttctccatgagaggaaaccaatgacgttgcttgttatatgtaacgacctatttgcagacacacaagtctcaaagaggggtttayatgcagtgacttttggtacaatccctgtggttagtggaagcatttataccctgggaaagacttgaaattagtgctttacttttgcaaagcacacaacacttgagcactcccaaagtttttaaaaataaagtttgtaacaaattacttga

SEQ ID NO: 700242 - DNA, 1737 bp, Homo sapiens
ttagcaactagctttagctagtttccgatacaagcactctaggccactccttgactggccttcccttacatctgcaatttgatgaaattttcagttaatgattattttaatggcccattgtctctgtgtctttgtggacttccttatatcttcaaaaacttataaatcataaaaacaaaattaaaaagttatgattcatgaattgggtgaacacaggtggctcagggtcatgaagccctgcctggattgacggcccatgagagtgattcccctccaggctcaagaaagagtagggagcctcttacctctctggggcctggaggagaacaagatgttggcttcctcagcatggagagggcactggcccactctgcaggtcaaatctgatgaaaacagagtaaacacagggcctctgatcagactggtgatggagtaggagcagggactcttgggttttaatacctctgtctcctgatctttagaatattctaaaacattcagctttacttccaaccattcacaggtggatcactacaggactagccaggcttacatgaataacgcattggggtgaattgtgtggttggagccagaatattctggattcgaccttcatctgtgcaggtagctgctgtgtcccacaacccacactcctcaactctggagcatccctctccttcactttatgtctgcctgcatctggtccccaatccccacctccaggcagttctgttggtcctgcatccctctaggactgcatcatagggtcccacttagaggttccttggtatttggtgacacaagaatattgcactgtccctgcagcctttggagtccaggcttggagaggtgggcggcccaaagccctcccattctcccctccccatgtccccctgccaacagcacagcctgtagatagctatgctgggctcccccgtacccacctctgtcctgttgtcttagcaactagaccaaggaagttggttttcttggtatccaaggttaccccgtgttcagacaaatgctgcacactgcatgtgcatatggatctacagttggttcagcgagaggaggctcacattgtatatgagttatacaggtgtgtgtaggtgacatgctgaatctgggtctgattttgagataccctttcatttgaataaccagaactcagggttataactaggaacattgggtcctctttgcaatgtttaacatgatctctcccaaatcaacagaaagagctctgcttctataggggaagtgggctcttaaagragaggatgtgaaagaggggagggtgggaagggagggtgaatgttatttattttttgtttaggtaagtggatttatgaaagaaaagaacagggcatcttaatactttagagttgatagctctgggtgctatttccgggagtctcacagacctcttccaagactgtcagggtcgagcttctagttcaagggacacacatggcccactctgtatagtcagatctgattagagacagcaggccttcatgctgggagttccttggtgtctccaacctgctctatcttgcagtctgtagctgcctggggccaagactcttctctggcggtcacctgtgagcccagctcagcaacacaggttcctcaggcccatgggcccagtccagtgctgcttattcccaccttgactcattaacatccttttgtgttttctaaagcagtttcatagatatctcatgtgaccctgca

SEQ ID NO: 700243 - DNA, 1406 bp, Homo sapiens
ttttagcattttcatgtaactatcttgttaacacaaaaagtaagctttcattaattatatcacagtgcagagaaagacaaattactgtaagagaacagttgcatttcacactcacaatgtaaaacatcaataaatgtctgtaaactgtaataagagcttatagaaagcaagagattattcacaaagaactgaagaactggtcttgtagctgaatacagaatacctgtatgaaaatctctaattaaagtcaagtaagaatgagcttaagtgaaataagctaggtgcttggagttgaatactcaacatttctgagtaacagaagaataacactaggaacagaaattcagatagaagtagcttttaagtagcattatgtttcactaaaaacagagagcatatgcttgagataaaattacaagcttgttgaattgatacatataattttaaagaggtctgtggtatatataagagaaaataactcagttactgattataataaccatccccatgaatatcctgaagaagaaattttcaaagctggaattaaacctacataataataagggrtaattgttttttatgctaaattttactgttttatatcttggagattactaatttttgaaacttaaaatacctaaaatttaattatgattaacatttcataagccgtggacctgattgaaagtgatctcttgactgtttcatggaatgactaaatattgtattccctgactgacaagttttgtaatgtcaaggttatttgaccaaataaaattgaaatttcaaaaataatttcaatatttatttgcacaatgatgtcaagtcataactatattttctttaaatcatctcaagaataatttaccacaaaatgttgcagattatttgaagttattttgtctaattatttatttttagatgaagtaagtgaaagaaagaaaaacatagtaatttacctaatgataaaaaagccaaacttgaagaccaccaaaaccatgttatgccagttctaatgaagaataataaatcctatatttaaattttacagttgaaaaaaatttttttgaaaaatacatcgttaattaaatttaatttttctcaaacactttgtctttcaactgggagctctctgagagcagagatttttgtctgttttttatacttcctactttcttgatatctttttttattcaacatgaagaacagaggctggcattaaaaaataagctttgatagttgattctcaaatgcatgaatatataagtaacctttgatgtctctggcagaattgacagcaaaaaaggaggataacttttattggcacttgtaagttaggtacataagagttggaagtatattgcatagtacttaaaacttaatttaatgtgaacatgtaaattcaa

SEQ ID NO: 700244 - DNA, 625 bp, Homo sapiens
atatatttattcacaaattcagaaagctgtatagtttcacaatacttaaagattaacatttcagtttaattgcatagtacaaactcataagtacttagcaatttattcatcaataaaaatggacaaatggcacagaatagaaaacccagatataagaactcacatctacaactatatgatcttcaacaaacctgacaaaaataagcaatggggaaatcatttcccatttaaaatacggtgttaggataactggctagccatatgcagaaaattgaaactggactccttctgtacaccatatacaaaaattgactgaagatggactaaagtctcaaatgtagaacccagagctataaaaaccttggaagactacgtagtcaataccattcaggacatagacatgggcaaagatttcatgacgaagatgccaaaagcaactgtaacaaaagcaaaaatggacagatgggatctaattaaactaaagagtttttgcacagcaaaaraaactatcaacagagtaaacagataacctgcagaatgggagaaaaatgtcgcaaattgtgcatctgacagaagtctaatatccagcatttataaagaacttaaacagattgacaagataaaa

SEQ ID NO: 700245 - DNA, 625 bp, Homo sapiens
atatatttattcacaaattcagaaagctgtatagtttcacaatacttaaagattaacatttcagtttaattgcatagtacaaactcataagtacttagcaatttattcatcaataaaaatggacaaatggcacagaatagaaaacccagatataagaactcacatctacaactatatgatcttcaacaaacctgacaaaaataagcaatggggaaatcatttcccatttaaaatacggtgttaggataactggctagccatatgcagaaaattgaaactggactccttctgtacaccatatacaaaaattgactgaagatggactaaagtctcaaatgtagaacccagagctataaaaaccttggaagactacgtagtcaataccattcaggacatagacatgggcaaagatttcatgacgaagatgccaaaagcaactgtaacaaaagcaaaaatggacagatgggatctaattaaactaaagagtttttgcacagcaaaagaaactatcaacagagtaaacagataacctgcagaatgggagaaaaatgtygcaaattgtgcatctgacagaagtctaatatccagcatttataaagaacttaaacagattgacaagataaaa

SEQ ID NO: 700246 - DNA, 1000 bp, Homo sapiens
tgcattataaaatagctacaattgctttgaacgagtacaatgaatttagatgagcaatgcctggaaacaaacccggaggttatttcagaggttatttatgagacacaaatttctccatggagaaaatcagtgggatttggaagcagagatcaagtgtacctaataccataagcccagctcagcagcaggcaaggctcagtgcctgcgcctgcctgctcctcacactggggctgtttgcacaggccttcagagaattctcagtagcatcaaagcttagaacatttacctcctacagaatcactaatagctggcagttttcttttcagctcatgcactcccatagctcctacccttagctattctttcagaggccgctgttgccaggagcataggagtgctgaataccctcttggttttacagtctacctctcactgctaatttattttccaagcagagcagccaagcttctcaaaaatctgggtctcctctttttcacacttgttctaaaataatagccaggagaaggaaggcttggtggataatggctattccagccagggcaccacgcaccttgctcaagggtgggtggcctcatgataaggagaaagtgataaagggaattccgcagggtgctagttctcaaccaaatgggggtaggagagaagtgggggcagttttaccacygcccacaaggagacatttggcaatatctagagatagttctgactgtcatgactgggggaggggtgtggctactagcatctaatgattagaggccatggatgctgccaaatattctaacatgcacagggcagctgcatcagcaaaaactcatccagtccagaatgtcagtcacgccgagaaaccttgacctaagggcttctgaagctttttgaggtaatggcatgcttctctcctcttttgcccaagtcatttgagcaatttggaaaatatccatctctccctttctgtgattgccctgagtgcaaggctgtgaga

SEQ ID NO: 700247 - DNA, 602 bp, Homo sapiens
tcaacacttttatccccttaattattagcagcaatgatttattctctctcttcagttttcttgaccccttcacagaatgcacatacattctattaatctcactggtccctagtacaggaatcagttaagtgttttgtatgatccaaaagtgaatatttatttaacatttcaaagggttataaaaacaaacaaacaaaaagcaaaaatgaatacatgaaagactgaaaaaagagaccagaagtagcctgcaaagcctacaatatttactatatggccttttatttaaaaagttgccagtctttgttctaataagkagagctaatcctgtaagtatggacaaaattcctgaaagataaagcaatggtcaaggttggagaggcttgtgaattgtgctttgaaaaacactggcatttaattaaatggtgaagctagaaaaggcagtagaaagaaatacggaaggactcttacactcaaaaaaagtcaatgaacatgaaaaagtaaatgcaggacaaagaactcagatatgtcactgatggactgtgtttgtggtaccaaaaccaatgggaaaataccagaagctgtgggatgatgatattcaaagg

SEQ ID NO: 700248 - DNA, 610 bp, Homo sapiens
gaaagtatttgtccaggactggtatggtggctcacacctattaccccaactacttgggaggctgaggtgggaggatagcttgacgccaggagtttgaaactagcctgagcaacatagcaaaaccctgtctctgaaaaaaaaaattaaaagttagttgagtttggtggtatatgtctgtagtcccagctactcaggaagctgaagcaggaggatttcttgagcccaggagttcaaggctgcagtgagatatgatcacgccagtgccactctagcttgggcaacagagtgagaacccatctcaaacaaacaaaaaaaaagtttgtgtaaaaaaaaaacaccaakaaaaagaaattggtgccatttacattaactgactcatccaaattctctactcaaaacctgacttttttcactgacatttttgctgccccttaatttttaaaatgtatacattttctttttcctcatgagtatataggttggttaggagcaacagaaacttggtgcagcctgcacaaagacataattgctatcataacaaattgcagaacgttgggatgctccctttgacaatactgacagtcattgagacatactttttgaaatgaat

SEQ ID NO: 700249 - DNA, 602 bp, Homo sapiens
aagctcagagcagtggaggtatgtggttgggatctgtactgagacacagagtgagtgacagaggtgaaatctgagcccaggcccccaggactgctgccctagtactctttttgcccattatgttaaatctttcacttgctggtcaatcagccgtgaactgttctccaggttgactaattacttacaggtaaccatattgacttcttctgctaagaaagttaatgaagtgccctgaattcattttactcacaagaaattcaaaaatatgaacaaagtgattgccayaccgtgcacccctttgagagagaaaacaaaacacaacagctgcactgtgtcagagttaatcttatgtgagttctgcatgaatcaagttaggaatactgatctttcaagaaatgcagccgccctgcactgattcctggggatttaagactccatctccacatctgggggctcgtagtcagaaggggtcttaactgataactttgtggtctgatttgatcagtctcctctagtatctctaactagttcctgtactttgactcatcccccaattttcctgaccttctttgttttatctactgtattagggttctgtaggg

SEQ ID NO: 700250 - DNA, 2284 bp, Homo sapiens
tcaaaggtttgactgctgagcagtggaaggataggcacagtagcaatgaatagagagaaagatccccaagatagaattgagaacatcaggatagatacccatcacctttctcctggaccactgcaattacctcctgggtggtctctttatttgattttgactcctcaactctgcaggtgctagacaactctttctctagctctaacatccaaccatcatctataacagcattttttttttggtgaataacaaaaagtatgtttttacatgtagaactgacgcaaatgatacactatttagttcttgatttggggtagtttaattttatgtgtgatggtaaagtttctcgttgggttaaattttactgaaggtctctgtacttcctatgtctgtgtgttggcatctttccccagatgtagatgttttcagccactctctgcaaatataatttctggaaaataaattttccagttagaggagaaaagataattaagaataataaagaaagaccacaagaattatgggacaccatcaggaggtctaactctaatctgctccctagagatggccatcaacaaaaagagtttgggaaaaaaaagtatgtacctttgccctgtgctggggattttcatgtcaaaagctaggatgtagcagtcagtggcaatatctttcttattcctcactgtgtccccagtgtctacacatggcctcacacatgatgtgggataaatatttgctgattgaatcaacttgttaagtgctgtgagcaatactgaagtgaaaaaccatttaacttgggaaactcagtacatatatcaaatacattttttttttcttttatctttcatgacatctacctatgtcatgagaaaaactctttgggaattgttggttttcagtatagagcttagttatttggtacagaagacaataatctgcctgatctctgatgttccaccttccatttattgcctaagcagtatcaaatggctytcacttcacaccctgctttttattccttcctagcctttcttcatatcgtcacttttcgtaatttcttcagtttcttctgtttcttcccaactgttctcccctttcacctctccctcacctccacctcacatacagacactctgcctgccttaagacacagctctggcttcacttcctaaaaagcaccaggctggatgttctcactgcataacaccatcattacactcaccaccttgtataacaataatattttaaagattttttaataggcaagtcacttaataaatattttctgttcattaatgaaagaacagaaaataaaagatcacttgcaaaaataatagcttccattatctcttattatcttttaaatatttcaacactattgtctggtgtgacaaagactggctattcaccaaacccatttacctctcctcctcacagctaggctacatttctgacatcccttgaagacaaatgtggccataagactgagttctgagcaacgtgaagtgaatagaagaaaagtgtgttacttctatgactagctcataaaagcctctcttcactgttgccatctgaatgttgatggccaagatgaccttggaagctacacattaaagattccagaacctttgttagcctggttttctgaagaaatgtgaggaacagagtccttaccgcctcccaaccctacttcttatcactaccaattagatttattatgaatagaaataaatttctgttgggttatgccattgggatttggtggcttatgtattatgacaccaagtattaccttaatacacacatactatcagaatattgttaaattctttcctttctaacctttgcttagaagggtttggtggaagtctgagaaccaaattacctcctcaaggaaatgtctgtattaggaaacacctggtctgatcaaaattcaaatcaaggtctgaggaagtttaagtataaaattaactctgtagaagacccaagtcttagttcttgattgattgagcatgtctttgtaagtgttaggcttcactgaccccagaagtcaaagagagtgataagttacaaatatggaaactttgaggggtcaagttttcctatattagctactccagccctttctttctattgattaatcaggtcagttcataagaggttaatttaatttcccatcatcttgagtttcccattcaccacctgagaagtcagccaacaaaacagtgaggatctgaggagggccaaggcttcagcaaggtgcagccagagtggtgagtgaagg

SEQ ID NO: 700251 - DNA, 2122 bp, Homo sapiens
caacattcccaagatctcagaaacagaaacaaaagctagttctcatgtgtaccctgtagccaattttggggccctgattacctattccatgagaatatacaaactttgagaaattcacactttatttttttccatttataaaaccaatacatataaaatgcaaaaaagaaaaactcatcaaatgtttaatcattcataggaatccatttctaataatttgatgtatttccttctaatattttctaggcatattttatttcatgatttcatgctgtatttcacagataaatttttttaaatttatctttataataaaaaagggcatttaaaatactcttttaaaataaggtgtccaattctaaaatgctgtgtgcatttgaaaactttcatctttgagtttctacaacaagatctttaataggaagtaaaattcagcagcaaaactgaccataaatttacagaacccatttgaagggtcagagccagcaaagtcagcagattctaaagcctctccaatttctgtgccttgccaagtgactgaagtggagaggcaatttgactattggcttctgactttaattaatgtttaatactcagtggcaaacgtgcacttcctcttgtaagttctcattaagttctttttgaatcagttaacactctgtttataaagatgtgggtattttctcttaattactgtaattttgactactgctgtaaaaatcagttctccatgtcacactgtcagagatcattacagatgtatacaggcttctcccctccctttcctggaaccaatccagtcatctttggaaattaaatgcattaaaaggtttaataaagaaaaggaaatcccagacatatcatatctcatttcaaaccattccagaataaaaccaggatgtattcatcaggatgctgagatgtattgtttaaacattaaggatatcgatgcagagttctattaattacaataaattattgtaaatccaattcattccactgaacaaggatgaattgagatgactgatgctcacagaagcacatttttgattgttgatatctcctttcatatggaaagacacccgtaagggcataaacctgggcctctgtccacaccttcagttgttcttcccctgggatgcaataaagtacacgattgccaagtttgcaagaaaaactaggtatgcatagctcagcatcttcctttctccttccccttgggagccagctaccacaggaaatatgtgttctagtctgttccttctgtgtggaaaaggactgtggttttctagcactatctatgactgagtaggcacatctacctgattttgtggttcagtattaggaggtccacctaagtctctaacccaggctttagaagtaatgagggactattttgatctctctcacacctctctcaactgattcaaaacccatcgtgggctaaagtgggtgctattttatcaacaccaccaaaacacaaaggctagtttcaaaataaaaaagaattaaaacatcagacttttagacattattaaagtttttttttttttgaactagtcattctctgctctgaatttgcaggtttttaaaatttatttattttttttccagtgaattctgctgtactctctgccttgtagtgtttaattctggatctattgaataaaaaggaaggaatctagctgtctggccagaattttctttggcaggaggttgttattcctcatgcattgatatttgtcctctgtcatattaggaattactttccctattaataaygacttgatgaggttaagtgaattgtccaagcttacacagccatttagcagcagaagaggggtttgaactgtccagctccaaggccagagtttttcttcaggaaaactttcactgtatcccttcctacaacccctacaccatgcccagtcctttcactgtcatgactattgcgggaagggaaaaaagaaacagaaaatggtgccccaattaaaaaaaaaacaaaaaaacttgtaagagagcagtgggaaccatctgtggcctgaagtctcctggctataaatgagatcgtttgttttttttttttttagttttggtttctttctacccccaagcaggttaa

SEQ ID NO: 700252 - DNA, 2122 bp, Homo sapiens
caacattcccaagatctcagaaacagaaacaaaagctagttctcatgtgtaccctgtagccaattttggggccctgattacctattccatgagaatatacaaactttgagaaattcacactttatttttttccatttataaaaccaatacatataaaatgcaaaaaagaaaaactcatcaaatgtttaatcattcataggaatccatttctaataatttgatgtatttccttctaatattttctaggcatattttatttcatgatttcatgctgtatttcacagataaatttttttaaatttatctttataataaaaaagggcatttaaaatactcttttaaaataaggtgtccaattctaaaatgctgtgtgcatttgaaaactttcatctttgagtttctacaacaagatctttaataggaagtaaaattcagcagcaaaactgaccataaatttacagaacccatttgaagggtcagagccagcaaagtcagcagattctaaagcctctccaatttctgtgccttgccaagtgactgaagtggagaggcaatttgactattggcttctgactttaattaatgtttaatactcagtggcaaacgtgcacttcctcttgtaagttctcattaagttctttttgaatcagttaacactctgtttataaagatgtgggtattttctcttaattactgtaattttgactactgctgtaaaaatcagttctccatgtcacactgtcagagatcattacagatgtatacaggcttctcccctccctttcctggaaccaatccagtcatctttggaaattaaatgcattaaaaggtttaataaagaaaaggaaatcccagacatatcatatctcatttcaaaccattccagaataaaaccaggatgtattcatcaggatgctgagatgtattgtttaaacattaaggatatcgatgcagagttctattaattacaataaattattgtaaatccaattcattccactgaacaaggatgaattgagatgactgatgctcacagaagcacatttttgattgttgatatctcctttcatatggaaagacacccgtaagggcataaacctgggcctctgtccacaccttcagttgttcttcccctgggatgcaataaagtacacgattgccaagtttgcaagaaaaactaggtatgcatagctcagcatcttcctttctccttccccttgggagccagctaccacaggaaatatgtgttctagtctgttccttctgtgtggaaaaggactgtggttttctagcactatctatgactgagtaggcacatctacctgattttgtggttcagtattaggaggtccacctaagtctctaacccaggctttagaagtaatgagggactattttgatctctctcacacctctctcaactgattcaaaacccatcgtgggctaaagtgggtgctattttatcaacaccaccaaaacacaaaggctagtttcaaaataaaaaagaattaaaacatcagacttttagacattattaaagtttttttttttttgaactagtcattctctgctctgaatttgcaggtttttaaaatttatttattttttttccagtgaattctgctgtactctctgccttgtagtgtttaattctggatctattgaataaaaaggaaggaatctagctgtctggccagaattttctttggcaggaggttgttattcctcatgcattgatatttgtcctctgtcatattaggaattactttccctattaataatgacttgatgaggttaagtgaattgtccaagcttacacagccatttagcagcagaagaggggtttgaactgtccagctccaaggccagagtttttcttcaggaaaactttcactgtatcccttcctacaacccctacaccatgcccaktcctttcactgtcatgactattgcgggaagggaaaaaagaaacagaaaatggtgccccaattaaaaaaaaaacaaaaaaacttgtaagagagcagtgggaaccatctgtggcctgaagtctcctggctataaatgagatcgtttgttttttttttttttagttttggtttctttctacccccaagcaggttaa

SEQ ID NO: 700253 - DNA, 1031 bp, Homo sapiens
taaaagtgcaatagccatacaatggaatattattcggcagttaaaaggaaaaaaattactgaatgtgcaacaacatgaatgaatctcaaaaatatgctacgtgaagaaatgcagaaataagaggtcgtgtattatattattctattcatttaaaatatccagaaaaggcaaatctgtagagtcagaaagcagattacctggctttgggatatggtgaaggagttaatggtggggaattaacaatgaaatacacatgataattccttttagggggggtaaaaaagttctaaacctattcttatgggaaagtggcgacaattttggggaaatttatttaaaatattgaattgtacacttaaaatgagtgaattggtatatataaaatatacctcactgtagttactcccgtctctttgtgtgtgtgtgtgtgtagccatatacatataaaaagcttggttgcattttggaccagaaaaatgaaaatagaggggaattttgtatcctaaagcttgtcttatattctccactttattgttattctttattaattacatggagaagccatctaaaacactaggtgtttgatgcctttgctttttctcgtgcctctgccttcttgaacatgattaatatttaattttcttttcagatatacaacactgtatttggctgatgctaacaggaaagttcatttatatcataaatactragtaaattctaagatatttgggttaagtaagggcaaaattaaaatggttgtccattttaaaatgatggttgtccaatcaattcaatgtgttttctacatatagattcctttcttattgtagaaaataacatcctaaaatataatggtgaaataacacatgtagtatgggtatgattttataacagaaaatatccaattttaattgaaaaaaattaagttgcctaaaacttaaatactgtggttggtatggatttataaagcacataatattaaatttgatcagagaaacttttaattgacaagtgaggagttgatatctcaa

SEQ ID NO: 700254 - DNA, 1031 bp, Homo sapiens
taaaagtgcaatagccatacaatggaatattattcggcagttaaaaggaaaaaaattactgaatgtgcaacaacatgaatgaatctcaaaaatatgctacgtgaagaaatgcagaaataagaggtcgtgtattatattattctattcatttaaaatatccagaaaaggcaaatctgtagagtcagaaagcagattacctggctttgggatatggtgaaggagttaatggtggggaattaacaatgaaatacacatgataattccttttagggggggtaaaaaagttctaaacctattcttatgggaaagtggcgacaattttggggaaatttatttaaaatattgaattgtacacttaaaatgagtgaattggtatatataaaatatacctcactgtagttactcccgtctctttgtgtgtgtgtgtgtgtagccatatacatataaaaagcttggttgcattttggaccagaaaaatgaaaatagaggggaattttgtatcctaaagcttgtcttatattctccactttattgttattctttattaattacatggagaagccatctaaaacactaggtgtttgatgcctttgctttttctcgtgcctctgccttcttgaacatgattaatatttaattttcttttcagatatacaacactgtatttggctgatgctaacaggaaagttcatttatatcataaatactgagtaaattctaagatatttgggttaagtaagggcaaaattaaaatggttgtccattttaaaatgatggttrtccaatcaattcaatgtgttttctacatatagattcctttcttattgtagaaaataacatcctaaaatataatggtgaaataacacatgtagtatgggtatgattttataacagaaaatatccaattttaattgaaaaaaattaagttgcctaaaacttaaatactgtggttggtatggatttataaagcacataatattaaatttgatcagagaaacttttaattgacaagtgaggagttgatatctcaa

SEQ ID NO: 700255 - DNA, 646 bp, Homo sapiens
tttgcttcccacagaaattagcatactttgacataactgaatgaaaagaaaaaacagatagttttgactctcttcaaacacaagatgcaaaatagggaattaatcaggtccaamcagtttggaggtttatgtgaccactcttgccactaaaaaacaagaagttgcatgaaatttttccctttggatcggtcatgcaaatttgcattgtataagcaatcacaaattctgtgacacatgcttccaaggaaaattaagaccttggttggttgtttaatgtgcataatgtgactgcttagcgtatttgagaatgtcatgctatagagaatttcatggtaagttcttattggcaaattctgttcactgtgggaatcctttatttgtgaaaatatttttatcacatacatcccttatcctccaaaaatattttgtcttctcttgtcttacctatgtggttgcatatttagaagtctagttatccctccctggcctcaaccttttgagggctggggtaatatcatttccatcttcatatccctcaaggcttgctattgaacagttatgtgcacaaagcatatgcttgtcttagactggattcctccagaagccaaccgtaaaatgaggatttgaatgcaagtagtttatctgg

SEQ ID NO: 700256 - DNA, 582 bp, Homo sapiens
atttggttttrgctgccagtctgaaatgcaatgaaaatatttaggcaccaggatattgaatctttagggaaagaaaagaaaaagtcagttaataaaaactgctgatgtcaatttagagaactgaaaattcttaagggtgatttttaagggattactgctgatactgcaaatcagtcagcaatgtgctatgctcatttgttctgttttaatagaccttatatagctatttaggaattgccctgttaacagagactgcaataaatatccaatgttcaaaaaccattttgaattacctgatgagaaaacaaaagagtatgtctgctcatttttcctaggcaaatgacatttagtgacttttttctattgttctgtttgattggaaatagtatgaagcattctgataatgccagtggtttagctgttaaggataatgtgatggctttagtttatattgatgagaacattagaaaaatgaagcaaaaccacaatcaaaaaattatggtaagatgacaagtttaaaatattagaatggaatatagaacttgaaaacaatctttctagtgttaaaagctaattatgact

SEQ ID NO: 700257 - DNA, 582 bp, Homo sapiens
atttggttttggctgccagtctgaaatgcaatgaaaatatttaggcaccaggatattgaatctttagggaaagaaaagaaaaagtcagttaataaaaactgctgatgtcaatttagagaactgaaaattcttaagggtgatttttaagggattactgctgatactgcaaatcagtcagcaatgtgctatgctcatttgttctgttttaatagaccttatatagcyatttaggaattgccctgttaacagagactgcaataaatatccaatgttcaaaaaccattttgaattacctgatgagaaaacaaaagagtatgtctgctcatttttcctaggcaaatgacatttagtgacttttttctattgttctgtttgattggaaatagtatgaagcattctgataatgccagtggtttagctgttaaggataatgtgatggctttagtttatattgatgagaacattagaaaaatgaagcaaaaccacaatcaaaaaattatggtaagatgacaagtttaaaatattagaatggaatatagaacttgaaaacaatctttctagtgttaaaagctaattatgact

SEQ ID NO: 700258 - DNA, 649 bp, Homo sapiens
tgaaagtcaagtatatatattttataaatagaggtattcaaaatttcaagtgagtcagcattgctttgatgagtaaagggtattaaatgcataatagagaagatgcatccacttcataggccataaattttatttttgaacttattccaagccttagcaaaagctaacctttataaagcattttgtttttatttaagtatatcaaatattagggtttcttctataattggatttccttttttatgaatcatgaacaggctatgatagaagacacctcatagattaagtagtatattacttttattttattaatgattttaaagtgctttacctagttgaaaggccttgtttaatttcattattttaaatttcttgctattttttcacctcaaactagtgraatgccctctcttcagaaaaattcactgagacactttcccctaatttcaatggcatcctatttatttaccaaatataataggcatattttcagaacttatttcatttaacttttatagtatttgagatttttatgctttcatgtatctttaaattgtctataggtttttttctaaatttccctaacacttgttagtcaatttcatggactcctatttcttgttagtcaatttcatggactcttctttct

SEQ ID NO: 700259 - DNA, 1133 bp, Homo sapiens
catgttcatctttgtatccactataatgtctatgtcagcaattagacaatacgcatttgtggaataaactaataaatgaacttctctgtgattaaaatatcaaggagctaaatgctaaatgcccatgataactcaatattttagatttttatactaatgtaagtacactgtcagaagtagttaaraaatgtttattcaacaatgccatttgtaaagcccagtaagtgacccataaagagtatattttgcaaatctgtttaactggattatccactgggaataatattgtgtgctaaccctcctccctccctgtctcatgatactctccctatttcattgttgcacatgttgcttggataaggaatatgtcaccatgttttttatgtttttaaacacgaaaagctatcaggtttaaaaagacttaaaataattgttttccggggcagctaccatgaatttgactacacttttagcacattaagtaaggaatctgttttcctttctctccactaggaaaaattaaatgttttccaatagggagctatcacaaaatatggattctatagttctcagatgtgtggactttctaccaacatgttaaccagaaattgatcctgtagctcaaagccacaaggacaagaacatgataaggcagggtcagcgttgttatggaccgggaaagccacagctatcaataaaccagaaacctagaaagtcaaattaaagagccagtggtcttaaggctgatagtgacggctttgagatctttgggatgcttaaggcctaatccccaaaggggaaatcaaagataaagtcaaatgttaagaagcaaatgggaagaacaatacatgaaccagaagaatttgccacggtcagctcaagcagctcagcacagatgaattcattctacaaaatgaatctaataatgtattgcaaggcaaaaattattttccatctaacagtgaaataaagaccccataacatatgcacatgctttgtcactttcctttatagtaccctgtatcttttccttcaaaatactgagggctgtttgaaattcacttgtttattgtgtcccattcctaagaaaatgtagactaaatgagaactggttttccctcttgtgttctcca

SEQ ID NO: 700260 - DNA, 1133 bp, Homo sapiens
catgttcatctttgtatccactataatgtctatgtcagcaattagacaatacgcatttgtggaataaactaataaatgaacttctctgtgattaaaatatcaaggagctaaatgctaaatgcccatgataactcaatattttagatttttatactaatgtaagtacactgtcagaagtagttaagaaatgtttattcaacaatgccatttgtaaagcccagtaagtgacccataaagagtatattttgcaaatctgtttaactggattatccactgggaataatattgtgtgctaaccctcctccctccctgtctcatgatactctccctatttcattgttgcacatgttgcttggataaggaatatgtcaccatgttttttatgtttttaaacacgaaaagctatcaggtttaaaaagacttaaaataattgttttccggggcagctaccatgaatttgactacacttttagcacattaagtaaggaatctgttttcctttctctscactaggaaaaattaaatgttttccaatagggagctatcacaaaatatggattctatagttctcagatgtgtggactttctaccaacatgttaaccagaaattgatcctgtagctcaaagccacaaggacaagaacatgataaggcagggtcagcgttgttatggaccgggaaagccacagctatcaataaaccagaaacctagaaagtcaaattaaagagccagtggtcttaaggctgatagtgacggctttgagatctttgggatgcttaaggcctaatccccaaaggggaaatcaaagataaagtcaaatgttaagaagcaaatgggaagaacaatacatgaaccagaagaatttgccacggtcagctcaagcagctcagcacagatgaattcattctacaaaatgaatctaataatgtattgcaaggcaaaaattattttccatctaacagtgaaataaagaccccataacatatgcacatgctttgtcactttcctttatagtaccctgtatcttttccttcaaaatactgagggctgtttgaaattcacttgtttattgtgtcccattcctaagaaaatgtagactaaatgagaactggttttccctcttgtgttctcca

SEQ ID NO: 700261 - DNA, 1242 bp, Homo sapiens
tatttccacagcagagatttcagatcaacagacaagtcccagaggactgaggacaaaataattaatatgccaaagttatataataagaaggcacagtgggagatttctgccaaactaagagggcaaagccctacagtggctgagtggaggaggtgggtggcaaagcccaaatcatgggattagagagacaagagattggatatcaggattggtccccttattcttcaggtcaacacctaagagtagaaaaaaaattcctaagtaaaatatggcaatcaaagaatcctaggggtaatcttgggagatccttctgtgactgagaagaatgatgcccattttcatcattctgtgccatggactgcatggaagtagaaagtagcaaagagcagaaggaggtgtcctatcaagtggatctgaggaaagtcctcgccaagtcacatagaccttattaggttggaggaaaaaagcaccttagaatgacaagactcttgaacaatgtggactcaaaaatgctgagagaatgaactaggaggaaacagaggtcaggacaagtagttggtgggatgttgagaatgaaggtaattacacagtctacaaccatcaggaatagctatcagtcagatgcccaaaatatcagatgggtctccacagcggataccagtgtaagatgcccagagaccaggtggcttctgctacctttcagcagaagtagagaccatctgccatctgggagacagaatcttcccctattgtgactattaatattatatgtcaacttggctgagccatgaggtacccagatatttggttaaacattactctgtgtgtgcctgtgaaggtgtctatgaatgagatcaccatttgaattggtagacagagtaaagcagattgcccttcacaatatgggtaggmctcatctaatgtgttgaatgtctaaatagagcaaaaaggctgggtaaaggagaattttttctctctgactgatacatttaagctgggagattggttttctgccttcaggtttggactccactaaaaccgttaccctgtcctacttctcaggctattggactcagactggaactatagcatcagctctccttgatctccagcttactgactgtggatcttgcagcttcttagcctccacaatcatgtgagccaattccttataataaatctctctatctgtctctctctctctctctctctctctctctccatctaatctccaattagttc

SEQ ID NO: 700262 - DNA, 599 bp, Homo sapiens
tagcaatctaggtcaaggtcactagtatctaccattaatatttggagcctaccataaattggacataagggaagtagaaataacctctctgagttatattgtatagccaacagaggacggattggagcagaggtatgtaatgattccttagacaggcaaaatggcttttcagatattgttttccagtaacaatattgaatatcagcatacctaatcaaccagaagagaaaatcggtgatctcgtaatgtctaagagataggtacattttaagagaggagctttggtgtaaaagtcccattggcaaggccagaacttttctgaacagggatgaactggacatatttggcctgaagttattaaactttggaatcatttaaataattttcccttgttttaattttgacgtcagcctatgggcagataatttattcatcacatagatgagagttccagmgcacacaactgttttatttctcatcatgaattaataaatatacactccattttcatacatgaattaagttaacatgagctcatcctaaaaaaggtcctctatggattcattctcttctgtcataattttattgctctaactata

SEQ ID NO: 700263 - DNA, 1423 bp, Homo sapiens
gggaatgtgtggggcaagagcagaatggagacttttcattacataccctttagtaatttgcgattttgtaacattacagttttaattaataaaacttgtgtgattttaggcattgatccaattccattatagaagtcattctttcagattaagatgttctttccaaaaatctgacacacaatcagcaattttagttttaactgcatggaattgtgaatgaaataaaatcgagactagaattaaagataagaaaaaacagaagaggtgtggaggatgggtgcctatgggacagcagatgcttttctggggagtcatgggtgtccagtggcatctaaagagagggagatcaccaacatgaaaatcactggtttaccacttmcactactatgctcttggctggtcctagattggaaattcttctgaagtacttacagggctcttcctgtttgaaagcaccttcatgctttagaatgcttttactgtacatcctataggaatctataggcacaggtgaaagactccagtgaagtctacggttcacaaagaacactcattctttcattgaaaaacattaaatctcatattaatatcaatttaaggaaaaccattttattttggacttgggaaggttagatagggacttcacctactctttttcaatgtgtacagattttttggtaccttgaattctaaaacactgtttaactttcaatagaaagaaatctaaaagttgctaattagcagtgtattttaatttgtgaattaaatacacaaccaacattggaagacatctttcttctaattaaatatgtcttttgatagagaaaatttagcccaacatggaagcagagactttcatgaacatctcggatattggcaagagaaaattctagaaaaatctagaaaaatgtgtcaatctgctgctaattcagtattttcactggtatatggttttaagtgcaagtggaatatttgaccagaattgggataatattttcagggcaaaaataaagaaagaacaaagctgggagaagaaaaggcaaacccaggcacacatgaatgactaaatctggagaagattttgtatatttagtttgtcttctcaaaaaatcctaacagaattttcaaacgcagcctccagtaggctgagtaatgactcgacactttattaacgataccaaaagcaggtctcataaaagttaggttgccatttcccttctagaagccttatggcagaggtcacattacaatctataatttttgtggtctaatggccatatcagtaattcctaatatattttgggccacatttaaacaattttaccttttaaatcatatacatatatataattatatatatgtgtgtatatatatatatatatatatacacacacacacacatatatgttggtaatgtctattt

SEQ ID NO: 700264 - DNA, 1423 bp, Homo sapiens
gggaatgtgtggggcaagagcagaatggagacttttcattacataccctttagtaatttgcgattttgtaacattacagttttaattaataaaacttgtgtgattttaggcattgatccaattccattatagaagtcattctttcagattaagatgttctttccaaaaatctgacacacaatcagcaattttagttttaactgcatggaattgtgaatgaaataaaatcgagactagaattaaagataagaaaaaacagaagaggtgtggaggatgggtgcctatgggacagcagatgcttttctggggagtcatgggtgtccagtggcatctaaagagagggagatcaccaacatgaaaatcactggtttaccacttacactactatgctcttggctggtcctagattggaaattcttctgaagtacttacagggctcttcctgtttgaaagcaccttcatgctttagaatgcttttactgtacatcctataggaatstataggcacaggtgaaagactccagtgaagtctacggttcacaaagaacactcattctttcattgaaaaacattaaatctcatattaatatcaatttaaggaaaaccattttattttggacttgggaaggttagatagggacttcacctactctttttcaatgtgtacagattttttggtaccttgaattctaaaacactgtttaactttcaatagaaagaaatctaaaagttgctaattagcagtgtattttaatttgtgaattaaatacacaaccaacattggaagacatctttcttctaattaaatatgtcttttgatagagaaaatttagcccaacatggaagcagagactttcatgaacatctcggatattggcaagagaaaattctagaaaaatctagaaaaatgtgtcaatctgctgctaattcagtattttcactggtatatggttttaagtgcaagtggaatatttgaccagaattgggataatattttcagggcaaaaataaagaaagaacaaagctgggagaagaaaaggcaaacccaggcacacatgaatgactaaatctggagaagattttgtatatttagtttgtcttctcaaaaaatcctaacagaattttcaaacgcagcctccagtaggctgagtaatgactcgacactttattaacgataccaaaagcaggtctcataaaagttaggttgccatttcccttctagaagccttatggcagaggtcacattacaatctataatttttgtggtctaatggccatatcagtaattcctaatatattttgggccacatttaaacaattttaccttttaaatcatatacatatatataattatatatatgtgtgtatatatatatatatatatatacacacacacacacatatatgttggtaatgtctattt

SEQ ID NO: 700265 - DNA, 1423 bp, Homo sapiens
gggaatgtgtggggcaagagcagaatggagacttttcattacataccctttagtaatttgcgattttgtaacattacagttttaattaataaaacttgtgtgattttaggcattgatccaattccattatagaagtcattctttcagattaagatgttctttccaaaaatctgacacacaatcagcaattttagttttaactgcatggaattgtgaatgaaataaaatcgagactagaattaaagataagaaaaaacagaagaggtgtggaggatgggtgcctatgggacagcagatgcttttctggggagtcatgggtgtccagtggcatctaaagagagggagatcaccaacatgaaaatcactggtttaccacttacactactatgctcttggctggtcctagattggaaattcttctgaagtacttacagggctcttcctgtttgaaagcaccttcatgctttagaatgcttttactgtacatcctataggaatctataggcacaggtgaaagactccagtgaagtctacggttcacaaagaacactcattctttcattgaaaaacattaaatctcatattaatatcaatttaaggaaaaccattttattttggacttgggaaggttasatagggacttcacctactctttttcaatgtgtacagattttttggtaccttgaattctaaaacactgtttaactttcaatagaaagaaatctaaaagttgctaattagcagtgtattttaatttgtgaattaaatacacaaccaacattggaagacatctttcttctaattaaatatgtcttttgatagagaaaatttagcccaacatggaagcagagactttcatgaacatctcggatattggcaagagaaaattctagaaaaatctagaaaaatgtgtcaatctgctgctaattcagtattttcactggtatatggttttaagtgcaagtggaatatttgaccagaattgggataatattttcagggcaaaaataaagaaagaacaaagctgggagaagaaaaggcaaacccaggcacacatgaatgactaaatctggagaagattttgtatatttagtttgtcttctcaaaaaatcctaacagaattttcaaacgcagcctccagtaggctgagtaatgactcgacactttattaacgataccaaaagcaggtctcataaaagttaggttgccatttcccttctagaagccttatggcagaggtcacattacaatctataatttttgtggtctaatggccatatcagtaattcctaatatattttgggccacatttaaacaattttaccttttaaatcatatacatatatataattatatatatgtgtgtatatatatatatatatatatacacacacacacacatatatgttggtaatgtctattt

SEQ ID NO: 700266 - DNA, 620 bp, Homo sapiens
tttactcttggttttaraaaaatatatcagtggcataaacacccaacaccatttattaaatactatgtgcacgatgcaaggtaccctctaggctgatgcaaaattgttatttatatacagtcccttctcccaaagagctatctccatattgcaggtgatagaacctaataaagagatttacaggataatataggctttggctacattttttgtaaaaattagatatgggaatagtaaaacagtaggagacatttgccctgaatgttctccgtcctcatctggcttacaaggaactctggacgcaaacctaagaaagccttggaaaacatgtatccaggaaaagcttctgtggccatagatttccccagaacaatgtatttagcactcttgtagcatttgccatttcttcatttcttcccttttatttttggcattcatttcgcccaggaggcagttacatttcaattaggcaacttgcctagcttctctgatgttagccacaatggcattagaacccagttggagtattcgttacctccattgcaaacaaaaacatctcagcctaaactctgatacctaccagactctcataataacatggatgtaatctattcactctg

SEQ ID NO: 700267 - DNA, 620 bp, Homo sapiens
tttactcttggttttaaaaaaatatatcagtggcataaacacccaacaccatttattaaatactatgtgcacgatgcaaggtaccctctaggctgatgcaaaattgttatttatatacagtcccttctcccaaagagctatctccatattgcaggtgatagaacctaataaagagatttacaggataatataggctttggctacattttttgtaaaaattagatatgggaatagtaaaacagtaggagacatttgccctgaatgttctccgtcctcatctggcttacaaggaactctggacgcaaacctaagaaagccttggaaaacrtgtatccaggaaaagcttctgtggccatagatttccccagaacaatgtatttagcactcttgtagcatttgccatttcttcatttcttcccttttatttttggcattcatttcgcccaggaggcagttacatttcaattaggcaacttgcctagcttctctgatgttagccacaatggcattagaacccagttggagtattcgttacctccattgcaaacaaaaacatctcagcctaaactctgatacctaccagactctcataataacatggatgtaatctattcactctg

SEQ ID NO: 700268 - DNA, 602 bp, Homo sapiens
gaaccaactagtaataataaatcaatttaaatactaaatataatgtttttccttatctataagtcactgatattattaaaaaattagaaaatacagaaaattttagatcatttattttaacattacatggaatttggactcaatgctggatttatttatgtcataacatttgaagtacctatagatatagatacttaatctatatctatagatactgaaatattcatgacccagttactatatgtgtatttgtgtatayatagatacttaaatattcatgacccagctactatatgtgtatttgtgtacatataataacacacacacaaaagtgcttgatttttaaaatattttaaagtttaaaagagacctcaaaatatcttatataatgacaataataactcagtgaaaatcaacatgcagatgtgttaagaaattcatgttttcctctgatatttccatcttggaaatgaaaatatttaattcaatatctgacaggtgcatcatacatacaaaccttctatattcctgaaaaccacctttgacttctgtatattctctatacttcacatctaaacaacttccaaatcatgcaaatatca

SEQ ID NO: 700269 - DNA, 1226 bp, Homo sapiens
atgcataaaaacttcacactctaaaatgcaataacataaaggaaagcaaaatcaggtgacagagggcaaatatctccactgtaaagggtggagaagatttaacatttgctgatttttttttaaaaaaagcaaagcctctaagatgtcaatatgggcaaacatactcagggaagaagtaaactggtcaacacacaaacgaaaaaatattcattttcattagttgcaaaagaagtgtaaaggcaaaacataaatagattcaaattttgcttattaaattgtatttcaaatggtagtatattccgatggtttaaaaatcagaaagtataaaaagtgtatagtggaaagtctccttcttgtgtttattcccctagtgccagtttcccaaccctgtgcttagattttaaaatattatgggtctatgcagatacacatatagattttcctccttttactctgaaggtagcataccaaaaacatcattctgaaatttgcttttttgacataataatatatctaggaaccctttccatatcagtacttagcttgctcattttttgtagttatataaaacatttttcattaacattagtatgttgaagtatatctgaatttaaattggtttcatttagagttttttaatcatttcagaggtacacacacataagatatttacaagttattcattcaacattttttgaagtcctactgtatggtagaaaacagatatctatctagaaactaacagacagcctggtaaataataaaactccattgtgtagctatcctacagtttatttaaccaggtcactgttaatgttcatacttttcctataggtgaattgttttctttatagttttctagtttcataattacatttaataaatttttattttaggctgggcacggtggctcacgcctgtaatcccagcacttcgggaggctgaggcgagtggatcacaaggtcaggagttcgagaccagcctggtcaatatggtgaaaccccatctctactaaaactacaaaaattagctaggcgtggtgacgggcacctgtagtcccagctactcgggagtctgaggcaggagaatcgtttaaacctgggaggcagacgttgcagtgagctgagatcgtcccactgcactccagcctgggcgacagagtgagattccatctcaaaaaagaaaataaaaaaatacacwtttttattttaataaaaggaatttgc

SEQ ID NO: 700270 - DNA, 575 bp, Homo sapiens
ccccagaagggaggcaagacagagatctgtcttcccactttctagattaggaagcagactcagtcgccgagggccctgcataggccatttggtggacttgaacctgggtctcttgacatcccggacaatgctatattcagaacccagcgttcttcacagccaggctgacctctacctcagttagaggtaacctctttcccggcccacctcttggccaaattaactaatcaatcaaatatttctggaccatctactttgtgccaagcactctaggtgctggggatacttctgtgaacaacacagacaaaaatccctgccctcctggtgctcttagggggagaagatggtaagtaggtaaattccatgttgatgagatgaacgttgaagacacagggaaggtgggaaggagtgttgggtggcagctgatgctgaagttttcaatggggtggtcacggagggtgacactttggcacacactggaggaggtaggggaacgagctatgtggwtgggtgtctaagggaagagcagctgcaggtaccctgggttggaagcctgcctggtgggtggggggcag

SEQ ID NO: 700271 - DNA, 596 bp, Homo sapiens
tgcagtgagccgagatcgcgccactgcactccagcctgggctacagaaagagaggaaaaaaaaaatgctgggcagtggccaaggtgggtggatcacgaggtcaggaggtcaggagcttgaaaccctgtctctactaaaaaatacaaaaaattagctgggtgtggtggcatgcacctgtagtcccagctactcrggaggctggggcaggagaatcgcttgaacccaggaagtggaggttgcagtgagccgagattgcgccactgcactccagcctgggtgacagagcaagcctctgtctcaaaaaaaaaaaaaaaaagaaaagaaaaccagtaactatccctgggacctatccaactccaactaatataaagtggtctgagatgggcagcagggttccccagggctcaggaacactatcctaggccatgctgcctcctggacaaagaatcgactgaaataagcaagcttccccagctgacatcccacggccgaccttactgccttttttaggaatatctttagaaccgtgagactggagttgtacgttaaaaaaaaaaatttttttaaattaaaagttaaccccaaaagtgatccta

SEQ ID NO: 700272 - DNA, 616 bp, Homo sapiens
ttacttttttaacctagattatcttgctctgttgcccaggttggagtgcagtcacactatcatagctcactgcagcctcaaacccctgggttcaatccatcctcccacctgtagctgagactacaagcgtgtgcctctatacctggctaattttttttattttaagtagagatggggtcttgaactcctgagctgaagcgatatccttccaccgtggccttccaaagtaccaggattacaggcatgagccaccacacccagccagattttaacttctcattatatactacgcaaacatatactaaggccagcaggagtatatatatgtgtactgtacttgaatttcacatccattttcttcgacattagcaactgggaratactgaaaggaagtttcaaaatattttagtgtggccagaaaatttaattacatatggtattatcttttatctacctgacataattgaattatttttaaaaatctgccatttatattgtaatcttatgaccaaatatttattgcttaaaactagtcaactttttaaactgagatatatggtatatatggatacaaagcagataattaaaacaatttttggttctgttcattcagcga

SEQ ID NO: 700273 - DNA, 698 bp, Homo sapiens
gtgatctgtccaccttggcctcccaaagtgctgggattacaggagtgagccaacgtgcccgggcctataatgacagttacaagggccgcacaatagtataacactatacccaggggtttcagctatatcagtagtgtttcttacactgggtatatgggtattttttttgtttgtatttttagctgtcatatttttacaagtgtctaagatattttgtattaaattaaaagcaacgtggttaatatacatgtatccaatgtagttaacttaggttgctaactttcttttaaattcaccatatttgaactacagaaagtaacttctttttttttttttttttttttattgagacagagtctcgctctatcgcccaggctggagtgcagtggcgygatctcggctcactgcaacctccgtctcccaggttcatgccattctcctgtctcagtctcccaggttcatgccattcttctgtctcagcctcccaagtaactgggactataggcgcatgccaccacgcccggctaattttgtatttttagtagagatggggtttcaccgtgttagccaggatggtctcgatctcctgacctcatgatccgtctgcctcggtctcccaaagtgctgggattacaggcgtgagccaaagtaacttttaaaaatgggaaaatgaattattcccttaggaaaatattgct

SEQ ID NO: 700274 - DNA, 698 bp, Homo sapiens
gtgatctgtccaccttggcctcccaaagtgctgggattacaggagtgagccaacgtgcccgggcctataatgacagttacaagggccgcacaatagtataacactatacccaggggtttcagctatatcagtagtgtttcttacactgggtatatgggtattttttttgtttgtatttttagctgtcatatttttacaagtgtctaagatattttgtattaaattaaaagcaacgtggttaatatacatgtatccaatgtagttaacttaggttgctaactttcttttaaattcaccatatttgaactacagaaagtaacttctttttttttttttttttttttattgagacagagtctcgctctatcgcccaggctggagtgcagtggcgcgatctcggctcactgcaacctccgtctcccaggttcatgccattctcctgtctcagtctcccaggttcatgccattcttctgtctcagcctcccaagtaactgggactataggygcatgccaccacgcccggctaattttgtatttttagtagagatggggtttcaccgtgttagccaggatggtctcgatctcctgacctcatgatccgtctgcctcggtctcccaaagtgctgggattacaggcgtgagccaaagtaacttttaaaaatgggaaaatgaattattcccttaggaaaatattgct

SEQ ID NO: 700275 - DNA, 640 bp, Homo sapiens
ttgagacctgaggtcctgagttcaaggtggccttgtgctttcaatcagaacagtttcagggcctgctgagtatcttacctgtttcagaatgaaaacttcaagagaatgaggtcaggataccttccttgttctagccccagagctggagagcctcggacaaggcacctggtctctctggaggtgtaacagtagcatttgccctcaagggacaatgtctgcatgtgtgtgtgtgtgtgcgtgagcatgtatttgcgtgtgtgcgcatgcgtgtgtgtgtgtgtgtgtgtgtgtgcatgtatgtgtgtgtgcgcgtgcgtgtgtgtgtatgcgtgtgcatgtgtgtgttctccctcttttttttttttttttttgagacagggcctcactctgttgccctggttcactgcagccccaatctcccaggctcaagcgatcctcccacctcagcctcccgagtagctgggaccacaagcacgcaccaccatgcccaactaattttttaaatttcttgtagagacaggatctcgctatgtttcccaggctggtcttgagctcctgggctcaagcgatcctcctgccttggcctcccaaagtgckgggattataggcctgagccaccgcgttctactgtgtgctctcc

SEQ ID NO: 700276 - DNA, 599 bp, Homo sapiens
gccccatccaaagtctcttctttatcaatatccaggaaggccttggatatgcacactaatgatgactatgcatatttcataaaactgtttccagaacctaccacgcyccccgtattagtcatgtatagtagcacagtgttattctattgtgttaacacatttccctttgcctggtcagccccttcttgtttggcctttgtgttgttggcaatttatagttattatagaaataatgctgctatagatgtgtttttctttctttggagctaacactgtaggatttttttttaaccaaagaaggaattaccgggtcagagcctctcaacagcagtgtggctctcattcatgttgcctgattgcttatggaaatttgtccagtctttctaaaaggcaatgctgaaggatgtgtttccactggctgcctatcctgggttttatcatacttatttttgtggctttagtaggcatgtaacaggacctgaaagttgcctggatctaaattgtattttatagctggcaagaccgcgcctatttccacgtggtgatttactatctccatttcctggtttaattttgttcatctcctttgaccacttatc

SEQ ID NO: 700277 - DNA, 599 bp, Homo sapiens
gccccatccaaagtctcttctttatcaatatccaggaaggccttggatatgcacactaatgatgactatgcatatttcataaaactgtttccagaacctaccacgccccccgtattagtcatgtatagtagcacagtgttattctattgtgttaacacatttccctttgcctggtcagccccttcttgtttggcctttgtgttgttggcaatttatagttattatagaaataatgctgctatagatgtgtttttctttctttggrgctaacactgtaggatttttttttaaccaaagaaggaattaccgggtcagagcctctcaacagcagtgtggctctcattcatgttgcctgattgcttatggaaatttgtccagtctttctaaaaggcaatgctgaaggatgtgtttccactggctgcctatcctgggttttatcatacttatttttgtggctttagtaggcatgtaacaggacctgaaagttgcctggatctaaattgtattttatagctggcaagaccgcgcctatttccacgtggtgatttactatctccatttcctggtttaattttgttcatctcctttgaccacttatc

SEQ ID NO: 700278 - DNA, 667 bp, Homo sapiens
aaagatgggcaaagagacaagaatttccaagtttcctctgactgctcccctgcaacacggagagcctgagctagcacaaaggtccccttccacatgctggccatcacacatctgtgggggagatgtcactgtggccacaaactccgtcgtctgtgatcgataacggatgactgatgtgagtggaaattttgaataaaggaacatgatcgtgccagagaagatatgagaaataaacatggcraagcgggtcctcttctgcaggagcaggctcttgcctgtgccaggacctggcacataacatggtcacattaagcattgaataaacatttgttaaatggatggatggattatgattatcctgtgaatccacacaaatttggtagtaccacaggtatttcaaaatcgatgtgccacaatctgaattcatcatctccgcaacattctcttttctctcatggtccattggttatccaaccaggacatagctgccagccttgactcctccctgtcccccactccgccccatcctccctgtcaccaaagcctggcaagtctgtacacgttaagtctcaaatgtcgttaaacccctgtctttcccccaccctggaggccaccctcttggtcaggagagattgagatcacaagctcaggagtaggcatgcctgaa

SEQ ID NO: 700279 - DNA, 632 bp, Homo sapiens
acccctctcctggtttcaatttggtgtatcagggtggggctgaacagcctgaaaacattctgacgattaggtgagatgagaaattcccatcctggaatagctctttgcaccaactttaatgtttctgtgtccatctggggccttacttgttgcgttggactcatgtgtttgtgtgtgtgtgtgtgcgcgcgccttgtgtgtgtgtgggtgtgtgtatttttctcttctgatctgtctacttcctaaactggactattgtccaatctatagaccaactctatctcttactctctggttgatcttagacaaatatctctaccttcctgaacctcacttttcatgataacaaaaatatgtgccccaagaggatcgacagagagaatatacatgaaaaagccttaaaatactgactggtttgtgaaagctactccaattaagtttgtaaagaccctgtgatrcagctatgtttatgacccttcacagataaggaatacagaaggatacacagacaattcagtacaaaggagttacctgtccacggtcacccaagactatgggttccaaatccaggggcaggaactcatcctggttcccttgctctttccagtgcacaataacccctcatgcttttg

SEQ ID NO: 700280 - DNA, 1835 bp, Homo sapiens
cttttcaaagtttaatatgattcaaccggagaaagcttattgaaattaaaaaaaaaaagtctaacatgcacacaaattacctgggatcttgtttaaatgcagacgttgattcaggaggtctggagtggcacctgagactctgcatttctaataacatttcaagtgatgcggaagctgccaggcatggaccacactttgagtagcaagagactggaccctagtactaccattctgagcaaggtgtacccctgcctgcttggagttcagagtctaatgggagataagaaaagaatcatacactcagggagtgatagtgtcgctcatagtggcagggaggcacagggtgttatggaagtgagaggagagacacctagtctgaacttcagaaatcttggagggcttcccgggaaaagaaagcatgtggaggaaacagtcaggtcaagacaagatggacgaggtgggacagaagatggcattgcagagagaacaacctatggggaggccttcactccagtggatgggctgactgagttcatcataccagactgaagagctacagagtgaggagttggggaggaggctgcagaggcgggcaggggccatgtcaggaaggaccttgaagccacacatctgagctggattcagtgggtgacagggagactttgaaggattttaagcaaagaagggacatggtcagattgaaggtttagaaagctgcctctgcctgctgtgaagagaagggccctccaggctcaccccaggctgaaccactgcaagcagagaaggccacgtcctgctgcacgttcccctccttcccagcgtccttactcccccctgcccccaccaccacccagaacactccttccagcccaggatgtcattaagctggtaaccaaatacaacacaagagcctcaaatgccacttcccacccccattaaacattcaaggtgtcagaagcccagccgggtcttaggaaggaacagaaaaagaagcaccagtcctttcaataacacgctcctgtcctggacatcccaaattcagaagcataaaagtcaaaaagaagaccctgggcctcaaagagcccttccatccactgcatggaggtacctgagatttgctgctgggattgaagaagaggcagaatttagggcaaggaggtgatggttctaccatccttgtgaaacatccagaacttggacaaccaaggacacctgagacccttctggaaggcctaagctgctgcagaggacacttatcttgggtacctggaacatctcagctgggagaggagaagcagctgcctcttggggttagagtttacctctgaagcgtcccacttcctgcagttgctcttaatatagagattatcagacaagggagggctgggtttgagtcttgcatctgcttgagatttgtcatgtcacctgtatgagctagcagtttgagctagatgatcttaatatagacacacccatctctcggagtctgaaacttctcagctccttagaccctacatgccttgtcccatggtcyaaacacatctcttgcccttttgcactaactgtcctggttgtgacctctggcctgagtctgtgagtctcaggccctgcttataggtctatggtctcttacttggcactagaagtggtccaggcagtgagagatagtggcaagaacactgggtttgaagtcaggtggctgctagattcctagttcagccatttacctctgtcaccatgttgaataagttctcaaattctttgatcctcagtttccatatctgtgaaatggagatgagacttctatattctccagtggttatgggcattcattg

SEQ ID NO: 700281 - DNA, 647 bp, Homo sapiens
acaaaagttctttcttacagtgactcactatatgamaaaagggctttatttcatatctacaagcctcagtttcccaatcattaaaatgggggaaaagattatctgccttttctcttctggtcttaggagaggctactccttgagcaaagcctgccattctttaaaaaatatcttcacaggtcatgccatctggtatcgatgagagaaggcaagagaacatggggtctaggaagtcaagctgagaacatagcctgtttttgtttgttggtttactttttattgaaatacaacatacagaaaaatgaacttatcataagtgcacagcccatacatttttcaaaaactgaaccaatgtgtacataatatgtagatcaagaaatagagccttcccgaagctgcccttggactcccttcccatcactactgcctaaatccaccatactgatctcaagcaccatagattagctctgtctctttttgcacttcatagaaacaaaatcttataactgctcctcctttgtgtatacctccttttgtacaacatcatgcttccataaggttgtgtgtcattgtagagtggccattctaattgctagatattattctattgtataattatattatgatttgcttatccattctactat

SEQ ID NO: 700282 - DNA, 1987 bp, Homo sapiens
tgcatgaattacaaccaaagatgaactcttgggtatagaaacaactcaggaacaaacagatggtatgcacaaataaattaaggtcaaggcttacatggtaccactagtctggggagatactaagtgaatatgtgaatgtcttaagcattcatgaatcaattattaggttaaaatatggcataaatactaaatataaggaaaacctactcatggttttacagtagggtcactaaaaccatagtaccaagaggcagttgctggtggcctacagtgtccataagggtactgttttctcttgagatgccttacaggacacagaaagtggtctcaagaaagacaatgacaagccaagtccctgctgtggagccagcagctgtcagtcagggcgaagctgcagggtgttgttggccacactgagatgcaatcccaggtgctatccctgacacatcacagcattattcacaatagtaaagacagagtatcaatctaaatgcacatgaacagtggaccggataaagaaagtggggtacatatacaccatggaatactatgcagccataaaaagaagatcatgtcctctgcaacaacatggatggagctggaggacattatcctaaggtaactaacacaggagcagaaaaacaaatacctcatgttctcacttataagtaggagctaaacactgagtatgaatggacgaaaaaaaggaaacagcagacaccagggaccccttgagtgtgaagggtgagaggacgaagaggatcaaaaaactaccttttgggcactatgctcattacctgggtgaggaaataatcggtacaccaaacccttgtgacatgcactttagccatataacaaacctgcacatgtacccttgaagctaagatgatagttaaaaaaagaaactgtagaagctgttaggttgtgtatacagtaccacttctgtttcacgtaaaatttgattcttttctcatgttcctttctttcatccacattacttgatataaactttttgggagttacatttctacttaaacattatcactaaagtcttaggtgtactcaggaacaatttttaatgtttatctttaggagcatcaaatatgcatttagaattagcatacacataatcatacattgacttcaaaccttaagtaccgatctacaatacagattcttaaccatgtaaacatataaaggccttactaagattgccgagaaaacagagaaacagatttttgaaaaaccaaacaataaacatggattcatgaatcaacgaaaaatttcttttgcatttaatttataatatactttttctacatcctgctaattttctctatggatgctagagtttttttgtctttttatcttagattttaagcctcgtacccataaaggtatttctgcagcaccacagtttgactgttttaaacagtcacatttagaagaaaaaaatttataacctgtttaaattaagaggaaatttggaaagacagcgttgtatgtgtatgtgtatgtgtggatacgtgtgcctctgtgatggaaacaataatgatgtgatgaattctagtttccttggaaacagcatgaccaaagtgtattgtgtgttcctagtaggatgtggacctatttagaaacataacagtatgatactaagtatattttccactaagaaattcaagatagttttgcctgtgaaaaatctggttttattcacagaccctcagttttctgaccaactctatttatgctgtgctgaaaggaaggagccatttacattcacttaatgtgcttccatgggttcatgaatgttcgtgggcctctgccaggtctatgggcacaggcagtcctccaargagctactgtgttcgctgggaggtgtggacccataaaggcatggagggcacaggatagagcaagaaaacctccataggcttgagaaataagtatgtgatatggtttggatctgtgtccctgcccaaatctc

SEQ ID NO: 700283 - DNA, 653 bp, Homo sapiens
tcggaggaaaggcaggagagcatgtatccagaatggtggagagtctgttttgccctaattacaagctagcaagttggtgccatggatgctggaggaagacatggatctgaatggtcagagacaaaggacaaggttagttcacaagcagggccagctacctaatttgaggggcctagtgcaaaatgaaagyacaaggtcctttgttcaaaaagtagaaataaggtgctgttattctccaatctaaaggttaacacttgtgttttccctccttcggcactgtgcttgattgggtgtatgaaacctgcatggtagttcctgtctggctacctgggctttgattacagtattccagaggaaagggctgctttatgcaatgccttgcagagatgtccatccaaatatttatccaattaatagcaattcagaaaagacaactatcaaactaatatttctcggctatatcaagtgcagtactgttgatattgtgatttatctaacagcagtaatctaataggttctgcacagaaactagaaataggcatgatctcagaaatgaatagacttgctctctaaaaatagcacatctcagacattgaaagaactctaaaatgtgtggcatcactaatccacatgatttgtctttgaggtgagga

SEQ ID NO: 700284 - DNA, 2842 bp, Homo sapiens
ctttccttgggaaatcatgagtcttttatttttgcaatttggctttatctcctacacatcatccagatggtgcaacatctggtactatatgtccaatggaattgccacaactcagccactgagatccaacattcctgcctctcttcattccaagattccttctgttctttattgtggtagacaagagcaagcatttttatttgcagagatgtacttatttaaaaagcaattgtgaaagcatttgatttaataattaggattgtttctccacgattctttttctgaaaaaaaatttttttggtgtaaatttagagttyataagtaacaccaaagactgagacaatgaagtccatgcatactgtaaaaaaataacataaataacagtccctagtatgcatcagtcattgtactagaggctttgtgtgtacattgattgtctcacttgaaaatcaaaacacggcagaagagtcaaatgcttttgaatgtgctgaaactcaaattttcttccaggtcatctctgtatgattcctcttttacactgccattactggcttctaaaaccactaaagctatgcagatagcctggtcctaacatgttctaaactgggcattagtgaggggctgcctgctggcttgtttaggggccagttggctcagtttggaatggtttaatatcagcaacaatagcattgggttgatttgaatataaacaacttagactttaaaagttcatcctgaaaaacaagccttcaaggacaagtgaggacatgaagcaaattcctaaggatgcctggggttcaggaagcaaagaagaatctttggttattcatgaaaaccaaataccagctatgtggcatcttctgggaaagcacaggggtgggagaatcctggggtgtgtttggcagcactgtccaaagtacagttgacttcttaggctgctgaacaaatttcttctcttgccccaggagaatttgatctgcaggttcccataagtagagtaacatctttctcttgaaataggtgctgtgtcatagtctgtatcataagcttctcttggtcaacataatgaaatgaaagtaactcagctccttgactggtatcaatcttagcagggattaggagacaagaagaaagctggtttctccaacaatcttcctcagattccctagaatcccccctttttgcacagcttctctggagctatgaagttcaaagcattgaatccaaactcgaagtccccattcaacccactcagccttgactgggctgattggatcattgccattttgatgtagaacctttgctctcattttcatgttcaattttctatagtttccaagctaggaagcatttctgtctgtatagagttgtttgcagggatgaaatcaggtattttattttcctggtagacatagtttgaagggacctctgatgtttgagacctctagattcctagcattttgatggcagaaactgtggttttcttatctctgaacttccagtgcactgcaaagttctgggcatatattggtgcttaataaaccctgttaaatgaataaacaaatgattttttctttattacacccccatttcagtagcatggaattatgaggatgattttgccaaattatgagtaggtcctattagattaggtttttctacaggaaattattctttcaaactacagtgtctaggaagtaccttgcacaaaatagacacaggatgcataattgttgattaattagttcattttaacctatacaccttggggttatctagttatgttttcatgaaaactagggctttgtaatatcaatgtcatgtctaataagcctaaatttccagttctaaaaacaaagttattcaacaacactttctcaatttgatgtgtttttcttttcctgaaataatttttttcttaagcttttgatatttgcttttgtgctgacatttgatagtcaaaactcaaacgatctcaagtacttctttctcagctcaataggatcatgtttcgcttaacatttgtgaagttgatttatctaattcattttgatcttgctaaaatatgacctttaaaatttttcatgtcacattgtgacccagaaagaccaaatacatacatgagatcatagttttacctgataatatcactcctagtttgatgatggaattaatttgtcaatatttcatggagttctgctgaaacgattgcaatttcttgggcaagtttcagaacgactagtatatctgtggtcatgtcatcttgggtcatgttaaccagttccattggattatcatgctgttcccttgtctgacaaaaggatctttgtgaaagcacacactgtttcttcccataactcacattcaattccagaccctgaatttctgcttgctcactgtgagccatattgttgagattgtctgtgcataggcaacttgagcaggtttggtttgcctttctggaatatattttttggggaacaaaaggagaatatcaaagcagagttattccagaagatcatttttctcttttcctttttgttttcttaaatgggaaaaaaacagctcttaaggttcttattatttattcattcataaaacatgtattttgtctatgtctatactgataaagacaacttactagatgttagacaatcaatacttccctactactgatcaatacaaacccaatctctgctgtcctggtcttatgatccagcagggaagctagactgcctgcctatggtttaggaaataatacaagctccaatcctttctaggttattaaaagaatctaaggtagttcctccaattttggatcaatggtaaatactttaaggta

SEQ ID NO: 700285 - DNA, 1529 bp, Homo sapiens
aatcaagaaattcaaacaaatacatatcctgatttttagaatcatatggagaagagggtaggaaagaaaagcagtaaaatatgagttccaggcaggaaataagacagaaagcagaggaccagaggatgcagtcgcccttgcgcaaacccactctctcctgtaggtggcagcatttatttatagctgtygcatccacaagtcaatggcggctggagggcgagcgggttgagtgagtttgagttgagctgtttcaattttcagaacatcgagcataatcaattaaaattttaatatcattaggtaagtgcctttgctagaaaaaaaaatacgtggaattcagttctgcctgacaaaaggggaagtggcctattgattatactcaaggtcatagccaatcaagacttgccagcacgatcacatttccttacctcctgcagacattgactcttctctgtttcctctgttgaaatctatatggatgcaataaaaactgttgtttactattcttttttgattcccgggtagtttttaggaagaaattgatgaagaagtagctaatgctatgaactgtatctgcagctgaaatcaggaaactgggctgatgttgctttttcatgaactacataaaaaaagatatctgactaacaggataaacgtcttaaggcattaaaaataaaaatcccagcgtgccttgaaacaccaaacatcctgatccctatgcttggggtctttgttttgatgtgttgatgtgaaaccctaccatagaccagaaaacagagtgagagcaagtcttctggaaaactctaaatacatagttgtgtaagatcctctcgggcaagctttctcaaccagtagatcaggatcaaccagtaggtcgctggcctacctggggttggccaagaagggctgcaggcacccttcccgctcagctgggtttccatgggacactgcctacccagcacctcctaggcgcgccctgtgtggactttcctgccccagtccctcacctctcacccatggtctcaacgtttggaaaaataagaaatgctccacttctttgagagactgccagccctgcccctgctctggggtcagaaagccccactcatgggggatttccaaaccttattgtttgtttgatttcctgaaacctacctcctgcccctaaaaaaccaagagctattttgcatagttggtttttcttctttaattgaagaaaaattgactaagttttgttttgaaaaattcacagctcacctagagataactaggtagggcgagttcagttctcagagtggcttctttcaaaatttggcagtaaatatgttatgaatatgaaaggagatagagacttaatcagtatttaaaaacacatccttcccaaatattaactaatgcctaaatatattactaaatgctaaatattacaaagtattaactaatggctaaatatacataacaaagaataatcatggggtttacattgaaaacatagcttctatagtcaggttgcccaagggtgtagcttg

SEQ ID NO: 700286 - DNA, 1377 bp, Homo sapiens
tgatttaaaaagtcgaatgtgataactctaagctcccttcccaaatttggaactttacgattttaagcttattgatcattgaaaagacatcttgtatctcttttagcttttgttttgaccacattatctaaaacatcttaaatgagtactatgaatactaaaaatgaattactgaatgaataaatcagccataacagcagcaaatatgctatgaatggccttttgccttttctgccttgtctataattaatgcagctatgcaccttaaaagaggtgtgtgtgtgtgtctgtgtgtgtgtgcatgcacacacatgtgtgtagtagacaagttggagaagataatctgttaaattcaagcactggaagtgatttcttattcagggtaagtaaaatcctccaatgcctcaattcagtgacaccctgggaatgttttatggatcaggtttcatcacttgttagcagtcggactgaaaggctgagctacttttgatggatgacccttctgagtctgtttttaaaagagcacccttggctcaccccttcttaactactccatttatgtggcattctgataattttccttctgctggctcctgagtcagtgtaggacatccgctttcttcagtaaacttttgtctgccttcctgttttggctgtaaattatttacaggaactatgagtctgcccatttttcagcttgtggacgtctattagataattgtatcttgtggcccttaatttcagttatcatcatctcatccctggattactgcagtagcctcctaactagtctctgtgcttccagttgtatccttctcaccttcaatccaatttctatcctacctcccagtgatctttcaacaacaaaaatgttgatggcacaacttccctgtttaccctgctgcaacacttgtgcattaccagatacagcccaaagtcctgagcacacccttagggaggctgccaccactcctctgcaccctgccttcctcccctgtgttctttcccaccattccccaaccacaacaggctgtaagattgtcaggagatattttatggttttaaaatactttacttctctaggcacagtgttaaattccaagaaaccttttggctctctgattattcttttttcatagcagcatatttctttttttttttttttaaactttaagttctagggtacatgcgcacaacgtgcargtttgctacatatgtatacatgtgccatgttggtgtgctgcacccattaactcgtcatttacattaggtttatctcctaatgctatgcctccctcctgccaccaccgcacgacaggccctggtgtgtgttgttccccttcctgtgtccaagtgttctcattgttcagttcccac

SEQ ID NO: 700287 - DNA, 1377 bp, Homo sapiens
tgatttaaaaagtcgaatgtgataactctaagctcccttcccaaatttggaactttacgattttaagcttattgatcattgaaaagacatcttgtatctcttttagcttttgttttgaccacattatctaaaacatcttaaatgagtactatgaatactaaaaatgaattactgaatgaataaatcagccataacagcagcaaatatgctatgaatggccttttgccttttctgccttgtctataattaatgcagctatgcaccttaaaagaggtgtgtgtgtgtgtctgtgtgtgtgtgcatgcacacacatgtgtgtagtagacaagttggagaagataatctgttaaattcaagcactggaagtgatttcttattcagggtaagtaaaatcctccaatgcctcaattcagtgacaccctgggaatgttttatggatcaggtttcatcacttgttagcagtcggactgaaaggctgagctacttttgatggatgacccttctgagtctgtttttaaaagagcacccttggctcaccccttcttaactactccatttatgtggcattctgataattttccttctgctggctcctgagtcagtgtaggacatccgctttcttcagtaaacttttgtctgccttcctgttttggctgtaaattatttacaggaactatgagtctgcccatttttcagcttgtggacgtctattagataattgtatcttgtggcccttaatttcagttatcatcatctcatccctggattactgcagtagcctcctaactagtctctgtgcttccagttgtatccttctcaccttcaatccaatttctatcctacctcccagtgatctttcaacaacaaaaatgttgatggcacaacttccctgtttaccctgctgcaacacttgtgcattaccagatacagcccaaagtcctgagcacacccttagggaggctgccaccactcctctgcaccctgccttcctcccctgtgttctttcccaccattccccaaccacaacaggctgtaagattgtcaggagatattttatggttttaaaatactttacttctctaggcacagtgttaaattccaagaaaccttttggctctctgattattcttttttcatagcagcatatttctttttttttttttttaaactttaagttctagggtacatgcgcacaacgtgcaggtttgytacatatgtatacatgtgccatgttggtgtgctgcacccattaactcgtcatttacattaggtttatctcctaatgctatgcctccctcctgccaccaccgcacgacaggccctggtgtgtgttgttccccttcctgtgtccaagtgttctcattgttcagttcccac

SEQ ID NO: 700288 - DNA, 1377 bp, Homo sapiens
tgatttaaaaagtcgaatgtgataactctaagctcccttcccaaatttggaactttacgattttaagcttattgatcattgaaaagacatcttgtatctcttttagcttttgttttgaccacattatctaaaacatcttaaatgagtactatgaatactaaaaatgaattactgaatgaataaatcagccataacagcagcaaatatgctatgaatggccttttgccttttctgccttgtctataattaatgcagctatgcaccttaaaagaggtgtgtgtgtgtgtctgtgtgtgtgtgcatgcacacacatgtgtgtagtagacaagttggagaagataatctgttaaattcaagcactggaagtgatttcttattcagggtaagtaaaatcctccaatgcctcaattcagtgacaccctgggaatgttttatggatcaggtttcatcacttgttagcagtcggactgaaaggctgagctacttttgatggatgacccttctgagtctgtttttaaaagagcacccttggctcaccccttcttaactactccatttatgtggcattctgataattttccttctgctggctcctgagtcagtgtaggacatccgctttcttcagtaaacttttgtctgccttcctgttttggctgtaaattatttacaggaactatgagtctgcccatttttcagcttgtggacgtctattagataattgtatcttgtggcccttaatttcagttatcatcatctcatccctggattactgcagtagcctcctaactagtctctgtgcttccagttgtatccttctcaccttcaatccaatttctatcctacctcccagtgatctttcaacaacaaaaatgttgatggcacaacttccctgtttaccctgctgcaacacttgtgcattaccagatacagcccaaagtcctgagcacacccttagggaggctgccaccactcctctgcaccctgccttcctcccctgtgttctttcccaccattccccaaccacaacaggctgtaagattgtcaggagatattttatggttttaaaatactttacttctctaggcacagtgttaaattccaagaaaccttttggctctctgattattcttttttcatagcagcatatttctttttttttttttttaaactttaagttctagggtacatgcgcacaacgtgcaggtttgctacatatgtatacatgtgccatgttggtgtgctgcacccattaactcgtcatttacattaggtttatctcctaatgctatgcctccctcctgccaccaccgcacgacaggccctggtgtgtgttgttccccttcctgtgtccaagtgttctcattgttcagttyccac

SEQ ID NO: 700289 - DNA, 1173 bp, Homo sapiens
tggtygcgtacaatgtgagtgacacactttagaaatgtctttgctttttctttgcaattcttcagttaaattctcttttctggtaggctcatgtttattatttcactctgttttcataaacgtaagagtcgatggttgattgatagataacatatttacttgaataactatcaaggaataaaactctggctatttgtgaaataccatagaaaatcctaaataataaaggatgaagatttataatttgtagtgtttatttcacccagtggagattgtcaataagtcactattttgatatgtcataccctaaacaaaccaaaacatttattgcagtttttctaagtacagaactgtcaaacacattttgttattagcagtgtgtgtgtgtttattgtgactggatacaactaaatcagaattttaaatggagctaattagacagtgtctacattgtcaaaatggtagacctgaaacagaggaaatacaaatgtaaatcacactgtcgtgaaaataaccatagatccttaacagtttgaaaataaatagctgtagtgggatttatggtgttaaaattttagtctaattacaaacattaatttaatgtagtagcattactagagcatttctatagctagatggtctcaggcaagacccaaattacatatcttagaaaatattttctcacttattaactaacaccttacattattgaagcttaaaaatactttatattcaagttgactttttatcaaagaagtaatttgttttcttttaaaaaaatgtaattatttaagatagtgtaatttctccatgtttagatttttcactttatttcctggttctcaaatattacctcaagtttcctttgtgtttaggcttttaacaccacaggaaaacaaattttaaaaatatattttttcattgatattttcaagaaaagaattattgttgctttgggaactttaacagagagttttctgactcctgtgtaattacaatctcagtcttaatgatacattagcatatttttgcatctaattttataaaaaaatgcaaaactctgtaataatgcagtcttgagtggcaaatttaaaaccatgaaagttaggtaattcctaaaaataagatgccttgaggtaagaatagaatacattgttatctatgtatataaag

SEQ ID NO: 700290 - DNA, 1173 bp, Homo sapiens
tggttgcgtacaatgtgagtgacacactttagaaatgtctttgctttttctttgcaattcttcagttaaattctcttttctggtaggctcatgtttattatttcactctgttttcataaacgtaagagtcgatggttgattgatagataacatatttacttgaataactatcaaggaataaaactctggctatttgtgaaataccatagaaaatcctaaataataaaggatgaagatttataatttgtagtgtttatttcacccagtggagattgtcaataagtcactattttgatatgtcataccctaaacaaaccaaaacatttattgcagtttttctaagtacagaactgtcaaacacattttgttattagcagtgtgtgtgtgtttattgtgactggatacaactaaatcagaattttaaatggagctaattagacagtgtctacattgtcaaaatggtagacctgaaacagaggaaatacaaatgtaaatcacactgtcgtgaaaataaccatagatccttaacagtttgaaaataaatagctgtagtgggatttatggtgttaaaattttagtctaattacaaacattaatttaatgtagtagcattactagagcatttctatagctagatggtctcaggcaagacccaaattacatatcttagaaaatattttctcacttattaactaacaccttacattattgaagcttaaaaatactttatattcaagttgactttttatcaaagaagtaatttgttttcttttaaaaaaatgtaattatttaagatagtgtaatttctccatgtttagatttttcactttatttcctggttctcaaatattacctcaagtttcctttgtgtttaggcttttaacaccacaggaaaacaaattttaaaaatatattttttcattgatattttcaagaaaagaattattgttgctttgggaactttaacagagagttttctgactcctgtgtaattacaatctcagtcttaatgatacattagcatrtttttgcatctaattttataaaaaaatgcaaaactctgtaataatgcagtcttgagtggcaaatttaaaaccatgaaagttaggtaattcctaaaaataagatgccttgaggtaagaatagaatacattgttatctatgtatataaag

SEQ ID NO: 700291 - DNA, 609 bp, Homo sapiens
agacctacagagcaggaatcagcaaagtgtttctgtaaagagccagtactaaatgttttcagctttttgagccgtacaattttcatcacaactactcaacaccaaggtgtagcatgacagcaaccacagctaacatgtaaactaatgagcttgcacgtttcaataaaacttgattacataagcaggttgcaatatgtatttgactcattggctatagtgtgttggcctctgctattgattaaagtatactgattccttctaaacccatgatataatttaaatttataataataaaaaagataaagtacaatcaggagatattgttaaccaatcacaacagaaattgagattattgagaatttggctcagacagaaaataccctgtaatacctatatccrtatctgcctatctatttatgaattagggaaacgtgaatactgactgaatatttgatattaaagaatttttgataatttttggagtgataatggtattttggttatgttttaaaacatgccgtctttcagagaaatgttctgaaatattttcagatgaaatgattcaatgcctgatatttatttcaaaagtattgaaggagaaatggagtg

SEQ ID NO: 700292 - DNA, 609 bp, Homo sapiens
agacctacagagcaggaatcagcaaagtgtttctgtaaagagccagtactaaatgttttcagctttttgagccgtacaattttcatcacaactactcaacaccaaggtgtagcatgacagcaaccacagctaacatgtaaactaatgagcttgcacgtttcaataaaacttgattacataagcaggttgcaatatgtatttgactcattggctatagtgtgttggcctctgctattgattaaagtatactgattccttctaaacccatgatataatttaaatttataataataaaaaagataaagtacaatcaggagatattgttaaccaatcacaacagaaattgagattattgagaatttggctcagacagaaaataccctgtaatacctatatccgtatctgcctayctatttatgaattagggaaacgtgaatactgactgaatatttgatattaaagaatttttgataatttttggagtgataatggtattttggttatgttttaaaacatgccgtctttcagagaaatgttctgaaatattttcagatgaaatgattcaatgcctgatatttatttcaaaagtattgaaggagaaatggagtg

SEQ ID NO: 700293 - DNA, 1063 bp, Homo sapiens
ggtaaataagcattcaataaattctgactgaactatattctagggctatgcttttgacagccactcttcctactaatcaatccaagacacttccttaaaatctatacttatttcccaccatatccatgttcctttaaaatgatttcctctgctcatttctaacccatgacatttgctttgatagcagcacccaccactgcatcttcccaaccccacatgttcacagtgccctttaactcaaactgtgagtaaatacccggcacttccaggtccttctctattcggcctcttctaaaagtgtcacttatcttgaaaatctgggccttaactctatgatccctgaatccccacctatatatttttacttgacactaacatattctcatgacctggtcagaaagcaaagcctcaagtgttgaattgtgtgacttctgaccatgtcggagtttgctgttgctgtgtatttgctctagtacaacgagagctatcaaattgccttatatatctatgcatacatatttatgtctatatgtaaacatatacagttttaatgtattttaatgtatttttctgataattaaagttatatataattattaaaacaaaytcaaactctacagataaattataataaaaaatattatctgaaattccagcattcagagataataattgtcaacattttggacacttttcttgacaatttttttcatgttctatacatatatatacatacatatatacatatacatatatatataaaatatataaattacatacataaccgtattcccaaattagatcacagtacttattcaggctttggaatttgtattttttacaacaatttaacaatgtattatgaaacatttctcatgataaattataaatatatacctaaatcataattgttaagtgccgcttagcatggtgttatatcagtatttaatcaatcagtgctaataccttaatattttgttagtttttctctctctctgctttttaatattacagtctatgctatgatacttattcctgcatatatatcttggtgctcttgtct

SEQ ID NO: 700294 - DNA, 587 bp, Homo sapiens
gcctttcccaaacatgcccataatcaacactctaaccctgaatctctgcgggctaggctgaagatctatattttaaccacccccaccaagagctggtacatatgttcagcaaatttggaaaatgctgygtaaggatgttaagatgtacgcagtgttatctcagggaaaactaaagcatgaattcaatcaccgtaatctgaccttgtccaaagaacttaagtttgttcctccttgggaatctgactaaagttattatttagtgcctttgaaagtgtgctttaagcgaatatattttacttcatcccattaatacattcctttattattacctacttttcacttttctgtaactttctagggctttttttagtatcactagtaaaggttcctttatattgtgtgttacttgtccacttacctataagctactcgttgcatattttttacccctctattctcaggaagctcatatcctggattcagcccatcagtgtcgctcttggcagccccctttcttggccttatcagaagccaatttcattcatccatttgcatgttcttttcccacacagaaccatgtcctgaga

SEQ ID NO: 700295 - DNA, 623 bp, Homo sapiens
ttttctggccgggtgtggtggctcacgcctataaccccagcactttgggaggccgacgcaggtggattacctgaggtcaggagttcaagaccagcctggccarcatggcgaaaccccatctctactaaaaatacaaaaattagccgggcctgatggcatgtgcctgtagtcccagctacttgggaggctgaggcaggagaatcgcttgaacccaggaggccgaggttacagcgagtcaagatcgtgccactgcactccagcctgggcggcagagtgagaccctgtctctaaataaataaataatggtttttccttttgttaacctttaccagatgaaacttaagaatttgaggaaattcagttattgcatgattgatacatttaattttcagacaatgcacaggcctgtctggaaaaaaatatccaaattctcagattttacttctaaaatcccttgtgcactcttctgtttcaggggagacaccaggatctcatgcctatgtctacatcaccaaaaggaaataagacaaggtttctaaaaccctctgacaacataccctgaattattaatacttgatacgaaggcattatcagtacagtgaatcttaaagatctgagatgca

SEQ ID NO: 700296 - DNA, 623 bp, Homo sapiens
ttttctggccgggtgtggtggctcacgcctataaccccagcactttgggaggccgacgcaggtggattacctgaggtcaggagttcaagaccagcctggccagcatggcgaaaccccatctctactaaaaatacaaaaattagccgggcctgatggcatgtgcctgtagtcccagctacttgggaggctgaggcaggagaatcgcttgaacccaggaggccgaggttacagcgagtcaagatcgtgccactgcactccagcctgggcggcagagtgagaccctgtctctaaataaataaataatggtttttccttttgttaacctttaccagatgaaacttaagaatttgaggaaattcagttattgcatgattgatacattyaattttcagacaatgcacaggcctgtctggaaaaaaatatccaaattctcagattttacttctaaaatcccttgtgcactcttctgtttcaggggagacaccaggatctcatgcctatgtctacatcaccaaaaggaaataagacaaggtttctaaaaccctctgacaacataccctgaattattaatacttgatacgaaggcattatcagtacagtgaatcttaaagatctgagatgca

SEQ ID NO: 700297 - DNA, 757 bp, Homo sapiens
tataattaataattcttattaatgcttatctgttaattaatgtttattaataaccaaatgagacgggtagaatttttttccccagtttatgtatggggaaaatgaaagattggttacttgtccagaattatagctaacaagctctttgtacccagacaggctgatgcgaaggttgggctcttaattgacccattaaactgctttgtatataatcaacttaatacagacatgggctggatgtggtggtttatgcctgtaatcccagcactttgggaggccaaggtgggtgcatcgcttgaactcaggaatctgagaccagcctggataacttctgagaccctgtctctacaaaaaataaaaattagccaggcatggtggcacacacctgtggtcccagctatttgggagatggaggtaagaggattgcttaagcccaggaggtggaggctgcagtgagctatgactgtgccactgcactccagcttgggcaatagagcaaggccacctcaaaaaaaaaaaaaaaaaaaaaaagacatgatatatactaaaatttatcmcatgctacatttgcaggatgtaggccttcagatattgaggtgttttatctaggtagataaaaatctgaaatgtgtattagaatactccgaaaatgtattagcaaaaattgaaaaatggagaaaattgttagatgagggtagcttataacagattaccaaaggcagaagtatttgtattttaaaagtaaaacaatgaacaa

SEQ ID NO: 700298 - DNA, 757 bp, Homo sapiens
tataattaataattcttattaatgcttatctgttaattaatgtttattaataaccaaatgagacgggtagaatttttttccccagtttatgtatggggaaaatgaaagattggttacttgtccagaattatagctaacaagctctttgtacccagacaggctgatgcgaaggttgggctcttaattgacccattaaactgctttgtatataatcaacttaatacagacatgggctggatgtggtggtttatgcctgtaatcccagcactttgggaggccaaggtgggtgcatcgcttgaactcaggaatctgagaccagcctggataacttctgagaccctgtctctacaaaaaataaaaattagccaggcatggtggcacacacctgtggtcccagctatttgggagatggaggtaagaggattgcttaagcccaggaggtggaggctgcagtgagctatgactgtgccactgcactccagcttgggcaatagagcaaggccacctcaaaaaaaaaaaaaaaaaaaaaaagacatgatatatactaaaatttatcccatgctacatttgcaggatgtaggccttcagatattgaggtgttttatctaggtagataaaaatctgaaatgtgtattagaatactcygaaaatgtattagcaaaaattgaaaaatggagaaaattgttagatgagggtagcttataacagattaccaaaggcagaagtatttgtattttaaaagtaaaacaatgaacaa

SEQ ID NO: 700299 - DNA, 611 bp, Homo sapiens
ccaagatatataaaggtctttctttgcagatatgatcatggagaagccctgttcagtgcctgtcagcagcacaggctgctgagcctccatgtgggccgctagttcatgatgctgggaagaccaagtcctgcttcaccatcacatttcctacaccctattattttgactttgtattacrcaaattttcaaacaaacataaaggtagagggaatggtgaaataaacacacacgtctcatcacctaacttcagtatttcttatattatcagtgttatttcctatattcccccacaatttttttgtagatgttggaatattttcaggcaaatcccagacagcacatgatttcacccctaaatacacatgtgaatcaccttccaataaggactttcttctcccaggatgatgataataccatttcacagatcatacaagttgacaactccttcatagcatttaatgcccagttcatgttcagtttccccagttgtttaaaaaaccttttttttatagttgatgtgtttgaatcaggatttaaacattgtccacactttgcagatgattgatatgtcccttaaacctctttgactctatgttaatgccccctccctt

SEQ ID NO: 700300 - DNA, 611 bp, Homo sapiens
ccaagatatataaaggtctttctttgcagatatgatcatggagaagccctgttcagtgcctgtcagcagcacaggctgctgagcctccatgtgggccgctagttcatgatgctgggaagaccaagtcctgcttcaccatcacatttcctacaccctattattttgactttgtattacacaaattttcaaacaaacataaaggtagagggaatggtgaaataaacacacacgtctcatcacctaacttcagtatttcttatattatcagtgttatttcctatattcccccacaatttttttgtagatgttggaatattttcrggcaaatcccagacagcacatgatttcacccctaaatacacatgtgaatcaccttccaataaggactttcttctcccaggatgatgataataccatttcacagatcatacaagttgacaactccttcatagcatttaatgcccagttcatgttcagtttccccagttgtttaaaaaaccttttttttatagttgatgtgtttgaatcaggatttaaacattgtccacactttgcagatgattgatatgtcccttaaacctctttgactctatgttaatgccccctccctt

SEQ ID NO: 700301 - DNA, 611 bp, Homo sapiens
ccaagatatataaaggtctttctttgcagatatgatcatggagaagccctgttcagtgcctgtcagcagcacaggctgctgagcctccatgtgggccgctagttcatgatgctgggaagaccaagtcctgcttcaccatcacatttcctacaccctattattttgactttgtattacacaaattttcaaacaaacataaaggtagagggaatggtgaaataaacacacacgtctcatcacctaacttcagtatttcttatattatcagtgttatttcctatattcccccacaatttttttgtagatgttggaatattttcaggcaaatcccagacagcacatgatttcacccctaaatacacaygtgaatcaccttccaataaggactttcttctcccaggatgatgataataccatttcacagatcatacaagttgacaactccttcatagcatttaatgcccagttcatgttcagtttccccagttgtttaaaaaaccttttttttatagttgatgtgtttgaatcaggatttaaacattgtccacactttgcagatgattgatatgtcccttaaacctctttgactctatgttaatgccccctccctt

SEQ ID NO: 700302 - DNA, 1226 bp, Homo sapiens
tggattccacattggtcacattcagtttgagatgctgttcagaagctgaagtggagatttccaacagggagttagatgttcaaaagccccagaggtaggtctgtgtggaagacatatttgaaagcctcagcttagtacccattcattgaaatcatgagcataggcaagaccaccagtgaggaaatgggaccagcaatgaacttcaggaaactaatatttaaggaatacatggaagaaagggagctaacaacagcgaagctcgaaacaatggccagagagagacagagacagagagagagagaagagagagaaataaaataactgagttgttttactctttaattcctttctttcttgttagaggaccaaatgcaatatcacatttagttatctggggagaagaagggtccttttgagtttgtccaggtagggacaagggagaggtggaatatggggagtttgtgggggcaaggggagatgaggtaactgggcattawccctctagcccagggtggattgagggatgggggaagaaggctgtgccacaccatacactcctagaaaaagagagatgggacatttcacctggagaaagatatttgttgtttagtttatgacacaggtggaatcatcattaattcctgggacagagaaccatctccttctagcaagttctccttgaggcaatttcagattcaagtctggaagggattgattcaagttatctagatatgctttggctctgaatagagccagaatcaacatatttttagggatgagcctgagatccacgttcatcagcgagaagccagcactgcaggcaggccctgattctgtaacactcagcccaccctgcatataagccatggcacccagggccacgagagggaggctgggtgggattctctgaacttctccctggacaggtggtcacatgtcatatagggttatctcccctcacaagagtgtagtgatgtctaatttcatgatctgtgcaatttgaccttcaggaaagaaacttaagcagaagtgggctgtggatttagaggagaaggatggtagtgtgggtatcaaaaccaaccctttgtctgtgctgtgcaatccaaagaatgaggataactgcccaagtatgagctgatgagcatgccttttgtcaacaactgtttagtggctctgctaaggaggcagctcccatggttaatgacccacagagtaataacactgca

SEQ ID NO: 700303 - DNA, 1226 bp, Homo sapiens
tggattccacattggtcacattcagtttgagatgctgttcagaagctgaagtggagatttccaacagggagttagatgttcaaaagccccagaggtaggtctgtgtggaagacatatttgaaagcctcagcttagtacccattcattgaaatcatgagcataggcaagaccaccagtgaggaaatgggaccagcaatgaacttcaggaaactaatatttaaggaatacatggaagaaagggagctaacaacagcgaagctcgaaacaatggccagagagagacagagacagagagagagagaagagagagaaataaaataactgagttgttttactctttaattcctttctttcttgttagaggaccaaatgcaatatcacatttagttatctggggagaagaagggtccttttgagtttgtccaggtagggacaagggagaggtggaatatggggagtttgtgggggcaaggggagatgaggtaactgggcattatccctctagcccagggtggattgagggatgggggaagaaggctgtgccacaccatacactcctagaaaaagagagatgggacatttcacctggagaaagatatttgttgtttagtttatgacacaggtggaatcatcattaattcctgggacagagaaccatctccttctagcaagttctccttgaggcaatttcagattcaagtctggaagggattgattcaagttatctagatatgctttggctctgaatagagccagaatcaacatatttttagggatgagcctgagatccacgttcatcagcgagaagccagcactgcaggcaggccctgattctgtaacactcagcccaccctgcatataagccatggcacccagggccacgagagggaggctgggtgggattctctgaacttctccctggacaggtggtcacatgtcatatagggttatctcccctcacaagagtgtagtgatgtctaatttcatgatctgtgcaatttgaccttcaggaaagaaacttaagcagaaktgggctgtggatttagaggagaaggatggtagtgtgggtatcaaaaccaaccctttgtctgtgctgtgcaatccaaagaatgaggataactgcccaagtatgagctgatgagcatgccttttgtcaacaactgtttagtggctctgctaaggaggcagctcccatggttaatgacccacagagtaataacactgca

SEQ ID NO: 700304 - DNA, 1226 bp, Homo sapiens
tggattccacattggtcacattcagtttgagatgctgttcagaagctgaagtggagatttccaacagggagttagatgttcaaaagccccagaggtaggtctgtgtggaagacatatttgaaagcctcagcttagtacccattcattgaaatcatgagcataggcaagaccaccagtgaggaaatgggaccagcaatgaacttcaggaaactaatatttaaggaatacatggaagaaagggagctaacaacagcgaagctcgaaacaatggccagagagagacagagacagagagagagagaagagagagaaataaaataactgagttgttttactctttaattcctttctttcttgttagaggaccaaatgcaatatcacatttagttatctggggagaagaagggtccttttgagtttgtccaggtagggacaagggagaggtggaatatggggagtttgtgggggcaaggggagatgaggtaactgggcattatccctctagcccagggtggattgagggatgggggaagaaggctgtgccacaccatacactcctagaaaaagagagatgggacatttcacctggagaaagatatttgttgtttagtttatgacacaggtggaatcatcattaattcctgggacagagaaccatctccttctagcaagttctccttgaggcaatttcagattcaagtctggaagggattgattcaagttatctagatatgctttggctctgaatagagccagaatcaacatatttttagggatgagcctgagatccacgttcatcagcgagaagccagcactgcaggcaggccctgattctgtaacactcagcccaccctgcatataagccatggcacccagggccacgagagggaggctgggtgggattctctgaacttctccctggacaggtggtcacatgtcatatagggttatctcccctcacaagagtgtagtgatgtctaatttcatgatctgtgcaatttgaccttcaggaaagaaacttaagcagaagtgggctgtggatttagaggagaaggatggtagtgtgggtatcaaaaccaaccctttgtctgtgctgtgcaatccaaagaatgaggataactgcccaagtatgagctgatgagcatgccttttgtcaacaaytgtttagtggctctgctaaggaggcagctcccatggttaatgacccacagagtaataacactgca

SEQ ID NO: 700305 - DNA, 1351 bp, Homo sapiens
tgtggaggagatgaatgtcagatacctctagacagccatcttgaagccctactcaaaactatattggtgtgttttaatcaacaaattttttgtataaaaatacatacttaaaatgattttacattatcatcacacaaatattggaaacttctagaaatattttatttctgtttcttcttttaaaacaaaagggatacatatgcagaatgtgcaggtttgttacataggaatacctgtgccatggtggtttgctgcacctattgacccatcctctaagttccctcccttcagcccccaccccacaacagaccctgatgtgcattgttcccctctctgtgtccatgtgttctcattgttcaactcccacttatgtgatatttggttttttcttcctgtgttagtttgctgacaataatggcttccagtttcatccatgcccctgcaaaggactgatctcattcctttttatggctgcatagtatcccatggtttatatgtaccccattttctttatccagtctatcactgaagggcatttgggttggttccatgtcgttgctattgtaaatagtgctgtaataaacatacgtgtgcatgtgtctttacagtagaatgatttatattcctttgggtatatacccagtaatgggattgctgggtcaaatggtatttctggatctagatccttgaggaatcgccacgctgtcttccacaacggttgaactaatttacattcctgccaacagtgtaaatgtttctatttctccacggccagcatctatagtttcctgactttttaataatttccatttggactggagtaagatggcatctcattgtggttttgatttgcatttctctgatgatcagtggtggtatttcttttcctggtttatgttattagatttttccgagtaaaacctcagagagttgtttttaatgytggtgaatccagggatgaaaaaaaaaatggtttctagagtaagacatgctgtaatatatgaagcttcccacagacctataccaagacacctctgctattttattattaaactcagattttcactgatcatttaccaaataatactaaggcctaaacaaagttaaaagaagacaaagtaaattagagctgtagagaaacagttaagtcttccacagtgacaagtagccaggaaaaagcctaacattcttaaaattcaaattgacaaattccaagagacaggatgaatgaactaacgttccactgaaatgtatcttgatcaagatacaggatttttgtttaagagctgacatttaacgtagaaagggatctaaaagtaacagattgattatcaaatttggctgaaggaaa

SEQ ID NO: 700306 - DNA, 646 bp, Homo sapiens
atcaaggaccaatgagattagaagttaaatctctcaatgaatataagaataagtattggctacaattcctaaaycccagcaagagtcaaaacattatttcaattaagtttactcagaagttatgccaaattcaaagccaaaatgttctattttatatcatatttcaatatttgcctaatcaactattgtccacccaaacttaccagcccagaataactcaaatcaataaataagtaaatatcaatgatataaaattcaccatacttgcttttactctacagataaataactatttaaaacacttaataagatgtcagcagcaatggcagagtaagtacctccaaacatcatttcctccatgaaagcaatgcaaaacatgcagaaatggtcaaaaccaactttttcacaattatgaaaattaaccaaaatttacaagaatccgggaaacatttggtaaatattggtagcaacagcaagctttgtggtgtttgaacatatccaatcactccagctctgcaacaatcttcaaaaccagtagtccataatcaaggtgaaacccagcagactgatagacaccggagtgggcagaacagggttggtgccccttctgagcctcatttccagagaattatcactattttacttg

SEQ ID NO: 700307 - DNA, 646 bp, Homo sapiens
atcaaggaccaatgagattagaagttaaatctctcaatgaatataagaataagtattggctacaattcctaaatcccagcaagagtcaaaacattatttcaattaagtttactcagaagttatgccaaattcaaagccaaaatgttctattttatatcatatttcaatatttgcctaatcaactattgtccacccaaacttaccagcccagaataactcaaatcaataaataagtaaatatcaatgatataaaattcaccatacttgcttttactctacarataaataactatttaaaacacttaataagatgtcagcagcaatggcagagtaagtacctccaaacatcatttcctccatgaaagcaatgcaaaacatgcagaaatggtcaaaaccaactttttcacaattatgaaaattaaccaaaatttacaagaatccgggaaacatttggtaaatattggtagcaacagcaagctttgtggtgtttgaacatatccaatcactccagctctgcaacaatcttcaaaaccagtagtccataatcaaggtgaaacccagcagactgatagacaccggagtgggcagaacagggttggtgccccttctgagcctcatttccagagaattatcactattttacttg

SEQ ID NO: 700308 - DNA, 664 bp, Homo sapiens
ttttttttttttttttgagatggagttttgctcttgtcacccaggcaggagtgcaatggcgtggtctcagctcactgcaacctctgcctcctggtttcaagtgattctcctgcctcagcttcctgagtagctgggattataggcacctgcctccacgccagctaatttttgtaatttttttttttgagactgagttttgcctttgttgtccaggctggagtgcaatgacacaatctcagctcaccacaacctccaccttctgggttgaagtgattctcctgcctcagcctcccaagtagctgggattacaggcatgtgccaccacgcctggctaattttgcatttttagtagagatggtgtttctccatgctggtcaagctggtctcgaactcctgacctcaggtgatctgcccgccttagcctcccaaagtgctggaatcacaggtgtgagctaccgtgtctggccattttcgtaatttttaatagagatgggttttcaccatgttggccaggctggtcttgaactcctgaactcaggtgattcgctcacttcagcctcccaaagtgctggaattacaggygtaagccaccatgcccagcctgtgaaaattttcataataaagtgttgggaaaataatattcatgacacaaaactcatgcaaa

SEQ ID NO: 700309 - DNA, 1214 bp, Homo sapiens
taactcaacttgtttttcttttccttctatctaatgaaaccatgtgtaacctagatttttaaattttacgtatttatgtgtgacatgtatgtgtgtatgtataaatgaacgaatgacaggtctcgctcactctgtcgcccaggctggaatgtggtggtgcgatcatggctcactgcatcctcaacctccccagctcaagcgatcctctcacctcagccttctgagtagctaggactacaaatatgtgctatcatgcctgactaattttaaaaattttcttttctagagatgcggtctctctctgttgcccaggttggtcttgaactcctggactcaagtaatccacttgtctgggtctccctaagtgtgggactactggtgtgatccactgtgcttagctgccagcttagatttttgaggggtacatagcccactgtaattggatacctctcttcagagccatagtagcttattataccttggggccatcctgcttggagtgtgcctcaaaagtgttcctttattccctaggttagagagttatgtaaaaacggggctctcaggtcagaatgagatttaaggcttctgcagagcctatatgaaagtgtttttgggccgggcacagtggctcatgcctgtaagcccagcactttgggaggttgaggagggcggatcatgaggtcaggagatcaagaccatgctggccaacacggtgaaaccccgtctctactaaaaatataaaaattagctgggtgtggtggcacacgcctgtaatcccagctactygggaggctgaggcaggagaattgcttgaacccgggagtctgaggttgcagtgagccaaaatcgccactgcactccagcttggcaacagaacaagactctgtctcaaaaaaaaaaaaaaaaatgtttttgggctgggcacagtggctcatgcctataatcccagcactttgggaggccaagatgggtggatcacttgaggtcaggagttcgaaaacagcttgaccaacatggtgaaaccccgtctctactaaaatacaaaaaaattagcctggcatggtggcgggtacctgtaatcccagttactcaggaggctgaggcaggagaatcacttgaacatgggaggtgggggttgcagtgagccaagatcacaccactgcactccagtctggatgacagagcaagacaccatctcaaaaaaaaaaaaaaat

SEQ ID NO: 700310 - DNA, 1575 bp, Homo sapiens
gggcaatacggcaagaccccatctcaaaacaaacaaaaattgccataagaatatttgttttaatatttaaatatctaaaatgcatgtaagatatcagtgtgaccaggatgcaatctaagtatgcagtctttgggccaaattaccaattatgtgctcaggcagagtagattatctgggtaagtgtaaaaattatcatttgaaaccttcaaagaaatggagtcaagagctacacaaatgcaggagatactggcttccttgactagaagagctgtcctgtccagaaaactgaagtctaaaaattgctgagttcagctttccagatccttggaagcctcctaaagacttcgtttttagatgcttaacgttttcattacctggtcaaagaaccagctcaaagaagcctttcacagtacagccaggtccagcccattctgtctaccagcccacagcaaacgcagaggtgtttccacatatcaaaccacagtcctggagctgattcctaaacacaacactgatttacattattagctatgcagtaagtttacaaaggatagttgcttttacagcgacactaaagctcaccaaattcagttcacctatttcatttcacatayacattactggatttttgagggttatttttatttgcaaaattgcagcctccatcaataatttgtctccaatgtataaactatattcttaacaaaaaggaccaaaattgtggaaacaaccctgaacttgaagtcagagggtctggagccctctattaactctgctggtaactggtcatctaaccatgggcaagatctctctcctgccttaaatggaagcacactcttgtcctgtatcacaagggactgttatgagcacctggacagagaatgggtgggaatgtgttttaaaatggataaataggtaaacacattaaagagacacttttctaatatacatatatatatcttttcttctgacttatccttggttagaaaagaatgtgattttggatgacaccacattcactgtgaatcttgaaagcgcactgaagaatacaccaatgatcaaaattagaaaacaaaatctattgaaacaacactctagtggatcttaaacttgagttattagctgcagggaaaagacaatagcaaaaccaatattattggcattcttaggactttggtcactttggatcaaaaatctgcagggtctgtctggcacttaaaaaagaagcagataaaaagatttgtctaccaagctcttcctcttcacttctccccacctacttccttttcttccaaaggagaagggctctcatttacccactggtttgccacatcctgcctaagaagctacttcctgggaactgcctgggctattctgagaggagctttaactctttcagaccctgagaccctagtatattcatgacatctgtacctaccatagtcatttacaacctaataactaaactccagttgaccagataatactcccaacttccttcatgccaggccccatattaagcactctacctacaacaatccaggcaggattcgcatttcttggtcccatctgggg

SEQ ID NO: 700311 - DNA, 800 bp, Homo sapiens
ttaacctaatcagaaaacttcttataatacagacttatttttctttgctttatctagaaacatgaggtttttattttatttttatttatttatttatttatttatgggaagagtctcactcaggctggagtgcagtggcatgatctaggctcactgcagcctctgcctcctgggttcaagcgattctcctgcctcagcctcccaagtagctgggattacagacatgtgccaccatgcctggctaatttttgtatttttagtagaaacggggtttctctatgttggccaggctggtctcaagctcctgacctcaggtgatccacctgccttggacttccaaattgctgggtttacaggcgtgagccaccacacccggccatgwggtctctcttacacaattcacaaattacacatcttcactatttcagcaatgaaatctaagaggaaagctgagtttacttaaataacttcagtagacaaaaataaaacagttcctttgtcctagcaatgactatgaatattttgttccatgggaagtgcattatacacttctcacgagaccaagaaagaaaaggaagcaataactttgaggtataatcaaaagtaacaattccatttcatatgcatttattgagagagcagagtataattttgacatttgctctcctctcaagtcctactgtcctcactgctatattcacttgtgtactccttatagaccaagacaccccacatccctgtcctattcatgatgtgagataaaatgtgtctctctggtgaggaaaacttgcttccgaatc

SEQ ID NO: 700312 - DNA, 869 bp, Homo sapiens
gatggtgtttcaccatgttggccaggatggtctcgatctcctgaccttgtgatccacccacctcaacctcccaaagtgctgggattacaggtgtgagccactgtgcccggcctatacatttttttaaggttaagtatacaatkgtgtctcacacacatacgtgcacacatatacactgcattccataatattcggttaattgagttttaattatagtggtagttaatgcttattgagttcctactatgtgctgggaattacagttagtgttatgtgtgcattatctttttgcatttattgcaacagtcccatggagtatgaaccattagaattcctaatttacagatgcatgaactgaagcataggagcagtttaactaaatttctcaagattatacagctagtttatgtaatagtgttagaaccagtgttaaaactcaaacagtgggacccaggagctttctcctaatgactatgctttgtttttgccctatattctacctgggcatgtgatgtttggccttctctcttgctcttttttaaagcagcccctgatgcaaatggttctctccttctctctgagtgataacaatgggcaagaatagtgaggatgcttagaagatatttgcagctacaaattttccaaagaatgtctacatgtaactactgtatagagtaaggattcttaaccaggggttcgtatgtaggcaacaagatatctgaaactcctgaaattgaatgcaaaaccatgtttttgtatccattgtatatccatttttatagttctcctcaaattcacagagggaactttaacctgaaaatgttaggaatcaatgctcttgagtctgtggttttagaactggaaagaac

SEQ ID NO: 700313 - DNA, 869 bp, Homo sapiens
gatggtgtttcaccatgttggccaggatggtctcgatctcctgaccttgtgatccacccacctcaacctcccaaagtgctgggattacaggtgtgagccactgtgcccggcctatacatttttttaaggttaagtatacaattgtgtctcacacacatacrtgcacacatatacactgcattccataatattcggttaattgagttttaattatagtggtagttaatgcttattgagttcctactatgtgctgggaattacagttagtgttatgtgtgcattatctttttgcatttattgcaacagtcccatggagtatgaaccattagaattcctaatttacagatgcatgaactgaagcataggagcagtttaactaaatttctcaagattatacagctagtttatgtaatagtgttagaaccagtgttaaaactcaaacagtgggacccaggagctttctcctaatgactatgctttgtttttgccctatattctacctgggcatgtgatgtttggccttctctcttgctcttttttaaagcagcccctgatgcaaatggttctctccttctctctgagtgataacaatgggcaagaatagtgaggatgcttagaagatatttgcagctacaaattttccaaagaatgtctacatgtaactactgtatagagtaaggattcttaaccaggggttcgtatgtaggcaacaagatatctgaaactcctgaaattgaatgcaaaaccatgtttttgtatccattgtatatccatttttatagttctcctcaaattcacagagggaactttaacctgaaaatgttaggaatcaatgctcttgagtctgtggttttagaactggaaagaac

SEQ ID NO: 700314 - DNA, 604 bp, Homo sapiens
taaagtataaattaatgtaattattattactatcataattagtgactaatacagacttgagccattccttccagaatccttcaatgaattctatgacaaaagcttaacccacataaatgaatctttactagtgtaatttcaggcagtgttgcaagtgagtttctttgcttcacagctactagttttataatcttggcataataaactagatataaaggtaaaaagacattttttagttcttaaaactttggaaacacctatttacagtaaaaataaacacacatttcttctagaattctttattaaccagaaattacaactaaagaacagtaayaactagcatttattcatttaagatctaattcactttaagatccttactctgtatttggaaaagccaactccaggtttcagaacagagaaccaagaatccattatggtagatgtcacctgtttcttaacaccgtattttaattgttgattattttatgaactggctattttctttcacatggatttgttttgccaagcatggattgataaataaagcaagttattgataaataaaaaataaatttgtttacgggttaaagtcagatcctgc

SEQ ID NO: 700315 - DNA, 604 bp, Homo sapiens
taaagtataaattaatgtaattattattactatcataattagtgactaatacagacttgagccattccttccagaatccttcaatgaattctatgacaaaagcttaacccacataaatgaatctttactagtgtaatttcaggcagtgttgcaagtgagtttctttgcttcacagctactagttttataatcttggcataataaactagatataaaggtaaaaagacattttttagttcttaaaactttggaaacacctatttacagtaaaaataaacacacatttcttctagaattctttattaaccagaaattacaactaaagaacagtaacaactagcatttattcatttaagatctaattcactttaagatcyttactctgtatttggaaaagccaactccaggtttcagaacagagaaccaagaatccattatggtagatgtcacctgtttcttaacaccgtattttaattgttgattattttatgaactggctattttctttcacatggatttgttttgccaagcatggattgataaataaagcaagttattgataaataaaaaataaatttgtttacgggttaaagtcagatcctgc

SEQ ID NO: 700316 - DNA, 604 bp, Homo sapiens
taaagtataaattaatgtaattattattactatcataattagtgactaatacagacttgagccattccttccagaatccttcaatgaattctatgacaaaagcttaacccacataaatgaatctttactagtgtaatttcaggcagtgttgcaagtgagtttctttgcttcacagctactagttttataatcttggcataataaactagatataaaggtaaaaagacattttttagttcttaaaactttggaaacacctatttacagtaaaaataaacacacatttcttctagaattctttattaaccagaaattacaactaaagaacagtaacaactagcatttattcatttaagatctaattcactttaagatccttactcygtatttggaaaagccaactccaggtttcagaacagagaaccaagaatccattatggtagatgtcacctgtttcttaacaccgtattttaattgttgattattttatgaactggctattttctttcacatggatttgttttgccaagcatggattgataaataaagcaagttattgataaataaaaaataaatttgtttacgggttaaagtcagatcctgc

SEQ ID NO: 700317 - DNA, 924 bp, Homo sapiens
tgaaaattagccaggcgtggtggcaggcacctgtagtctcagccactcgggaggctgaggcaggagaattgcttgaacccagggggcagaggttgcagtgagccgagattgcaccactgcactccatcctgggtgacagagtaagactctgtctccaaaaagaaaaagaaaaaaaaaaaaagaaagaaaatgattgcaggatagcaaaagaaatgggtagtactgtgctcaaaatattgacatgttttggcttgggccagtagaagcagtgccaaattttgctcactgtgtgttgaggaggggcttggggattagatgagaaaccaatgtcctgaaaagtatcacccatagctccactcaagagaataatggaaggcagatgagttttgggagtctgggggaggaagtagacatttccacaagattagaagtccccacctgacctcttctgagtcactgtaaggggctgggaaaatgactatacttcaccattttggtgattccctaatgggcacaaagccgtaaaggaaaagctaaacagtcccataaatgctcagtgctaattatttccagtagcgaactgcaatttaatcaagcagaagataaaagataaaataaataagcaagaagttgggagcaagtgggaggaagacattgcctatggagatcctcagctgcttcccccaccacaatattttttatctaaaaattaaatcagtttaactcatggacatagagagtagaaggaagaatgattaccagaggctggaaagggtagtagaggattggggggaagagtaagtatggttaatgggtaaaaaataatatgtaaaaagaataaataaggcttactatttgatagcacattggggtractatagtcattaaaaacttagttgtatattttaaaataaagaatgtaat

SEQ ID NO: 700318 - DNA, 623 bp, Homo sapiens
agagcttttaacatgatgcatgataccaggtagattttcaataaatatttatagattacattatttttcagcaaatgtataattttactttaagaaactttaaatattctgtcttactaaaggtgattattaaattctcaaaccaaacatgtattacctgctttggacatttctctgaatgagaaaaggaaatcttcacccgtgatattcacaccacatcccctgtcactatatccccttaacatcagttaagtagaccccatcaaaaccactctcaaatcctctcctcaattgcctcttagcacactccagctcctagtcacttaaacgtcactcccagagacagtgcccaggccttgcccaaattcttagacttacagcaattttctcacctgataaacctatacgagagtctcattttctaatttaaagccctgtttacctatccccatcttctcctcactgcaccacagcttctaaattgatgatttcttctacttttattctaataattaagagatgggttcctcttttagtgtttgacctggyggctttcagattcccatctttctttcctgctacccgacactgggcaactaagataaaggagtttctgtgctcca

SEQ ID NO: 700319 - DNA, 1196 bp, Homo sapiens
tgactactctcaatgtcctctcacaaaaatgaaaattcaaaatatttttatttgcctctttcctccaaccaatactcagtaccactgccatttggataataaactttaacagataaaatgtttataaaagacataataaataactcttaatatccaacactcataattttaaattatagatcattttctggtagtatgacattacagaatgagtatgagtcagttccagaaaattaaatggcatgtcattgattatgtttaatttaaaagcaaactctcatttcctttcatccttaatgcttgctcagtcttagagtgggatgaacgtctcagtcactactaactcytcactttcttaaagtatatagcagtggatggggtgagatttgaaggcccatagaagcacattctaagggacacttggtattctattttgggcaatataactgaaggctgcaatgtgaattgtcttcttagatcgactgttattacatagcagattcttgagtgaatagggctaaagaccccttaaaagactttaaacaaggcatacattttcatcatgacctggacattaaaacaaaaatggcaagtggcctgcaaatttagttcgatcaatcaacagttttacaagtgagttaaggactttttttgacatgatcaatcctcttagcaatagcagtaggtataacaatatagatttaaagagagtaaattaaatatacagatgtctttgaacaaatatcctggtgactttatgtgctaagtactagccacatcaattcattaatcactgaacatttgatattgctaaattatttctattggcctaggaattgaaaaaagtatagctgtaggccaagctctgcatatgagttactatatataaccctgaatatgtattctaactcttacaggattcagtttttttcatctgtaaaacaagagccatgattggataatcattatgaccttttcagatttaacatgaaagtagaatgtaagcatattacatttaataaaaggctgagaaaaaatctaaggcaatagcgattacaaaaaattacacatgacaaagaccttaattaatgacttcatttataattcatacttgctgtgaaccagaaacgtacatttaaatatagggttaacaaaagaaattgacataatctttttttaaaaaaattattttatag

SEQ ID NO: 700320 - DNA, 1196 bp, Homo sapiens
tgactactctcaatgtcctctcacaaaaatgaaaattcaaaatatttttatttgcctctttcctccaaccaatactcagtaccactgccatttggataataaactttaacagataaaatgtttataaaagacataataaataactcttaatatccaacactcataattttaaattatagatcattttctggtagtatgacattacagaatgagtatgagtcagttccagaaaattaaatggcatgtcattgattatgtttaatttaaaagcaaactctcatttcctttcatccttaatgcttgctcagtcttagagtgggatgaacgtctcagtcactactaactcctcactttcttaaagtatatagcagtggatggggtgagatttgaaggcccatagaagcacattctaagggacacttggtattctattttgggcaatataactgaaggctgcaatgtgaattgtcttcttagatcgactgttattacatagcagattcttgagtgaatagggctaaagaccccttaaaagactttaaacaaggcatacattttcatcatgacctggacattaaaacaaaaatggcaagtggcctgcaaatttagttcgatcaatcaacagttttacaagtgagttaaggactttttttgacatgatcaatcctcttagcaatagcagtaggtataacaatatagatttaaagagagtaaattaaatatacagatgtctttgaacaaatatcctggtgactttatgtgctaagtactagccacatcaattcattaatcactgaacatttgatattgctaaattatttctattggcctaggaattgaaaaaagtatagctgtaggccaagctctgcatatgagttactatatataaccctgaatatgtattctaactcttacaggattcagtttttttcatctgtaaaacaagagccatgattggataatcattatgaccttttcagatttaacatgaaagtagaatgtaagcatattacatttaataaaaggctgagaaaaaatctaaggcaatagcgattacaaaaaattacacatgacaaagaccttaattaatgacttcatttataattcatacttgctgtgaaccagaaacgtacatttaaatatagggytaacaaaagaaattgacataatctttttttaaaaaaattattttatag

SEQ ID NO: 700321 - DNA, 1640 bp, Homo sapiens
gtcctgaggagtcatgctgtgctttcttcaattttatttttaattctctcacttgcctctctgtaggtcaaatagaaaatatatatattttaataagttaaaagtcaattgataaaatgtaatttctgattcaaaatttatccttctgctttataatttattttcatttaatcagtggatgtttgattttagcatggtgagaaagaagctaatttaaaaactcaaattgaaatctcagcattgcacagtgtttgatcagagtcacattaatcacagttcatgtcaaatttctcaatgctgtaaagtatcattctgaataatgacttgctctccagggttcttagttattaaaatagaagttgaggagtgggctatagcatttctataatcatgggtttcacagtatgcattttagtaataaagatgaaggagtaagatttttgatactttttcagagtattctcattcaatacacatgtatcttgaaattatatttgatcaaaagttgtttgacttgggaactatcttctgttcagagcttgttttcttctaattacaattagcagttactgatgctacaatattcctttatgaagccaagaactgaaccaaaatacaaacaacataaactaccacttgatgagaagaacttcaaagtcaaattgcaaaaggtgactaaaaaaggagagtactttcagccattttcaaaataatctatgatatgtactggaaaacttctaataatccttgtcattttacaagtaagtagagagtaatagaaaattcacccttaatagaaaaaatgtaatcataggattaaatttaaatcaatgacaaattatagtaataaatgaacactaggttgaatgttttgaaatcttagaggtttaaaatagataaattcctttaagtgagccaattctgtttccatttatgagtagaaattcaaaataatgttgataatktttatatatacattaaatatcttttattcctagaccaaaattcatttatgaccttcagagatcgtataagtgcttttgagaaaagaatttaaatattatgtggtcatatggagaatgaagtgcttttactgtaaaaggaagctataacaatttcctgacttctatgctatcaaataatattataaatgtatatttatttttatatgccattttttgagacagcttaaatagaatactaagtaacaatttatattgtaaatcacaaatactttgctattaagaaataatgtatataatacttgaatgatttagtatcttttttaataatataggattttcttaaagctttgtctctgaataagactctttcaaagtatttttaatcatcattatgctgtgtaatcctctgcagtactgaaatggaatctcatttcattataagcatattagtttcttagaatcacacacaaaaatctaatttataacacaactacttagaatttcatggttgggaaaaatatataggacttgtctatggagttatttagatatctagcaaataaaataattttataaaaagtactcacattttgaataacaatttggacaatggaaaataagtgaaagaaagctaaagtatttttaaaaataccctgtatacaggtagttcatgca

SEQ ID NO: 700322 - DNA, 3038 bp, Homo sapiens
ggttgaatcatcttcaaaagattttacatggcacaatatgttagctgatactcacattcaagtgtgaattatatctaacattctatccatgagcaccgcattttattttacttcctttgcagttctcatccttgagagcttctcttatccttccccagaatctctcctttttttttttttttttgagacaaagtctcgctctgtcactgaggctggaatgcagtggcgcaatctcggctcactgcaagctctgcctcctgggttcacgccattctcctgcctcagcctcccgagtagctgggaaaacaggcgcctgccaccacacctggcttttttttttttttttctgtatttttagtagagacggggtttcactgtgttagccaggatggtctcgatctcctgacctcgtgatccgcctgcctgggcctcccagagttctgggattataggcgtgagccaccacggccggcccccttcccctgaatctcttatgcacagagatctgccaggattctcctcctcctcatccctccctgcacacccaacatcatttccccccagaacagaaatgtcatgtctttaggccagttacaccttggacatttctgactgttttgtattctagaagatcatgcatgagctcctatgcctcacttgtgaacaaaccaaggagatgtctccttgaaaacctttatagttaaaaaattcatcacccttctaaactttctttagaactcagaagactataaacacaaattatgaaaactctgtcatcaagctgcttccaattcctatacctttgtgtgatggatcctctctgccatctgtgtaatcatgtttgacacttggtgatgaatctttcagtgctctccaccactctttactcaatttcaactatggaatcacaccctatcatttgtaatttacattagactttatttcttttctggggttttgtgattggtagcattttctagctcgatgtttataataaataggaaagctgtgattcaagatgtgtgagaatgatattttttgaccttcttgatttcattttctttggagcatacgaatcacataggaatgatatttcaagatgcaagacatttattcatgtcagagtaagttaactaaattgtatgcaatgcattggatcttgctggagacaaaacagctgctgccacccgcccacatattcatggcctttccaatatcaaatcgtttcttttccatttagaccaagatgtgaaggaaacaagagggaaaataaaatgttgctttacatgttttagacaagattggaaatttattttctaattttcatgttattattatgagtgttatcttgtgacatttcagagattcctttgaataataacaggatttatgaacactactatattcttggatggacttaagcacttcacatatattacctggtttaagttttgaaataaacccttgaaatgtttactttcatcagtgaaacacaaaagagattaaatcccttgccaaaggttacacagctagtaattattagagacaactcaaatactccaggaatccaaatttaaagcctcaccaataaccctatgctatttagatattgtaagagtgatttgaaattatcttgatctaatacaaaatagaaacttttgacgagacctaaatatttataaaattattaaaccatttacttacttatttctaacttctctgtctccctactggaataaaaggaacaataggtcatggatatgtccatcttataccctcttctattcccattacttaaaatagtgccatacatatagcaggggcttgatgaatatttgtggactgaatgaatgagcaaatgaaagagacacatttcaaattcaggtaggtgtctatgaggctgatcatcctcagtcaatttcagtaatagcctctgttgaaatgaaagatccagaacagacaagacaactttcatcaagagtgaaatgtttatatttcacttttgtatataaaaaacttgaaatactttagaaaattagaagacatcttctccctgcttattctataaatgttgattcatatacatctgatgttgaatgggggagaatttcgtagcaaacctgatataaatttgtctgaaaagatattcmaggagcccctttttatccttgaaattaaatatatatatatgaatcttttttattaagtttgcctgaaaatatttctttgtttttgaaaccaatttctttattcaattctacaaagtactcttcaaatatgtatttgattatacttctttttctttcaaaacatatactatttaaaagtttttacattataaatattgattctcttttctactttcctaacatatctgaatttctgctagagtaattttttatattgcagctttgttcttctttttcttctaaatgtctgataagccatttaattctaaaaaattaaaaacaaatttcaaataagacaaataattcaatcctacttacataaaaaacaagagcatcaaaacaataaggaaaatacattagcaatatagactaaaatgacataaaaatagtaaaaactacatgaggacaatgataaagtacatcaattattataaagtaagctttggaaaagtgcaatataattttgtttagaattaaaataacaaaaaaccctgagtttctttttctaggtaaaaaccatcactaatattttgaagtattttatcatctatctctcactctctctctctatcttcacacccatatatacaattttgaacctgcaataccgataaatcttgttcctgcattatttgacattatgaaatgaggtattcttcaaaatctctaaaaattatttgagagctgaatcttagtggtgtttcgtatgcgaatgtgtgaatgtatcattttgcatagcctggcttctcttgttagatatttatgtagctttacagtgtactatcataaatgatgatacatatccttgatgtaattttgacatagattattcctcaggataaattttga

SEQ ID NO: 700323 - DNA, 1011 bp, Homo sapiens
cacaaaataaaaggcaattgcataatgaaaaaaatatggaaacagagaacagatcaatggttggcaagggtaaggggaggggctccatgaggaattttggtgtgccgcaattgttcttatcctttctttggtgttattgacacaaatctctgcatttgtaacgcttaatagaactgtgtgccaaaaacataatttttcctgcatataaatgacaaaattttcttaaaacattgaaaagatataatagaaatctggaaaaacaatccccaaaaatgagcatattataaatctaggataattctattgagttctgttttaaggaattgtgtacaaggtacatatggaatcgaagtcagcatgttttcacactatagaactctgtgactgaagtcaaggtcaaaaatgctgtcatcggtcatggaaagttttccaaattttcctgaattataatttatcaaataatccagttaagtcgcttagcatataattatatgaagtcatgtaattatgggtacatgagaaatgtttttttgtatcaacaaaggattttaaaatataaatgacaaatcacacgttcaggaataacaacttccctctctgacgaccatacataattttgttaaattgaattaaaactttgaggaaatatatttatgtccttgaaattaagctgaatgactataaatcatttagcaaaggtgttttcctatagctaaagtcctcctctgatcgaataggagcaagacctttcctatacgccagccaaggcccgagtgagaacattcacatgggcaagggcccttccatggtcctcttcagccctgggactttcaattataatcagagccaaactgaaacacaagtagtaggtacctgcctggctgctggctatcttcagcagaaaatatttaaacacttattttaaataaacgaagctctcctcacagtagaagtattgagcaggactgctacagtaattaatcaaaactttgcccaasaaaaaagtcctta

SEQ ID NO: 700324 - DNA, 1199 bp, Homo sapiens
acatatggattagttgtccagaattgaagagtacagagcagatacaccttagcaacagttaaaatttgcatctgtgattaacccagagacttacaacagtaaatgaaacatttataggcagcaaggtaggcaaacactgatcactgatgaagaataagtgataggtaaacaataataatttctggcattgtataacacttttattacccaacattcatatatctcatttacctttatctttataaaaatgatataaagtaaggagagaacttatctacattttacagaaggtgaaacatatgaggagattgagtgacttatctgtaatctgtttatgacaaagtaaggactcaaattggatttcttaactctagttctgtgtccttcttctatggcatgaatgataatatttttgatgggttcatccatttaacatacatgatacatgaaaggcaccatactggttctgctccttaaatatacaccagtaaaagaaaagataaaatctccaagaaatgaacagcccagtgaaaaatatagcagatgactacataatgaaaactcagggtaggccaggcgtggtgactcatacctgtaatcccagcaatttgggaggccaaggcaagcggatcacctgaggtcaggagttcaatatcagcctagccaacatggtaaaaccctgtctctactaaaaatacaaaaattagccaggtatggtggtgcactcaggaggctgagacacgagaattgcttgaacctgggagacggaagttgcagtgagcggagataggcgccaatgcactccagcctggacgatagagtaagactatgtctcaaaaaacaaaacaaaacaaaaaaaacctcagggtgataagcattaagtattaatatataggcatcttaaaagtctcacaggaaaacacaggaacatttcaccagtcagggagtttgtttggcaaggagacttgggagtggggttgaaagggaatctattstgcaatggcttctttgggaaggcaatgcttgaaggacacgttctagttagcaaagaaaggaatgaagagtggggaaaaatcatttggtgtagaaacagaagaatgtgcaaaggcacagggtcatacagaaagatggcacagtctttctgaaagctactttcaagcctcctcaaattgctacttccctaaaaggattagttctag

SEQ ID NO: 700325 - DNA, 1727 bp, Homo sapiens
gatacaagggtttctaaatgatttccaaaagaatatatatacttcttaaaaaatttatagactaaattttaaaaattatttatgattttcccaaaaaccagctatacttttctttttacttgacattaggttatgctgcttaaacaaatagaagatgtatcataagtatcataccagttactggatttaaatctgataattttttttttagctactaagatartcaacaggagaaagttctgttcaaaattgaatacttggcaatgaattttaataatagattggtatctgtattctataggtgtgcagtacagattattgtaaaggaaaaaaaaacaatcctgcatttcatctatgaccgaagacagggaaaatatgacaaagaaagaaacaagacagcctactctccttatatagggagtagaagcaatggaatgaggtggagatgatagtaattgaatgaacaaggctaccgacagagtgactctcaggatagtcatgcagaccaggcagcagcccaatgattagagagcaccaccttgaaccacaaagctttcatatttccatagtgagaaagaatcaatatgtgggaacagaacttgaaaagactagtatgaaagtgcagaattacaagagttttctcaaatacatgtgttatatttgatccatgactacacaaacctctgaggaaagtcccaccactgcatttgacaaccattctaagtgcagagaaagaagagattgtttaacatatattttgtagaaaatattgttccattgacatatatgctgttaagcaatgcacagaaacatctcccattagctcttattctgtgttctctctattcaacaataatttcagttcatacagtgaccctcttccacaatactgtgcatcctgccttgcctagtacattgctgtacacagtttgttatttaatgccaaaaggggacatttagttcacttttcttcagtactttaattatgctgaagactccagtgttaatggtgaatacaggaaagacttcaactaggagtgatcatatagaccaagtagcagctatggtctaaaatcaacatgttgggaggattaaatgagataatgtctgtgaaagtacttgtaaaagggagcacactaataactgttatgaagacatggttggtaaatttaatagatgcaaatataaatttcttgcatccacattacaatacatccattgtatgaacaacagatgagagagacctgtctggagagcatttcaacagaaaccagaagtctcacttggctggtgaaaaggtttaggtaatctgtaattataggtaggtagatcacatctgggctatcgtatttattttggggagccacgttttaagagtgttcaagagtgtatgatcaaactggacctcactcctcactctcatagaagagagtggccaagttaaagagaagttaaaagcttttatcatatggggcgtggttgaaagagatggaagtaaatagctgtcctcaaacatttgaagaaaacagaactaggatgaggtacaaaaggacaaaacaaaattgaggtggaagttacataatggtagaattcagctcaatataagagaaaacttctaatcatgagaactctctgaaaatatataatagattggccctctcttccttcatttctttttcctccttccctttctcactccctctctccctcccttcgtcctttcctcc

SEQ ID NO: 700326 - DNA, 372 bp, Homo sapiens
ggagttcaagaccagcctggtcaatatggtgaaaccccgtctctactaaaaataaaaaattagtcaggcatggtggcgtgtgcctgtagtcccagctactcgggagaggcagaagattcgcttcaaccggggaagcagaggttgcagtgagccaagatcgtgctactgcactccagcctgggtgacagagcgagactccgtctcaaaaaaaaaaaaaagtccargtgtcttcgcctagctttgtcaggaatgtttttaccctcagtctgtaagtgtgaccaaatatattttttaaaggtttaccctcaatctgttaagttcaaaggtttactataatctcttcataagaaaactattggaaagatggaataa

SEQ ID NO: 700327 - DNA, 1332 bp, Homo sapiens
gcctgggagacagagaaagaccccatctcaaaaataaaaaaaaataaaaaataaaaaatatccataaggatctaaaatgcctatctgtatgagattgttctttgttcacattttttcaagcaaatatcacacaataaattgaatgcaggtgcaaatgacatatcaaacatcaacgaaatttgcaaaaggtgtaagattgtactactttgggtttagaaattttcttttcataaaagcattcataacaaaatttggtgagcttttaaggaatattttaagtatttctgatttaatttttagtgataaataccaatagatataacctatatacagaaaagctccttgggccctcaatatacttttaagagtgtaaaggaatcctgacctcaaaactttgagaactgctgccttcccctccactttcttccttccctagaatttcttccctggaagaaacattcctttgtcattctaygttaacttacatagttccattgaggccagttttgctacctccctcccatctttccacattcctctcttgacacaaaacctgaccaaaggactctaccggcccacctcatttccagtgattagctgtcaggtgggctaagccaagaaaatctgggttttccctgagactagacctctctttctggaagatacggaatcacaaggacaaggttggccacctacgggtagtgagaattcatcttgcctaaatgggaagaggttaggcaagtttctagaatgccagactgctttctagaaagtcaaagataattatactttctgccacgactgtgaaaatgcccatttcattgcacgctttctaacatttataccaatctgataaataaaagctggtacctagaagaaaaaaaggctgggtatggtggcttatgcctgtaatcccagtagtttgggaggccaaggtgagtggatcacctgaggtcaggagttcgagacaagcctggccaacatgatgaaaccccatctctagtaaaaagacaaaaattagccgggcatggtggcaagcacctgtaatcccaactacttgggaggctgaggcaagagaatcacttgaacctgggaggcagagattgcagtgagccaagatcatgccattgctctccagcctgggcgacaaggtgagactttgtctcaaaaaaaaaaaaaaaaagtttccatacaatataatttgttccatctctaaaaaccaattcagcaataactgaaagccaccacttggaaggtttcaaggatttagctctacctgttgatgtccaaagcattagttaaggtagaaaaaaaatacacacacacacacac

SEQ ID NO: 700328 - DNA, 487 bp, Homo sapiens
cttcttttttttttcctttttagcaccaaccatgtgcctagagctaastgtgttaagaagagcatgcttcaagtggctggagtgagcaattcaacttgtggaggaatgagaagtgacagtgttgagacaagcaacataaaaccccagggtaaggtagaaatcactgaaagtcaggcaaaggaactggcgtccagtaatgagtcaggctttgccagcctctggccctacagatggctctttgcagaggaaaaaattaagccaggcccgagggcacagatcctaagggaatgctggcagctctaggctgtctatgagagtccagagatgctgcttcaccctggggctttaggcaagtccctttccctcccagagcctcagcatcccttctagcaaatgacgttctgcctttctcctaggatggctgtggggatcaagggagacagtggccatagggatactatgttaactgcagatgcggctgtaggag

SEQ ID NO: 700329 - DNA, 487 bp, Homo sapiens
cttcttttttttttcctttttagcaccaaccatgtgcctagagctaagtgtgttaagaagagcatgcttcaagtggctggagtgagcaattcaacttgtggaggaatgagaagtgacagtgttgagacaagcaacataaaaccccagggtaaggtagaaatcactgaaagtcaggcaaaggaactggcrtccagtaatgagtcaggctttgccagcctctggccctacagatggctctttgcagaggaaaaaattaagccaggcccgagggcacagatcctaagggaatgctggcagctctaggctgtctatgagagtccagagatgctgcttcaccctggggctttaggcaagtccctttccctcccagagcctcagcatcccttctagcaaatgacgttctgcctttctcctaggatggctgtggggatcaagggagacagtggccatagggatactatgttaactgcagatgcggctgtaggag

SEQ ID NO: 700330 - DNA, 984 bp, Homo sapiens
tttctccaatcgcctcagcctcatagagcattagtagtctgctgtctcttactgtaggatgtttttgyggcattggaacatctctctaaaggctaagagccctcataaagttgcttacttcaaaactacgaatttcagatactttaaaagaaatttgatcaatcacaaaccccattttccctttgataggctttcatgataggttttgccaaaacttgcagtggctggctgtggtcttggaaatttagatttggggaagcatttattgtcactatgtctgagccaggtcactaggctgtgtgtggtaaccaacattattctcataagatattcactactccttgctcagatagcttaacagcaacctcagctatcaagagtacagcctagaggaagtcaaaggaggtgcgctgtggctgcccagagctcatgccctttactcttcaaaaaattatttcagaaactatttgcttcatagaggcacagttgagtgtatgtatagattgttttctgagaaataatttgaatattatcaaattcacctatttaaagtgcacaattcagtggcttttagtatattcacacttttgtacaaacatcaccactatctaatttcaaaactttttcatcaacccaagataaaccccatatccatcagcagtcattatccattctttctccttccaccccaagttgctggcaacaactaatctatattctttctatggattttcattttctgaacattccagacaaatgggatcatataatatgtggtcttttttcacttagcataatgttttcaaggttcattcatggtgtagcatatatcagcatttcgttgctttttgtggctgcaaaatatgccattgtgtggactgtagaatgggacatggcacttaccgtttcagcagttgcttccactttttaggtattatgaataatgttggtatgaacatgcacacacaggtttttgcatgaatc

SEQ ID NO: 700331 - DNA, 876 bp, Homo sapiens
attatttttgtggctagatttagatctactgatttattgcttgctttgtttggtctctctgtggtatttttttcactttgtctgatctcttttaaattatttaaacatttttcagtcttccatctcaatgcatttattgtgatttttactatatctctttgaatagcatttcttttgggattacaaaatacgtacttatttcatagtctacttagtatcagtattttatcactataactggaatgttggaatcttcgccttatagttccatttaccctccctctttcatgctttgtaaatatatgtctcatagattacacctaaatacattgaaaaaccctccctgagatctccctggtattttcagttcccaaatgttccctttttcggttctctggctagaaacttgaggttctagttacccctctctgccatatatttctgcatttggaagcttgttgggctcaagtgacaagacaagagagaaaggaaaagacgaaagcaacgtgggttgaccacacyctcttggaactgcagcttgactaaatggagaggaagtttcttctccctttgagttttggctcttgctggtcatcattgccatgggattgtctaggtattgagatgtaagagtacagagaaaagagagaaaaaagtgaggggatatctacattctgataattataacctcccttttcagtaactcatgccggagccagacagattttcttggagctctctctgtgcacaatggccacttccgggtttctagttgcgttgacttcaggctaggggctatcagaggagaaaacatagtaaatcctatggtagtggtacttaaaattctggtgttctttcttgatgtacctacttctg

SEQ ID NO: 700332 - DNA, 2790 bp, Homo sapiens
tggttcttccaattggaggacaaaaaacattaatacaagaaaatgacacaggtttgctttttttttaaggaataatgaacaaaatataatgtgctttaaaataattagccacatatacctgaagagttttggggaaaatatagagaaaaagtatagattttccaggagtagccttcattttctaattctgggaaagaaaatcaagaatggatagaaagtttttaagcaaatcatttttaattttaccataaaagtaagcaaaaatacaagaatgccttattctgtggacaagaaatatcactttcatacgaacattaaagaaatcacagttttagggcagagaatctaaaaacatctcaattcacaaatttctctcaggatgatttagaatatgtagaattttaagaactgttgtagttccaactggcttacaactgggtcaagagcactgtataaaaacctacctgtagatgtctgctgggcacttaacatctattttaatctactagatgtggcaatttcagtaatttcttccagagtatcactctaagagtcttaagaactagggacattagtatatatggtctctcaatgccttctagagtccaacacattaactgattatgtgtgtgatggggcattgtatggtcactgggtagatgagtttgtggctattctttgtcttgcatcatgattatgataagtctttatctccaatcatgattgaagatacacagtctgagaaggacagaagtacttcatggggttggtcagaggggtaaaatatgtgaaattaaatgtcccagaaaatccagaaagtatatctggaattcaaaattaaacacacacacacaaaaaaacaggaaaacatggaaattaagaaaaaagttgttctgtttggaaacaaattaggaacttatgtgtgttttatacagagtacaatttttaagtatagacgacttattttgcatttaacacctcacagttaattctatggtaggagttttttccagttgtctaggccaactcttaacgttctttcccagagagacatctttacttgaggcttgacagggcagttagaaggcatgctcctttctaagagggtatgtctggcttgtcacagctgaatgtagaaatttatcacgccttatgatggctgtcttctatgtaattctaggcagagaaccaaagtctctagaatcacaggcaatatttttgtcactatttttaattgtatgaattttagaaaagaaaggaggaataggtatctgtaatatatgtgggggctaccaaagtaaagccaactgaattaatatrtaaatgaactttaaaaaatgggtttgggttttctgagacatagttaaagaaaataggctaggaatgaagtacatcccataaaggttagaaagtagatgtttgctgggtgacttcctaatctgatttttgttttcacatttagaactgaaacagggagagaaaatacccagataaaactctaaaacttagtattaagtggatatgacataaaaaagaaaacaatagtgacaaaggccttcattgttaatagagattgatagtttaaagacaaatggagataagtgaaggagatggaaaggtacatctttttaaaaaataaataatcttccagagtactagtctacttcctcttttaagtcaagaagaaatatatctgcatggaaatctatgagtagaggcaagctgaagaacatctggacaaagataaaaagaatgagatacacaaataatataacagggatgtagcacaggatgataaatttcttatgcatatcacaaaactggcactacagtaaccttcagtagtgctaggagattttaactacacagaacatcagctggaagtctcatttaagcctaaagcaatgcttctgacaatttcattattggaagaaatgatgggagtaactaataacttttactctaactctgaccaatgtggagggtgagacggttggtgatgggaacctggttgagttcaagataaacaggaaggaaaacatggggtatatagttagacatttgctgttagaaagggaaatgggctctcaataagttaaaaggaaagacgtctgaggaccaaaactgaaagacactttgacagggttggaggtttactaaaaataagatgtgatggcagaattgtagactatcttgaggaggaagaaaaaaaactatgtaaagaacctgaagtaccaggtcaagagattctaaggtggaaagaagggcacccaaccaagagcaagtgtaaaactggtggcatggacccctgagaaccacatcaggaagtcaaggcttcctcttcctgtggggatctgctctcctggctctgtagtctctccctgataattctgaagaaggctgctcctgtggctcagggacatgcttggtacccatgggcacgggtctaggtcacccagccagggctctgcattctttctcctactaggggagattagacacatcttcaaagtatgaatgtggaaaagggacaggactatggcttgagacagataatgtaatgctaggagatgacagacaaatagtagacctcttcattccctctttagtcccatctttactgctaagaattactttctgactgaaatgtctgaacaaaccatggtaaaagagaactgagaggagaaaaatattgggggaaagttttactatgtagtatttattccatgtgcatatttctaattttctcacttagatttaagtgctaaatactcatttaatacgggctga

SEQ ID NO: 700333 - DNA, 603 bp, Homo sapiens
gcacaaataatgtatacctaaagtttcactatgctggatttaggacacagtcatttgagtctttttctctgatgacagagattaagctayattgaacccacattaagctccctattaccaggggtggtgttttccccaccttagggtgaagaaaaactgaggctccaaaatataacttgcccaaacttgcaggtctgacatatctatcaggaggtaggcttgctggctttgacaaaaccaggtctctaccttcacactcctttggacctgatttctatattaacaacataagtaaagtttgaatcaaaacagaaaagactttaataaaataaactttttttttctttttctgaatctgaatctcactccgtcgcccaggctagagtgcagtggcactatcttggctcactgcaacctccgcctcgcgggttcaagtgattctcctgcctcagcgtcctgagtagctgagactacaggtgcctgccaccacgcctggcaaatttttgtatttttagtagagatggagtttcgccatgttggctgggctggtctcaaactcctgaccttgtgatccacccgcctcggcctcccaaaatgctggga

SEQ ID NO: 700334 - DNA, 603 bp, Homo sapiens
gcacaaataatgtatacctaaagtttcactatgctggatttaggacacagtcatttgagtctttttctctgatgacagagattaagctacattgaacccacattaagctccctattaccaggggtggtgttttccccaccttagggtgaagaaaaactgaggctccaaaatataacttgcccaaacttgcaggtctgacatatctatcaggaggtaggcttgctggctttgacaaaaccaggtctctaccttcacactcctttggacctgatttctatattaacaayataagtaaagtttgaatcaaaacagaaaagactttaataaaataaactttttttttctttttctgaatctgaatctcactccgtcgcccaggctagagtgcagtggcactatcttggctcactgcaacctccgcctcgcgggttcaagtgattctcctgcctcagcgtcctgagtagctgagactacaggtgcctgccaccacgcctggcaaatttttgtatttttagtagagatggagtttcgccatgttggctgggctggtctcaaactcctgaccttgtgatccacccgcctcggcctcccaaaatgctggga

SEQ ID NO: 700335 - DNA, 603 bp, Homo sapiens
gcacaaataatgtatacctaaagtttcactatgctggatttaggacacagtcatttgagtctttttctctgatgacagagattaagctacattgaacccacattaagctccctattaccaggggtggtgttttccccaccttagggtgaagaaaaactgaggctccaaaatataacttgcccaaacttgcaggtctgacatatctatcaggaggtaggcttgctggctttgacaaaaccaggtctctaccttcacactcctttggacctgatttctatattaacaacataagtaaagtttgaatcaaaacagaaaagactttaataaaataaactwtttttttctttttctgaatctgaatctcactccgtcgcccaggctagagtgcagtggcactatcttggctcactgcaacctccgcctcgcgggttcaagtgattctcctgcctcagcgtcctgagtagctgagactacaggtgcctgccaccacgcctggcaaatttttgtatttttagtagagatggagtttcgccatgttggctgggctggtctcaaactcctgaccttgtgatccacccgcctcggcctcccaaaatgctggga

SEQ ID NO: 700336 - DNA, 603 bp, Homo sapiens
gcacaaataatgtatacctaaagtttcactatgctggatttaggacacagtcatttgagtctttttctctgatgacagagattaagctacattgaacccacattaagctccctattaccaggggtggtgttttccccaccttagggtgaagaaaaactgaggctccaaaatataacttgcccaaacttgcaggtctgacatatctatcaggaggtaggcttgctggctttgacaaaaccaggtctctaccttcacactcctttggacctgatttctatattaacaacataagtaaagtttgaatcaaaacagaaaagactttaataaaataaactttttttttctttttctgaatctgaatctcactycgtcgcccaggctagagtgcagtggcactatcttggctcactgcaacctccgcctcgcgggttcaagtgattctcctgcctcagcgtcctgagtagctgagactacaggtgcctgccaccacgcctggcaaatttttgtatttttagtagagatggagtttcgccatgttggctgggctggtctcaaactcctgaccttgtgatccacccgcctcggcctcccaaaatgctggga

SEQ ID NO: 700337 - DNA, 587 bp, Homo sapiens
aagggattgttgaattgtgtcttttaaaagtaatgctgaaatcaatgtcatatccacacttaaacaaggaaataattctcataaataatacaaagaaatggaaacatttttgagtagtaaaaactttcttctgctctcaaaaatgtaaaatttcttacgatatttggatttcrtgctcaactccaaatgggaattgccatcatgatgttataatccatttcactcaatgaaaagtttaggtagaagaatataagattactaaggaataactggagactttactgataagttattataagttaatttgtttttggacagagttccaggttttctttgtgaccatagttgtacacacttcttgttttctagaccactggcacatctgcacaacaggtgatatgtaatttcatcaaataggttttatcactttccttataatgagatatattttttgtgcctctccttgatatacttactctgaagcatttctggctgaatacctcttttgttattttatggatgagaggagaaaaaatacaagattttttccatcaatttttccaacttatacgtgttttgcttcaaca

SEQ ID NO: 700338 - DNA, 1204 bp, Homo sapiens
  misc_feature 415, 438, 439, 440, 441, 442, 443, 444, 445, 446, 447, 448,449, 450, 451, 452, 453, 454, 455, 456, 457, 458, 459, 460,461, 462, 463, 464, 465, 466, 467, 468, 469, 470, 471, 472,473, 474, 475, 476, 477, 478, 479, 480, 481, 482, 483: n = A,T,C or G
  misc_feature 484, 485, 486, 487, 488, 489, 490, 491, 492, 493, 494, 495,496, 497, 498, 499, 500, 501, 502, 503, 504, 505, 506, 507,508, 509, 510, 511, 512, 513, 514, 515, 516, 517, 518, 519,520, 521, 522, 523, 524, 525, 526, 527, 528, 529, 530: n = A,T,C or G
  misc_feature 531, 532, 533, 534, 535, 536, 537: n = A,T,C or G
gtattccgagagagagtgtttcgagagtgaaccttccaggaaggaggcagcagaggctcccagtcctcttaaaacctagacccagagagtggtatacagtcrctttcactatattctgctggtgaagcagacacagggccagcccagattcaataactacctttcagtttgggagagaaaggcaaagaatgtccaccataacaatcgtagcgtatatgcactataacaagaaagaaagtattgtcttctgaaaatgattaaattaaagaacagttgtggggcttttagttttttggttggttccatgtttaatgaaatgctactctaatgacaacatacatcattttcagttaatccctcacaaccctataagtgagatgtcatcttcattttacagatgaggaaatggaggttncagggcaaggtaaaataaggtannnnnnnnnnnnnnnnnnnnnnnnnnnnnnnnnnnnnnnnnnnnnnnnnnnnnnnnnnnnnnnnnnnnnnnnnnnnnnnnnnnnnnnnnnnnnnnnnnnnaaaaacatttcattaccacctaccaaggctttattatctctcataaaggaagtggattatcactgatcacagaaacaacaggtcatgttaattctactgcatctttcaacccctcttctactggatgtttttgaataacagccacatggaagtgaaacagactgataagacttcctctcttctcttgctcccatgcatacattaccagcagtgcaataacgaggaagctggaaaagaacttgaatgacccacaaaatgcccattacccttgaataataataaataaaaaacttggttatatttgtttggaagtgagagatttgcatatttcacaacagactcaattttgatgaggcggaatattgtagaggtgtgtggattctgcttttcctattactggtatgcagccccttagcctaaaccagtaatttccattggattgggaatcacatagcctgggttcaaatcttggctccatcgtttggacaaaccactgaaatccagtttcatcttttgtgtaataacatgtgagcactggaataattttgagaagtagacagtgtagtatatacacagtgcttctttagtgccaagagcacgtatctagaatttgctatattccagacccatgtttttaactcatttaatcctcataacagctctataa

SEQ ID NO: 700339 - DNA, 651 bp, Homo sapiens
tttttaaatgacaataaaattatatttaatttttttaaagttatrtttctttttctttggctgttgtattttaccattacctcctcatgtttctcagttctgtgaattttgtcactgtattttcccagcaagcttaaatgtagaccaagtctttcccaatgaccagggagaagagcaatccacccacaatataaaaatattatcaaattcaactggctgccgaactcacctgaccttattgggtttatagctctgttaaaaagatacaccataatatgactctgtatcacttaactgagcttatcaaagttgtttgtgccggtatgggttttgtttttattggggtttttcctaaaaaggagtcagaatcccaaactaagctcagagaactcactgactatgagctgattaaagcagtttgtgctatacagatcatgaaacagcttcatatgcagctcctagtatgtgccacagagacacgttggataatgatgagagcaggtacgctgagttacagcatacctcactcagatttctggacatgagatgacttaacatttttcagaaataaagaagtatcttttcatttacttttcaaataaacattagaaaatcatttatttatatattgcacaacaagtggacaaaatg

SEQ ID NO: 700340 - DNA, 651 bp, Homo sapiens
tttttaaatgacaataaaattatatttaatttttttaaagttatatttctttttctttggctgttgtattttaccattacctcctcatgtttctcagttctgtgaattttgtcactgtattttcccagcaagcttaaatgtagaccaagtctttcccaatgaccagggagaagagcaatccacccacaatataaaaatattatcaaattcaactggctgccgaactcacctgaccttattgggtttatagctctgttaaaaagatacaccataatatgactctgtatcacttaactgagcttatcaaagttgtttgtgccggtatgggttttgtttttattggggtttttcctaaaaargagtcagaatcccaaactaagctcagagaactcactgactatgagctgattaaagcagtttgtgctatacagatcatgaaacagcttcatatgcagctcctagtatgtgccacagagacacgttggataatgatgagagcaggtacgctgagttacagcatacctcactcagatttctggacatgagatgacttaacatttttcagaaataaagaagtatcttttcatttacttttcaaataaacattagaaaatcatttatttatatattgcacaacaagtggacaaaatg

SEQ ID NO: 700341 - DNA, 645 bp, Homo sapiens
tatctttaagagcttgaaaatccttcctgacctgagctaggcttttattctaagggactgtgtatgtgaacatccccaccatctatgtttcctgttttcaaactcggtgccgttttgagtattttcagatgctcactgccagtaatggtttgttagtagctccaaacyattagagaagagctcaggagtcagaatttgaaagatgcccatagggtgatttgagatttggaacaaggttatcacaataagttgggattgggggagttgacacaaccagggtctgcttgggtgggcagctgtttcagaaacccttggtgaactcttaaagccctgaagagcttaaaaaatgctctgaagagatctgagagtcgcagttaaggactctcaaagaacctcaaagaaaagccaacttagcctttttatacaattaactagatttgggtcttaaattctactttgacatataggcctaagaggtagtttaacatggccttgttacccttaccccttctgttctgtgctgttttctgagaaacggatgcaggaactgattccctttcttcctctctggaacaggatataaagaacccttccgcttccctttacttgtggccttcctggccaggcttatgtatactgaacaaa

SEQ ID NO: 700342 - DNA, 645 bp, Homo sapiens
tatctttaagagcttgaaaatccttcctgacctgagctaggcttttattctaagggactgtgtatgtgaacatccccaccatctatgtttcctgttttcaaactcggtgccgttttgagtattttcagatgctcactgccagtaatggtttgttagtagctccaaactattagagaagagctcaggagtcagaatttgaaagatgcccayagggtgatttgagatttggaacaaggttatcacaataagttgggattgggggagttgacacaaccagggtctgcttgggtgggcagctgtttcagaaacccttggtgaactcttaaagccctgaagagcttaaaaaatgctctgaagagatctgagagtcgcagttaaggactctcaaagaacctcaaagaaaagccaacttagcctttttatacaattaactagatttgggtcttaaattctactttgacatataggcctaagaggtagtttaacatggccttgttacccttaccccttctgttctgtgctgttttctgagaaacggatgcaggaactgattccctttcttcctctctggaacaggatataaagaacccttccgcttccctttacttgtggccttcctggccaggcttatgtatactgaacaaa

SEQ ID NO: 700343 - DNA, 645 bp, Homo sapiens
tatctttaagagcttgaaaatccttcctgacctgagctaggcttttattctaagggactgtgtatgtgaacatccccaccatctatgtttcctgttttcaaactcggtgccgttttgagtattttcagatgctcactgccagtaatggtttgttagtagctccaaactattagagaagagctcaggagtcagaatttgaaagatgcccatagggtgatttgagatttggaacaaggttatcacaataagttgggattgggggagttgacacaaccagggtctgyttgggtgggcagctgtttcagaaacccttggtgaactcttaaagccctgaagagcttaaaaaatgctctgaagagatctgagagtcgcagttaaggactctcaaagaacctcaaagaaaagccaacttagcctttttatacaattaactagatttgggtcttaaattctactttgacatataggcctaagaggtagtttaacatggccttgttacccttaccccttctgttctgtgctgttttctgagaaacggatgcaggaactgattccctttcttcctctctggaacaggatataaagaacccttccgcttccctttacttgtggccttcctggccaggcttatgtatactgaacaaa

SEQ ID NO: 700344 - DNA, 616 bp, Homo sapiens
caccatgccaccctggaactcatcctctccaacagtgatgaagatctccagtgggagagcagaaggtgcatagtggctctgctctgtgacatggacacggacagacgtcraagacgagaggggagggatgccactgtctgacgcctgtgggcaaaacaaacactgctgtcacccaacagaactgcagtgctcttgcgcccgactgaggctgggcctccttgtggagctacgtttctctgccccacgcccaacttgagggctggctcagcgcattgttgcatttagaaaaaaaaaacctaactccaaaagcactgacagaaaagaaagattttctgaaggttttgtagagattgaaggagggagttacatcctataccatgcagtaaaacaatgcagtttcctcatgtgacatctctctgagcctcttcctaaatctctccagccatagacttgggctaacttcctcatgaagtttctcattctgtccctgtcctcaagggcgccctcagatgtctcagcaattctgatgcaccatgcaccctgctcagcctacgaaaattccccttgggattcccttttgctatgcgattggagtgggagtcgggatttgtccttc

SEQ ID NO: 700345 - DNA, 606 bp, Homo sapiens
tcttcgaagcagtcaatagcttggtaacatcaagtgttagtaaataacctcactgaacacactaagaaataattcacaggtcaggcatggtgctcatgcctataatccaagcactttgggaggccgaggcaggcggatcacttgagcccaggygtttaagactaagtgggcaacatagcaaaaccctatctctacaaaaaaaaaaaaaaaaatacaaaaagtagccaggagcatgcctgtagtctcagctacttaggaaactaaggtgggaggatcacttgagcccaggagatggaggttgcagtgagccatgattgtgccagtgcactccagcctggacaacagagcaagaccctgtctcaaaaaaataaaaggaagtaacccatgaaactcatggaagtgtttggggttcctatttgcaccccctaactaggggtttttgctgagcccttgacttctagaagagccaggtgtgtgcatgcatatgtgcagtaggtgtagaagtacttccatgtattttgttccttggcaaactagataaaagggtagggcaaaccagaaatataaaaggaacccagctcaaaaacttgtctctaacacttccga

SEQ ID NO: 700346 - DNA, 606 bp, Homo sapiens
tcttcgaagcagtcaatagcttggtaacatcaagtgttagtaaataacctcactgaacacactaagaaataattcacaggtcaggcatggtgctcatgcctataatccaagcactttgggaggccgaggcaggcggatcacttgagcccaggcgtttaagactaagtgggcaacatagcaaaaccctatctctacaaaaaaaaaaaaaaaaatacaaaaagtagccaggagcatgcctgtagtctcagctacttaggaaactaaggtgggaggatcacttgagcccaggagatggaggttgcagtgagccatgattgtgccagtgcactccagcctggacaacagagcaagaccctgtctcaaaaaaataaaaggaagtaacccatgaaactcatggaagtgtttggggttcctatttgcaccccctaactaggggtttttgctgagcccttgacttctagaagagccaggtgtgtgcatgcatatgtgcagtaggtgtagaagtacttccatgtattttgttccttggcaaactagataaaagggtrgggcaaaccagaaatataaaaggaacccagctcaaaaacttgtctctaacacttccga

SEQ ID NO: 700347 - DNA, 1194 bp, Homo sapiens
tgaacatatactgttgtcagaataatctcattaaactcaaatctgtttactctcagtaaactttaaggcttttctctctaccctaaaggagatgaagatttcagaatcattttcagattctaccagctgtatgcccagtaatagttatcttgtttatggaagagttacttattttcatgtgggaaagaagtcayccgatttctatttgtttcctcatttgtctaatgtttttatcttaagaaaaatacatattcagtttaattttttttgcaagaaacttctgtattcaaaccctgattactagtttctcaatggagacatactttaagagaataatatttcatataaaacttgcattttaaaatcattttctgtttactttttcaggcattatacagacctctaaagaaatttcaaaaacatggacatcatatttagtgtttttccagtccttaaagtcctttttggttatatcatgtatggttgtaaacagaaattctttgcacagtattattcagcttgacagttcagtcatgtctatttcagtcactcaaagcaggattaaggatgttacttgttattggaatattcctgacatggaggcagctattttcaccaaaatgctgtcttaaaagcccaaaaagcaataccaggcaaaattgtttgagaaaaaagagatccaagaattgaactggtgcatagaaaagaaaatgaaatttttaatctaaaatcagagctaagtgggagcttttaacatcatataatttgcaaatgttaaggatccaagccacagcaaagaacatgtcttgttctgtctctcatcaccatgatccattatctccctaatcactctctcactcgggttttcaccattaggtctgcattgtacagaagaatgataccaagaagatgtacgcaatgaagtacatgaataaacaaaagtgcgtggagcgcaatgaagtgagaaatgtcttcaaggaactccagatcatgcagggtctggagcaccctttcctggttaatttgtggtgagtaattttactggacctctgaatagagacactcctgttatcggtgggctaggggaggtccccaaatgcctctgggacctcagccctggctggtatccaggctcttgacacaattgcaagaaagagttcaaggatgagttggaaaacagtgaaagtacagaga

SEQ ID NO: 700348 - DNA, 823 bp, Homo sapiens
tactttgaacacagaaggtacttaataataaatatttattgaaagaatgaatccattaatgtgctctgctctacagttattctgarcagagaatggagttactgaaatgcacagtgtacattgtctttctcttgggtaaactataaatattaacttatgccttttccccttttaacaaaaaagtatcaaatttattctctacctcttgaccagagctacactgatgaagtgggcatttcagtgtcttccatacttattctctctacgcatttgggcaagttgtttaatttctccgtttcaatgcctataaaatgctgatagttctagcagctgccctgcatgactatcatgagaattatagataacaagccatggaaatttgcaaataggtacatgttcccaaaacgacgcactttgttcataatacataagagtaacaagagcactgtttaggcaggggaaatacttgtaagtatctcacagctcccacatcattctgagtacatattatcagaggcaatgctgaaaatatttaacaactctctgacctgggcattgattaaacagagtagtcagtaattattaaccatcattatagctatactggtgtgtgcaggctgaatataagcaagcaactccttcagaacattcccaaaacacaggactcccctggttccctcctaatcccactccgtatctgcaggtttaccacatcgtgggatggttcaggatcgtgcataactctatgaaggcagattcagatggagagaggctcctgaatggttgataacagagaaaggatagttgcttctgagcaatagca

SEQ ID NO: 700349 - DNA, 1245 bp, Homo sapiens
tcagtctacaatttaaacatagcaggactggacagaggcacaggaagattaagccactgaccttaagtcagacagtcacatgggtagatccggaatcttgatctaaaatgaataccattttttcagttatagctatcttcccaggwtggccaaccagaatgcatatataaaatttcaaaaacaaacattgggaattgctcttcagcaagaatacatcaaacacccattatgtgcctaactctaaatcttactttcagagagctaaaaacaatttcatttcacagtgacattcatcttcgcttctgccgtaactcacatgcatatgccttagaccacattattaatgaagtattggggggttccatctagagcaccttttcttccctggagttaatcatccagttcagcaccactcttgagctttgcttagcttcttctacccatttggattttaaggacaacaattccaatggcctttatccatgtatttaacaattcattatgagccaggtgaagtggatcacacctctaatcccaacactttgggaggctgaggcaggtggatcgctggagcccaggagttcacaaccagcctgggcaacatggtgagactccatctctaccattttttttttaattagttgggtatggtggcaggagatcaaggctacggtgagctgtaattgcaccactgcacactagcctgggcaacagagcaagaccctgtctcaccaaaaacaaaaacaatttatttcatcatcattgtcatcatcattgtcactgctcactcttcaacattttttaggtcaacttaattaatatgataccttgtgggataatttttatttatttttataaaatattgaagtttttgccactttgataacttcttcattttctgtccagagtataacataccagggaaaaggctctaaaataaggcttgaggtattaaaaagatcttctgtttaagtcttatgttcctaatcaataactagaattggcctgattgctttcctcagtgggttttctggtagtcctgatatgatatcgaggctgtcatatagtcctgaaatatcctatcattaacatttgtggtggtatctgatataaaggtagatgaacttcattgcagctattcttaggaaatgcgtatttaaatgcatagttaaaagcaagatttacaattatagaaggaatgcaaatgagttgtagaaagctcataaaataaaaatcaagaagaaa

SEQ ID NO: 700350 - DNA, 1245 bp, Homo sapiens
tcagtctacaatttaaacatagcaggactggacagaggcacaggaagattaagccactgaccttaagtcagacagtcacatgggtagatccggaatcttgatctaaaatgaataccattttttcagttatagctatcttcccaggatggccaaccagaatgcatatataaaatttcaaaaacaaacattgggaattgctcttcagcaagaatacatcaaacacccattatgtgcctaactctaaatcttactttcagagagctaaaaacaatttcatttcacagtgacattcatcttcrcttctgccgtaactcacatgcatatgccttagaccacattattaatgaagtattggggggttccatctagagcaccttttcttccctggagttaatcatccagttcagcaccactcttgagctttgcttagcttcttctacccatttggattttaaggacaacaattccaatggcctttatccatgtatttaacaattcattatgagccaggtgaagtggatcacacctctaatcccaacactttgggaggctgaggcaggtggatcgctggagcccaggagttcacaaccagcctgggcaacatggtgagactccatctctaccattttttttttaattagttgggtatggtggcaggagatcaaggctacggtgagctgtaattgcaccactgcacactagcctgggcaacagagcaagaccctgtctcaccaaaaacaaaaacaatttatttcatcatcattgtcatcatcattgtcactgctcactcttcaacattttttaggtcaacttaattaatatgataccttgtgggataatttttatttatttttataaaatattgaagtttttgccactttgataacttcttcattttctgtccagagtataacataccagggaaaaggctctaaaataaggcttgaggtattaaaaagatcttctgtttaagtcttatgttcctaatcaataactagaattggcctgattgctttcctcagtgggttttctggtagtcctgatatgatatcgaggctgtcatatagtcctgaaatatcctatcattaacatttgtggtggtatctgatataaaggtagatgaacttcattgcagctattcttaggaaatgcgtatttaaatgcatagttaaaagcaagatttacaattatagaaggaatgcaaatgagttgtagaaagctcataaaataaaaatcaagaagaaa

SEQ ID NO: 700351 - DNA, 1245 bp, Homo sapiens
tcagtctacaatttaaacatagcaggactggacagaggcacaggaagattaagccactgaccttaagtcagacagtcacatgggtagatccggaatcttgatctaaaatgaataccattttttcagttatagctatcttcccaggatggccaaccagaatgcatatataaaatttcaaaaacaaacattgggaattgctcttcagcaagaatacatcaaacacccattatgtgcctaactctaaatcttactttcagagagctaaaaacaatttcatttcacagtgacattcatcttcgcttctgcygtaactcacatgcatatgccttagaccacattattaatgaagtattggggggttccatctagagcaccttttcttccctggagttaatcatccagttcagcaccactcttgagctttgcttagcttcttctacccatttggattttaaggacaacaattccaatggcctttatccatgtatttaacaattcattatgagccaggtgaagtggatcacacctctaatcccaacactttgggaggctgaggcaggtggatcgctggagcccaggagttcacaaccagcctgggcaacatggtgagactccatctctaccattttttttttaattagttgggtatggtggcaggagatcaaggctacggtgagctgtaattgcaccactgcacactagcctgggcaacagagcaagaccctgtctcaccaaaaacaaaaacaatttatttcatcatcattgtcatcatcattgtcactgctcactcttcaacattttttaggtcaacttaattaatatgataccttgtgggataatttttatttatttttataaaatattgaagtttttgccactttgataacttcttcattttctgtccagagtataacataccagggaaaaggctctaaaataaggcttgaggtattaaaaagatcttctgtttaagtcttatgttcctaatcaataactagaattggcctgattgctttcctcagtgggttttctggtagtcctgatatgatatcgaggctgtcatatagtcctgaaatatcctatcattaacatttgtggtggtatctgatataaaggtagatgaacttcattgcagctattcttaggaaatgcgtatttaaatgcatagttaaaagcaagatttacaattatagaaggaatgcaaatgagttgtagaaagctcataaaataaaaatcaagaagaaa

SEQ ID NO: 700352 - DNA, 1245 bp, Homo sapiens
tcagtctacaatttaaacatagcaggactggacagaggcacaggaagattaagccactgaccttaagtcagacagtcacatgggtagatccggaatcttgatctaaaatgaataccattttttcagttatagctatcttcccaggatggccaaccagaatgcatatataaaatttcaaaaacaaacattgggaattgctcttcagcaagaatacatcaaacacccattatgtgcctaactctaaatcttactttcagagagctaaaaacaatttcatttcacagtgacattcatcttcgcttctgccgtaactcacatgcatatgccttagaccacattattaatgaagtattggggggttccatctagagcaccttttcttccctggagttaatcatccagttcagcaccactcttgagctttgcttagcttcttctacccatttggattttaaggacaacaattccaatggcctttatccatgtatttaacaattcattatgagccaggtgaagtggatcacacctctaatcccaacactttgggaggctgaggcaggtggatcgctggagcccaggagttcacaaccagcctgggcaacatggtgagactccatctctaccattttttttttaattagttgggtatggtggcaggagatcaaggctacggtgagctgtaattgcaccactgcacactagcctgggcaacagagcaagaccctgtctcaccaaaaacaaaaacaatttatttcatcatcattgtcatcatcattgtcactgctcactcttcaacattttttaggtcaacttaattaatatgataccttgtgggataatttttatttatttttataaaatattgaagtttttgccactttgataacttcttcattttctgtccagagtataacataccagggaaaaggctctaaaataaggcttgaggtattaaaaagatcttctgtttaagtcttatgttcctaatcaataactagaattggcctgattgctttcctcagtgggttttctggtagtcctgayatgatatcgaggctgtcatatagtcctgaaatatcctatcattaacatttgtggtggtatctgatataaaggtagatgaacttcattgcagctattcttaggaaatgcgtatttaaatgcatagttaaaagcaagatttacaattatagaaggaatgcaaatgagttgtagaaagctcataaaataaaaatcaagaagaaa

SEQ ID NO: 700353 - DNA, 1671 bp, Homo sapiens
tgacatgtaatcctgtatcattttcagtaaggttaaaatggtatatgaaaggaggtggttcacaaaatggattaatatcaacatggaacttcatgctttctaggtacctgctgcatccttggagattcaaaatgtcatcatggcattctaggctagactggcagtggagaaatcactgtgagttattggatttgctcaagataaaatcttgaatttgcaaataaatcctggtcagctttttttaacactcttgtggtaaataatacacaactcagattcatgtaatgggtgtaagaaaatcattgctttggttatttcagtatgaaactcaagagaaaacttactgaagtgtttttaaaattattctgaccacaacccaaggtaaaacataagccaaaaaacatatcatgacatagtaaatgaagccaggattgtatatatatgtctactcaagtatatgaaatggaaacaacagtttcagaggcagtactatgcttactacatttgaggcatttctggtattttctattctatttaattaaatttttagtacttcttattttagctacatttatttcataactcattaatgggttttgactcacagctcaaaaacactgccttagagaatccaaatgttcacactatccatatttataagaagtaattgttctggggttcttgtgtattcttatagcttagttttatttatttgctaagacctggctaagtgagaactgcaaagagttatgccttcaactacctaagccaggaattttctgaggtggcaggggaaccagggtgagcagaaggacatatcatccccaccctcattaagcttatgctatagtggatgaaataaactcagaagtcaaggagtttcagaagagaagtcattcccttgagtaactatgttaagtacgtaaacagctttagtagtgctttcttagtacaaggtgttttcttctgatctaggagagtcagtccaatttttttcttttgagaaaatggaggctcaaagagtctgtcatttatctccagtctcttcattattttgagtccaagtacaggattatttgtaatatacatgctgcctcacatgactaagtgggttttgtgatagaaagggaatttggagttgagaagagaaagtgatgattaagtcacatcattaaaatgtttgactctcagatatcttggaaagactttgaaggcactctagccaaactttttccttcagaaggagcttatctaattattctagataatagagaaaaactagktcttttaaagagacaaattatataccatttagtgtttcacaatattttctgaataaacttaaaatcccttatttggaatttaactcatctaaatccttatttcaaaaaccaggaaacagagtcaaacattttctcagttatcaaggcagtaaaccaaagattgtcacctgcacaggagaatctatgatttgttcttctcatcattatacatttcacgagcattgactcaaaaaaccatgctacctataaactaatcaacaattgcttcttctagggactgaaattttaaaatttcagacgtggaggatcgactctacttcaaagcaaaattcagtggacttctgcacacatatccattctaatctgttacaagtctgcactttggaga

SEQ ID NO: 700354 - DNA, 612 bp, Homo sapiens
gttagcatttcggtttctgacacgggagggaaaaaagaggtaagtcacccctgggttgtgcattcgattctctttacatgttttctgaaatattcagcatggtgttagagccaatatttcatttgtggctttagcctttgttttgtttccacgctggaccttccttatgacacaaacactgttggcactgccaacagatctcacagaagaattaagccccaaggaagtattttcactcatacagagggaaagctttcatcataatttaagttaggttccaaytggatataattgtctgagaattactcatggtccccaacgacaacatgcagtttaagccctataaactcacagatgatgaactggcaaatacatgctggatgaatacaaggatttggtaaccactttttatcttagcctctcaagtaaaatgttttaattagtactacccatgagaaataagtaaaattcacaaactaactaaactcctttgacttctcaaatacctcctgttttttttttttttttttttttttttgttttttttttttttttgagacggagtctcgctctgtcgcccaggctggagtgcagtggcgggatctcggctca

SEQ ID NO: 700355 - DNA, 612 bp, Homo sapiens
gttagcatttcggtttctgacacgggagggaaaaaagaggtaagtcacccctgggttgtgcattcgattctctttacatgttttctgaaatattcagcatggtgttagagccaatatttcatttgtggctttagcctttgttttgtttccacgctggaccttccttatgacacaaacactgttggcactgccaacagatctcacagaagaattaagccccaaggaagtattttcactcatacagagggaaagctttcatcataatttaagttaggttccaattggatataattgtytgagaattactcatggtccccaacgacaacatgcagtttaagccctataaactcacagatgatgaactggcaaatacatgctggatgaatacaaggatttggtaaccactttttatcttagcctctcaagtaaaatgttttaattagtactacccatgagaaataagtaaaattcacaaactaactaaactcctttgacttctcaaatacctcctgttttttttttttttttttttttttttgttttttttttttttttgagacggagtctcgctctgtcgcccaggctggagtgcagtggcgggatctcggctca

SEQ ID NO: 700356 - DNA, 612 bp, Homo sapiens
gttagcatttcggtttctgacacgggagggaaaaaagaggtaagtcacccctgggttgtgcattcgattctctttacatgttttctgaaatattcagcatggtgttagagccaatatttcatttgtggctttagcctttgttttgtttccacgctggaccttccttatgacacaaacactgttggcactgccaacagatctcacagaagaattaagccccaaggaagtattttcactcatacagagggaaagctttcatcataatttaagttaggttccaattggatataattgtctgagaattactcatggtccccaacgacaacatgcartttaagccctataaactcacagatgatgaactggcaaatacatgctggatgaatacaaggatttggtaaccactttttatcttagcctctcaagtaaaatgttttaattagtactacccatgagaaataagtaaaattcacaaactaactaaactcctttgacttctcaaatacctcctgttttttttttttttttttttttttttgttttttttttttttttgagacggagtctcgctctgtcgcccaggctggagtgcagtggcgggatctcggctca

SEQ ID NO: 700357 - DNA, 770 bp, Homo sapiens
taacaatatacacaccgcaagccctcaagaaatgatgtgaattaattatatctgattcacatgagctacaaagtcaccaccataaccatcattttggagtattattcttactacataacaaaaagctctgtgctggccaccccataagggagaaaatttcctcactcttaagcttgtttttcttctggagctgcaggtccagtaacacttgttgaggagtaagtcaggaaaagaaacaaaacactaaatgggatgacaccttccacaaccacactcttggcttttatgggtatctctaataaccatcaatgtagttatgaatttaaacaatatttctagtcttaagcaatatggaagccactggaatataagtttgatgagaacttggacttaaacactaaataatatttagcacatgatacatatgcaataaatattcactggattaagatctcaatatattttccaacttggaaaaatttctattcccagtcatacaaactcaatcattggttttaaaaaattacctcctcatgtttatgctatgtcatagtactggatggagcactgcctagatcctgaatatctgggtcctgttttctccactgccrctaattaactgtaatattggacaagttatttcagcagttggccttttcagagtcttaatggatgaaaagaaagctcatttccagctagaagtctccaggaactgtctataaattattttgagggactttacaaatcagacacgaatacagatgatgatc

SEQ ID NO: 700358 - DNA, 2565 bp, Homo sapiens
agtatattaattgaatgatgctggtgagaagtaaaatggaatgacctacttttacacaagacaacatggatgaatctcaaaaacacactgaatagaagaagccagaaacaatagaatatatcccataagaccatgtatgtgaagttttgggttgttttgttttgttttgttttgagatgaagtctcgctctgttgcccagactggagtgcagtggcacgatctcagctcaccgcaacctctgcctcctgggttcaagtgattctcctgccccagcctcctgagtagctgggattacaggcatgcaccatcacacttggctaattttttctatttttagtagagatggggtttcaccatgttggtcaggctggtcttgaactcctgtctcaagtgatctgcccacctcggcctcccaaagtgctgggattacagccatgagccaccatgcctggctccgtgtatgtgaagtttcaaaaggcagaacactggcggcctcagtgggagaggaaaatatcacgactgaatgaacttcatggtgagagaaatatgctgtaccttgattggggcaggggttccatgagtgaatacctttgtcaaaattcagatcccacatttaaaatgtgtgattttattgtatattaataacatcacaggaaagttgagtataaaaataaatggtgaaaatgagttaactattttgctgtagctggtgaaattttctccactgtgttataacatgagtcatcttgcatgagggttaggtgacagaaccacccatatttggcaggcaggaattctaccactgaaccagtaatgctgccggccccacccatatttgagacaaaattcatatatagtcaaaatgaccctggaaaagtcactagaaaagtgtccagtatttcacaatataacacaaaagcatttctctagggaagaaatcaagttaaataccacaagaaatacttcacatatttttaatctagtataatgctaaacacattttaaatagtcgaatcttatttaatagagtgagatggtcatgctatgaaaagcatgaagaaaccgagacctactaaattagaaaatttatgcctcccatttgactgaccatctggaatatgttcccactgagtagaatgagaaatacttaaattatttttctacatgttctccatgttccattgtatatagttgaattgagataagtaaatgtgcacaatacatgacacttttatatgcaggtctgttttcccacaagactgtggcttcatgggcacatgggtggggctgcagcactggctggctttcttcaacgataagcaagcaggaaactaagcccaggcttgggatgcctcaaagggcataagggaaagaccttatttggtcacccatcccactgatcagctgtaactacccccttgagaaattcacttagtgttttcagaaaagaaccctctcattttgtcctgggggtaaaatgctcctatcattccattaatgagtagcaatggagaagaggaagaactgtgcttcataccacaggccaacattcaacttttgtcctttcctccctcactttgtcatagttcccaattttaagacctttactgagtggtttcttgatttctttattgaactatgttttatgtaatacaaaattatatttttttctatatatctttcaaagatgtttaaaaatcaaatctactgtttattcccctcccattctttttgccacttggggtttaaccattaactgtacagaagaaggtagtaacttttgcttgagttcaatcctatagcttttagtaaaatctcagatatcaatgatttgaatatcattaaatgtcaaaaatcttttctggttgttccctatgtctataatctctcttttaggttacacacttccttatatggaatcttcgtctgtctttatgtgtgcacattatctcctaaagaggaatgaaattaaaatcataaactattgagggtcacaattccctctatatcactacagaaagggctcctaacttttaatccatggatgcacttaagtggatccaaacacatcctgaaattgtatacaggccatgtgcatttgcatgtggtcatccatttctgagaaaaaagaaacatatttttattctaaaaagtgattgaggctagcataatgactcacacctataatcccagcattttgggaggccgaggtaggagactgcttgtgagcaggagctcaagaacagcctcagcaatttggcaagtccctgcctctacaaaaaaattaaaaattagccaggtatgatggtgtgcacctgtagtcccargtactcaggaagctgaggcgagagaatcacttgagcccaagaggcagaggctgaagtgagctgcatctgcaccactgcatcctaggctgggcaacagagcaaaatcctatcccagaatataaataaataaatataaaaacacagattgaaggtaatgtattggaagaaaaatgtcagaaaggtagtaactagataaacagactgtatttcgatttgtgagggagtttttaccacctt

SEQ ID NO: 700359 - DNA, 1308 bp, Homo sapiens
aggaaattgagatccaaaagagaaggtaagtgtcacatcgatatgaagtggccaagctcagtataattcytgactcaacagggactcagtgtatactggcagaataaagcaataaaaccagctgtagaaagtgacgttcaaaattatccagccagattcttctcttttcacaagaaatcatgattcccttctgctgatcctctccatgtttgacactaagatatttattatctgagacaaaatttcaatgcatgatgaattttcagagaaattcagtgagggctaaagaaagttgtaagagaaggaccatcataagacttggtaagggccgggcgcggtggctcacgcctgtaatccccgcactttgggaggccgaggcgggcggatcacgaggtcaggagatcgagaccatcctggctaacacggtgaaaccccgtctctactaaaaatacaaaaaattagccgggcgtggtggtgggcgcctgtaatcccagctactcgggaggctgaggcagaagaatggcatgaacccaagaggcggagcttgcagtgagccgggatagcgccactgcagtccagcttgggcgaaagagtgagactccgtctcaaaaaaaaaaaaaaaaaaaaaaaaaaaagacttggtaagttagccacagttccgctgctgtgctgtgaggcacaaaaatataaaaaccatcatttccacatccaaagaaaacagacaagtacaaaagtgatccacatgaatattaggacttctacaaaaccagcataagattcactgataagaaagatcccagagaagaaaatacttatctacagacacatcacacacaaacacacacacacacacaaacacacccctccaggtacacctgacagtacctgaaaaattattcttccaagtcacccgtctccccaccctcagtgatgactatgagaaacaataacaaaacctacccacaaaagcagtctctaatttccttttgacaacattacttggaggtgcatagagattttctacttatatagcaacttggtaatagactaattaatttttccttataggaaaagcactgttagcttgcacatatttgcaatttttctggcttttaaattgtactgtggaaatcaagacttcaaaagctacagataaaataaagactgatgctgaagtcatgaagaaaataatacgacagtaatacaaattgtggaggtgcacggaggaattcagctcttcgatgttcccaaacaattaaccttgctgatatctgttaaacatgctaaatagtttcaggccactttcaa

SEQ ID NO: 700360 - DNA, 1808 bp, Homo sapiens
taatacataatttaccacataagtagtaccatgatactacttacagacaagaagcaatacaaagggtctatgttaaatacagaacatgtacttttggccagtaatttccaaactcagaccgcacagcataatcagctaaatacttttactaaaaatgcagattcccagatctcacatgaatttattgactaagaaattctaygtcttaaaatccatcattgtctttaaagaaaaatctctcctgtcattctgaagtgtacactcaacatatgaatatatggtttaatttataaatattgcataaatatgcataggtagttaggataatgtggaagctttcatggagaagctggatttgagatagtgttgttgtttttttgttttgttttgttttgttttgttttgttttgttttgttttgtttgagacagagtctcactctgtcacccaggctggagtgcagtggcatgatcttggctcactgcaacctccgcctcttggattcaagcaattctcctgtctcatcctccccaatagctagaattacaggcctgcaccaccacacctagctaatttttgtatttttagtagagatggggtttcgccatgttggacaggctggtctagaactcctggcctcaagtgactgccggcctcagcctcccaaagtgctggaattacaggtgtgagccaccacacccagcctaagatacaattttgtaaaaagacatggcatttaggaaaggagtattactctgagcacaactgtagaggtagaaatagaaattgcatggaaatgattagtttataaaataacaaattgtttttaataggatggagtcaaatacaaagttaaagaagtaaacacatgccagcctggatatagtgggatactgggctttatcttgtaggcaatggtaaactcaataaccaaagatttttgtccaaggagcatatatatgtaaataaattttgaaggaatgcattttcaattaatatgtgccattcattggtaggctgaggactaaaaacaaatcatacaatagtacattagatttgagataatgaggatttgtgcagaatgcttcttgtgctaagaaaaataagaaaagagatgagcccaatgatgatcgtaaaggaagaattgacagcaaagagaatgcaatactaatagtgacttaggaaaatacaggggaaaaaagtattacaaatgatatgtctgtatacttaaaagatgacaatcagaaaatatttaccaatttgtaatcagaatagaatacaccaagataattcatttaaataattctaattgtattaataaaccctttaagcaaaatattctttatctttttacatagaaaataaaatggctagtaaataaatcattattttcagaaacacaagcacatttcccctcttacatatagttttgataccataaaataacggtattttctcagacaaattagcatcagactatttgtgtcaaaaaacaaatttagtgatatatgtatgaaaccaagagacttccctggtaaaaattgttacacatcaaatatgttctttgcaaaatattttacaaatgaaaataacatttagttgaaatgcaagaaatcggttaaaagtgcacttgattaataaaagccgtatatgacatacccacagccaacatcatactgaatgggaaaaagttgaatgcatttccccaaaactggaacaagataaggatacccactcaccactcctcaacatagccctggaagtcctggccagagcaatcaggcaagagaaagaaataaaacatccaaa

SEQ ID NO: 700361 - DNA, 1808 bp, Homo sapiens
taatacataatttaccacataagtagtaccatgatactacttacagacaagaagcaatacaaagggtctatgttaaatacagaacatgtacttttggccagtaatttccaaactcagaccgcacagcataatcagctaaatacttttactaaaaatgcagattcccagatctcacatgaatttattgactaagaaattctacgtcttaaaatccatcattgtctttaaagaaaaatctctcctgtcattctgaagtgtacactcaacatatgaatatatggtttaatttataaatattgcataaatatgcataggtagttaggataatgtggaagctttcatggagaagctggatttgagatagtgttgttgtttttttsttttgttttgttttgttttgttttgttttgttttgttttgtttgagacagagtctcactctgtcacccaggctggagtgcagtggcatgatcttggctcactgcaacctccgcctcttggattcaagcaattctcctgtctcatcctccccaatagctagaattacaggcctgcaccaccacacctagctaatttttgtatttttagtagagatggggtttcgccatgttggacaggctggtctagaactcctggcctcaagtgactgccggcctcagcctcccaaagtgctggaattacaggtgtgagccaccacacccagcctaagatacaattttgtaaaaagacatggcatttaggaaaggagtattactctgagcacaactgtagaggtagaaatagaaattgcatggaaatgattagtttataaaataacaaattgtttttaataggatggagtcaaatacaaagttaaagaagtaaacacatgccagcctggatatagtgggatactgggctttatcttgtaggcaatggtaaactcaataaccaaagatttttgtccaaggagcatatatatgtaaataaattttgaaggaatgcattttcaattaatatgtgccattcattggtaggctgaggactaaaaacaaatcatacaatagtacattagatttgagataatgaggatttgtgcagaatgcttcttgtgctaagaaaaataagaaaagagatgagcccaatgatgatcgtaaaggaagaattgacagcaaagagaatgcaatactaatagtgacttaggaaaatacaggggaaaaaagtattacaaatgatatgtctgtatacttaaaagatgacaatcagaaaatatttaccaatttgtaatcagaatagaatacaccaagataattcatttaaataattctaattgtattaataaaccctttaagcaaaatattctttatctttttacatagaaaataaaatggctagtaaataaatcattattttcagaaacacaagcacatttcccctcttacatatagttttgataccataaaataacggtattttctcagacaaattagcatcagactatttgtgtcaaaaaacaaatttagtgatatatgtatgaaaccaagagacttccctggtaaaaattgttacacatcaaatatgttctttgcaaaatattttacaaatgaaaataacatttagttgaaatgcaagaaatcggttaaaagtgcacttgattaataaaagccgtatatgacatacccacagccaacatcatactgaatgggaaaaagttgaatgcatttccccaaaactggaacaagataaggatacccactcaccactcctcaacatagccctggaagtcctggccagagcaatcaggcaagagaaagaaataaaacatccaaa

SEQ ID NO: 700362 - DNA, 1590 bp, Homo sapiens
tgctggaaaaggagtgacactccactcattctgcttatgaatactttcttatcctctttgccaatgatagcatgtagaaggcaggaatgtggtcaacactgaaagagattacattctaagaatgttctaattacatgtggcctagggagacacagttgaaagatggtctatattttatgttataaaatgacacattaacatgaccagaaaaaaacttattggtcacattttcctgcatactctgagtacacatgcatttgtgatcttcattaacgaagctgagcaacagcttttgatagggtcattggaagctggtattcataggctgcatgaagaataatgcagtgtcataagtaatgagagaaccaagaataaatgaaatggcattagagattacagaggcaggaagattgacattgtttcaatatacacagattctgaagaccaggacattgtctataacaatagtgttagtacttcttttctcacagtgaggaataagaaactcggtaaggatagtgcatttgacaataaaaaatgcaagatgtggttcttggacataaacaggtagaaattgtgtctggacaccatgaagaattttcatgtgcactaattaaacaataattattaattatgtgcctcttctctcctcattacacttaaccattaataaatcaataaacttcacacgcaaataaattgtataataatcgttttaaatcaaattgtttatatacacagtgggtggctccatacaaaatgtttgtctgggaccacccacatccatgggccgccctggccatagatattattgaccaagcattgaggatccacagcacataaagtacttcacagccagtacatatgttaactctaatctataatccacacaaacacccaggtttttttyatattttaatcaacatttttaaaagaggaataattgaggctctaagaggctaaacaactggcctggcccacggccacaaaggtgctaaggatcaagcatgatttttgctctagtttgtccaactctaaagcctaagctctttcttactaaatcatgaacatgaacaacagtagggtagaattcttcaaagcagatatttgggaagtaactacttatcttttggcatcgcttcctttgaaatggcttaaagaggcacttaacacatgaaaaggacaataatggataaaaaccagtacacttagtcaaggcactcgacattgacccaaagtctcttgcctcttgttttctctgcttaacttgcctgaccccacggagaaggaagggtggaaggttataggaaagtgtgagaggttagatggcgctgaaactagtatctggagcagattaaaaaggcgaatggaaattgaggttcatttgtgtgctctgctagcaatgagtgtagtaaattgctaacacacatttaattggctgaaggctgtaaaagaaaattgtcagacatcaaattgctgtacaccaaggtttatttatatggtacatttaacttttcaaagtactttaatgtgaattatataatgtctccccctttaaactctggggggctgattgtagatggaacttgt

SEQ ID NO: 700363 - DNA, 1590 bp, Homo sapiens
tgctggaaaaggagtgacactccactcattctgcttatgaatactttcttatcctctttgccaatgatagcatgtagaaggcaggaatgtggtcaacactgaaagagattacattctaagaatgttctaattacatgtggcctagggagacacagttgaaagatggtctatattttatgttataaaatgacacattaacatgaccagaaaaaaacttattggtcacattttcctgcatactctgagtacacatgcatttgtgatcttcattaacgaagctgagcaacagcttttgatagggtcattggaagctggtattcataggctgcatgaagaataatgcagtgtcataagtaatgagagaaccaagaataaatgaaatggcattagagattacagaggcaggaagattgacattgtttcaatatacacagattctgaagaccaggacattgtctataacaatagtgttagtacttcttttctcacagtgaggaataagaaactcggtaaggatagtgcatttgacaataaaaaatgcaagatgtggttcttggacataaacaggtagaaattgtgtctggacaccatgaagaattttcatgtgcactaattaaacaataattattaattatgtgcctcttctctcctcattacacttaaccattaataaatcaataaacttcacacgcaaataaattgtataataatcgttttaaatcaaattgtttatatacacagtgggtggctccatacaaaatgtttgtctgggaccacccacatccatgggccgccctggccatagatattattgaccaagcattgaggatccacagcacataaagtacttcacagccagtacatatgttaactctaatctataatccacacaaacacccaggtttttttcatattttaatcaacatttttaaaagaggaataattgaggctctaagaggctaaacaactggcctggcccacggccacaaaggtgctraggatcaagcatgatttttgctctagtttgtccaactctaaagcctaagctctttcttactaaatcatgaacatgaacaacagtagggtagaattcttcaaagcagatatttgggaagtaactacttatcttttggcatcgcttcctttgaaatggcttaaagaggcacttaacacatgaaaaggacaataatggataaaaaccagtacacttagtcaaggcactcgacattgacccaaagtctcttgcctcttgttttctctgcttaacttgcctgaccccacggagaaggaagggtggaaggttataggaaagtgtgagaggttagatggcgctgaaactagtatctggagcagattaaaaaggcgaatggaaattgaggttcatttgtgtgctctgctagcaatgagtgtagtaaattgctaacacacatttaattggctgaaggctgtaaaagaaaattgtcagacatcaaattgctgtacaccaaggtttatttatatggtacatttaacttttcaaagtactttaatgtgaattatataatgtctccccctttaaactctggggggctgattgtagatggaacttgt

SEQ ID NO: 700364 - DNA, 605 bp, Homo sapiens
aagctcacactccattggggagtcagtaagtcaatgggaagaacatggaataaagaagttagaaacttggtttcttatctcaaattcacaataaaccagttttagagacatctgtcatgacccttaattcatgcctcagtatttccacttgcagtattaggataatatttattttccatatttccttaaaagtgagagcaaatgaaacatgaagtaaaagcaactgagagccagattttcctataaaagatcaagaatatgtatggaagtatgtacatatgtattgttatttataccagtatttcaaaatgtattgaagttatcctttcattagaatttattagcagataattccatttccattattttataaatattgtggatgaaggggtgagtrtatatgtgtgcacgcatgcacgtgtgtgcacatggtggttgaggggatgtactcaataaatacgtcaacctgcgtgactaaaccaagcagtagatataataccacatgaaatctacacaaactccagagttgtgtcaactgatcctttcatcccacaccacacaagtgcatggtgtttaggatatagactaccttaccgaatggcaaa

SEQ ID NO: 700365 - DNA, 652 bp, Homo sapiens
ggtagaacgaattattattaccatcatcatcgctagtgtgtattggtcaggctctatgctaactgtcttacaagtgtttctcatttagttctcataacaaccccttggactttggattattttcatttcacagttgatgtgcagtttatgaggctgcatttgaacttcctcctaactgctgtgacctcttgcactcggctggccttctggagatatttattgagtgattatgtctggaacagaacaaaacttgcacagaaaacaaaacaatcattgttcatatttttaaaaaggcttttctttcttcatccacaaattgtctttgcaattctgttggttattttgcttgaggacatttatcttctggaagaaatcactggggaaaaaatcagttttatgtttaataccaatggttccactaatatgcccctgaattaacagttatgtgcaagtttttaatacattctcaccatatttctttgatagagraaaaaacagggagaaaaggagttgtgtaggggcttttcataattttttaaaaaagtttaaataaatcatttatttttcaaatatgtattgagcatgtattgtatgacaggtgctgtgcttccagctggaggaacaagataagagtagaaacaccttaattagc

SEQ ID NO: 700366 - DNA, 642 bp, Homo sapiens
atatgaagcagtgagcccattactttccaaacaactggagttctaccacacacacatcaggatttcttagctaaagagaaatggagtcttttcagtgtgccctaaaggaggtggtaaggaactgaaccgtatattttcacatctggtttgtagcgtgttgaagtcctaagtgaaaagagctgagaggcagagtaagacagccaaatagaaagccctacctattgtttccctgagcaaggacaccaaattaacagctatctatatgaaaaaaacacctccataagaaccaaaaaagaggtgagcactcatagtacctagtattaactttacatcgctgaaagaggcactgaagagactgaaaaaacagtcctggccaggagyggtggctcatgcttgtaatcccagcactttgggaggctgaggcaagcggattacctgaggtcaggagttcaagaccagcctggccagcgtggtgaaacgctatctctactaaaaatacaaaattagccaggtgttttggcacatgactgtaatcccagctactcaggaggctgagacaggaaaatctcttgaacccaggagggagaagttgcagtgagctgagattgtgccactgcactccagcctgagagacagagcaag

SEQ ID NO: 700367 - DNA, 642 bp, Homo sapiens
atatgaagcagtgagcccattactttccaaacaactggagttctaccacacacacatcaggatttcttagctaaagagaaatggagtcttttcagtgtgccctaaaggaggtggtaaggaactgaaccgtatattttcacatctggtttgtagcgtgttgaagtcctaagtgaaaagagctgagaggcagagtaagacagccaaatagaaagccctacctattgtttccctgagcaaggacaccaaattaacagctatctatatgaaaaaaacacctccataagaaccaaaaaagaggtgagcactcatagtacctagtattaactttacatcgctgaaagaggcactgaagagactgaaaaaacagtcctggccaggagtggtggctcatgcttgtaatcccagcactttgggaggctgaggcaagcggattacctgaggtcaggagttcaagaccagcctggccagcgtggtgaaacgctrtctctactaaaaatacaaaattagccaggtgttttggcacatgactgtaatcccagctactcaggaggctgagacaggaaaatctcttgaacccaggagggagaagttgcagtgagctgagattgtgccactgcactccagcctgagagacagagcaag

SEQ ID NO: 700368 - DNA, 1181 bp, Homo sapiens
cataaatgttaaccattgttatgttattatgtaatctacaaagtacgtttagttacacttcatgaaatactttcagtttttcaaagacaccactaatacatgggaaatcaaaccctgaaaattaatttcactttagcagtaaagtcacatgccagatggaaaggatagtatttcatgaacaaagatcttacttttgagatttggtcttacttttttctttttcttaagggagaattatcttgtgttttttgttttgttttgttttgagatggagtcttgttctgtcacccaggctggagcgcagtgacgtgatctcggctcactgcaaccttcacctcccgggttcaagagattctcctgtctcagcctcccgagtagctgggactacaggtacgtgccaccacacctggctaatttttgtatttttagtagagacaagagttacaccatattggccaggatcttttgctttctatagcttcaaaatgttcttaatgttaagacattcttaatactctgaaccatatgaatttgccattttggtaagtcacagacgccagatggtggcaatttcacatggcacaacccgaaagattaacaaactatccagcagatgaaaggattttttttagtttcattgggtttactgaagaaattgtttgaattctcattgcatctccagttcaacagataatgagtgagtgatgccacactctcaagagttaaaaacaaaacaacaaaaaaattaaaacaaaagcacacaactttctctctctgtcccaaaatacatacttgcatacccccgctccagataaaatccaaagggtaaaactgtcttcatgcctgcaaattcctaaggagggcacctaaagtacttgacagcgagtgtgctgaggaaatcrgcagctgttgaagtcacctcctgtgctcttgccaaatgtttgaaagggaatacactgggttaccgggtgtatgttgggaggggagcattatcagtgctcgggtgaggcaagttcggagtacccagatggagacatccgtgtctgtgtcgctctggatgcctccaagccagcgtgtgtttactttctgtgtgtgtcaccatgtctttgtgcttctgggtgcttctgtgtttgtttctggccgcgtttctgtgttggacaggggtgactttgtgccggatg

SEQ ID NO: 700369 - DNA, 519 bp, Homo sapiens
ggcaacttctggtgcgagttttggacttccattgatgtgctgtgcgtcacggccagcattgagaccctgtgcgtgatcgcagtggatcgctactttgccattacttcacctttcaagtaccagagcctgctgaccaagaataaggcccgggtgatcattctgatggtgtggattgtgtcaggccttacctccttcttgcccattcagatgcactggtacmgggccacccaccaggaagccatcaactgctatgccaatgagacctgctgtgacttcttcacgaaccaagcctatgccattgcctcttccatcgtgtccttctacgttcccctggtgatcatggtcttcgtctactccagggtctttcaggaggccaaaaggcagctccagaagattgacaaatctgagggccgcttccatgtccagaaccttagccaggtggagcaggatgggcggacggggcatggactccgcagatcttccaagttctgcttgaaggagcacaaagccctcaagacg

SEQ ID NO: 700370 - DNA, 600 bp, Homo sapiens
tgatcaaaatttcaatgttgcttttcatgataaaatctaatgtcagagctcaggagaagacctcaggaacaattttattttgggaattatttagagggtggtgaagaaaaagagaagagaattgaaagaggatacatgggagagaggaagagataaaaggaagagagaaggaaaagaggagagaaagagagaccgagactttgagttcatctatttcaattatcttactttacaaatttattcaagttgggaccaattcttgccctcaaggagtttacaggcaagcagacgagacaggctctgaacagttattacaagaagaagyatagggtgctaggcgggagtataacaggggacccagactcgtgtgctggctcagaatgagcatctcagaagaagcaatgtttccgctgagaaataaaggaaaagtggaacttaaatagaggaatgcacgcaaagatttcaacttacaaaaagtcagtggtggtacaactaaaatccctggatgttatttatttaaaaaaaaaacaaaaacaaaaaaaataagaagactgtgaaatgtggagtgaagaagctaggaaacttgggacccaaagaaca

SEQ ID NO: 700371 - DNA, 600 bp, Homo sapiens
tgatcaaaatttcaatgttgcttttcatgataaaatctaatgtcagagctcaggagaagacctcaggaacaattttattttgggaattatttagagggtggtgaagaaaaagagaagagaattgaaagaggatacatgggagagaggaagagataaaaggaagagagaaggaaaagaggagagaaagagagaccgagactttgagttcatctatttcaattatcttactttacaaatttattcaagttgggaccaattcttgccctcaaggagtttacaggcaagcagacgagacaggctctgaacagttattacaagaagaagcatagggtgctaggcgggagtataacaggggacccagactcgtgtgctggctcagaatgagcatctcagaagaagcaatgyttccgctgagaaataaaggaaaagtggaacttaaatagaggaatgcacgcaaagatttcaacttacaaaaagtcagtggtggtacaactaaaatccctggatgttatttatttaaaaaaaaaacaaaaacaaaaaaaataagaagactgtgaaatgtggagtgaagaagctaggaaacttgggacccaaagaaca

SEQ ID NO: 700372 - DNA, 600 bp, Homo sapiens
tgatcaaaatttcaatgttgcttttcatgataaaatctaatgtcagagctcaggagaagacctcaggaacaattttattttgggaattatttagagggtggtgaagaaaaagagaagagaattgaaagaggatacatgggagagaggaagagataaaaggaagagagaaggaaaagaggagagaaagagagaccgagactttgagttcatctatttcaattatcttactttacaaatttattcaagttgggaccaattcttgccctcaaggagtttacaggcaagcagacgagacaggctctgaacagttattacaagaagaagcatagggtgctaggcgggagtataacaggggacccagactcgtgtgctggctcagaatgagcatctcagaagaagcaatgtttccgctgagaaataaaggaaaagtggaacttaaatagaggaatgcacgcaaagatttcaacttmcaaaaagtcagtggtggtacaactaaaatccctggatgttatttatttaaaaaaaaaacaaaaacaaaaaaaataagaagactgtgaaatgtggagtgaagaagctaggaaacttgggacccaaagaaca

SEQ ID NO: 700373 - DNA, 540 bp, Homo sapiens
ggaagttgaaactttcaaatattcacgtgaacattatgtaccaggttatcacttgtagcactgtacatagtagaaaaataatagaaacatcccaaacatacatcaataaggaataagttaaacacgtttgtacataaagaatactaagaagcagggctgggcgcagtcgctcacgcctgtaatatcagcactttgggaggccaaggcagacagatcacgaggtcaagaaactgagaccatcctgaccaacatggtgaaaccccgtctctactaaaaatacaaaaattagctgggcgtggtggcacgcgcttgtagtcccmgctactcaggaggctgaagcaggagaatcacttgaacccaggaggcagaggttgcagtgagctgagatcatggcactgcactcctgcctggtgacagagcgagactccatctcaaaaaaaaaagagaaaaaaaagaatactaagaagcctaaataaatactgagaaagctctctatgttttaacataggatgaacgccaggaaatactgctaactgaaaa

SEQ ID NO: 700374 - DNA, 644 bp, Homo sapiens
tggataacataatgcttctggctgttaatggctgtcctagtaggcaagaaagcacagcttcccacatatccacattcctggctctgtaagcttgagctcagccagtaatcgttttgtaataatacctagtggtattattgaacatttatgctatgccaggcactgtgcccagtgctttcagagggtgatcttgtttaatcctcataacaatcctacggggaggagggtgtcattattatcctctgtttacagctaagaaaactgaggctcagaagtttggtaacatggccaacttctcacagctaggaaggtgcagagccaggatttgaaagcaggcctctaggatttgtgttctcacaaccataccattgcttcctagttgggagagtgagggatgccttcggcttggtttggatgctgtcrgtttgcctgttccctcccacaagatactctcacccagacaccaattgtaggatggaaatgtaaaaggagcactgagaatgtaaccttcatccaaatccttcttcattacagttttgatgaagaaaccaccctttcagatgcaccactgaatgtaggcatttgcccagcctccatccttccaaacaaagctcactagggcttgggacctaccacaaaggttg

SEQ ID NO: 700375 - DNA, 636 bp, Homo sapiens
gaaaaacactttcactagcttagctcctccatccctgattactgtgttctgagtacggagagaacagtaaagagtcgtgcttgggaagaaacaaagcctcgttcttctgtgcccaggatctctctagaaagcttccttctcactgcacccaggaaggacatgggggaaaacagcaggggaattctcagcctatcttggaaagagaagtagctctccttgacccgacagctacatgaacaggcagttaaaaattactatcatttgtgttcttttctactggaaaaaaaatcaccaaactgcattgtgcccccartggtgaaagactgatagcatgaagtgcccaggcgggttgcagccaaccctcacggtgtgtgcagcagcaagagcagtgcttctccccttgcccaggagcttctgatgcaggcgagtcttcccggggagaatgccagcgtggggagaggttactcccaggcagacttgtgcttcttacaacatcttcttgtcctttaagtcaaattctttagtccatgtctccagaatgataagctttagctctttaaatttttttaacagaaactaataccttgggagggcttggagataatacagagactttgtggcactgtgaaaagttgg
